United States Patent Application Publication US 2007/0061916 A1 - sequence listing, part 9

SEQ ID NO: 38310 - DNA, 335 bp, Gossypium hirsutum
  Clone ID: LIB3146-010-Q1-K1-H5
ggtcggtccgggaagtcctgtcggctccgatggtgcaaccaactgtctccgcaagttgagcatcgggccttcacccccgaggaagacgagaccatcatcagagctcatgcccgatttggtaacaagtgggccacaatagcccgactcctcaacggtcgtacggacaacgccattaaaaaccactggaactcaacgctaaaacgtaagtgcttgtcggttggggaagagagtaatttcattacacatggtgggtatgacggtaatttgggaggggaagggaagcaacaaccgttgaaaagatcagttagtgctgggctttacatgagcccggggag

SEQ ID NO: 38311 - DNA, 332 bp, Gossypium hirsutum
  Clone ID: LIB3146-010-Q1-K1-H7
cttagcttgcttggttagtctcagattctaatgttttctaagctgaaattgcagaagaagctagtaatcaaagtggaggccacgggagatctgtatctaaagaatctggtgaagattcaaagggatctagaggtcgtaagcgcgttgagaacatccagttcaaagggaagaacacatttgcagtgccaagaaatgttaaaccacttggatggactaacaaacctggaacccgggaagaggaagatgagaagccaaaatcaaatgatgagttcagaaaaatgtttatgaaaacctgaggttcactctcaagtttctggttaagatcaatgctc

SEQ ID NO: 38312 - DNA, 266 bp, Gossypium hirsutum
  Clone ID: LIB3146-010-Q1-K1-H9
tttccctcaaaagggtggaaaacttttcttcattggatcgagtctaaaagggataaatggatgtggagaataataataattgtaccaataacaagaatttctttctgggcataaccaccgaaaaatacgtatatcatattctgaataataactttagcaattgtcaaatctgtattatttctctcctatcagtttactgtttaacctaattggcactctttcgagtgctctctccttatttttatttttttatattttctttttta

SEQ ID NO: 38313 - DNA, 336 bp, Gossypium hirsutum
  Clone ID: LIB3146-011-Q1-K1-A1
cccacgcgtccgttcagatctatcctctagcttctcttgtagtttacgaatcaccggccgagaatcgccttcaatctccacctccctcaacccaaggtgaaattcgagttgccagtgcttggagacctgccaccacttttgctgcaaaggcggatgtatgttcgagtttattattgattttgagcaaataacctctgctttattatttcggataactaacccagaacacgactcttttctatgtttgttgaaagcggcgtcaaagttaattttaagccccgttccccccggtgcaacctatcttacctaacagagccgtttttcagggcactcccg

SEQ ID NO: 38314 - DNA, 235 bp, Gossypium hirsutum
  Clone ID: LIB3146-011-Q1-K1-A2
tttttattttttgggttactttatttttgctttttttcttttttttttctggaaatttacctttaaagcctattattttcgattgtaaaggggttcttttttaggcaattttcccacattgaaaaaagcatccaaaaaatcaacgaggtgattattcggcagaagatcatttttatgacttgaaagccttattacccaaggagaaataccttaacaatcttttgatggaagggga

SEQ ID NO: 38315 - DNA, 359 bp, Gossypium hirsutum
  Clone ID: LIB3146-011-Q1-K1-A3
gggttgatttggccgtagaccacggcctgattcaaagcctgcaatctcggctctgatggtgggtggctggaacgacgggacacgaatagacgcgtttgattctggccccgaatgaccccacaatcccagggtgagacgaagaggcgtttctgcttgcggcgcaaaccctggctagggtttcctaaagctgaaaataagttgggccaattgggccaattaagtcttgggttattgggctagcttagtatgtaacgggtctgctgggtttaggctaaaaccgagtgtaggacttttagtatttgcgtcaattgggcttgtgaatgtaaatggactgtaataaataaacttttgcttatttt

SEQ ID NO: 38316 - DNA, 276 bp, Gossypium hirsutum
  Clone ID: LIB3146-011-Q1-K1-A6
tttggggtttttcttttgagtagggaataagccatgaggcttatacaaataatgagatttatgtagtttataacagtgcattagtgcttagtttttaaagaaaaatggtgtgttttagtagtagaactcttggtggtatgccacctgaccatgaagggaatccatgccctttttaggtacccttcttggaatgttgtggataagtgatggcaagtttggctttaaataaaggggaattttattaaaaaaaaaaaaaacacacaagctatttttttt

SEQ ID NO: 38317 - DNA, 256 bp, Gossypium hirsutum
  Clone ID: LIB3146-011-Q1-K1-A9
gaccgccgcactgtcatggcggcggacgctgtcgccggacactccgatgatccattctggtacctctctcaccaccaagaaatcgtacgtgcaacaaatggtgacgtgcagtgccagtggaagtactcaggcggtgaatttggcttcggggacttccgtccgaccgactagcatattagtggttggttccaccggaactcttggaagacaaatcgtgagacgtgcactcgatgaatgttacgatgttaggtgcctt

SEQ ID NO: 38318 - DNA, 302 bp, Gossypium hirsutum
  Clone ID: LIB3146-011-Q1-K1-B2
cttcgggtgggggtcatggcaattcaatatccggcttacatttattatgggcacagcaattggatggttactagtaaaaattacaaaagctcctcaacatctaagaggtcttattctgagttgctgtgcagcaggaaacgtgggacacttgcccttaattgtcgttccagcaatctgtagggagaaaggcagtccctttggagctcctgacatttgccatacgtatggaacggcttatgcttcactttccatggcgattggagccatttacttgtggtcagtcgtgtacaacgttgtccgag

SEQ ID NO: 38319 - DNA, 400 bp, Gossypium hirsutum
  unsure (1)..(400): unsure at all n locations
  Clone ID: LIB3146-011-Q1-K1-B4
gaagcacctaaccaatcaaaaagctgttgatatagttcagaatcattcacgaagtggaattgcaaggaggctggtgaaaactgctctacaagaagcagcaaagaaaagagaaatgaggtattctgacttgaagaaaattgaccgtggtgtccgtcgccatttccatgacgacatcaccgtaattgtggtgtttcttaactcaaacctcgtgagcaaggcctcctctgttaagggtcctaatctatctgttcgagggggaggagttaccttacctcctcgtactctggctccttgtgccatgccagtctaatctggcagtacctgatcatatgccgtattgcatgtttttcatgttgtatcattttcttatgtgaataccaggtagcttncaaaagcgatg

SEQ ID NO: 38320 - DNA, 329 bp, Gossypium hirsutum
  Clone ID: LIB3146-011-Q1-K1-B5
gagaccattcttttgccgcaacagggtccgtgggctcttctcctttgtctcattcacttggaagtgaattgcacagggctgaaaccgtgaccagcgatgttgctcttattaacaattgggaggctttctatatttctaaagacttcatcttgaatcaatcccatataggggggaacacaattgctgatgaaaagtttatgtctgttctggtcaagattatgcctaaacttaagcaactacatggcaaactcttagattgagtttcaatacatttgctcggtaatctctacatttgatatgcactttaagtcccacacattaccatattc

SEQ ID NO: 38321 - DNA, 307 bp, Gossypium hirsutum
  Clone ID: LIB3146-011-Q1-K1-B6
gattctcaggaaccagccgcccccttttgtttggggtttctaaataaaagatcggggggtgtgcatgttaagaaatgacctgatatgattaaaaaagacgaaaacgctccgaccccctttgaaaatcgagatacgcttgccatttctatgctacaaacggatcacaatggatcgagctattacatactgtaaatccatatcccttctacctagtacatatctgctattaacagctgccttattgggcaaaacatattgttgaccctatcaggaaacgcgtgggtgtatgtctgctatctagtctctc

SEQ ID NO: 38322 - DNA, 299 bp, Gossypium hirsutum
  Clone ID: LIB3146-011-Q1-K1-B9
acgcccacgcgttcggcagctggcacgctctcatcattttactacgggaccgtcagtcttgccaaacaccttctgtccgagaaaaaaaaagctcaagagagaagaccatggccgaacaacttaccggcgagcagaaatctgggttttaagaggggtttgtgccctttgtcccagggatggaggggggtgttttactaatgaactggggactgggatgcggtcacttggtcagaaccctactgaggcagaacgtcaagatatgagcaaagaagatgatgctgctggaaatgggaccattg

SEQ ID NO: 38323 - DNA, 244 bp, Gossypium hirsutum
  Clone ID: LIB3146-011-Q1-K1-C10
cccagaccttctagagcgctcgacaatttatgattagatatcgatacgattctattgcattcaggccaacaaagcacaataaagggacgtaatctaaacgattgttaaaactatccgagttaatgcttgctctgagccgttagaggtctggtataatccgacatggtaaatatatataaaacatctgatagacagtgctgtgtgatttaaatgaggtgtgatgaggcctgaattggtgatgaaa

SEQ ID NO: 38324 - DNA, 365 bp, Gossypium hirsutum
  Clone ID: LIB3146-011-Q1-K1-C4
gggttccggaattccaccactaccattggtgatggcggaagcggtttggatttgtgggactccatggtacaggttcaaaacgcctcaggggagccctttaactatcgtgtggagggttctattattggcattgaagaagaaaaaacagccttatccttcccaccccagcctcttgaacgattacgacaaccgaaaggttccctacacgccaagattcaagtttctggacaaggctgcaatgctagacgacaactgtgctgtcaacgcagaaaaaaaataacccatggctagtatcaactgtgacccatgtggaagaagtaaaaatggtgataaaattactccccatatggtctacgtgcatactc

SEQ ID NO: 38325 - DNA, 254 bp, Gossypium hirsutum
  Clone ID: LIB3146-011-Q1-K1-C6
gcctttaaccctggcctgcctgctactgctaaatttcaatcccccttctttctgtttcgggcagcaatggcatgtcaaagaaggttgtttcctatttttctgactctgacgctgcttattgcttagctgctaacaagcctttgctgctagttcctcttcagtcggattttttgtcgttttaatggagtcaacaagattggccatgttctttcttttctttctgtacagacatgtggatgaacaagtttagtttc

SEQ ID NO: 38326 - DNA, 244 bp, Gossypium hirsutum
  Clone ID: LIB3146-011-Q1-K1-C9
cggacgcgtgggtggaattggtggtgggcatggtggtggagtcggcggaggaattggaaaaggtggtggatttggcggcggtgccggaggtggatatggcaagggtggtggttttggaggtggagtaggtggtggagctggaggtggaaagggcggaggttatggaggtggttggggtggtggaaatggacaccattgatattcaatgctaacgatgcaagcatgcttggttcaacattcaata

SEQ ID NO: 38327 - DNA, 361 bp, Gossypium hirsutum
  Clone ID: LIB3146-011-Q1-K1-D10
taccgatgccgaatctgctccggtgcgacccacgcgtacgcccacgcgttctacagcgcgtgcgcaggatgttgtaacctcaagacgtttcctgtgatcccaagacactttcctattttagaattaagtgattcaaatatagaagaagtgcctgattcaattgagcatctggtcagacttataaagttgtgcttgaaaaactccaaggtctatattgtatcaagcaatcttgcaaagttggaatcacttcatgatctggaccttagtcattgcccaatagccggatttccaaaaatcccaagaagcttgacagaattaaacttatctgaaactcaaattgaaaatgtgtgcttgtgtagct

SEQ ID NO: 38328 - DNA, 412 bp, Gossypium hirsutum
  Clone ID: LIB3146-011-Q1-K1-D2
agccttcggttcagtcccttttttcatggtttttatgccaattcaaagggtttttcttcttcttttgaaatgtttgaaaaaacccaccgtttatttccctttccctctccttgttatttgattatgacattgaaccttgtttttttggcttgagatttccccataaatacctccctttccctttctccccatccatccttattcaccaaatgctatatttctaaccttttagtataagggttcgaagatgaagaagaagatgacggtgatgatgatcatcatcatcatcccaaagcattgcactctccatccatttttttttcattcaaaacataataccatgacatgctaccatgcatatttgttacatcatcatcaacatgacatccatgtatgtatgtgcctggcttcc

SEQ ID NO: 38329 - DNA, 292 bp, Gossypium hirsutum
  Clone ID: LIB3146-011-Q1-K1-D7
ctattataatgctagctgattctatgaaggctccaaccgtacgagcacgaacctgcggaaggtctactaaggtatatattgacttaccactaataaatttaaaaaggcaacacaactatttgagtgttaaatctcaaccttcacaactcacaagctttttccttatcatacatttatattcaattcccggcttaccaacatcatatggaccgatcgagcttcccaacaacaaaacgtcctaaatgctcatgagatctcgactttcatcagaaaaatacccactctttcagaa

SEQ ID NO: 38330 - DNA, 371 bp, Gossypium hirsutum
  Clone ID: LIB3146-011-Q1-K1-D8
cccacgcgtccgcggacgcgtgggttttcttttgatgaatatgttagatggagatttaattggtttttagacttgtaatatattagattcaagataatttctttcaaagttgccaattcatgataatattttgttgacataataataaatagggaaatatttgtagtttatgatttatgactgttttttggaccaaaagatgcttaggaatagcttttgttttgttttcaggaaagagttgttgatctcacggcaaagcctactcagtttgcagctcgacctaatctttctccttatgcacccccagtgattcctatggactatgatgatggtattccatacagaggtattagtggggtgacaggagaact

SEQ ID NO: 38331 - DNA, 269 bp, Gossypium hirsutum
  Clone ID: LIB3146-011-Q1-K1-E1
gagagtttggcgagcgtggaggccgaaacgtgcggcgatcgggcgttgggcgcggcgtgggtgctgttgcggcgctgaggcagatgcggctagggttttgtttttgtgttttgctgtgttgatctttgggtttgggctgctttgttgggcttgtaaaatgtaggcctgttcattttttgttttggcttattacgtgggcccaggccgattgggccttattacataaccattttaataaaaacaattctatgccgaccaatattaggatt

SEQ ID NO: 38332 - DNA, 255 bp, Gossypium hirsutum
  Clone ID: LIB3146-011-Q1-K1-E12
cttcacccgtatagatgtgacccccgagcttgaaactcttcgacaaggtatggagtacggcatcaaggagtatgtcttgaaaactaacatgaaactaaatgatgaatttaagctggcaaagaaagcccttaataacaccgtgggagttataatgcgagcattaatttttgagctttaaatttgcattgccaagcccaatcttatagaggaaattttgtccaggatttgcaccctttacggggacttaccatttgg

SEQ ID NO: 38333 - DNA, 362 bp, Gossypium hirsutum
  unsure (1)..(362): unsure at all n locations
  Clone ID: LIB3146-011-Q1-K1-E3
ataagggttttcttgccatcggccagttgaataaaaatttcatgctcaactagtaacggataatacaaactgcccttgcaaagatcaaaaaacaaaagtcaattcatctggtggtgtcagtggagctagtttttggaatttctgacatgtgcagttctaaaaccatgttttagtggacaatctttttgatttacttgttcaggctggctgagcttcattgttactaaaatttgttattaagattttgctgactagtattctaagaacattctttaaggtgattatatatgattagaatattttcactaannaaaaaaaaannttntnnaaaaaaccaacaaaaaaaaaaaaaaaannaaaat

SEQ ID NO: 38334 - DNA, 394 bp, Gossypium hirsutum
  Clone ID: LIB3146-011-Q1-K1-E7
gggggacgcacgcggccggagagattcactagcgtggaggccgaaactttttgcgatcgggctttgggcgctgcgtgtagcctgttgctgcgctgaagcaaatgccgctagggttttgtttttgtgatttgctgtgatgatctttgtgtttgggctgctttattgggctcgtaaaatagaggcctgtacattttttgatttggcttattacgtgggcctcaggccgattttgtcttattacataaccattttaataaaaacaatactatgtctgccaatattaggatttttaaaaatttaggaacattttctatccctttaaataaatgaggaatatttttctttttgttgaaaataataaatcacaatttttcctattatattttttcatctt

SEQ ID NO: 38335 - DNA, 313 bp, Gossypium hirsutum
  Clone ID: LIB3146-011-Q1-K1-F5
aatggcaaacctgtctaatttggggactaagtcaacccaattttgaactgcacatggatgatcataaatcaatctttggttaaattacacaaggcccttggagagctaaagcaatcagcgcttttcctgcagatttggaggtgactgagtcttagtcctgagttgtggtggcactcaaattgaccaagaatcaatcagattgagccacatttcctcaattcatggtcggtcatccttggaagaagcttcaaaagatggaaactactatttttagcagactagctctcttgcctcacctattaatcagagctca

SEQ ID NO: 38336 - DNA, 355 bp, Gossypium hirsutum
  Clone ID: LIB3146-011-Q1-K1-F6
aacgattcgaaaccgcccaaaaccttgttgaggtccaccattccggagtggtgaagggcgcctcgacattggcaaaatcagtcttcaccgtggtcgagccaacagttgaaaaatgtgctgtttcgatttggcagacactgaacaaaatccctctctttccacaagtagcttcggtagttgttccgacagccgcctttttcaccgaaaagtataaccagacggtggcaaccggtgccgagaagggttacaaggttgcctcgattttgccagtggttcctacccagaagatcgccaaggtgttcagtgtaaggaaatctgattagtttacatgatgattatatgggaatatataata

SEQ ID NO: 38337 - DNA, 141 bp, Gossypium hirsutum
  Clone ID: LIB3146-011-Q1-K1-F9
acgcgtccgctagcaaccatgagatcatactgaatcttttctgattgatgcgtcatgccttattggggggggcacactttatatcataaaggaagtatggatcccttctctcaagtacatcattacgagtatagtactagg

SEQ ID NO: 38338 - DNA, 220 bp, Gossypium hirsutum
  Clone ID: LIB3146-011-Q1-K1-G11
acgctgaatacctgtatagcactggcgctctttagtatattgtgttaacccggcctgatgtggcatatgctgttaatagggtgtgccaatttatgcatgctcctactaatctacatatggtagcgttaaaacgcattcttaggtatttacgtggcactctttcttatggcttgcttttccggacatctgaacggctttcgctggtcggttatgccgatgc

SEQ ID NO: 38339 - DNA, 348 bp, Gossypium hirsutum
  Clone ID: LIB3146-011-Q1-K1-G4
aacgagctgattctgggattcttcttatcaggtaaaaactctcttttttttagtgcctcctatgtaataacatgagcatcgacattctttggtttagggacaaaatgaaactcgatctcctggaatctgtcttttctgctttgtatatcccttacgatggctccaatgaccgatttatctgtaccagtattttggcatttcttgatgacagcttttgagtctcccactatttcgattgtatataatcccataaaaatccctaagttgactgcttgtaacctcgcatatgcttctgccatgaacgaaattgatattctcgagtgtatgactgcctgtgatgcaaggatc

SEQ ID NO: 38340 - DNA, 389 bp, Gossypium hirsutum
  Clone ID: LIB3146-011-Q1-K1-G8
acggtaaatcgctcattggagcgtatgtctagctttagtaaattgagaatacatgcaatgaatactgcagtgaatggttctgctagtgctaggaggagaagcaggaataggggattctttttcatttctattttaggtgcattgtgtgctgtcttatggttcttgataggaacagttagggtcctagggagatctatctcctcctgaatatatatatgtataagttggaagtgaagtgaagtgaaattattgcatggacaacatatatgcatagttttaatatctaactaattttgaatgtaaaggaagaaagtgatagctgaagtaaggaaatgaatgttgaaccccttttttcgtttggagaagacctttttcttaacttaatattt

SEQ ID NO: 38341 - DNA, 386 bp, Gossypium hirsutum
  unsure (1)..(386): unsure at all n locations
  Clone ID: LIB3146-011-Q1-K1-H2
cacagttgtgcactctttggagatgagcagacagggattccggagaccgatgaggtgatcaggacatctttttcaagtctgaagaggttagttttggaagctgtcgcctttggttctttcctttgggacattgaagaatatgttgacacggtctataagctgaaggacaactgattcggggaagaagtcacagcagtttgagcataatgcttttgtatagaggagttgatgtttttggcattttctacttcattgctctggtttgatagcactgggcaatacgcattgtatagttataagtngatacgatgaaataatgtacagtagaagactntgttcatcaatgggatcaattcccttgactggtatattgttgatagtcctag

SEQ ID NO: 38342 - DNA, 364 bp, Gossypium hirsutum
  unsure (1)..(364): unsure at all n locations
  Clone ID: LIB3146-011-Q1-K1-H8
ggcggatgggttggtcccactttatctttgtgtcaccctagggaccacttccaccacggctgttgacccaatcgaactgctcgctggtgtggcgaaggaacatggcatgtgggttcacgtggatgctgcttatgccggaagtgcatgtatatgcccggagttccgccatcaccttaatggggtagagctagttgactcgttgagtttgagtccccacaagtggctactcagtggcttagattgttgctgcttgtgggtgaaaaaccccaccgcacttgtcagagctctaagcaccaacccccgatacttgagaaacanacaaagcgaaatcgattccgtcgtcgatttcaaggactggcaagtc

SEQ ID NO: 38343 - DNA, 325 bp, Gossypium hirsutum
  Clone ID: LIB3146-012-Q1-K1-A10
acgcaaaaaagctgtagaaccaatgaacttttttgaagctctagagaatgattagcctagcgggtgcttgcttgttgctaagtataaaaaagacggatttgctaccctctagagtcatacacattagcagcatggtaatactattgataatgcctacattccaaaggcaaacagcattgacaataacacacaagtgtcagacgtgttatcaaaaccaactattgtaattcctaatgaaaccctggtttttcgtctcaatgcacctattcacgatatttattgaaaaagaactcatctccgtttgaaatagatatgcccattccca

SEQ ID NO: 38344 - DNA, 230 bp, Gossypium hirsutum
  Clone ID: LIB3146-012-Q1-K1-A12
atttcccacagtctataactcactctttttttcccttcatccaatgtcatatcctagggggatcttaataaataggcggtctcactaaaaattgttaacaatctgcttttccaagcccattcttaatcatatcatttctatgcgtattaaatctttaacaaaatcgtcctttccaagcccaatgtagatgtccatctataaatttaaatgttctctttttcttaacttca

SEQ ID NO: 38345 - DNA, 340 bp, Gossypium hirsutum
  Clone ID: LIB3146-012-Q1-K1-A2
ccacgcgttcgcttattctacaatataaataacatatatttacatttcctttcccttttaacatgcactgatggggattatatacatgcttatcataccaaaatggcctaccttttttattatgatcacctgattgattgattacatccatgtttctacccctatgccacatgttgcttcatttgcaaaacctctatactcttctgctatatccaacattggatcacagttatttaatgctctacaattcttatcctaaactgttttcagaggtttaaatttataactgaagctccttattagcaattgctaatttttttaaaatatatacaccttttac

SEQ ID NO: 38346 - DNA, 324 bp, Gossypium hirsutum
  Clone ID: LIB3146-012-Q1-K1-A3
gaaattaagccatcaaatgtgagggtcatactaacatgtttaaggagcttatatatgtcatagaaggttcttgaatcagcctaacatgctaagtcgaaacaagttttttattacatcatcgtagaattcttgaaaaatacatttacctatgagtggtgtctgcccgcaagttattaattaacatttattctcccaatagaaaccgattattctgaaaatgcttattcaccttggtcgatggaatctaacttgatttattagtaacgggttgagttgatttttttagctagcttattttagtcccgatgcactttctttttgtaa

SEQ ID NO: 38347 - DNA, 405 bp, Gossypium hirsutum
  Clone ID: LIB3146-012-Q1-K1-A5
cccacgcgttcgaaaaaaaaaaaaaccaaaacctaaaaaagaaatcctctcttaagaacgcccaatccccgatgaagcaaatccggtcaactccgccatggctctgccttatatggtggccagagacctataaacccacctttctcaccgatttttggagcccatcatctataaagcatagattcaagggcaaaactccgagaacatggccaaaatcggtggagcaaccaagaaatgcatatttattctcctttttcgatttgacccgaatggagaacggccatcaacaaggtgtcagaggcatgtggaggcaagccgagcggcggtggcaaagccaacggtggcgtgcggcgctggttaagctgaaggaagctagggtttgttggctgaaaagttttacgatta

SEQ ID NO: 38348 - DNA, 385 bp, Gossypium hirsutum
  Clone ID: LIB3146-012-Q1-K1-A8
aacaaaatcaacaaagggactttcatcaccagttacaaggcagatatgccttccggatgggttttgtcagaaaagagactgaattccatggataggaccataattcatcatcaaaacaagatgattagatagctggaaagactaagcaagctttgtcatgataatctcgtacatcctattggtgtcgtcatctatgaagatatcgctcttatgttacatcattatttaccaaatggaacacttgcacaactccttcacgaatcgtcaaagcagtcagagtatcaatcagactggcccagaacactatcaatagccattggagtaccagaaggattggcttttctccatcatgtggctgttatccaccttgatatatcttcgagca

SEQ ID NO: 38349 - DNA, 302 bp, Gossypium hirsutum
  Clone ID: LIB3146-012-Q1-K1-B11
gccgaaaataataccgacttcactttcaatgaatgaactgtttacaagcaatggagggggcaattcttcaagtgaggtcggtctgatgcctgttattggaaaagctatgacttcaataccaatcagtcatgcagcaccaataagctacataatgcagagaaagccacgtgttgatgaagaacctttcactgttgttaccttgctgaactcactcagatcggggaaatatgccattcattttacagctgaagacttggatataactgcattaaggccaatggcaaactgatacctcaaacagc

SEQ ID NO: 38350 - DNA, 219 bp, Gossypium hirsutum
  Clone ID: LIB3146-012-Q1-K1-B12
acgtcttgattatttttttaccacccccactttacaaaaggtcattaatacacattaaaagatgttttccaaatcatctaggtcttatttcctatccccaaacggtgctagaaatatgaattccttctatcctcatcaagaatgaaattgtgcaatgtatatcatgcattgtaacggtgcacaacatttggcgccttcaattaaattaaacttattctt

SEQ ID NO: 38351 - DNA, 324 bp, Gossypium hirsutum
  Clone ID: LIB3146-012-Q1-K1-B4
aagtagacctcaacttggggatagtataagtgacgtgaatgctgggattcgagataggctaaattctgcttagtccatgtattttatgaaagttgtggttttagtccctaaaaaaaaaaaaaaaaaaaaaaaaaaaaaaaaaaaaaaaaaaaaaaaaaaaaaaaaaaaaaaaaaaaaaaaaaaaaaaaacaacattaaaaaaaaaaaataaaaacaaaagaacaaccatttaaaactacaaaaaacagaaaaaatcaaaactaaaaaaaataatataaaaaattgaggtggcgcctctttataaaataataccttttggaaaca

SEQ ID NO: 38352 - DNA, 395 bp, Gossypium hirsutum
  Clone ID: LIB3146-012-Q1-K1-B5
gcatcatatgaagaagtgataagaggaatgtgcttggacttctcatctcccattgcagaagaagaggaaatcaatggaggaggggatagtgatgatgctgataatagagttactcaaacacctcgaactgatatctttggcatatccacgtcccttgatcactactttgatgaagaacagcattaggtcactcgcaaaccaaattaagaaataattttgttaattactgcgtcaagtttgaagtaggttttaagattgtatactttgcttccacttccatcaatcttggtggaagttatcagtgtttccttctcaattggagatggttatcattgtcctatgaatctcaaataatatacaactcttggttatgcaaaaaaaaaaaacaaaagggc

SEQ ID NO: 38353 - DNA, 319 bp, Gossypium hirsutum
  Clone ID: LIB3146-012-Q1-K1-B6
gctttattttcagaagcgataagatgactttactggtcacttgcatacccaatgggcggaggcgggcaaacaaatcatcgatgggaatggactgctgcacataaaaacaatgctcacacacgtccaacagaactccaggggatctgacactaacttgataagtacagtcatcaacaacagcgttgctgactgaatcaacgagaactcacactcctgatcgtcagtgctgactcaagttttcaggtaactgtcagaggcgttactgcctttgcactgcgcttactcatgcttgcagggatcaggcctgccttcaatactg

SEQ ID NO: 38354 - DNA, 435 bp, Gossypium hirsutum
  unsure (1)..(435): unsure at all n locations
  Clone ID: LIB3146-012-Q1-K1-C1
caatagtagaggaagtgtgcgtgttgtattgtaaatgagctgtagttaagactcgatagccactcttaacagtgtattctcctaaacctttgtgtttccaaaccagcatatcctccgagctacttccagaaatcggaatagaaaagattcgagctgttatatcttcatcaactaaataatgaaccagctctctattccaggtagccaaagatcattccaaatattgatgcgagcaccactgccaaccctccacacaatctcttccacaatcaactccctagcactgcaaatacttctccaggtaaaagaaggaagatggcaaggagatgtgttcgaggaaaatccttgttgaaccttangaatagattaggataaaagtgacatgtcactaggatgggtgagcattcgaactcgttgaagtgagtccgagttcac

SEQ ID NO: 38355 - DNA, 211 bp, Gossypium hirsutum
  Clone ID: LIB3146-012-Q1-K1-C10
gggatcaaatgtacaatacattcattctataaaacagcaaaaatatgatacaagaatatctgctttaataacaaaaatgtaagaaaaacgaacttgggattgagctccgtacgtgcaataagcttggattcgaattccagcctccttatgtaactaagccttttcctccccagaaggaaacctgactattctttatcttgtgctattaccc

SEQ ID NO: 38356 - DNA, 165 bp, Gossypium hirsutum
  Clone ID: LIB3146-012-Q1-K1-C12
ctctgaactaatatatcttcccaattattttttaaactataaaagcgcattattggtgggacttttattgagtgcggggcatctatcttaaaaaacccattacaaaaacttcaaaccccagacttagattgtttaaatccaaaattctgtattccttacttttta

SEQ ID NO: 38357 - DNA, 368 bp, Gossypium hirsutum
  Clone ID: LIB3146-012-Q1-K1-C5
tgtaaatatggtgcccaatggcctatagatacctcggctgagggatcgtgtagtcaaaattattactgattacagaactgaaacttatctcagacatggctgcaacgatatacttaaggctgattgtgttaacctgtcggtaaaatactacaatgaagcgaaacgagcagtttgcttgagtaatgaagaagatgatgcacgatccaagagggatgccagtagagcttatcaaatcataacacctagtgtgagaaacatggaggtttagtctaaaacaaggggaagtggaagatgttgcatgtgttttgatcctttctcgatacaaaacgtatcagtcaacgtgttcttttgctgccatgcttatcaca

SEQ ID NO: 38358 - DNA, 427 bp, Gossypium hirsutum
  Clone ID: LIB3146-012-Q1-K1-C9
cccacgcgttcgaccacgcgtccgaagaaatttgccataaatgtggtatactctttggtgagcaagaattgcagggaacctgatgtggtattgaatgtgcctcatacttctttgctagaagtaggtatgatctatcatgtctaactctaactccatttatctcaatcataagagaaatgtaaattatacaaagggaaatagggtcccttaaatttacatatgatgtgtatacaaagagacggggcacaaaataacttccaatttaacaggaggctgtcctacacgttaagaaccacttgacatgaaaatcccttcaatggttttttattttcttgctatggtagcaatgatctgatatcatcatattccaaaataaaatcacaaggtgaatatatatatatatatacatgtctactaggttcgtggg

SEQ ID NO: 38359 - DNA, 319 bp, Gossypium hirsutum
  Clone ID: LIB3146-012-Q1-K1-D1
gacccacgcgtccgaaaagtatgccttcaagtgccatcgaaaatctgaggctggacgggacattgtatatccagtaaatgccattgcattccatcctgtatatggtacatttgcaactggaggttgtgatggttttgttaatgtgtgggatggaaacaataagaagaggctgtatcagtattcaaagtacccaacaagcgttgccgctctttcattcagcagagatgggcgactattggccgttgcttcgagttacacattcgaagagggagataaagcacatgaaccagatgcaatctttgtacgtagcgtaaatgaa

SEQ ID NO: 38360 - DNA, 225 bp, Gossypium hirsutum
  unsure (1)..(225): unsure at all n locations
  Clone ID: LIB3146-012-Q1-K1-D11
acgcccacacgttctaccacgcgtncgcttttatcactgtggctttgacttattttcaaggtgctgctgaagaccatgcagggaggttgaaggtctttctttggggaggggctaccgggctggtcatatacacctactgtttgtgttattacaatgcgcggtcaaacatgtcaagctttatgcaaacttcgatcttctttgggtacatggaccgcatttgctatg

SEQ ID NO: 38361 - DNA, 218 bp, Gossypium hirsutum
  Clone ID: LIB3146-012-Q1-K1-D12
acgatactccaatgaattcgagctcactttttttacactacataaactccctatgaacgtcgccatttaagattcggagagaattaccaacctaacaatattggatatcatactgcataactcaaccatcacccctgatcagcttattaacatattttataaaaactactacatgctcctgcacatattcaatacacagggcttgctggagataacat

SEQ ID NO: 38362 - DNA, 345 bp, Gossypium hirsutum
  Clone ID: LIB3146-012-Q1-K1-D3
cccacgcgttcgaaaaaaaaccctaaacaatatcttataccatgcttactccttgcttgtcgccttgaataaagaaaagaggctaataccgaggcttctatcagccgctggaaaccatcatagcaaggccctacaacggggtgagtatgattcgcagtaagacccacatactgtctctgatccgatacaggagacgagggtcctactgtgcatcatgatgaagaggaggaacagggcgaaattctaggcaataatctccttagaaataagcttggaagaattctatggagctttgtatggatttcgggcacagtttctgtcacaaaaaatataaaagggcggacg

SEQ ID NO: 38363 - DNA, 216 bp, Gossypium hirsutum
  unsure (1)..(216): unsure at all n locations
  Clone ID: LIB3146-012-Q1-K1-E10
caaggagccagaacncccgggtgcgacccacacgtaaccttacacgttgtcgaacgcccgcccttttattctacagtagctacatatatagagctgggggatgatggactatacaaaggaagctggttcactgacaattggtctgataaagaacacatgccaaatattccatgttcctttaggaatgctaaggaaataatgaaactccatgctcat

SEQ ID NO: 38364 - DNA, 267 bp, Gossypium hirsutum
  Clone ID: LIB3146-012-Q1-K1-E12
ctcacaccttccattacagcctgcatgacactctgaatggcactcctcatggcaatggtggtgccctctaagttgaccactcattatattacccccaatttcctcaccctgtctctttcacagccttttttggacattttttcgtccaacacaacgtcacactggacggctctatgctcccatctctctatccaagccaggcttccaaccaaacgtacgtggtaaggaggactgttgtaactactgatatgactgaaaatagtggaa

SEQ ID NO: 38365 - DNA, 233 bp, Gossypium hirsutum
  Clone ID: LIB3146-012-Q1-K1-E4
tctgttattgtcaaatcagtggacttgtcgtttacaggagtttacaagctcctgaggtgtatggacattatgaatggacactatgcttatgtcaacagagagttgacaggcctatggtgtccatctttataaaatacgaggtacacatagctcgagttcatcttcctagcaagaactaactgttgaatattcacggcttaccgagcattacgttaacttattccacaatgggc

SEQ ID NO: 38366 - DNA, 382 bp, Gossypium hirsutum
  Clone ID: LIB3146-012-Q1-K1-E5
ctgacattctctaaaaaagccgtgctattttttactttccacaggataccaaaaagcgggggcatttggacaacgtaaaaacattcttttacaattttagcacagtattaaatactatatgtgtacccccatactcttaccaatgaattcatttccactgtactttacctttcttagtacacgcttgataaaattgctgcttaactgccaaataaggttacgaagaaacgaaaagaatgcaaatttctatggcagagcgtacaacaagtctgaacgataatagaagtacattatgacaaaccatccgttacattaggactaaaaattgattcattgtcactgaaaccttgcgaagaaaacatttgattaaactctgcttcac

SEQ ID NO: 38367 - DNA, 129 bp, Gossypium hirsutum
  Clone ID: LIB3146-012-Q1-K1-E9
acgctcacaccctctgatatactagcgaccttctttttttttctatatactagctacctttttcagggaggcactatatataaatggggtcattattaacaccacactttgcatttcactcatataact

SEQ ID NO: 38368 - DNA, 256 bp, Gossypium hirsutum
  Clone ID: LIB3146-012-Q1-K1-F10
cccactcgttctaaaatatgcaagcgagaaattgctgattaattggattcaaccatgggtggctggcgaaccttatattgtcataggatgtagggattatgcagggcgacttgcacgcactgagtgactaagatccaaagacatcacccatcgagcgaaaattaataatttctggctgggtgtagtcctcctggcatttgttgatgaggtgctgtgctggctttacagaacaggcaaagagtattacgactacata

SEQ ID NO: 38369 - DNA, 288 bp, Gossypium hirsutum
  Clone ID: LIB3146-012-Q1-K1-F11
ctgatggccagtcttgatttctctccatctcgaggtttggttatgccctgtacctgtggggtttagggaaaaaaaaaattctcggttcttctgttttcttcaagaggattccatgaacgtttgatgaacttaatacacttgtgtgaaatgtcttgttctaaatttacgggtcagctttgtcctttctctcttgtccctcttgtccttctgtcctttctctctttccctattaatgaatgagctagttaaatgcattccacacacacttgaattgttatgacttgatcc

SEQ ID NO: 38370 - DNA, 273 bp, Gossypium hirsutum
  Clone ID: LIB3146-012-Q1-K1-F12
cacgcctccttcaagcgagagcgtcctattttttttttcttcctttcccgcgacgccgggggaatcaccaaccggccggtgcgccaaatgctagggttccgcggagcgcgggagccggctcgactttcgtagcctcgccgccggcgcgcgggaaccggatgctgctaagctgcgggtcgctctcctcctgggtgcgccgcttcgtcgcctgcattggtggttgttttggatgtgcccaacctactccgataatagctgtcgatgaacccacaa

SEQ ID NO: 38371 - DNA, 286 bp, Gossypium hirsutum
  Clone ID: LIB3146-012-Q1-K1-F3
cccacgcgtccgcccttttactaggcaatttaggtaccttccaatgtcaaatatcagtagaacgaatccggcggttggcgttgtaacattagactcagtccaacacggtccaaacccgaacttcagagtttacgtggcaggcgggatgtccgaagcaccacgagggggtgccatgtacgaactcaagctggaaatgtacgactcgacggacgacacgtggcacgtcgtggggttcgtgccaacggaatttgctgtgagactaactgtgtggacaccaaatgagagt

SEQ ID NO: 38372 - DNA, 383 bp, Gossypium hirsutum
  Clone ID: LIB3146-012-Q1-K1-F5
cgggattctattttggcgtgcctacttttttatccgcatgctcgtgcaactgatggggagctcttgctgcgtccatgtgttaagaggcttttattcacacactcaggctcaccatctactcatcttggtcgtcggatatgaatgtacagccacgaaactaaatggctacatgtaatccgatacccatcttctgctgaacataaatacgtagccaacatgctccttcggtcatgtcacagaagaaacattgtcctggaaccttcattatcacaccatgtgtgctatccatatcctatgatacctgcatattattcggttacaacggtccatttttggtatcagttgagcttcattcagcgcttctatcttgtgtttctttgcag

SEQ ID NO: 38373 - DNA, 207 bp, Gossypium hirsutum
  Clone ID: LIB3146-012-Q1-K1-F8
acgctcacacgttctagagcaaccgcactattttttttattgctatgacccctacaggcgggaggattcaatcaacgacactatatgcaacataaaaggacaggttattgagggaccattccgccattcatacccaatttccatcatcctcacactctgatatggatcaggagcataatcggaatgagacccattaagtgacaacat

SEQ ID NO: 38374 - DNA, 290 bp, Gossypium hirsutum
  Clone ID: LIB3146-012-Q1-K1-F9
gttgcaacctctgctaaatgcttccacattttagtgggaaggaaaaaagatggttaaggggtttctgccgacatgatattcctggagttttcttaggactcatttcttgatgtcgattcttgaagaacctctatggtctgcttggagctttctgtatttgttgggtttgtagatatagttagcagtagcgcgggtgcgccgatttatcaataacagctggtaatgactgtcttccttcttaagagaacagcacactggttgatgctttatggatgtaatattacacttga

SEQ ID NO: 38375 - DNA, 318 bp, Gossypium hirsutum
  Clone ID: LIB3146-012-Q1-K1-G10
acgtgttttctcagagtcgaacctcctctaatcttactccctccctccttaccgctctgtgggctgtcgcttccatggctgtcttgtttaaaatgcctgtcgttacgggtttatacgtgggtcttatgatgctggctttggctagctcaactgagtatcatgagctatttcaacctggctgggccaacaatcattttatctatgaacgaaagctcctttagctcaaacttgataactcttctggtgctgggtctgcatcaaaaagcacgtgttttgttgccaaagtatccatgcacattaaacttgtacaaggtgact

SEQ ID NO: 38376 - DNA, 377 bp, Gossypium hirsutum
  Clone ID: LIB3146-012-Q1-K1-G6
agaaaatttgtgggctgatggatgtgaagaaattgacaatggaagcatctatgcgtgctgcacagaacgatagacttccgctacgagttgtagttcaagttctcttcttcgaacaggttaaggctgcaactagagctcaatcacgtaactccgatgcccgcgctacttgcgtttccaagatgagccccgatgaagaatgggacaagaccatgggtgaagattgtcggtccctcaaaaaaaagatgagtgaagtcgatacaaatgaggatggaggccagaaaaacagtaaaatgggcaagaagaagagcagaaacagtaagagtggggtgcagctgctgccatcacggtctagaagaatatttcacaagctgtgggta

SEQ ID NO: 38377 - DNA, 294 bp, Gossypium hirsutum
  Clone ID: LIB3146-012-Q1-K1-G7
cccacacgttctagatcatgcactattttttttttgtagtgccaaaatagccatgggggggatcctaagaggcgcctctgctccttatttaactgcagaagtaccctaatgagccaatcccgaaacttagctcttgagttgatggtcacccatgaaagggttaacatctgccaagctgctaaacttgttagacattgtttaaatatgtgcgagcagtagttatgcctcaaactaccgcgtgggcagagagcatatatgaacactcttctgcttcttttgattacatgtgagggc

SEQ ID NO: 38378 - DNA, 325 bp, Gossypium hirsutum
  Clone ID: LIB3146-012-Q1-K1-H3
aaccttaagctcactccggaccattattgtgaaatgggagaaggtattaccacagggtgtgagtggatttatggctctggatgtctcccaccaagaggtccttatggatctgggatgttatgggggtatatcataccgattgactatggtatcttgaaattggttcagaactgtatttccattattcgattggtctaccattatatacatgggatatcgtgtttgtctgggcacaacaattattgaagttttttgtttaccatcagctgagactactcttagtttgctctggtttatgcatgcttgggctgggctcattcaatcc

SEQ ID NO: 38379 - DNA, 401 bp, Gossypium hirsutum
  Clone ID: LIB3146-012-Q1-K1-H5
aaaacctataaaacgaccactctttttttaaaatcgtacacaataaatcaaacgcgtgggcaaaaacaataaataaacacataaaacaaacacaaaaaaaaaaaaaaccccctccctttctcccaaccttttccccacccgtttacccaacctttcccccaacctgtttgttttaaaatcgaaagcgccctttttaaagaatcaaactttattcccccgcctttgcaacccaattttttttttttggggccccaaaatttaaattaatggccccccttttaaaaactttttaatggaaaaaacctttcgttaccaaatttaatattttttaaaaaaaatttctttttccccaattggtataaaacaaaaaagcccccccctattctcttttcccaaatttt

SEQ ID NO: 38380 - DNA, 431 bp, Gossypium hirsutum
  Clone ID: LIB3146-012-Q1-K1-H6
acggttctatctctccctgtgttctccctcaatctcagcccttaagtacaagactccaccggcgcctccatggccagtggccggagttgcgcgaaacgggcttctcagccctcctttcacggcgtgcctgaaggctaagccttctaatacgcgggaccgagagaaaaaaggaagagactcccctccccgctcgactctggtgatggcgaaagtgggttccggccggccctctaaacaaataggtatattggtttaccttcttcgattcgtttttgataaaaagagttgttaaacaaacgagccttaaattgactacaacgaaaatcaagaaaagacaaagacgctagaacagaaaaagaaccggaaacaacctttttataatatttgatctgataattcatattcactggtgtggtaaaaacaactctgaa

SEQ ID NO: 38381 - DNA, 412 bp, Gossypium hirsutum
  Clone ID: LIB3146-012-Q1-K1-H8
acgaccgcttctttatctttaaccatccttatgcttttcacagcggtaaatactaacaaaggggggatcaaatacggggaatctagattcaccgtgctgtaccgggggatccctttgggtaaagcttaggtttctgggttttatcaagaagctcatagtactcgtaacgtggaagcaaccatcgccgctgatcgagctaacttaatgcaagctgacgccggcgatttaatcagagacgcctgcatttatgaccgtgttcagctccgagttctcagcgacgacggcgcctagatccgtgtattagacttcgattcttctgtcgtacacgtatcagtggattgtgcaatagtgattagtccaaggcagcactcacttacatacaagcaatgtggatatgcaggattgaatggtt

SEQ ID NO: 38382 - DNA, 378 bp, Gossypium hirsutum
  Clone ID: LIB3146-012-Q1-K1-H9
cgagcaattagaatcatccatggtgttttgggagaacgccatacacgattttggtcgagcgcaacgtgtttgatgaatcaacgagttgttctgaaagtccatctatatcttccatacaactcagcattgaaactcaacctaaatcccctcagatcgacatgaattccgagccatccactgtagttaccccagagcccgttacatcaatggaacaacctgctccttcaccagctggggttaatgatggattctgggaacaattattgaccgaaaatccacgtttaacagatattctagaagttcttgccgaaagaaaagatcctgatacgagaaaagactaataacaaccccaagggcaaaacatattttggcggaaca

SEQ ID NO: 38383 - DNA, 226 bp, Gossypium hirsutum
  unsure (1)..(226): unsure at all n locations
  Clone ID: LIB3146-013-Q1-K1-A6
acgcccacgcgtccgagagaaggcaacaataataatangactncaactgctttccgagcttgaagnctctgattattcaatacaaagcagttgaagtcaaattatgattattacattcacttatgccacactatatgaggtatgactccccatactccatgcttttgcgggcaggaaaatcacttccacttactgaatacgccgcctccatgctttccgtgcttga

SEQ ID NO: 38384 - DNA, 347 bp, Gossypium hirsutum
  Clone ID: LIB3146-013-Q1-K1-A9
accgacgcgtacgcccacgcgtccgcccacgcgtccggccaagattaagatcagcatggagtaccctctcaggcctcctttgtttactgtgaatctttactctcctggagaaagttcttccaagaatgactattccgggtggcagaatgaagttcgtgctatggaagctgaggtaaatcttcatatgttaaagatggtacccccagatgatgaaaactatacattatcacatcaagtctactgtcttgctatgttgtttgactattacatggatgaggcaactccatcttccgagaagaggaagagtagttctgagattgatgttggattgtgtaaacctgttagtg

SEQ ID NO: 38385 - DNA, 345 bp, Gossypium hirsutum
  Clone ID: LIB3146-013-Q1-K1-B1
aacggagggccgaccgcgcgtccgagaaagtcaactagagcggcctctgtttctgctccaactcaaaggttactagtaccaatgctttcggatgcgagattcatcgaggaatacattaagaccaataaaaggaggctacaaaatatgcatgccttatttgaagctggtctgaaaggattaaatattagatgtgcacatagtaatgctggcttgtctttgagggctgatatgagcaaattaatctcctcatacagtgagaaaggagaacatgagctaagggatatgctattaaatgcgggtaagaacaatgtaactccgtgttcagcttgccattgcattgaaccg

SEQ ID NO: 38386 - DNA, 140 bp, Gossypium hirsutum
  Clone ID: LIB3146-013-Q1-K1-B11
gagatggctgatactggtcgaagattgagatttacgtcgtggcgtttgattggacctacctggcatattgaaaggaacgacagcttggacacagagtatttcggaataagtccgacctgattttttaggaatgtttagac

SEQ ID NO: 38387 - DNA, 219 bp, Gossypium hirsutum
  Clone ID: LIB3146-013-Q1-K1-B12
cggctcgacccattcgtacacggacccgtgggtgtggatggcccatagtgggaatcaaaagagatgactttgatttgggggtaactgctgtagcgcccagcacagtcacggaataaatgattcatcgtatgagctcctaaaacacatcggggacaccttgtgatgactgctaatgtccggtgttgcagatctaccattgaaagcaaatagtgccatgat

SEQ ID NO: 38388 - DNA, 244 bp, Gossypium hirsutum
  Clone ID: LIB3146-013-Q1-K1-B8
cccacacgtccgacggcgcgagggcgattggatgaccatcgacccatcaccacaacgcatgaactagaagctgacgccgagcaccattcggacgagcaaaggggtcgcaatggtagcactgctgctgaccaacctgacatattctgtgatgaaaataaatactgtgagcggtagcagaaaaacccaatgcaggataccaaataacacgacgagacgaaagcaagaagaccatattcgggcggac

SEQ ID NO: 38389 - DNA, 249 bp, Gossypium hirsutum
  unsure (1)..(249): unsure at all n locations
  Clone ID: LIB3146-013-Q1-K1-C11
aacacagggtcagtgcaattcctcccatgaaatgcaaaantcttagcgatcctatctctgattttgatacactatatgaaaaatatatgatttgcgtgacattatgattttctttgattggcgttactaggctgaaagcgaatactgctcgtatacacagatagatgagtacttcggcggatgaagttcgtggtgaaaaagtcaaaaggatgtcggatcagagattgacaaaaatatgttgtgatattt

SEQ ID NO: 38390 - DNA, 223 bp, Gossypium hirsutum
  unsure (1)..(223): unsure at all n locations
  Clone ID: LIB3146-013-Q1-K1-C6
anngaagccacgggacgggncagcaacgggggagcanccaaaganccacngcaaaacaacggacgggcaaaacacggatgacgcaaagcaaagcacngccganangaccggacaggggcaaanaacgcancaacaaaggcaaaccaagaancaaacaagggcggannccagnaacaccaagancgacgacangggaaacgcgggaaacgaaaaggagcaaagc

SEQ ID NO: 38391 - DNA, 287 bp, Gossypium hirsutum
  Clone ID: LIB3146-013-Q1-K1-C7
gacccacgcgtacgcccacgcgtccgaccacgcgtgcgaaaaaaactaaaagctttccccttttctctcctttctcccttcttctccggccaatatggtcatcgtccaaccaccatggcttgtggcctccaacgttggtggccgccgtatatggcggtcggacgaatacgaaaagaggtctgtttgaccgattggtctccccaaccctgatgtaaaaccaaaaatcctagaaaaagccttttaaaagtgaaataaaacaaccaaaccctgggttcccttctccgatc

SEQ ID NO: 38392 - DNA, 303 bp, Gossypium hirsutum
  Clone ID: LIB3146-013-Q1-K1-D1
cccacgcgtccgaccacgcgtgcggctcgatgcccctttgagcaagttactgcaactctcttaaattttgtgaggttgtttcggaaagcacacgaagagaatatgaagcaggttgacttggagaagaagaaagctgagaaggagaaggctaagggaattaaccttacaaaaaagggtgcaaattagtctgaagatcagtttctcttttcatacaagataatatgctcctaccaagcagcagatgtttgtgcccaagagttcgattgaatgacaatgatgctgctttttggggatgtccagata

SEQ ID NO: 38393 - DNA, 127 bp, Gossypium hirsutum
  Clone ID: LIB3146-013-Q1-K1-D11
ccgaccacctcgattatatgtagtgatgatgttgttgtataactccaatcctttggctccgtaagatagctcactactgttttgaacatcgggtttctgggtaaacacgatggatttaattgatacc

SEQ ID NO: 38394 - DNA, 341 bp, Gossypium hirsutum
  Clone ID: LIB3146-013-Q1-K1-D2
cccacgcgtccgaaggaatttggttaataatatgcaccgtcgttatctatatattgtttagatttatgagtggatagaaaattgttgtgaagagcaagcttagcttcatgctttcctttgtttccacacctcaattccaaatgaaatgaatgaatatatcatgacagaggcattgatggctgatgatgaactggagaccgacaaacgggctgagctttaagaatgtgaatggcaggctgtgatttgcgcacctctatccattatatagtcaatatttgttactccctaaaatctgtttggaaaccttatttatagagtatctcgacattaacgggtgacga

SEQ ID NO: 38395 - DNA, 124 bp, Gossypium hirsutum
  unsure (1)..(124): unsure at all n locations
  Clone ID: LIB3146-013-Q1-K1-D4
cgacgctaccaacaacgaggagggccaagccannnnngcaaaaagagccagcagggcacgagggccgaacccnggacgncgccaaacaaaaaccacaagggcggaaggacacagccgagggagg

SEQ ID NO: 38396 - DNA, 345 bp, Gossypium hirsutum
  Clone ID: LIB3146-013-Q1-K1-D7
cggcgcgacccacgcgtacgctttgttcaacatgatgacattcaaggtgatgaccacctttatgtcccctcctcctgaagccacgttcttggcatttcatccacaagacaataatattatcgcgattggcatggaagactccacaattcaaatttacaatgttcgagtcgatgaggtcaaaaccaaactcaagggccaccaaaatcggataaccggacttgccttttcacaaactttgaattctctggtgtcttcaggggctgatgcacagttatgtgtttggagcatagatggatgggagaaaaaaaaatcgaagttcatacaagctccggctggtcgtcaatc

SEQ ID NO: 38397 - DNA, 330 bp, Gossypium hirsutum
  unsure (1)..(330): unsure at all n locations
  Clone ID: LIB3146-013-Q1-K1-E11
ccggcgcgacccacgcgtacgcccacgcgttcggcagttcaagtagagcacacaaatggaacattagatatggattaagcatatatatctaggattagagaaacaaaggtatagaaaatttaacattaaagttctcaatatacaagtgcaacttccagagcggaatagctgtattgtaatgcataagtgcataaaagaaagggaggcttgcagtagatgaagaatataatccccccaacccaaccacccccaagaaaagaaaaaatatgaagcaattatggganattannctctggggnnaaaagaannnggangaaaaaaaaaatacaa

SEQ ID NO: 38398 - DNA, 201 bp, Gossypium hirsutum
  Clone ID: LIB3146-013-Q1-K1-E8
cggacgcgcgggttgacggatgctttgtaaagcaccaaaaggactggtagaaccacagtcgggggcttaaatgactgtatcgaaagagtacttacagaataacttcttgatgaatgtttgtttcggagggacccaaaaaccggacaaaaaaattttggggggctcaccgcctataattcccaaaacaaaaagttgatgctg

SEQ ID NO: 38399 - DNA, 404 bp, Gossypium hirsutum
  Clone ID: LIB3146-013-Q1-K1-F10
ctttttcacatacctcaatttacgtgataagaagctacaaccacaaccggggctgcaagtttcatccgctttgcccaagtccaagttgagtgagggaaatggggagatccgcgatcggttcggtactgaaactgtctaacaaaaaaaggaatctatgaggatactggagatgctaaaactagattaaccaaacccttttgcataggaagctaatcatttcagtgttgatagcgagtaatgggttttaattatgccttttaacagatacaagggctttgatatgccaatatgttggctgaatattgagtttgatgggagatatgattattagcctctcttcacccaagcttttgactttgaagcaatgagtatgtatgatttaagtttattagatgaatgttggg

SEQ ID NO: 38400 - DNA, 174 bp, Gossypium hirsutum
  unsure (1)..(174): unsure at all n locations
  Clone ID: LIB3146-013-Q1-K1-F2
cnnagaaaagcagcagaggccaggaacccacagacagnngagggggacaanaacccgggcccaaagacaaacanacanggaaaggcagancgagccaacagcnacgacagcagacaaggaagaaaccgggccaggggaacgcacnacnnagaaggacgcccgggaaggaaagaa

SEQ ID NO: 38401 - DNA, 185 bp, Gossypium hirsutum
  unsure (1)..(185): unsure at all n locations
  Clone ID: LIB3146-013-Q1-K1-F6
ccggaccggaacgcccggggcgacccacgccgacgcccacgcgcccgggaccgaccggccccnngcgnaccnncccaggaggcaaagnggaaagacacgatggccgcggcccngaccgcaaanaacagaccaagaacgaaganggagacacncnggccgcccnnagacgcaagaaccaagacaag

SEQ ID NO: 38402 - DNA, 319 bp, Gossypium hirsutum
  Clone ID: LIB3146-013-Q1-K1-F9
aacgcgacaaagacctgatctcatacatgatattttaacaactttaaggaggaacatagacactccagtaacatgcaagatccgacttttaaaaacatcccaggatacagtagaacttgcaaggagaattgagaagactggtgtttctgctcttgctgtccatggaaggcaagttgcagataggccaagggatcctgcaaagtggaatgagattgctgatgttgtatcagcattaactattccagctattgcaaatggtgatgtttttgaatatgatgacattcagcgcattaaaggtgcaacaagtgcttcataagta

SEQ ID NO: 38403 - DNA, 171 bp, Gossypium hirsutum
  Clone ID: LIB3146-013-Q1-K1-G10
aacgggaggatgtaacctagatagtggactgatgtcagttctatttgttgcattatctctgccggtgaagctgtctgtacaacctttttatttgtattggaattgaatcaaacatctatgtttatgcaaccgaagcagatggcagcattatgctgttgtcgagacttgacg

SEQ ID NO: 38404 - DNA, 247 bp, Gossypium hirsutum
  Clone ID: LIB3146-013-Q1-K1-G3
ggcatgtataatataactactaggatccaagttagacttctgtaatagatgataggcgcttctgactgaaaaatccccggatagttcccttcgccatactcgaaaatcttcatgcgccggctctgccaatgggaatctgcatgatttgatttgctacggccaaacaaaaggtattcatcacaacctctactgtccagcttctagtcgtagcatctactaaatcagaaactaactcaatgttatcatt

SEQ ID NO: 38405 - DNA, 313 bp, Gossypium hirsutum
  unsure (1)..(313): unsure at all n locations
  Clone ID: LIB3146-013-Q1-K1-G4
aagaaagggcgatngcagaacgcgcagagatggtgaaacaatcaaaggagtactgggaatctcaaaccaaatatgtggtgggctattaactaacatttttatttttaaaaatgaagccaatgatgaatatgcttagctttccattaagctatggaaaacagagttaggcttagcttagctttagacgtattttgagtttttcaataattttattggaattattaattttttgtatgaacaagattaattattgaatgaagattgtggttaagggtaagccagcttgtggtgtatgaccaaatgtttcgactcg

SEQ ID NO: 38406 - DNA, 198 bp, Gossypium hirsutum
  unsure (1)..(198): unsure at all n locations
  Clone ID: LIB3146-013-Q1-K1-G7
ggcgcgacccacgcgaacggncgaagncgcggcagagcccgcccaggactcccnaccgnaaagaagaacaaggagaggcgcangaaaanggccggngcagnccgcaccggcgggaaggggagcaagagaagaaagaagaaggcgggccacaagacaacgaccacagacgacaaacggggacaaagcacccncaagaga

SEQ ID NO: 38407 - DNA, 309 bp, Gossypium hirsutum
  unsure (1)..(309): unsure at all n locations
  Clone ID: LIB3146-013-Q1-K1-H1
cacggaccggaacgcacggggcgacccacgcgtacgctnagaccaggtacagaggcagccgctggagcagacattacggcgnagagggcagcagccgcgggccaagaaccagcaangcagaaagggagagagacngccaggagccaacacagggaccagaaggcaggaaaaganaaacnataaacccggcaaaacacaacacgcacagacatagatttcaaagcgacggagtataacaacggttctgagatcttgaactacagaacttgcaagaattacctatcttgcctgcgactttgaaaattttat

SEQ ID NO: 38408 - DNA, 326 bp, Gossypium hirsutum
  unsure (1)..(326): unsure at all n locations
  Clone ID: LIB3146-013-Q1-K1-H3
atctcgcgaaagctagatttatttttaaaatgcattatgtgaaaagagaaataaataaataataataatgtgatagaaatacggataaccaaatgtgttggtgaataatattccatctattttcaatatgccttattttgtgttttgagtttatatgttaggatttgtgaaacagatgcaatctacactcttacttactagtctcattttttgtcaagttcttttctagctcttcgnggagggaaccttcgatgatattagttgaatgtgagaatgtcagttttatgtagtggataatgaatcagcttgaaagatgaaaaatacta

SEQ ID NO: 38409 - DNA, 353 bp, Gossypium hirsutum
  unsure (1)..(353): unsure at all n locations
  Clone ID: LIB3146-014-Q1-K1-A1
gaccaagccgtccgccaacccgtccgaaagtcttgaattgagaaccttttagcaagtgaggagacaatattatctatgagagatggtacagtgcttgtgataatgattctgtcaacgcactccattaagtggactctaacgcctcaaatttccaatatagtaattggtagtgatcagggaacatatatagtgaattttggaggaaaacttggaaataagttattaaatgaatgttcttatggnggaaaaacttcanngngattaatcaaaggacaacataaggttttgtttaaaatcctttaaggctctggtggatttatattcaaaataaggcagaaggaatgccttaaaaa

SEQ ID NO: 38410 - DNA, 217 bp, Gossypium hirsutum
  Clone ID: LIB3146-014-Q1-K1-A10
aaggaatgatactgcttacaacaactcttatctacaaccctctatctggtggaaggtcgtgggttataaactgggactcctcttattattatggatagcattacttgtactgcaggttaccaagaatagtacaactgcttgaccagcggtgtatagggtgttgaacttgctgcgtataccacgattatgatgtgtttctctatagaaaggacccatg

SEQ ID NO: 38411 - DNA, 345 bp, Gossypium hirsutum
  Clone ID: LIB3146-014-Q1-K1-A12
gcaaaataaaaaaaaaatggagctttcagctttttataatgaaaacccaaattcattatgatctgagttttctttatttttgtctatcaagtgacttttcatttttttgggtagaaaatggaaaacccagaagcaaatcatcttcctgaggtggattcattaccagatggctttgttgagagtcctacagattcattggctccaaaaactccaattttggaacaagaaaagcctttgcaatctgattataaagaagaggatttagttgccaccgagtttggagcaagcaagggccaaaagcaaagaacatttccatttccattgtctgaaggggacaggtttaat

SEQ ID NO: 38412 - DNA, 332 bp, Gossypium hirsutum
  Clone ID: LIB3146-014-Q1-K1-A3
agaaccggggcgacccaacccgtccgtttgcatcctgcaggtgacaccccttcatcttgccgactatttgatgctattgtgagccattgtgttccagtgattgtcagtgataagattgagcttccctatgaggatgaaattgactactctgaattctcaatattcttttctatgaaagaggcattagaaccaggttatttggtcaatcagttgcgtcagtttcccaaggatcgatgggttgaaatgtggaagcaacttaagaatatttctcatcatttcgaattccagtaccctccaaagaaagaagatggcgtcaatatgttatggagaca

SEQ ID NO: 38413 - DNA, 366 bp, Gossypium hirsutum
  Clone ID: LIB3146-014-Q1-K1-A8
acgcccacacgttctagaacgcccgacctttttcgtcctttaaaatcatatacaggttgggggtaacaattacctgatgcacctttcaaggagcaatgaataatcgaaggtgatgtttaaagttacttttttaattcactccaaatctttgctccaccagaaaaaaaaaacctgatcactatctgtactcaatacacaaactcaaactgatggtgcattttcttataacgcaaaaatgcttatttattaatcaatgtacaacatccattttgcaataaaaaaaatatcaattctttttgaactatagccaaaatcttaaatgtttatgccttacacttttttcttaaccgtttaatgtaactaaaa

SEQ ID NO: 38414 - DNA, 369 bp, Gossypium hirsutum
  Clone ID: LIB3146-014-Q1-K1-B1
gaccaagccgtccgccaacgcgtccgcccacgcgtccgcacacatgtctactatcaggagtatacatagggaatgtgaaggtgctagtgcgattgcaatttggaattgatggtccaaaggatgtagctatgaaacttgctgttagatctgaggacgaagctgttagtgatgccattcatgagattgtagctagcggctaggtaggttgtcgattttttgtttgtttgtactttttttaattaatttttttttgcatatagtccggcttttatactatttgtggctttatatgagacacgggaggcttatggctacacaacacgttaaaaatgaaaaatataagctagtaggaaggattgattgcttctt

SEQ ID NO: 38415 - DNA, 311 bp, Gossypium hirsutum
  unsure (1)..(311): unsure at all n locations
  Clone ID: LIB3146-014-Q1-K1-B6
tttttgacaattgaaacatggactgttgttatggaaggaaaatctgcatggtgtgagggtatccttatattatgcaaacaggctaggaaagttgagctgttgttggataaagtaggcaggtgtgcaggacctgtgaaaattacggttagatatctggattaagaaaggcatattgcggttttgtcctgtcaagcatgaaaaccatcctgctgtcactgaattacgcccactcagatctgagtgctgagatgctattttacagctgctatangctgtcttgctgtcatccgtgttgagaatgcaatagtgac

SEQ ID NO: 38416 - DNA, 372 bp, Gossypium hirsutum
  Clone ID: LIB3146-014-Q1-K1-B8
cttgtttcaatcaattaagcaagcttctccaatctgattcaaaggccattacagctctgaggagaaatccgtatttaatggtatgtaatttcgatacttatgtgttgcctaatatcaaaactttgatagataatggtgtgcctgaatcgaatatcgtaactatgtttaattaccatccatggtctttcgttatgttgccggatcggtttaaggagattgttaaggatgttaaggaaatggggtttaatccattgatggttaagttccttcatgctgtcattttgtttagaaaagtgagtaaacctgcgatggagaagtagtttgatgtttataagaaatgggggtggtctgatgatgagatttgggaacttt

SEQ ID NO: 38417 - DNA, 297 bp, Gossypium hirsutum
  Clone ID: LIB3146-014-Q1-K1-B9
cccacgcgtccgcccacgcgtccgatcacttcttatctagcgttagctatctttaagcattcaaagaagctttcagaagtaagggagcaaacagaaggtattgctatggagagacggcttccaatgccattattaggtgcagccttggctatcggaatcaatcttgctgccaagtgggttggttaccggcatttgacatggatgatagtgtgaggacagttaatcggtttcacacatctactgtaacgacattgatcttttgtctggaaataattttgtgtcatgtagattcatttc

SEQ ID NO: 38418 - DNA, 396 bp, Gossypium hirsutum
  Clone ID: LIB3146-014-Q1-K1-C10
atggaggcagtgactgccttacttggaggtagaatccatgttggggtactccttcaagagaagaaagtgagagatgacagtcgaactctattacaaaccggtatttcatctgaagataatttggatgctctgggtttcactttggagcctggtcccgtgataggtcctcgacctatattctccgaagaaccccctctacagttgccgcgtggctctgcccctcaaaatttaacaagctctttagtagtcacaccagccttagataccggggattccagctgccacacctgacccacctttactgaccaattcagcaaaacctgtggatagtaattatgaacacgtttcgtcccaaactgacatgctaaccgatcaaaatctgtcagagtctagagc

SEQ ID NO: 38419 - DNA, 365 bp, Gossypium hirsutum
  Clone ID: LIB3146-014-Q1-K1-C2
ttttaaaaggtattgtaatggcctttggtgcagagggatccagctcggagaaattttctcttgacatcattgaattacagtttaacaagtgctattgatgttcttgaatctattgatgcacatggtggggttagaaatctccttaaacagaagcagcatgttgagttcatacagaggtggcacttgttccggtacaagctggataaagcagtttctgctttgtcacattttgacttcgagatggcattctattacataaagtcttcagatcacgatctttatgcaattcacgatctcgtatacacttcatcacaagaaattgaagcatcacttgtttgtttcaaggacccaccattcccgtgggc

SEQ ID NO: 38420 - DNA, 149 bp, Gossypium hirsutum
  Clone ID: LIB3146-014-Q1-K1-C4
aaaacggacccccctaaaacggcgaatccggccttggccaaagcaaacgcaagatagatcaaagacaatcgtccccattattatgacgggaagcaggcccgcttcatgataatgaactcacggcttgctcatacgtgcacatgatgcag

SEQ ID NO: 38421 - DNA, 296 bp, Gossypium hirsutum
  unsure (1)..(296): unsure at all n locations
  Clone ID: LIB3146-014-Q1-K1-C5
cgaaaggattgaactgttgaaaaaaccacctcattttggtaaagtggaaggactccctaatccgattcttcctagtaagttatgaccttggctataattcctggtgctccatatatatatatatatatcatatcgaaaaagatcatccnccgaatatgctgaaccaagtttaaaacacttttgtatgatgacctcggtcttgcccgagttagctcacagatcatataaacaatgggttttggggggaagtattaaggagtcccctctcatttgtaattacatttctcaactttact

SEQ ID NO: 38422 - DNA, 357 bp, Gossypium hirsutum
  Clone ID: LIB3146-014-Q1-K1-D2
tcgaaacaattccgctggaaacttttggccctatttatggaaggagaggtcactttggcatggctgaagctgctggttggtttcttaaccatgaaataggaagatatgaaagtgcttgaaggaatatgaggttaaggttggcggagcattctcttcgagctgcattagcttcttgataattcctcatgagaagtaaaaaatggagcgagggtttagcctcaacattgtctctactgtaatttcacagtctactccaacttgcgtttccaaagaacttgctgaaaggtgttctggttttgttacgacaatcgtaatgcaaattgtgcccataaagaaggaatcaactttggccccctg

SEQ ID NO: 38423 - DNA, 334 bp, Gossypium hirsutum
  Clone ID: LIB3146-014-Q1-K1-D3
cttcgcttaaaaatcctggttttgggcctaggattcctatatattttggacctttttaaagaaaagaaaaaaaagaaccctttttacattttgtttcatggcttttatagcctgttttcactgtctgtttgttctctttgttgctgttgcgtgtctttctcattttgcagggcatggctggtgttggtggagcaggtggccggcagtcaggggcatggggctgtcagagggttggtggcgcaagtgggggtaggtttggttagggtttgctaattgtatgtgtttgggcctttgcttggttaatttaggtgggtatttgggctgttgtaaaaag

SEQ ID NO: 38424 - DNA, 234 bp, Gossypium hirsutum
  Clone ID: LIB3146-014-Q1-K1-D8
cggacgcgtgggcggacgcgtgggcggacgcgtgggcggacgcgtgggtttttacaacaaaacaaaaaccttataaaccctagcctctgccaggccttcaactcagccaccgccgctgccattcaaggccgatttatggcctcagtcatcccagtctccgatcgcgacggagatgggatgaaacgcgacgaagctaggtaagtttcttttcttctctttgtattattattttac

SEQ ID NO: 38425 - DNA, 172 bp, Gossypium hirsutum
  Clone ID: LIB3146-014-Q1-K1-E10
gcaaagggcaagagatcggttgaagaggataaaggccgaaccttatttcaaaaaaggcaaattgaacctggtgattgccacctgtttcaaaggaaaatcaactgttgttgctgaagaaaccaaggttaatttaactgcttcttttctttgcaaaagatttcgacttttaaat

SEQ ID NO: 38426 - DNA, 432 bp, Gossypium hirsutum
  Clone ID: LIB3146-014-Q1-K1-E4
cttttctgcaagggaaaaaagaaaagatttttttggatcaaggccgaaaatgaaatatgatggtaaacctccactggctgctaaatcgcctatccgcctacgaccccgtcgctcccttccatcaaactctgcctccctgcaaacccctccaggttctttaacgagatcccagaagccgattcttacttggggcattgaagaatccgagattcgacccgagtaccgctctatttcttgtgagttacgagttttggctcggacggttagagatgaacttggaaatggggaaacggaagccgctggtttaggcaagaagactgtgctcagcgtcaccaattcttgtccagtggtcgagagaggtcggttttacgaggaatactcggcgagaagaaacgagaggcttaagacgaagaaaggcgaaacccagaatga

SEQ ID NO: 38427 - DNA, 240 bp, Gossypium hirsutum
  Clone ID: LIB3146-014-Q1-K1-E5
cagcgttcggccagccttcgggcaaattcgatcctgttagattgagtacgatctctattgtcaaggcatcatttaagactaccgagagagcttgagaatatttactgaactggaggaggagagaagagctaggtaaaagcctgagaggcagcagctcggggtatgttatcgagtgatagtgaacgacaaattgagagactgaggactatttggagggctgcctatttacaacttgtatgc

SEQ ID NO: 38428 - DNA, 267 bp, Gossypium hirsutum
  Clone ID: LIB3146-014-Q1-K1-E6
ttaaactgaatctcaaatttttacacagggaaaaccacacctttttgcttaccattttctttcccggcacacaattggcctaatccccaggggccgggtttatgccaaatggagttttttgggagagaggaattggttttaatttaattggagatggttaaggccttacattccaattatgtgttaattccaagacttatgtaatttttaattatgtagtgattcaaagacttatgtaatgtttctaattatgtagtgattcaaaga

SEQ ID NO: 38429 - DNA, 338 bp, Gossypium hirsutum
  unsure (1)..(338): unsure at all n locations
  Clone ID: LIB3146-014-Q1-K1-E9
cccacgcgtccggtccaagagaggttgatgcttggccttatttcactgattgtagggcactgtctaaagatatggttgctatcttcttctccgagactgcaccgaggacatctgtcgttggcggtcacttttttgcatcttaggttagctaataaaaggaaatagttccaggagatccgccatattgttattgcaatttttgatggcatctgtaaatcccatagttttcgatagaaatttttagtttcgggttgtaataaatagctattaggatctaagctgttatactgtaatagtttataggcgcttcttattgagaaatccctngaaagttcttc

SEQ ID NO: 38430 - DNA, 228 bp, Gossypium hirsutum
  Clone ID: LIB3146-014-Q1-K1-F10
cccacgcgtccgcccacgcgtccgatcattttgcattgaaatgttctcgaaatgtaagggcgcttgtaagggtgtttcttagaacattaggaagaacagttgctgtaggggtcgtgacccgaatagttgaggagctggtatagtttgaagctaagactgaagacggttgtgtactaattcaaggctgacagtgattataaaatgagtaaaaggcaattcattttgtgc

SEQ ID NO: 38431 - DNA, 433 bp, Gossypium hirsutum
  unsure (1)..(433): unsure at all n locations
  Clone ID: LIB3146-014-Q1-K1-F3
tcgccacgcgttcgggtcaaaggattcaagaaattgaagtccgcaggactgccggttccatggttgaatggggaacgaaaatttattcagcgaagttggttgtgtatgactttgtttgttcatgactttatcagctgtataattgacaaagacatcaatgtttctaggtttaatgcaaaggaagtttattttaaagttctttcaatcaatttgctgcttctcagcacttctttcccctgacaactttccttatatgcagggatgtcttttttagcattcagtcagagactatcatgcaaaagtcatgcagggctttctcttctggagacggaacatcgacacctgtggttcagttcttcgcacatagttattggattccagcttgcaagtggcacaatacgtctnctcttcatttactttctttcatctatga

SEQ ID NO: 38432 - DNA, 434 bp, Gossypium hirsutum
  Clone ID: LIB3146-014-Q1-K1-F6
gggtcgacaccacgcgtgcgggataaccgacttggagggctaacgcggggttggaagcggtgagaaacccgctgtgccaaccgtgacttctgtgaggggatcaccagctgccgcctcctaaaaccggcgctggaatttgtttcccctcaacctgtttctggcgctgatatcctggcaccagctgttagagactctgtcgtaatatcagggggtccaagttgggaagtgcagatggggagaaaagacagcttgggtgctagcaaagaagcagcaacaaacaatattccaggtccaaattcaacggtgccaatgcttgttgccaagatccaaaacgttggactctcattcaatgacatgattgcactttctggtgcacacacgttgtgaatggctcgatgttcgacatttagttcacggcttcaaggctcaaatgg

SEQ ID NO: 38433 - DNA, 229 bp, Gossypium hirsutum
  Clone ID: LIB3146-014-Q1-K1-F8
cataactctagaggcacaggtggacgtgttggcggaggtggaggaggtggtggtggtggtggacggtctggtggaactgatttgaagcgctatgaatgtggagagcctggacattttgctcgggaatgccaaacacctggttgttctggatgacgtcacaaacgccaacctagatatcgtaagaacccaaactatcgtctcagaagctacaatgctcatggactgtccc

SEQ ID NO: 38434 - DNA, 425 bp, Gossypium hirsutum
  Clone ID: LIB3146-014-Q1-K1-G11
gaaaggtcacttagcaaaccatccactgccccctaaaacaacccaccaccaactcagtaaccgcaccgactcagcttcttcctcgtcctcttcatctggcgatgatgagcaagagaaaagcagggaaacactactcgaagacaaatctttggtttatgggttaagagagaatcccaagaagagtttcaggttcgcagatcctgaattctcattcgccggtgattccgcctccgtcgtccaagacagagagagcgagactgagtccaggaacccaactcggagacgatccaagagaaaacccaaggtgggtactgctaatgcaacaacagcaactgacgaaatcaagaaaccgaagctgttgacgagtttccccagtttgatcgactcaccggcggagccttgaaccgtgagctcagtctccgata

SEQ ID NO: 38435 - DNA, 401 bp, Gossypium hirsutum
  Clone ID: LIB3146-014-Q1-K1-G12
cccacgcgtccgcccacgcgtccggaaaggactgttacaggttattgaacaccaaccaggtttctcctatctcgatgaccccatgaatcctttatatacccttttgcctaaactacgacaagtgcttgttgaaagggctctcaaggattgtaaaggcgatgaaaatgggttttcaatattcaaaaggatcccagttttcatagaggaactcaaggaaagactggaagaagagttaccgaaagcaagaacgaaatttggaaatggagagtttgggattgctaataagatcgaaaaatgcaggagttatccgatatatggatttgtaaggactgaaattggaactcagcttcttattggtgaaaaaagggtgagtccaggagaggatatagagaaaatttatg

SEQ ID NO: 38436 - DNA, 355 bp, Gossypium hirsutum
  Clone ID: LIB3146-014-Q1-K1-G5
cggacgcgtggggccggtcggtgcctcctctcttccatctctttcgtgtcgattatacaaattctgaacttgtgaccatgatgtcttgaattttgattttgcatctacccttctttgatacaacactgcatttggtagactagttttccctcattcttttccaaatgaaccttttcttcgaggatctgatgcaatttcatcatgccatggaagtgtctttttggtgattttctgatgttacaacgtagaatttatattccaaatacagatatttaacatcatctgtttattactctgatccttgtactgaaaaaaaaaaagggaatagaaaatgaaattctcgattaaggatggc

SEQ ID NO: 38437 - DNA, 369 bp, Gossypium hirsutum
  unsure (1)..(369): unsure at all n locations
  Clone ID: LIB3146-014-Q1-K1-G6
ccaggaaaaaattgacccattgttgccaccaactcttatggagcctaaaggcgaccatagggcctggtaattactcgatggaggtaccattgcaagtgagaactatagggtgagattttaaaaattttcatgtttacgtctcattatgattatacaaacacatgattaagattgtgaaagatgattacagaataagcaagtgctgttagctgtgcagtatagaaaacaaaaaaaaaaagaaaaagaaaaaaggagggatttcttgacagtgtcatttatgatgaagttttttattcttcattttattattctctatgataccatttatattcaatgaaggaaactcatactgaatagtttttattcnna

SEQ ID NO: 38438 - DNA, 352 bp, Gossypium hirsutum
  Clone ID: LIB3146-014-Q1-K1-G8
gttggttgatgctgcggtcaggagttcgagctctgataagacagcagtagttgctctcgcaggtggtgttggtactcttgatgagatgtttgagatactggcattgatccagcttgaaaggattggatcagagcttccggttcccttcattgtaatgaactatgactcattctatgcaaagctcttagattttcttgatgattgtgaggattggggtaccgtctctaagggagaggtttcgtctttgtggaagatctgtaacactaattctgatgctctagtgtacttggcagagttttatgatctgccattttcggatgaacacaagcatggaacagaagcgagaagcgca

SEQ ID NO: 38439 - DNA, 397 bp, Gossypium hirsutum
  unsure (1)..(397): unsure at all n locations
  Clone ID: LIB3146-014-Q1-K1-H2
tccggagtgtacatgatgtatgggggtctgaccccacccttgttggtcaagtgggtttgtgacatggcggaaaagttctatggcgtgcagcgtaaaaatccatttcaagatatgttcggagacatgctgaaggtgagtgatgcatccaactaatactcatcttatcttaagctgtttattaacaacaacattccttgtgcagatgatgtgatgagttgtcggctcaaatccctttccagtttctgattagagaagcaatttccttttcatctccaaatatttatgatattgtttcctatttatttataatattaattaatgttataccctttgtaaacaagatggatccattctttgttaaatcaaattttgcctccgnnnaaaaaaannnnnnnna

SEQ ID NO: 38440 - DNA, 394 bp, Gossypium hirsutum
  unsure (1)..(394): unsure at all n locations
  Clone ID: LIB3146-014-Q1-K1-H4
cttcggtgtaaaatcccatttgaagtttgcaatttccccgtaaccgaaactcgctttcaccccctccctccctttgcttggttgaaagaagggaaaataagtaggatgtgtggatcaaatatgttattgggttttagggggagcataagttcttgtttcagaggaaccacaatacgagacaaggggaagctggagcaagcagaagagaagatgacatttcaagagatcaattatgggtcttttagcatcattattccttgtttctcaaagcaatgattgttaattttgccttgtcttttcattttgaaacaatatgtaattttgaatagctaaagctgagttattcattagaactcaatatatatatatctgngtgtgtgtgtgtttgagctac

SEQ ID NO: 38441 - DNA, 303 bp, Gossypium hirsutum
  Clone ID: LIB3146-014-Q1-K1-H9
aagacattggtctccatcaaagatgtaaaagctgctttcataggccacgatcatactggggacttttgcgggaatttagagggaatatggtttcgttatggtggaggctttgggtaccatggctatggaagaattgtcttggcacggagagctagagtcatattgcctgaacttatgaagggcgataatgaatggatggtagtggagaggatcaaaacatgggagcgtattgatgacgagaatctcatcaagattgatgagcatgtgctgtgcgagttgtcaccatctatatgattctctttt

SEQ ID NO: 38442 - DNA, 302 bp, Gossypium hirsutum
  Clone ID: LIB3146-015-Q1-K1-A10
gttggagtggagaattcaacgggacgcattcacctgcccttgcgcatttctggctacaatccccgtcccagatttgaaaaaaaatccttatcaaaggctgcgtcaaaattaagtttgatgcatattcccaaagggggcttccattttgcatagatcaccttcctgataacccccttttccttgacgccttctatttctttcatgtatcattgaatgaaccttgatatgtcaaccgccgatttagcataaaaaaaaaaaaaaaattcgataaaaattttattaaaaaaataaaaaagggtaat

SEQ ID NO: 38443 - DNA, 225 bp, Gossypium hirsutum
  Clone ID: LIB3146-015-Q1-K1-A12
gtcgaatgtttcagatttaagattcgttgcatattattgtaaatggataagaatatgggattgttcttgtagctggctgcattttgaagataaaaatgtgccttgctaaaataaacaacaatcctttcaatttcctgtttatagaatgtatgccattatggggttttaaaaaaaaaaaaacatgaaaaaaagttcaataacatgtaatatttgtttataaaaata

SEQ ID NO: 38444 - DNA, 439 bp, Gossypium hirsutum
  unsure (1)..(439): unsure at all n locations
  Clone ID: LIB3146-015-Q1-K1-A4
gaaaaaaaaaaacaccccccttttccatttgccttctctgctagggtttataaaactcatcatcgccaccgtcgtcatgcctccttgaagccacccatgatttccaccgtagacggtggtcggggccacgtgaaatcgggttagtctcttcttcttctttgattcttttttttgttttaaagtaagttaataaataaaaaaataaaataaagtaaaaaaataaatataaagatcgagataacagaggaaaaaaaatcgaagttaaccttctaaattttcttttttgtttttgatttctgatgttcgtaaccaaaaaaattacaaagggatgtttcggcttttataaccgaattacatagattcngttttgtttttttgcttggtgtctgctactattttttggtttttcttcttggttcttggattttgcatgttagtt

SEQ ID NO: 38445 - DNA, 451 bp, Gossypium hirsutum
  unsure (1)..(451): unsure at all n locations
  Clone ID: LIB3146-015-Q1-K1-A6
gtttcgtgcatcatcatgtacatatcattacaatcatataatttagtccaacaatttaacatagataagttcatttcattataatccattatcttataaaaattatatatcattagcattcatcaacattcgacgtccaaatcaagacgaggacattttcattcgtatcataatattatgacttttattcatacctctactactttctatttattccgttcatcttatcaagtaagccatatacactacatcatataagcattaagcaaatatgaatatttatcacatatgcatcataaacttttattcatacttttctgaaccgagacttatcataatcataattgtactcaaataccttcacataacattgaacatggntggggcagctcggntggagagnaccctgtctaaataagacggtactcatacgcgtcgaaagacatgacac

SEQ ID NO: 38446 - DNA, 346 bp, Gossypium hirsutum
  Clone ID: LIB3146-015-Q1-K1-A8
cccacgcgtccggatctggactaaagaagctgatatttcttgtggaaggtgatccggggacttcagaagctgctgaaagcatcaaaacagcgtgcttcacaacagagatcctggaggggtttgatgttcagagaacaagtagtttacatgataccctgaggaagtatgcgtgtcttactcgagcaatagctcaatattataagctgcatctgcctgagggccattctaaattgtctggggtctgtcctccctttaatgaatttatcataaggtgccaagaagctggataaaaatgaccaggcagtgatggatattgccattctactttatggcccgtacccccagg

SEQ ID NO: 38447 - DNA, 338 bp, Gossypium hirsutum
  Clone ID: LIB3146-015-Q1-K1-B12
acggtcaaatgttctatattggaccatctttttttatgatggtgatcagagaaaaagatgcgactgctttggcaatgggctacacttcgaacatataaaaggaacctctcttagattaacgaccataatcagacccttatgtgtattcaatagaccccatcatgtggttgctttgataagatcaccggacaacttgttcaaggtattttatatttctcgataaaatacaggacacaccatttgtgaatggggtatatcagggaaatttggatttttcttttcacaaaaacctgtgtgtaactcttacgaggggcacaatagtgatacaccagcaattt

SEQ ID NO: 38448 - DNA, 396 bp, Gossypium hirsutum
  Clone ID: LIB3146-015-Q1-K1-B2
ggtaccagcacataagttgtatatattggaactataaccatttaatttgttctgctttcatggataccataagctttgcctcttagtcttccttttataattccttctgaaggcctcataggaggtaagggaattctgttttgcagattctaaagggataaaaaattcaaagagtaaaaagaagaaccgaagaagaaaagatcagcagaagaccacatctgccaatgaagccattaaaaaccataataaggaaccaaatggtcttaaccaagtgtgccatagtgccgaagttggtcagaaagttcgggctggtgttggtgctacctcaaacttacatgatgtcgaagataatatttttgacaataagaatgagcttgatgatggtgatattgatga

SEQ ID NO: 38449 - DNA, 340 bp, Gossypium hirsutum
  Clone ID: LIB3146-015-Q1-K1-B7
acgctgacgcgtggttgaacatcttgactagttgagggagctgggttctggtacatttgggactgtatatcatggcaaatggaggggatcagatgttgtcatcaagagaataaaaaaaagctgcttcacaagtcgatcatctgagcacgaaagattgaccaatgaattatggcgggaagcttacatcctgtcaaaactttatcattcaaatgcggtcgcattatatggtgtggcgcaagatggaactggaggaacaatggctacttgtacacatttcatgtgttatggttcccttaagcatgttttactctccaaggattggcagcttgatcgtatgaag

SEQ ID NO: 38450 - DNA, 317 bp, Gossypium hirsutum
  Clone ID: LIB3146-015-Q1-K1-B8
acgctgggggacggttgattgaacagacggctatagagaggcatgatgaagaggaccatgcggctaatatactcaaggaactggttctagtcatcaactattgacctgatatgcgtgatgggtatggtgatataaagcctgagaatatacatgatacagttactgaacatatgaagctagcacatcttgtattaactgatatgatgtcaaatgtgcataactggacatgtagagtaggcaaggctgcttatgtatgcctaaatgtattaacaggccattataccgaaaaagtagacatctggagtgatggtgttcta

SEQ ID NO: 38451 - DNA, 358 bp, Gossypium hirsutum
  Clone ID: LIB3146-015-Q1-K1-C6
acgctcacgcgttcgacaacgcgtgcgctcaaacataactgaaaacataatcatatgcaaaccctactccatcgatgacatggtctcaagctaatcagtgcgcctagtattgtagtgcatgaaggatatggaacccatggcctcaactgctctaacatgtgtacatgtgcgacgtcaaacgggtcgacgtataaagtattagcagcgtggaaggaacactctaactgctagttgcaactgagcatggaacctaaacatgcaagctagaaccactcgagaccgatatactacatgcacatgcttgcaaactgtcgataggaccatatccggctttaatactaaattggctggcggtctt

SEQ ID NO: 38452 - DNA, 316 bp, Gossypium hirsutum
  Clone ID: LIB3146-015-Q1-K1-D11
acgataccctactctagaaaaatccgactccttttgatgttatattcaaaatgggagcatacaaggtcttttccgagttatgccgcacgttcagatcgttaactatacgagaaaccaagctatacttgaagcacttgaggattccgaccgaatccacatggaggattacgatataggtttacgagctcaatgggcttattgtatgcatgaacttcctatgaggagcaaaggagttcgaacgtcattgacaatgacagctcatgttttcatttagacataccatactatcgaactcatgattataagggaaaatctt

SEQ ID NO: 38453 - DNA, 431 bp, Gossypium hirsutum
  Clone ID: LIB3146-015-Q1-K1-D2
cacgcgttcgaggacgcgtggggtcgtgactcagcaacctcgttagctcctggcttccggttccaccccaccgacgaagaactcgttcgttactatctaaaacggaaaatcttgaacaggccttcctttgatgccatttctgttatcgatatttatagatccgagccttgggatctccctgataagtcaaagctgaagagcagggacttggagtggtactttttcagtgcactggacaagaaatatggaaatgggtcgaggaccaatagggcaactgagagaggctactggaagacaactggaaaggaccgtgcaattcgctttaaggaaagagtggttggcatgaagaaaactcttgtttaccataaaggtcgtgccccacgtggcgaaaggactaactgggtaatgcatgagtaccgtcttactgatga

SEQ ID NO: 38454 - DNA, 342 bp, Gossypium hirsutum
  Clone ID: LIB3146-015-Q1-K1-D5
acgcgcgcggggtttttttgctgtattgagggattgaatacaccaggtaacaactgatggatcatcaagagctaaactagtctcacacaagacagaagcgctataagagcaggaatacacgatggagcaagacccagctgagctttaggtggcacaggaacgatcggtacatgccaggcacatcagcggacaatttttaaatatcgacaatcccgagttggtagctgagcacagttcataggaacctcagacatatatagcacctaacagtcttattgcatcacctacagaacaatcagctcctgtgatgtatgcacggctagcatctaaaactgataaagc

SEQ ID NO: 38455 - DNA, 374 bp, Gossypium hirsutum
  Clone ID: LIB3146-015-Q1-K1-E11
cccacgcgttcggtaaaaggttgtcttaacataaccacaagatttagtgttgattcagagaaatcagtgcatgccaaaacacaggcaagccaatcagttgaagaaattatagtggaagattctgatacagcttaagaaactgcatgggcaattggtagtgatatatatatgcggacaattgaagatagtgatttttgaattgaagatagagatttacgattgaagattaatcattgttaatgtttaaatcgaatgccatttattcgttattatgcaccttcaatagctcaatatttgcctggccccgcgtataaattaacataaccaatgaacaatactgtgttcaattaaacagtcctgattaaaaaaaatat

SEQ ID NO: 38456 - DNA, 448 bp, Gossypium hirsutum
  Clone ID: LIB3146-015-Q1-K1-E12
gtgctacaatgattgttcacaaatcgatgctttcttaagaagtgatcagaaccgttgtgctagtaaacttctttctgcttatacagaaggtgatgtagaagaaatcaaacgtgtagatcataaagcttgcaaggaagttgcctactggtgatgtggctgaactaaaggaagaagctgctaaaggtgaggaagaagcactggatgaaaatgacctgacatgagttttacctgtaagaaattgtttcatcctctgcatccatgggatttgtgtgtgctgctcatcccatcctttcttttcatgtaattacataggcatagaaacatgttccatttaagtttgctttaactcttgttgtgctttgcctacttgaaaaagaatgatgtttaatcatttttaaactgttgcttgtttatacgagtgggcttcacaatgcaattgcccttattg

SEQ ID NO: 38457 - DNA, 265 bp, Gossypium hirsutum
  Clone ID: LIB3146-015-Q1-K1-E6
tctttggtacacaaaatcttgcatatatagcattcttgtcggttctatgagactgagacaaatttataggtataccgactgtctaccatattcgtggaggcacagatctgtgggcctttttcacgctataaaagaatttccccgcaactgatgaatatcagatgctgagggcgggaacaaaagcttataatcaactgacaaaagcctacattcactccctcagaaacttacaaggccctgtaactgtccctatgcatcaaaatac

SEQ ID NO: 38458 - DNA, 395 bp, Gossypium hirsutum
  Clone ID: LIB3146-015-Q1-K1-E8
acggactagttctacccacgcgtccgatttgctgcttgttgaacacgccgattgacttcactatcgctcaacactcgtcttacactttttttttttgaatctgcatcttttacaggccatattggagatgctttttcccaaatacacacgcaatcatttatgtggttgatgcaagtgacactgattgaattggaatagccaaggacgaatttcatgccattttagagagggacccatggcctcaggtttctgacaatgctaaggacctggtcaagaaaatgcttaatactgatccatagcagcatcttacaatacacgaagcccttggaaaccttctgatgcatactatatctatggcgatatatatctgctatgcatgaaatatcatgccaact

SEQ ID NO: 38459 - DNA, 281 bp, Gossypium hirsutum
  unsure (1)..(281): unsure at all n locations
  Clone ID: LIB3146-015-Q1-K1-F2
ctacgggttaatggcttcctttttttattttattaaatgttagaaaatgctatgtcaacttttatgattcagggagcttggagaaaccgagaccctgcangcttatctcctatctttggtatctctntaaccacaatgaaattgtttaatttcatatgtttaagggtgttttattgactcgcatgaaatccaaaaacttgatggntnaaaaaaaaaaaaaaaaaaaaaggataaggtttttccaaactcccttaataaaaaaaaatggaaaaaaaaannaa

SEQ ID NO: 38460 - DNA, 377 bp, Gossypium hirsutum
  Clone ID: LIB3146-015-Q1-K1-F5
tttttggccatcgaaatttgtgaaatgatgctcttatgtatctcagatctgagtgagacttcttgctctgtaatggcgggacaacgttcactttctttataaaggacgcttaacgaaaataattgatagcttatttgagtccttaattctcggtcgagagggccgaataaacagggttaacattgtgatggaacattcaggctgatgttgcacggtgcacgtacgataaatgtccggcgtcttttgaccggagactgtatgtctgacagacgaagaccgatttcattaagctttttggaaaaatgagctcgagaaatttcaacactttttgttgtcgagaaaagaggaaagaatacatcatgtagattgaaggaatt

SEQ ID NO: 38461 - DNA, 294 bp, Gossypium hirsutum
  Clone ID: LIB3146-015-Q1-K1-F9
acggaatatgtctggagcatggactaacaacataaaggcttgaatcatacacaaaacaccgagccgacgaagctaaacattgggtgcgagatgtaacggtccgagcccagatcgggcagttcgtgaacctaagggaagtattgggcgcagtattcaatgaacaacgtgactaggatgttactatggaggcaacatttatgggccgtatatcgtcggcccaagatacaacatggaggtgatgcacataacacatgaatgattttggctattacgtgtgatctattcgggggatta

SEQ ID NO: 38462 - DNA, 198 bp, Gossypium hirsutum
  Clone ID: LIB3146-015-Q1-K1-G12
acgctcgcatacaccgaaagcgctcgcatttttatttattacctttccacaacggaacggggcattttttaggaatcgaataagctaactaacaaagctaaaggtgtgtataaagtactagatttaatggaatttcataggttaattaaacctatgagggcttaatttgttgggattacaatcaagaattcatcaaaa

SEQ ID NO: 38463 - DNA, 367 bp, Gossypium hirsutum
  Clone ID: LIB3146-015-Q1-K1-G5
tctaaagcagggaacgtgcttttttatggttggccagaattgttgggtaagcggactaatattggatcaaagagaatgggtgagcttgatccaaaggctctgcatgacactagtgagtcgcgattcccttctgatgaagcggaaattcaagccactactctatgctcatcatggcaagtgaatctgaaaaatccagattggcattcattcaaagttatcgtgcggggagggaatactaaggaaattctaaatgaggaagatgagatactgacacatctgacgctggaatggggcgaagagatttataatgcagtggtaacagctttgaaagaactaaacgagtataatcccaagggggagatatgta

SEQ ID NO: 38464 - DNA, 128 bp, Gossypium hirsutum
  Clone ID: LIB3146-015-Q1-K1-G7
acgcgtagatgaagtcataccataattcctttggcaacaatgtttcttgtctcttgcaatctaattttaagtcatgtatttctgcatatcaattttcagtgtaagttgaaacttaatatatagtatgt

SEQ ID NO: 38465 - DNA, 196 bp, Gossypium hirsutum
  Clone ID: LIB3146-015-Q1-K1-G8
ttcacacgttcaaaaatggacggggggaatttctttttaatccttattgagaactcgccgaacaggcatgtcacgtctccaaagagaaaaaccggttttttcaagaaggctaaggaccttacagttttttgcgatcctggagtgaaaatcttcatgttttccactactggaaacctccatgagttcatcacccctt

SEQ ID NO: 38466 - DNA, 313 bp, Gossypium hirsutum
  Clone ID: LIB3146-015-Q1-K1-H10
acgcccacgcgttctaccgatgcatcactttttatttatgagaggtaaactattcattcgggggactgttgactaccctgactcgttgaccccagaccaatgcaaggcactggaggctgtgctttctacaaggcataggatcagctgactgacatggagctggttgagtgcgaggaaacaaccatgcatgatgtttacattgatgaagagatgcgtaggaaacaggctcaagctcaacatgaagcttatgatgaagatgaggacatgcatggtggtgcgcatagagtatcaatgcgctcaccaatgattaaaa

SEQ ID NO: 38467 - DNA, 387 bp, Gossypium hirsutum
  Clone ID: LIB3146-015-Q1-K1-H12
acgaccacgcgtacgaccaagggaagcttagttgattaaaaggtgcaaaggaagggtatttgcattgcaagatgaacctgaagtatgtacagtatggttgccattagacgatgcaccagggctagccatggctcaagcgtttggagattattgcttgaaggaatacagggtcatcttcatgcctgaatttttccatcgtttacttacataaaatgatcaattctttgatctagcatcagatggggtatgcgatgtatagatcaatgaagatgtagttgtgattgcatcatcggcttcatcccgcacatcattagccaggatgttgtgtctctaatctgcactagaatggaaactgaagtacactacttaaaagatggatgattgcgc

SEQ ID NO: 38468 - DNA, 246 bp, Gossypium hirsutum
  Clone ID: LIB3146-015-Q1-K1-H4
tttgggtgtcaaaaagtctttaagcttagtgctagtgttcagttttacatatatgatctataatatgatcgtttttgagtaatgttttgtggcaatggtttacatgtactctctttttgtaataaaataaacttttgtgtcggatacgtatttatatccgtagacggtggctttagctctccaataacaaaaaacatttttaaaaaacaaacattttataaattatatattaaaaaattgaaaact

SEQ ID NO: 38469 - DNA, 229 bp, Gossypium hirsutum
  Clone ID: LIB3146-015-Q1-K1-H5
attctatataaattttaccctattttttttttattattcttaaatatcctatagagggcctttttctgaagcaaaaatcactctcttctaattaaaaagagcataaaaaaagctgtgtgttatacagcttaattaatgcctcatataggatggcataaacttatattagtgctaacagaatacatggttctctattgttaaaaccacatgttaatttatgggtataaag

SEQ ID NO: 38470 - DNA, 259 bp, Gossypium hirsutum
  Clone ID: LIB3146-015-Q1-K1-H6
ttctgctattggggcaggctatattattttgccctggtgggccggcacaagcattgcttgggacacttacaccagacatagcagttctcacactctagtacaggataaatgggctgggtgtcgccatagttaatgactataaaagtagcgaaggagacaaagctctaggattgcaggcacttcaccgagcctctggagctgaaacagctaaatggatcagtgtcggtgctattgacatacctcaaatgtctatacgctg

SEQ ID NO: 38471 - DNA, 298 bp, Gossypium hirsutum
  unsure (1)..(298): unsure at all n locations
  Clone ID: LIB3146-016-Q1-K1-A1
aaattaaaatttttttattaaaaaaaataaatctattggtaaattaatttttactaataatccaaataatttcataataaatttagaggtggttgatttttcaaattatccaacattgcataaattaaaaatttacctacttaaatatttaaaatccaaaaccctaaatttgaatgagttcatatacggcatctatatacagaaagaaaaatgggggagggagggtggcggttcaaagcaagcttgaattgattctgttatgacttctncaagttcctttgatctttcaagtatttta

SEQ ID NO: 38472 - DNA, 376 bp, Gossypium hirsutum
  Clone ID: LIB3146-016-Q1-K1-A11
cccacgcgtccgtgtatgttgaggtctaatcagcttaatttcgaattagtttgttctgggtgttttgctaacagactgtagatataaacaatctttaaacatattggattttgctcaaagagtattgattctctgaagaattgaagagaaagaatggtggcagcgaaattggaattaaccaaagattagaaagcagagctcaagatccatggcttctgctctccgagattggaaggagaagtttcttcccatgtatgaagattttataaaatgcataggctgaaataggaatattggttgaagcaaatgtacaagacgctttaactttgtaatttgtcatcttgcaacttataattagcagcaaaaagctgttttt

SEQ ID NO: 38473 - DNA, 297 bp, Gossypium hirsutum
  unsure (1)..(297): unsure at all n locations
  Clone ID: LIB3146-016-Q1-K1-A2
aagggagaaaatgtttattttcgcagagagagtggggtggaaaatccaaaaccaggaggaggcggtggtgcaccagttctgccaagagattggggtgaagagaagagtcctcaaggtgtggatgcacaacaacaagcacaacctagccagganaaacccttgtaattccaccgccaacgccactgctgctgctcctactaccactgctgcatgactatgatgatcaaagtcaaaacgccaatttaatcagtatctctcctctttcagcctttctagtaatttgtgtctcatttcatt

SEQ ID NO: 38474 - DNA, 195 bp, Gossypium hirsutum
  Clone ID: LIB3146-016-Q1-K1-A3
acccacgcgtgcgcggacgcatggttcacatctatctttctactatgttcgaccagggccttgcatatattaaaagagcgggacttgactcatatgaggcagaatattgcctagggcacaaggcaaaggctgtatggagctattattatgtttgtgtctactcactacaaattctgtaaagatactgaccgcgcg

SEQ ID NO: 38475 - DNA, 336 bp, Gossypium hirsutum
  unsure (1)..(336): unsure at all n locations
  Clone ID: LIB3146-016-Q1-K1-A9
ccacgcgtncgcttgtattcgttggacaagttctctccctgtcgtctctttcctctcgtgcatgagctgatttctggagaaccagattagccataaagcaatacagaaaatgcggcattggttctcagttcctctcttgaaaacccaggacattgtctgaaaatatgaggactgtcttcaaccccaacatggcaacgggggcatctgtcacttacagtaatccttctatatctgagatttgctagatgggggatgaaatcccaagagattcgccagatagttatagtaatttttgaaggaagttgtaaaccccattaatttttgtaaaaatttgta

SEQ ID NO: 38476 - DNA, 195 bp, Gossypium hirsutum
  Clone ID: LIB3146-016-Q1-K1-B1
accacgcgtaagatgtgtttcgcccggtttataacctgaaaaagttcccaagaggttgttagaatttttccttttaaagtttggccatgattttggggggttcttaaccctttctttttggttcacccatttatggaaatgcttgcgcctaggttcacttcccttatttttaactggccatttgccatttttttt

SEQ ID NO: 38477 - DNA, 230 bp, Gossypium hirsutum
  Clone ID: LIB3146-016-Q1-K1-B10
cccacacgttctataactctcttccgcttttgttttgaaacccatcatcgtccgtcgtgcgtgtctatttccaacacataatcggtttttagaaacaaaacgagactggctttctggtcctttgataagacacccccgaaggccattctttcttagtcctaaaagtgccgacaaaaagggtcttttcccaacatattagatccgatcccgccgactgaagagagaccttc

SEQ ID NO: 38478 - DNA, 314 bp, Gossypium hirsutum
  Clone ID: LIB3146-016-Q1-K1-B12
attgacacctcatcaagctctcatggttatagaatgcttatctcgtaaccagtgggagggggttgttgctaggagcttctgtgttctaccctttgattctaggtttcgattctccttacaatcggaggatgatagaaactcactattctctacatcttaaaaccaaccatgtttcttattctaactccaaaagttagttggcaattatttatcacaagggctgttttcatgtaatctattgcctagcaaaccgatgtcattgtacaatacctatacctgggaaaaattttaaaccaaagaagctttttttcttt

SEQ ID NO: 38479 - DNA, 404 bp, Gossypium hirsutum
  unsure (1)..(404): unsure at all n locations
  Clone ID: LIB3146-016-Q1-K1-B4
ggtttttagttaaaggttttggaaattgcattatcctattaaccaatggtgtttcagaagaaaaagtcttttacgtgatagttggttgatctttgtggatggatttctgttattgcataaggatatcagtgccaacagattttgtcatcactgaagacatgatattgatccttgcaggatgaatggagggatacagtacacgttacaacatggcattagagagctcaatttaacacatgtaagacaacagagttcccaaaatattgttctgtcaaatctcaaagatgtccttagttttcagaatttctcagaccatgaatccattcaaagtttgtagatagttagtggcaaggtattttatttttatgatgtaatttcattgtaatctncaatttttagtagtg

SEQ ID NO: 38480 - DNA, 332 bp, Gossypium hirsutum
  unsure (1)..(332): unsure at all n locations
  Clone ID: LIB3146-016-Q1-K1-B5
atggttggggccaaggttaaggctgggtggctggaatctgcttaactgcacctccaggaaggcaagatctgtaatttccagcctattaccctactgcttagggggtttaggcttggtggcttaaatctgcttcactgcaatttcaggaaggcaagattcaccgttgtgatttcaatctgtcccactgcatcttcaggggtgttggaattttatttctttagtctgttacaccattctttagagaacatgatctatttcatggacctatttatgcntaaatgataagatgtcatgatcaaaatggatcaaatgctcctaactagatgtgcatg

SEQ ID NO: 38481 - DNA, 248 bp, Gossypium hirsutum
  unsure (1)..(248): unsure at all n locations
  Clone ID: LIB3146-016-Q1-K1-B7
gaattacccgggatctctagaggatcaagcctgcttgaaactgtggtatccatgataaactcatattctgcagaaattttcnntatgcaggcacctacacgtggaaagagttaaatatgcactcataacttcctcttaaaaaaaaagaaaaaaagaaaaaaataaataaaattaaaaattgcttccaaaaaaaaaaaaaagaaacaaaattaaaacaaaaataaaaaatggcggggcggtctgttcta

SEQ ID NO: 38482 - DNA, 403 bp, Gossypium hirsutum
  unsure (1)..(403): unsure at all n locations
  Clone ID: LIB3146-016-Q1-K1-B8
cgcacacgtcgccnacctcactccggttttatgttcctatttctgtttcacatacctgagccgcatctcaatagtgctgaatcaattatggtttcaagtacaacctcaacatgccccttttttcctataaataattgttggcatagaatgtttacaacgatggtggggtgtttctttttttttatcttcacttgtacttttggttattgcttgtgatgattatataacaatgagagttatcattaataaaaaaattcgaatctttatttctatttttaatgtcccaattattttttaactttttttccattactttttattattatcctttttaaaaatataggggcggcctttttttaagttccaaatttttctaccctttctttccaattgaaattttttt

SEQ ID NO: 38483 - DNA, 264 bp, Gossypium hirsutum
  Clone ID: LIB3146-016-Q1-K1-C6
ccgcccacgtttccggccgttggaaatgttgtcggtgaggggaaaacctaaggaagaggaagaagagtgttcggagttgtggcattccctgcaaggaacacatggatagttccaactattattctcatttcattattgattgttggcactgtataattatccattcatagtttgattgaagaacaatttgtcaccactttgttctttgtaacataaagttctcaaatgttgtcactgaaccataaatgccaagtgattgtttgt

SEQ ID NO: 38484 - DNA, 362 bp, Gossypium hirsutum
  unsure (1)..(362): unsure at all n locations
  Clone ID: LIB3146-016-Q1-K1-C7
atgcccacctggaggacaagngtaacatcaggataatcaaccccacgagcagatacatctgatgttacaagaataagtccttttgacttccggaattcatcagatacccttgttctgtaactctgtgattttcttgaatggatctctctaacattcaggttcatttcacgaagaacatctgctaccaacttcgttaccatagcaagagtgcagaatacgagaaccttatagtcaacatcatctgcaatatgttctttcagaagaacatacagtagggaaaactgcttatctagtggagcaaccatgtgcacttgtcggaccagtgaatgttattcttagtgccttttttgattttttttttt

SEQ ID NO: 38485 - DNA, 355 bp, Gossypium hirsutum
  Clone ID: LIB3146-016-Q1-K1-C8
gccacgcgtacggaaaattgaaaggattcttcaatgcgggcttcgaagctatacttggagagagcgttgacgtcattgacgacgtcacttgcagtgtcatatggggaagaaaatctgtgattgaagaaatccgagactcttgcataacccgcgagatatagcctgacatattggcactatttattgaactaagtggagatccagctggcaattgaactgacgatagtgttatagatattgtgctggatggtgtgaacgctggccgtgacacatcaacttcgactctcacctggaccatgtacatgagcatgaccaatgcccgggtagactaaaagctttactcataacttaaagc

SEQ ID NO: 38486 - DNA, 290 bp, Gossypium hirsutum
  Clone ID: LIB3146-016-Q1-K1-D11
ctttccgggcatatagatagcacttcagaaaatgctcgaaaggtggacgaggaagagaaagcagctgatgaattaagtgaagactctagagaacctgctagtaaagcaactggatcagaacccgaagaggctgaagaaagtgatcatgttgagagtaaatctccaatcttgaaaaaaacatcgaaagggtcttcctcaactttggatgttgcagattcccgggatttctgatgatgagccccttagcaagtggaagcataaggtcggaaaatccggttccaagaaactga

SEQ ID NO: 38487 - DNA, 305 bp, Gossypium hirsutum
  unsure (1)..(305): unsure at all n locations
  Clone ID: LIB3146-016-Q1-K1-D12
gcagtaaccaacattttcttttgggccagtatatgttgtgttacgtagtaatgtgatgatgtatcgatgtttaagacttcgcatcagttgtaaccaagtaaaaaagtatattatattggtgtctaagtaggtgtctttctggcttgatttgatttaagttaataatattttacattagatttcttattttgaattcaattcaagttattttttnnagaaaaaaaacatgatgaatccaagctcttgtgttatatgatggatcaaaactatgttgctatgtttactggtccttgctggcctatgtg

SEQ ID NO: 38488 - DNA, 439 bp, Gossypium hirsutum
  unsure (1)..(439): unsure at all n locations
  Clone ID: LIB3146-016-Q1-K1-D7
gtaaaccccaaatccaggcccagttgaatactttgaacgcatgcaatagcctccgccgcgaacaccgatggtacattttcatttaactcaaccgtgaaactcaatacccgccccatagaatctctgattgcaatccctgagcaagatttgttttcatgttttctgtatgctgcatcaaagtttattttcacaaatgggttctccgatagctgccacttttccaattccattctttgaacatgtatggaattattcaacccatctagtttataaacataattcctaataaaatctgttatggctaaagctattttcctttgcccctcatgcaccaatttgtttcattcagcccatatttcccataaagcatagacaaaaagacaacattgaatggtggaatngttctaaaaaaaccaggacaatcatgcagagcatgttc

SEQ ID NO: 38489 - DNA, 319 bp, Gossypium hirsutum
  unsure (1)..(319): unsure at all n locations
  Clone ID: LIB3146-016-Q1-K1-D8
cggacgcgtgggtgtgaatctactattcacgtagccatgaaaggggtgatatagaattattttgggggtgctttttgtgcatggttgtgatgtaattgaactacatatcttttgttaatttcatctttctttagaggttatggtttcaaattagttttcaagggtttcaaatgcaaaccgagaaaacagtcatgatgcgtgattgaaatgtactttttagccactttttgccattgaaataaactggatttcatgaaccgnnnantnaanaaaaataatataaaaaaaatattatttaaaattaaaaaaaattttataa

SEQ ID NO: 38490 - DNA, 368 bp, Gossypium hirsutum
  Clone ID: LIB3146-016-Q1-K1-D9
atctgaactccaataaaagcgaggtgtcttccgtggagggcacatcttgaaattttggaagcaattagatatacatgcagtggtcttattgcttaaaagccagaaaaataggtttgatcagcctttttccaacagtagcatagtatcggaattacttctttttagctcagaaattacatcttaatagtgtgtatagacttcgaagtaatagcaggaccttagggaggttgttaaaactgaagcaaggtagagtgttgtttaagtgcatttacagttcttttgcacatttttatctgagggaccgatagttaatccgcatggacgtgtttctttgcacttaaatactaagataggagaaaaaactggag

SEQ ID NO: 38491 - DNA, 265 bp, Gossypium hirsutum
  Clone ID: LIB3146-016-Q1-K1-E1
aaatcttaaccccttggccaggttggccacccgacctgggttaaaagaaaccaattctgtcaaggccaaaaactgatagtagtatagaaatactttctattaagcattagttctttggcaagaatgattcatctgttcttctgggattccctttgttgattgatttacattgagtaatgatggaacgggaatgaagtaaagaagcacggaggattttgaggatttatttatctccaaataaagctttgtaactttgtttgggcta

SEQ ID NO: 38492 - DNA, 218 bp, Gossypium hirsutum
  unsure (1)..(218): unsure at all n locations
  Clone ID: LIB3146-016-Q1-K1-E3
aaaaaggattttcttccaatattttccgaatggatggaaggcttgtaatgatgttaaattccccttttttcctgcttcatttctactttgtagtcgtcattgatggattgtattcatgaaaatctggtaaatttcttccaccaatctctatgcctgttagcatttaatggtactctcaagcaatggaatattgatagtttgtgcccgannaaanaata

SEQ ID NO: 38493 - DNA, 420 bp, Gossypium hirsutum
  Clone ID: LIB3146-016-Q1-K1-E8
caacaatataccccccaaaatgaaagcattattagtgatggtatgcattctcctggcttccaatctctttatccctacttcaaccatggctcgacaactggtggcgaaggacatcaatgatcgaccagtgtttaacactcctaggaggaataaacctgctgtaccatgtggccgtggaatgccttataaatcctgcatacaacctcccacgaagcagccctgtatacccacgtataatcgacactgccattaatttccacctcaaccttgaatgtgctggagaagctaaaggaataggatccattggcgaatttgtaatggaatatatataaacatatgcagataataaatgagttggcaaaccagatcatgaagttgcattagttgaccatgatttgtgttcttttaagactatgtact

SEQ ID NO: 38494 - DNA, 436 bp, Gossypium hirsutum
  Clone ID: LIB3146-016-Q1-K1-G10
ggcccgcccgcgtgcggaaaagattttgttggaggtttggcatctaccgtcaccgaggttgactttaagaactactttgatcaatttggtaaaattactgatgttgtggtgatgtatgatcataatacacaaaggccgagagggtttggcttcatcacctatgattcggaagaagcagtagacaaagtcctacataaaacatttcacgaactcaatgggaaattggttgaggtcaagagagcagttcctaaagaactatctccaggtgttaccaaccgcaatgttattggatataattatggtttaaatagggctttcaactttcttaatagttatgcgcaaggatttaatctaagttccattcgaggcatttgaattagggatgatggtaagtttaaatcctcttgctaataagcaaaacgggttttttttcatt

SEQ ID NO: 38495 - DNA, 338 bp, Gossypium hirsutum
  Clone ID: LIB3146-016-Q1-K1-G12
ggtacaaaggacggacaggtggtttttttcatggagagggatatagggaggtttgacgctatttaaatggttcacgccacccccaaggatatggctagggacatggctatggagagggtcatggcatcggtggggacaattaaaatctaacttcgtgggcatgcccgcttttaaagagaaaaaaaatatattatccataaataatatgaaggttgctatgtttatttacccccgcgttaattgcattcgagctaattgggatgattcatactggggttccttattaactttaaatttgtcagggtcccccaatctgcttctgttgtttttattctaaa

SEQ ID NO: 38496 - DNA, 273 bp, Gossypium hirsutum
  Clone ID: LIB3146-016-Q1-K1-G6
ggggcaaggcttcccccaacggttaggtggacccgggggggccggatttgggggtcgtccactttttgaaggtgcggcatacaacattacaattacagttttatgagtctgagatggccaacattgacacgtgagatttatgttattagagagggatggtggaacgtgttatatatgaaataatgagagttagcaactggcatcgaatattccattataagaattcatcaacttgcatcgcatatttcattaaaaaaaagcagacggactaaa

SEQ ID NO: 38497 - DNA, 204 bp, Gossypium hirsutum
  Clone ID: LIB3146-016-Q1-K1-G7
gataatcctccaaacacatttaacagtatttcataaggtctcaattacttgaaaaagcggcgattttataatatcctgcttcctcaccttactaaataaacttctatcaatcaaataatgtcatattcactcatctacgggataaagaaaattcacaaagtcatataatttaaaatacatatgtgataactaaatttgattaat

SEQ ID NO: 38498 - DNA, 188 bp, Gossypium hirsutum
  Clone ID: LIB3146-016-Q1-K1-H6
agggctcctcgttgcgactcaaattgaaccctaaagccatggttattaccatgaaagaccgaagcaagaaccggaagccgctgcagaaaggcaaggaaccttagcatcgaaacgattcaagcggtgcagtcgttgaagcgagccaaccgcaacgtttccaacacttcgctctcggaaattggagcgcg

SEQ ID NO: 38499 - DNA, 191 bp, Gossypium hirsutum
  Clone ID: LIB3146-017-Q1-K1-A2
cacgttgggttttaacaaagggaaccaaatggtttttgaattttgaacaaaaaacccgggggccaaccagttggggggactggttttttcttccaccttttgagggaaataataccactgaggatggcagggatactgcaagtcgttcatccgaagacttgaggaagtcgagattgggatttccgcagggc

SEQ ID NO: 38500 - DNA, 147 bp, Gossypium hirsutum
  Clone ID: LIB3146-017-Q1-K1-A3
gacaagaataaacgattcgcatagctgtggtcaaatgtctagttgaatgtgtctcaggccctttagatatgacaggtgttcaccagacccaaagaagagatggtgcttcgtataagtgactgccctaattgctgagcgcagttgcgc

SEQ ID NO: 38501 - DNA, 416 bp, Gossypium hirsutum
  Clone ID: LIB3146-017-Q1-K1-A4
ggaactttcgtgtaaagtttgatgatttctttgtgagtggagtcatagctgaaattgaagtaggaatgggtccatgtggggagctaccctatccgtcgtatcctgtaaagcatggttggaaatatcctggtattggtgaatttcagttcagtgttatgataaatatttgatgaaaagactaaagaaagcagcagagattagaggacacactttctggggtagagcaccatataattctggttcttataactctgcacctcatgagactggattctttcgtgatggaggtgattatgacagctactacggcaggttctttcttaattggtattctcaaattttggttgatcatggtgatcgtgtgcttgctctggccaacttggcttttgaaagcacttgcattgctgcaaagctat

SEQ ID NO: 38502 - DNA, 410 bp, Gossypium hirsutum
  Clone ID: LIB3146-017-Q1-K1-A5
ctggtatttaaaatcaatttggactgtcatatacgattgttgttagggaggtaatggagcttaacgacaaagtgaccatttcgtaacaaaacgataacgtgactaaaacataacatttcaaacataaatgactaaaatgtaatctgaggcaaataaaagcgactatttttatagtttatctttatatatatatacactagtgtattgacccatgcaaggtacgagatttaatgttttatattttcatttttctaaattggtgcaatatcattaatatttatcagttattaaaattcaataatagaaatattaaaatataacatatttaaattgcaaatattataatgatgtttgataatattttttttgtaatattatgaaactttaatatatgtgaaatatgaattact

SEQ ID NO: 38503 - DNA, 185 bp, Gossypium hirsutum
  Clone ID: LIB3146-017-Q1-K1-A7
acgctcgtatcatctataaaagccgactttattaagcatttggataaaactatcggggggaggtttactaccatagcacctaaacttaactatattatacagtatatgctttatagtataacaaaactaacagagtctgctaaggtcagagatagttatgatagaattttccaatccaactacta

SEQ ID NO: 38504 - DNA, 137 bp, Gossypium hirsutum
  Clone ID: LIB3146-017-Q1-K1-A9
ggggtgcgcgggcaagcaacgtcatatctcttctatagcgtcacttaaatacattttactggccggcggtctacaacttgttgtttgggaaaaccccgatatatctcaacttattttcacttgtaaacattctccat

SEQ ID NO: 38505 - DNA, 373 bp, Gossypium hirsutum
  unsure (1)..(373): unsure at all n locations
  Clone ID: LIB3146-017-Q1-K1-B1
ctgattgcatttcccttctccatttggcaccaaattcccaggaagcgaagttatttgaaggatatcaaaagctgacagaaaggaaccccataatggccactaccaccccatctaccaccgggaagtccacaggcaatggtgcatagaagagtgggggaggaaaaggaaatgaaatggctttgggagcttctttatgggttttcactatgcttcttcttaactttggtgtggaatacacaactggaatttaccaccaactgctattattatatttggtaaacacaggtccacgaaaaaaataaacttatggagtttaaatataggttatatcacaaatcacacccttcttttntntaaaaaaaaacactcactg

SEQ ID NO: 38506 - DNA, 413 bp, Gossypium hirsutum
  Clone ID: LIB3146-017-Q1-K1-B10
gggcgacccacgcgtacgcccacgcgttctaaaagagagaagctctttttttgaaagttatgaagaatatcgacaagagcttacttgacgaccttgattcagattaatgagaacaaatgtacgacttataagtgcagtacttgactatagctaaaaatttgagggttgatattgtttgtctagtaatttgttaaataaataaaaagagagaattatacttaacatattgacaatgttactgaacataactaattaaagttaactaaccacgatgacaatagtcttgctgcattccatttatatagctatgatttatgtataatccttgtgagcggcattcaacttttatttattgcatcatgtagtacaagttggtaaacagtttaattaatttaatgaactttttaacctgt

SEQ ID NO: 38507 - DNA, 440 bp, Gossypium hirsutum
  Clone ID: LIB3146-017-Q1-K1-B11
tgcggttcaggaatcttttggtactgataaatggcgcttcacgggcttttatgggttgctagatgtgcgatttcatgcggaggcttggagtttcttgcgatctttggaacaagatcagagttttccttagctggtttgtggtgattttaatgaaatacttttttcttttgagaaaagaggtggggttgttagggacgagcggtgtatgaaggagtttaggaatgccttgtcggcttttcttttggaagatttgggttttaagggttcatggtttactttggaaaggggcagattggtttattctaatattcgagaacggcttgaccggagggatgcaaattttgcttggtgggatcgatttccttctttctctttgaaacacttgcctcatttgatttcggatcatcgcgggcaaaaacggcatttgtgcactaaactta

SEQ ID NO: 38508 - DNA, 371 bp, Gossypium hirsutum
  Clone ID: LIB3146-017-Q1-K1-B3
gcgagatgttacccaatacactaattttggctggaaggttgattgagctttgcatggattcatgcccctttggggccgaaaaggagaagtcatgaaatctttatcttgatgttgctacaaaaaaaaaaaaaaaaaaaaaaaaaaaaaaaaaaaaaaaataagattaaaataaaaaaaaaaaaaaaaaaaaaaaaaaaaaaacaaaaaaaacattttttttattacaaaaaaaaaggaaaaaaaaacataaacaaaaagaaaatgaaacgggggcgccccttttatggaaacaattttaaaatccggggatttaggagttgaaatttttttattgtggccactaaaatcaaagtaactgcccgtttttaaaa

SEQ ID NO: 38509 - DNA, 280 bp, Gossypium hirsutum
  Clone ID: LIB3146-017-Q1-K1-B4
cccacgcgttcgctcaagttgtaatggacatgatattaatatatagctaacatataatgggctggtttccatatgtcggctgtggctgcttatttaaaatggaggtccttgttgttattgattttaccaaaaaacgtagaaatcttttttaaatttccaaattgaagatagcaacaactttatcttctctttggctttattgggaattcacttttaaaaaaaaaaaaaaaagctgaatatttaaaaaaaaaaaaattatttctcgctcctttatataaat

SEQ ID NO: 38510 - DNA, 344 bp, Gossypium hirsutum
  Clone ID: LIB3146-017-Q1-K1-B5
ctagaatctagtgtcggcttcggcatcatcaaatagcactcgcatggttgcctcagctagccacgacaagtgtgtgaagctctggaaatgattttactccctgcattttatccactctactgttaaaaaggtatagttccttgcactaaaatatataacagggttttctgacattgttttgtcctaagctcatccaaactattttgaagcagcaaaaaaaaaataaaaaaaatggtggtgccgcttaggggccccgggggggggggggttagttttttccaccaaagaaaaaaaatggtaaacctcttggccaaaccagtcaactaagacatcttttttttttt

SEQ ID NO: 38511 - DNA, 425 bp, Gossypium hirsutum
  Clone ID: LIB3146-017-Q1-K1-B7
ctgacattggctttgaagttgacaaattccataaaagaaagaaacaagatggagggttcaatgcattttatgacaatgagccagggcgaagtgggtcaaatagtaagcgttctagcaagggtgtacttgcccctgctaattggaaaagcagtaccaaggagaaagagtggtcggaattagagtcaagagatgcggagattcagagttcaacacaagaagctgttattgataataatgaaagcaaggttaaaaaggttaagctcaaggttggtggagttacgcgcacaattcatgcaaactcgacagttaatggattgccagggactgggtcctatgcaaggaagaacagtctccagggaagtagcaatgatgggcactcacctccaggtaggagtggtttgcaaggtgtaccctggaaagatttc

SEQ ID NO: 38512 - DNA, 257 bp, Gossypium hirsutum
  Clone ID: LIB3146-017-Q1-K1-B9
acgccacgcgttcgatagttgtcgaccgcgagctgcgcccttgatttttttttttccgttgggtgatggccgacaaaaagaaaaaatgaaatcacctatcatatattataaggagggacatatgttcttgcaaaagcacttttgggttttgaaaaagaggccccagattgattttgaactttgtgcgatgacgacgaaggaatttaccctacgaactattacaagaataatgagggttattcttttgaagaactcta

SEQ ID NO: 38513 - DNA, 401 bp, Gossypium hirsutum
  Clone ID: LIB3146-017-Q1-K1-C1
ccttgaaatcaccgaaagaccattcctttgggttgtaagagaagatattacaaaaggaaaacaccataactaccctaaagggtttaatgaaagagttggcaatcaatgtaggatagtaagttgggcaccacaagcagcagttttgggtcattcttccattgcatgctttataagtcactgtgggtggaattccaccatggaaggtgtaagcaatggggtgcctttcttgtgttggccttactttgctgatcagttcctgaatgaaagctacatttctgatatttggaagcttggattaaaactccaaaaggatgaaggaggtatcattagaaaagaagaaattaaaagcaaagtggaacaattggttggtgatgaaaatttcaaaacatgagctattgaac

SEQ ID NO: 38514 - DNA, 190 bp, Gossypium hirsutum
  Clone ID: LIB3146-017-Q1-K1-C11
acgcccacacgttctaaagaaaccatccacttattgacttgtttcatgaaaaacaacatttacggggagccgtccaataaatccatcatccccacaatcatctcttaatgaggaaacgcttagccaatatcagtacatattttaactgcgatgtttacagctcttaacagtaaccatataaaagatctgt

SEQ ID NO: 38515 - DNA, 434 bp, Gossypium hirsutum
  Clone ID: LIB3146-017-Q1-K1-C12
aacgctaaggagatacgtgagtctgcccacacgcttttttatcccattatcataagacaccagatacgagggcgcggggccttcatgatctgcagcacatcctcgtttatactcgtgctggcgaagatgtcattactccacaagaactaatggctgctaatatctaatcattggaaaacgagcagcttctctacgttctatatgagtgtaagaaggatctcactgctcccggagcgataggaacagcaccgactgactacctggatattgatactcccgttgggaagacgaatgaaagccaacatcgtgatgcatcattagaggaatgcaccatctcggtttgcaaacctcactggatgcatgctaggagctgcagacgagcctaactttctggattctcactggaatggaccaaggttctgtttacggaatga

SEQ ID NO: 38516 - DNA, 243 bp, Gossypium hirsutum
  Clone ID: LIB3146-017-Q1-K1-C4
aacgctcacaccttctatatatttcaaccaatcttttttttctcatcttatttaaaaaaaaagggcggtgtttttttaaatgaatctatttccactattatgtgacctctcgcccttatactcccatgacaaatttaaggctttcatcaacctttattctcataaaaaggagcacaaccctctacaaaatatctagacaccaaaaaaccttgtacaaaattcttaacatacataaaatttcat

SEQ ID NO: 38517 - DNA, 278 bp, Gossypium hirsutum
  Clone ID: LIB3146-017-Q1-K1-D11
cggacgcgttgtttattagccaaaggttcagctttaagtttgggatcgaagaaatctacgaccaaaccgtggaatattagaagtctaaggggctgctcaagtgaagcgctttgactcttccacaatgattatggtgtaagattgttgcgttatcgcaacaatattccaatatcttcatgttctacacatgaaagcgcaaccgtgtggcgttcgttatccatttagattttgaatttctatcacctcatgttcttcaatcccatacttaaagctgaacc

SEQ ID NO: 38518 - DNA, 402 bp, Gossypium hirsutum
  Clone ID: LIB3146-017-Q1-K1-D12
cccacgcgttcggccaggacccgcctacatgacataacattccccaataaacttgctgcctggacatttcaactactcaatcccacttgaaacgctctgcagagacactgagatgactatatggcactatcatggaggctgccaagatagcaggggtgttgaccccgataataaagaacttggcgtcgaaactctaaaggatatcgacgggtccactttcaactttttgtctgggactaatacgtacgccactgtcatgatgcttggaacgtacaagggtgtgaagatattaagagagagactaggccattaataatcctcatgattcggtatggaagatccttatttcttttgatcaagacatgatggacggatggatgaccttgacttggcaatacatat

SEQ ID NO: 38519 - DNA, 232 bp, Gossypium hirsutum
  Clone ID: LIB3146-017-Q1-K1-D4
gctaattattccagccaacaaagtaaaccattagagaaaatattttcttttgtaaaaaggtgctgaacagaggaaattttagtatgcacctgtttagagatggcttttgtatgcctttttggacgacattagtgtcgcttatctgtttgttctctgtttcttttgtgtttttgcttgtgacacctataggctttgcttcgggaacatttatattcatattaaatcgtctttt

SEQ ID NO: 38520 - DNA, 356 bp, Gossypium hirsutum
  Clone ID: LIB3146-017-Q1-K1-D5
aacggttgaatcatcaataaataacattcttttttttaagatattactaaaattttaatggcggttattttaatacgttttaattataataaaaatattttagttaggagcaagttaaatagatataaaagttttgatcttattttttaaaatagattaatatattttttattgcaggtgcatggaatgaatgtgaaggctcgtcaaaatatatgtatcatcatatatttttatctgcggagaaaatgaaaagaaaaaaaaaaagttaaaaaaaggactgtctgaagtgtatagtattaatagcgcatgatttattaaacaagctatgaatgtactaatgaaacaaaataaattat

SEQ ID NO: 38521 - DNA, 242 bp, Gossypium hirsutum
  Clone ID: LIB3146-017-Q1-K1-D8
catcctttccccatgcgactacctccacattagaaacaatttcctcccaatggccattattactccagttgtacagacactaactcatcaaggtcagccagcaacatcagctgtgcttacttaatcatgttgaactcacacacctgatcaccggttgtcactcactttttctgttaaccggcatatgcgttaatgccttctcgctatacgttcgcatcccttctaggctcacgcctttcaac

SEQ ID NO: 38522 - DNA, 428 bp, Gossypium hirsutum
  Clone ID: LIB3146-017-Q1-K1-D9
acgcccacgcgttctggccgaccgatggttacccacgactgttcctctgcctctcctttcaaccgctagaacagtcaatcgaggcttcattggaccaaggggatccgcgggtcttgcttaccagccccaaatcgccactgtgtttagatggtggcggaacacgcgggcgactcgaaagctttggaacgcacaaaatttctccactttcttttggttctttttgatgatcaaataataaagatatcgagtcaattaaattctgaagagcagcgaattcataacagagaagggataattacctactctgtattctcgagtgactgcgattatctccgtgtccgcattgcctattttgtattcgtacctttacaacgattaaaagcttggcttttatcgccgataaaagagagaaaaagaaattgaaaata

SEQ ID NO: 38523 - DNA, 359 bp, Gossypium hirsutum
  Clone ID: LIB3146-017-Q1-K1-E11
acgctactatgaggaaaatgtttcgctggagaggatatgtcgcaggcctattacttaaaagctgaagttgtgcagaaacaaattgacgaaattaaccgtaaacaactcttcaatgagttggtgtttacatttttcgcaaacaagagatgtcaggggccttcatccaagcttcttaaaacggcattttcttattgagggagtgatgtagttcgtaaggaggaatacgtctctcctttgatgagcaatttgtaagtttaatgtaagccttcattgaagtctatgatgaaaagaagaaaataacaatttcttggtacagaaaaaaaaaaatatttgtttaaaaaaaaaataacacccccctt

SEQ ID NO: 38524 - DNA, 354 bp, Gossypium hirsutum
  Clone ID: LIB3146-017-Q1-K1-E2
acggcactataaagagaatgctgaaaaaggttggggcattttcaaaagatccatttcgtgacacttgtgtaactgtctggggtgtgtctgagctcgatgcatgctccgatgcttgagctcgtactgtttgggtcaaccaacattaggttcccaactggaatgacctttggcttccaaagtgttagagggaattccttagactctttggttcgaaatcttaagggtttttcctctttaattttaaacattaatatttgtagaatattgtgctttaattacagtgactgctatcttggtcccaggagttggccttaaagtagtgatcctacgcaggcaattttatgttgaatatta

SEQ ID NO: 38525 - DNA, 414 bp, Gossypium hirsutum
  Clone ID: LIB3146-017-Q1-K1-E3
acgctggtattctatgcatcatactaactgttttccacttgtatatatgtgtaattaccaccggaagaaaaactaatatgtgcacgtgatgtctactgacccgctacgaaccgtgtgcgctgtctgttatttataaaaaacatactgcaccgcactaagtgtttcttgcgcgtcacgtcagctccgaaatattaccctacactttaaacaaacctactatcgccacgaaatctcctgtattattactatggaaactggtattggtatctgagtcaattacgattccgtgatctaacggttccatagattggactcagaaactcatatcctatcatttccacaaaatcaacaacaccttgacctctcccttgattcacatcaaaggctgtctcatatatttgctccacctcaacc

SEQ ID NO: 38526 - DNA, 390 bp, Gossypium hirsutum
  Clone ID: LIB3146-017-Q1-K1-E4
acgtacatatcatagctactcacaaccgagaatggaccccatttttgcaaactcagcaccctggctgtacccaccatacaatctgtgtgttcctcagtctaatgtatacaacgataccagtcgtgttcagaatcaaagtcatcctgcaacatataatgggtccacaaatggggaaggaccattcaaggtaaatgggggagataagtcttattacaatgagcttgagagcctacttttggataaccagtgagctcctggagggtctcttactgcaggacttaatgcaccatctcctcctgatcatatacctctagaaactggtatgcttttctttgatatctaaagctcttgggatcgtctaactcgcgcatagagcagattagcatttgc

SEQ ID NO: 38527 - DNA, 227 bp, Gossypium hirsutum
  Clone ID: LIB3146-017-Q1-K1-E5
aaaacccggactcgacccacacgtaacctcatatcatatcaaccctccacccttttttttccctattaaaacaaccataacgggcggcttaaataaaccatacatcctccccttacctccatacaatcttccaaacttatcctctaacttccaaaatcaaccaacaacttcttccccacttaattcacattttccttacctacccattcaatataaatccttatact

SEQ ID NO: 38528 - DNA, 398 bp, Gossypium hirsutum
  Clone ID: LIB3146-017-Q1-K1-E8
gaaccccgggtgcgacgccacgcgtacggacccaccctttcgatcggtgctctttattgttgccgcacatgcatgctcacaaatggagcctgcgagcaaggagtaaatgtctacaaacctcgcttctatcaggaatgcaggaaaggctgatttatgtgccttgatttgctacttacaattttcattactgtctctggaatatgttcactgcagaggttcaatttgctgcagactttcgccacgcataaaggattctgagagctggtaagcactaatcaagttagttcgatagatttatagtcacaagctgtcagatcctcccttcggatgtttgtgggacaacatctacaccattgagaggctatacgagctgaaaccttatgtagaagtgatctggc

SEQ ID NO: 38529 - DNA, 376 bp, Gossypium hirsutum
  Clone ID: LIB3146-017-Q1-K1-E9
cgtacgctattatactttatattacccaaacttaattttttataaaataaagattgagaactacagggggaaaggtggaagttgcaataatacaacactcttcattgctttacgtttccttgcctgataaactgtcacaatggccacaattgcttgtcccaccccgaacactttgtacttcacattttttcctggacaactatacttgtgccgcactttcattaacccccttgtcaccaccactcttctaccaattgtaactacagtctaagcctaaaacgcagacgtagtaacatgaccccgtaccattggcaaacattggctcaggcactgtctccgccatacagaaatgcaacgttacttttgtcaattactg

SEQ ID NO: 38530 - DNA, 415 bp, Gossypium hirsutum
  Clone ID: LIB3146-017-Q1-K1-F1
gcaaactctagacccctttttagcctcaacatcgatccaccatcacgacggcggtcagcagttgcaaggcctcgaaaagtcaattcttaaccttgaggttccctctagacttcgatttcaacgaagtaaaaaagaaccaacggcctattcgcaaggtcagatcacactttttcttttacttttgcttttaagatgtagataaaaaagcttgatggaaatagattaaaaaaaaacagagaattaaaaggaaaaaggaaaaaatcaccttttgaaatcgtttttgaatttttctattcagtatgcgtatagtgtgcatgcgtaagttttttttaggtacattcgacggctttttatagccggatttacagagtaaataaaaataaaattacattttatttgctgtaaattctgttat

SEQ ID NO: 38531 - DNA, 385 bp, Gossypium hirsutum
  Clone ID: LIB3146-017-Q1-K1-F12
cccacgcgttctaccacgcgtgcgctcactctttctgaaaaccataaccgtgtgcgaactggtagaatgcgttccacttgtactgatctttttggtccaatatctacccgcgatgacctggtgagaatggcttctgaggccaaaaagtcggcacatgaagaggtgcgcaagatggtactgaaaatggaggctatggaggaaaaatatgctcgtatggaaaaccatataactagaatgacttcaagcatggagaagtgtctcaagaaggtgggtgagatcttcaaatactttgggtctcagaacaggctgcagaaccagaagaggatgatgcttaatggacttctttacccaccattatgctgaaagtggctttatgctgattcta

SEQ ID NO: 38532 - DNA, 411 bp, Gossypium hirsutum
  Clone ID: LIB3146-017-Q1-K1-F2
acgctgtaggcctctcaaccaaccgaccgtcatggatagctttcctatacctttcattgaagaactgcttgatgaactaggccaggaaaatttcttctctaagggtccgtttgattgccagtaaaatgttttccgtaaaatgatttttggaaaatgttttatttttctgtaaaatgatttactgaaaagtattttctggtgtttgattgaatctgtgtaaaatattttctgctgtttgacagatttcctgaaaatattttccggaaaagttgtttttacatatagtaatatatattaataaatttttatattttaaattatttttacatatattgcaatgatttatttataataatattcaattattaagctgcaatattgatcgttataaattgaaaaaaaactaatatc

SEQ ID NO: 38533 - DNA, 419 bp, Gossypium hirsutum
  Clone ID: LIB3146-017-Q1-K1-F3
acgcccacaccttctatatcatccgaccggcattagttgctgcgttacacatccatttctcggtctgtatctgctccggtggtataaaatggactaccgaagatacaacagttctcacgaggcaaaccttggaactaaacagcaaatttcagaagagcaagcataccaagattctcttgttgaggagttggctgaagatttccgcttgccaatcaatcacaagccaacggagaatgttgatctggataatgttcagcaagcaacgttagatacaaagttgaattcttcaaatgttgggtttaggcttcttcaaaaaatgggttggaaaggaaagggtcttgggaaggatgaacagggaataattgagcctataagatctgggattagagatccgaagttagggattggaaaacaagaaa

SEQ ID NO: 38534 - DNA, 390 bp, Gossypium hirsutum
  Clone ID: LIB3146-017-Q1-K1-F4
acgctcacacgttctgttgtgtatactgatgtaaagtctacgctcaagcggacacatgaacttgatgatagatttgatgatgcaatcaaacaactcggaggaacagacacagctacacctaagggtgtgatgagggacaaggggatttcaggacatactaagtgtcatcttaaaagctatttacagaaatacatggctggggaaaagcctagcgaacaatacagatcacaacgagattcatgagcagtaatgggaatgccattggggacacatgtgatggaatgcacgggcaaatgaatgaaagctagcatatccaataagctctgcacatgcaaatagaactacatcgaaagcttgatgaacagatacatgttcagatacatttacagc

SEQ ID NO: 38535 - DNA, 414 bp, Gossypium hirsutum
  Clone ID: LIB3146-017-Q1-K1-F5
acgctcaaatcctctgaagcagccaccctattatgcatccacgaggcatgcatatgggggctgagtccacagattggagaattgctctagatgatagaaccggctttgaattaacaggaaaaacaggtcatggagctcatcaatctccggaaaacggggactacgatcggatcactggatagacatttgtctcacggttgaaagcactgttttccccactttctcttttttttttttcttacgaagacctaattgatgtgcaactccatggcccttccttctttcacagagtgtaacatgatatacatgttcaggtcggctcgttactattatggtaggctctatttggagtacggtgggaaagtccaattgtaaaccgacatccaataacgtgcgattcgtatcaccgtgcta

SEQ ID NO: 38536 - DNA, 415 bp, Gossypium hirsutum
  Clone ID: LIB3146-017-Q1-K1-F6
acgcccacacgttctgtatccttcgattttgatctttggccattcatgttcaaatcctattgggactgcttttcgacatgcgattgctttagctgcaaaggcggaagttaccccatgatggatctcagagcaagaaagtaagactaccccttcttcatttctgatcactatacctgaagctgattggtggtgagtcccatcatatgcaccgtcaaaattaatttttatgaactcactagatagcccaaagaccacaacagaagaggtggttctggcttggagtaaactgatcaaagatccaagtaatccgctgtacaaaatccatgttaggatccataaaaatattctgaatttttaaaagtgtccacagttccactgtgacaggacattcacgaaaaatacggtcgattgtttc

SEQ ID NO: 38537 - DNA, 247 bp, Gossypium hirsutum
  Clone ID: LIB3146-017-Q1-K1-F7
aacgctcggatagaagtctatcattctttcttttatatttgctactcagcacactatgctggcggatttacattacaaatattataatctattgaaacaatactctgattaaatataagaatactttagctctgtatcttatatttaacactaaaatgttcctgaatggaaatagatcctttaatcttaaatcgcacaaaatgttgtgtaaaaaaaaaaaaaaaaacaggcaagtccatctattatt

SEQ ID NO: 38538 - DNA, 378 bp, Gossypium hirsutum
  Clone ID: LIB3146-017-Q1-K1-G1
cggacgcgtggttccgagcacgcattgatagcttctacttttgcatttacattgataattgagtttgctcttgtttaaattgtttgtactctttatctcttactgaagtctggtaaattttgttccttttaaatagatttgacatcgttccttgttataaaaaggaaaaagaaatatcaccttttattgttcatgtgcatgtacgtgatgtgtttgtttgcaggcttacatgcatatgttcgcatgtccgtatacatatctctgctgctgtgtcaccatactcatgtttcaaatagcatttatttaacataaccaattaccagcatctcgtcgtaaaataaacagtttaatgttgtttgtgggggggggttacaattc

SEQ ID NO: 38539 - DNA, 386 bp, Gossypium hirsutum
  unsure (1)..(386): unsure at all n locations
  Clone ID: LIB3146-017-Q1-K1-G3
ggcgaaaaagtgatcgggaaaaaaagttttattttgcggtggtggtgccaccgttttttgtttgttaattttctggggaaaacaaaaatggaaaatcggaactctttgtatagagatttgtttgtcattttgtctcgtatattatctctttactttctttaatcaatgtaatatatttcttcaaaaaaaaaaaaaaaaaaaaaaacaaaaaaaaaaaaaaaaaaaataacataaaaaaaaaaaaaaaaanaantttttaaataaatcaaaaaaaataaaaaaaaataatttttcttacaaacccactnnnngggggtgttttttaagaaatccattttttcggccggggggatgatcaattaaattttttttttatgggcccaaaa

SEQ ID NO: 38540 - DNA, 295 bp, Gossypium hirsutum
  Clone ID: LIB3146-017-Q1-K1-G6
aatccggtcgccactcgaaaatacccacgagtcatattttgcttggactagccgggggcttgttattattttcaatttatgacttttctattaatattttactcttttgagagcttttgtcaaagtgacccttattttgcattcccaggaaaaaatgctcatacattagtgagaaattgttatcgtaaattaagattgtttaccaccaatatttgatcactgacaatacatccttctggtaaagtaactaattaaggtaaaacaattttagatcaactaccaatgacaattttac

SEQ ID NO: 38541 - DNA, 346 bp, Gossypium hirsutum
  Clone ID: LIB3146-017-Q1-K1-H2
ggggcccacgcgtcccaagaccctgaggataacgattaggctcacttcttttgatgacgacgactatcattatggggggggggaggatgaagaggatgttgaataccaacaaaatgaagatgaggaagaagaagatgaagatgaggaagccctgcagccacccatgaaacggaagaagttaattgttaggaaataagtggaagcctcctccattaaaaaaaacccttttggtttaggtaaactggttcatctaacactatgtgatgttttatttatgcattgaggaggatgctgtttagggttaaatgtcttacgcattatatatcactccactttatcttacctt

SEQ ID NO: 38542 - DNA, 241 bp, Gossypium hirsutum
  Clone ID: LIB3146-017-Q1-K1-H3
gatcatactcttaactaggggggggatctatttgagtacaaaactatcacctttattctcatgagacttaaatgaggacaatgtccaaaaccgaaaaaaagcatcaatttttcttgtcaaattagtgacttggggggattcaccattacctagagcttcaattgagtttggaaaaatcgtgaatccttctaggattaactccccaataacgtataaattgaatctaaattcaactttttta

SEQ ID NO: 38543 - DNA, 406 bp, Gossypium hirsutum
  Clone ID: LIB3146-017-Q1-K1-H7
acgcccacgcgttctgacccacgcgtcctaaattgaatgaattttaagttagaattgaaaaagggattaaattgttaaagaaactatgagttttatgttttagggactaaattgaggaaaattcgaaattgggaaaatatgctgaaattttgatagttaaatttgagtttggatggaatttgaatagaaatagagtgtgaattgagttaggaaaataagtgaatttagttaggattaaattgagaataatgaagaaattgaatagaaattcaattatttatcataattagtgctgaaattaatagtataaattattattttcgtagctaacaaagaacccgaggcaccaacattaaaggtaaaggagaagattatcgacgagtaaactctagaaaatcacggtcga

SEQ ID NO: 38544 - DNA, 296 bp, Gossypium hirsutum
  Clone ID: LIB3146-017-Q1-K1-H8
agcgtacacgctcacacgttctcaaacacccgtccttattttttttttttaattaataaaatagggaaaggggtcaaattgcgatcaaaatattcacctttattacatacttaatcctcttaagctcacttctcaattaacatcaaatccttttctctaccttttttccaataatcatttaacttaaatgaaatccactataaatgaaaattaataataacaactctcgactacttttcatacttaatcaaatatttacccaaatcccccctatattgaataaaatcattttttta

SEQ ID NO: 38545 - DNA, 331 bp, Gossypium hirsutum
  Clone ID: LIB3146-018-Q1-K1-A10
acgaatgcacaatctcaaatgtccgctctgttttcccttttctctctctaaaaggaaccctaaccgtacctcaccaaccaggattcaacatgaagggaggaaaatctatgtcagatactaatagtgccaagctatccgtgaaatgacaccgctggaaagaaatcggggaaggctgccaaggatccaaacaagccatagaggcctgctagggcctcattcgatgtcatggcggagttccgtgagcaatacatgacggatcaccctaagaacatattcgtcgccgctgtcggtaaagctggtggagataaatggaagagctggcttgaagctg

SEQ ID NO: 38546 - DNA, 134 bp, Gossypium hirsutum
  Clone ID: LIB3146-018-Q1-K1-A11
attatttcgtgaaggcgagtccgtggagagatgggaagggcgatgttgatgctgagttggcttggggagctaaggaagcacgatttgcatttgggctctatctgtctgcatgacataggcatgaaagttgctat

SEQ ID NO: 38547 - DNA, 444 bp, Gossypium hirsutum
  Clone ID: LIB3146-018-Q1-K1-A7
tgtggatgaagaacagccattatgcattagtggcgatagtggaggtggcatatttttatggagcattaatatccctttcggacaagatccgttaaagaaatggtacgaggaaaaggattggcgctatagtggaatccatgctttggcagtttcagaaaatggctatttatacactggaagtggagataaattgattaaagaatggtcattgcgggatggcaccctgtcaggcactatgactggccataaatcggtagtttctgccgtagcagtgaataatggagttctttacagcgggagttgggatggaactgttcgattatggagtctaagtgatcatagtcttttgactgttttaggggaaggcatgctgagatctgtgtccactgtcttgtctcttgcagctgaccagcatacacttattgctacttacgaaaatggctc

SEQ ID NO: 38548 - DNA, 478 bp, Gossypium hirsutum
  unsure (1)..(478): unsure at all n locations
  Clone ID: LIB3146-018-Q1-K1-A8
gcgacgccacagcgtaacgcaaggcaattcctgtatggtcagcgactaatctttgtattttctcggaagttggaagggtaaagcagtgagcgcgtatcagtctccttcaagcatatacctacgagatnngagaatggctgccctaagtnagaagaaaccggaattttgtgaagtacacattggtgagctgcaatggcaaggccgagacanccattgagagaaatttnagcttcggcttttgaagagcnaaaganggagatggagaaanagactatgcagacacacgtgaaaggagatggatttgcttaaaagaannaaactagctggtattagaaacttgcacaagaaagaaaggccaacaacatatctaacatagttcactttcggataatgtaaagaactcgaacccatgacgtgnngctttccttataaagcagttctaagatgaaatactcaaaaagggagcttgcactcgact

SEQ ID NO: 38549 - DNA, 334 bp, Gossypium hirsutum
  Clone ID: LIB3146-018-Q1-K1-B10
acgcccacgcgttctacaacgcgtccgcttggatttgcagtttcaggaggttgccgtggaattgggcgctttaatgtgtctattgatggcggaaaaacatcgacggaagccactacgtttcagaaaactggtaccccttacatagcagatggtgtaagcaatgacacatggtcatggatgctttttgagctcacatttgatatcccacagagcactgagattattgccaaagcaggagattcatctgcatacgtgcaacctgagaaggcgcaagatatttggcacctaagagggattcttaacacttcatggcacataattcatatcctcattg

SEQ ID NO: 38550 - DNA, 383 bp, Gossypium hirsutum
  Clone ID: LIB3146-018-Q1-K1-B3
aaaagggtttgctgttttggctcaataagtttgcttatgcttccatttttattgttattggtgcttggatacttttccggtttgttggaccggcacttaatctttatcaacttgattctcctcctttgcctcctacctccatgtttaagggctcttgaaaggataccatagtgctttgtctttgtattggtttgttttgtagcatcttgtttagggaaatggagcaataatgagacatcttttactaattgtctatataacatatctgagatatagtcccatttggttataagtggtgcccttttatgtgttatgaattggtgtctcgtgaagacccaacttttcaaggtttgtgaatgtttgttttaataatattgctttca

SEQ ID NO: 38551 - DNA, 298 bp, Gossypium hirsutum
  Clone ID: LIB3146-018-Q1-K1-B6
ggccgacccgcgcgtacgcccacgccttcgacaccacccactcatatttttaaggctttgatggtgagtctttaaagacgagggttctttgagctcgttcccagaggctgaacttctttccaagcggtgacacgagttcgatccttttagaaaccaaaacaaccggtggttgtggtgatgggtacgtcccttctaaagaaatcgagactctatctatgctatctgatgatccgggcgtggactttcaaacgacgcttgaacatatggtggagacacatggcatgaaagattgggaatg

SEQ ID NO: 38552 - DNA, 226 bp, Gossypium hirsutum
  Clone ID: LIB3146-018-Q1-K1-C10
acgcccacgcgttcgagagcagacaccatctttttttataatttatacacgaacatgaggagacgcacttttttcatggtaactcactccactttaccacctacaaggcgttgataaccctatcaagaggagaattaacaccctagacactgcacaactttggatgttcactatcatacagaggccagattgatttgagaaaatatgaaagattttgctggataac

SEQ ID NO: 38553 - DNA, 182 bp, Gossypium hirsutum
  Clone ID: LIB3146-018-Q1-K1-C12
caaacacgatgggaagaatcctgctatccattgcttttctctcgcaaaaaatactcagaggtgtttttaacgtgcgctgaatactatccctcatttctttcctacaaaccctaatgcgagcactgaagccatttaatcatgattgggcgaagtgcataagaaaactgaatacacttactttt

SEQ ID NO: 38554 - DNA, 395 bp, Gossypium hirsutum
  unsure (1)..(395): unsure at all n locations
  Clone ID: LIB3146-018-Q1-K1-C4
acgttttgggaaaaattgtcaaaaaattcggggaggcgcaaaaagagcttggaggttgccgtatggaaacactagaaagggaaaggaaaaccctccgaatccaggaaatggaggctgtgatcggaactatttcggaatccatctctagcaatgaggcaagattgagtcgattctatgagaggtctatggtggatgggctactttgtctttgaccccccaactgttacgaactatcaccactcaactggaccaggctgcgtctggtgagcatcgtgagcacaagatngatataagtttctttgagctgaacgggctgaacccaagaccttatcgtacaagaagtcactatgcgattctagtgactcaccaacctacccactttttttatttattta

SEQ ID NO: 38555 - DNA, 254 bp, Gossypium hirsutum
  Clone ID: LIB3146-018-Q1-K1-C5
ccttcatacaaggcggccccaaagttttttttttgtttttggcaaaaccaatcaaagaggagtttcgttttagctcacacgctcctttatcgagtgctatattgggtaaggagactgttcacgtcaacattgaggtcattggccatgtcgactctggaaagtctacaaccactggacattcgatctacaagcttgacgcaatagacatgcgcgtgattgctaggtttgacaacgacgctgctgacatgaacaaa

SEQ ID NO: 38556 - DNA, 432 bp, Gossypium hirsutum
  Clone ID: LIB3146-018-Q1-K1-C7
cccacgcgttcgccaacgcgtgcccttacgcgtactcccacgcgttcgcatctggccatgtgttgtctagaggagctgatgtctacggcttggagaagaccactcggaatgccacatgcctctgccgatggacgtgggaggatgaaccatgctgacgtcagacataaagataccaccaacgctgcgaatgtaatcggccggatcaacggaattgctccggacagaaactctgaagaggaggaaaatgcaatggacccaccacagccagcccagaggggtgctaccgagctagccgaggctgccctgctacccaaaaatttatgtacaatggatccaacatggcatccctggttacgattgtacacatggtatcctacaaatgtccaaccctgttgtagataaatcataaatgtagcaattgtcagatttgat

SEQ ID NO: 38557 - DNA, 432 bp, Gossypium hirsutum
  Clone ID: LIB3146-018-Q1-K1-C8
acgctgacgcgctggataagcgttcggcctcacggatggacaaaagagtaaacacagtggcaaagctaggatataagaagtgtatagtgcccatgtcagctgaaaaatcattagcaactctggatttgggggagctggagattattggctgcaatgattcgaagggggtcatcaatacagcgatgactaaaaattgaacagagtttagcagcattgcttcacaaattatgtaaaatatattagatcggcatgcttaaaattgtgatttgtgagtgtaatgattcaccacgaacaaacaaggttgtgggtagaacatgaaaaattgttaatataattaacactaggttgtgttcttatgttgaaatcaaacttgttgagttgataatatctgctataaatctcccgaatgtaaagtgctagatgccctacttt

SEQ ID NO: 38558 - DNA, 333 bp, Gossypium hirsutum
  unsure (1)..(333): unsure at all n locations
  Clone ID: LIB3146-018-Q1-K1-D10
agattaatgaaaataaatccagaaattttagattagcacaatagcattaaccaagtaagcggtgctcctaatatatgtaacaaaatactttatacactaattttcatgctagtagtgctggtcgtttcatttgtttagggtagtatctcttgctaaaagtaatgatggtacgtagtagagctaagagtgaggaagggatttgagaaggtgagcttcaagaattaacttgttgcaagtagagacgataaaagcagttgaacacggggattcanatgctactttagaaatttttgagtcgagaataataaatatcctagtttgtaaattactttt

SEQ ID NO: 38559 - DNA, 226 bp, Gossypium hirsutum
  Clone ID: LIB3146-018-Q1-K1-D12
tgagcttttgcagaaatgctataagtaagaaaatgttttgaattaataaaaataattaccatgtttaaacggttcctcatatagtatctttaagagtttttataagcccttgaaaaatggaaaggagccctggtcattagctgtggaaaaaaaaagtgcataaatgtgcagaaatgcataattattacatgcatgcataattatgctattgctatctgtagatggg

SEQ ID NO: 38560 - DNA, 325 bp, Gossypium hirsutum
  Clone ID: LIB3146-018-Q1-K1-D2
ctacatggggcccccgttagttttgttgtcaagaggggcatacaccccatctgggccggttaggcttcagacaccgtcggcgctaaaaatttcatgagtgcggcgaacacttacagagagaggagcccaaggttacctcgaccgcgctgaaggtaaacgggtccattcgaagatctaactaacatacatcacatggcccaagctacagtggctacagatcaacatgtggaccctacgactcaagacgcagctctgttgggcttagccatgtctgaaccaccgcgtggaccatacaggtcactcggttacctgcgatccaattttg

SEQ ID NO: 38561 - DNA, 209 bp, Gossypium hirsutum
  Clone ID: LIB3146-018-Q1-K1-D6
ggcatgagcaacatccaagggggggaagcctgatggagtgcagatgctgaacagatatctgtgaagcgaaagtcctactgctcttcctcagttagctggggaaaaaatagtgagtgcttaaacatcagaggatagatcgacatggcctcttgtaaagtacgggactcgctgtgcatgctgtgatatgcataatcgattcactattgtac

SEQ ID NO: 38562 - DNA, 360 bp, Gossypium hirsutum
  Clone ID: LIB3146-018-Q1-K1-D7
gacccacacgtaaccttacatcctctaaaaccaccgatcttttttttttctctttacattaacaacatgcagaggcggtctttatacaataactaactcccacttattatacaaatatcaatcaatccccaattatcatatactcttcatcttttacacatacatactgttttttttccaaaaacatcataacatacatctaaaatacctcatttaaataaatttactcattaattacactgttatattcatatttatacaatttttatcattatcatactcattttctccttatcaataacaacaaacttttattattcaatagtcaaaaaacttccactctaacaaacacctttttaa

SEQ ID NO: 38563 - DNA, 425 bp, Gossypium hirsutum
  Clone ID: LIB3146-018-Q1-K1-E2
ggggcccaagagctctgccagacttttctgttttgggtctggtcctaacagcgttttgatggagtaaaggcgagcggcaatgcattgtagcaggaacagttcttcacagcaactcgtgcagctaatacctctgcagagcagcagttgctccctttagccccattccaccaagtgagacctgctgcaatgccatcaaagctctggggcaaccctgcctgtgcgttattgtaaatggccctcctatatctggtgtcgatcggaacatggccctgcagctgcctgagaaatgcactgcaaactttgaaccatgtgatataatgaagtagttgcatgcgagattttaagaataagtgcgtggagagctcatgagaacctttcccaattagttctactggttgattacccaacataaaaggatatatgaa

SEQ ID NO: 38564 - DNA, 247 bp, Gossypium hirsutum
  Clone ID: LIB3146-018-Q1-K1-E7
gacccacgcgtacgatcatatattccaaagcctccacacattttttttttatctaccacatattaaatctgggtgcctgttttttaaccaccatattcaccttcacaatgatataccaatccacgaatctccacatattttacattacacacccataaaaaacttttctcatacaaaatatctacatctaaccttatacaatctaatgaaacctatcttaattccatcttacaattttctcaaccct

SEQ ID NO: 38565 - DNA, 410 bp, Gossypium hirsutum
  Clone ID: LIB3146-018-Q1-K1-F1
ccttcggtttttgggtcacggggggtgaaattgaaaccgagagcatcttggccacagggctccagggattttttgaggctgtgggactcctccttagaggcactgaggacaaaaaggaagcattggagaacttgcatcttatgtcgttatgcctcgatgagattgatgatggcggtataattctcgaaactgatgcaaatgtcattgacggacaagttgatagtcataggatggatgccggagctcctttgtgcgagcagacaataactcaagcattggctaccgctcgtgaacatcttacaagatctctcctcaagtaaaatgtgtgtacatggaaccaaacgagataagctcgacggtattatctatgcagtatgatactgtacttgatatgcattaggataattttt

SEQ ID NO: 38566 - DNA, 395 bp, Gossypium hirsutum
  Clone ID: LIB3146-018-Q1-K1-F12
acggttggatgaattcaatcagccaaacaggttgcttgagaagagattaaaccaaagtgggcaggtatttgtgctcgacaatctacacctctccaccttaaacccgactcatttcattacggttctccgacaaaccgagaagtcgattcggggtttcatccggctgatgatcgatgaaatgaagttagccgattgggatatcaatgctgcagcacgttcaatacagagtggtgttatgtattggaaagaagatgataaacgttttgcatttgagtccttcatttgcagggaaatgttcaaggctttccacctgccttatttctccctttttggtagctcagtaccacaagggaagaaacatcctcaagtgttcttcgataggagtatggaattga

SEQ ID NO: 38567 - DNA, 297 bp, Gossypium hirsutum
  Clone ID: LIB3146-018-Q1-K1-F2
cacgcgttctataaaagctctgcaagccggatccatcatagctagactactaaaggatccttcggtcattttaccagatgcacacatccctctacaggccaaagagctaatgcacacatgttgcgattctaacatgaacaccaaggaagatcttagaattgttagcagtttgctttacaataagatcatcagttccatgatcgctcgcttgtatcatgctgcgaataccactagagtttgccacgatggcgtacaaagaaccggttatacagtcttagctgctatgatcgaggatat

SEQ ID NO: 38568 - DNA, 251 bp, Gossypium hirsutum
  Clone ID: LIB3146-018-Q1-K1-F3
accactgttctcatgactggaagcatgagttgatagaagggtgcataggacgcaacacttgagttaagacgagatcttgtgcggagtgctgcggcgaacgattctgcgtaactgtaagcgtgtgtgacaccgactggcagttctgctgagcataccgcagtacatactgcgtactacgacctggtaaaagagcgggtcaaaactgacgagcatcttgctatgcatgtctgtctcactgcatgactaaaaag

SEQ ID NO: 38569 - DNA, 327 bp, Gossypium hirsutum
  Clone ID: LIB3146-018-Q1-K1-F4
acctgaaggcggactcgcctggttttttatgatcaccaccaaacctttgtccttcgagggatgagcgataaatgaaaaagtaccacaggttgatgccgatgacgaatagtacagagacaagttcgacacctcagacaccgacgtatccgacggctcataaggagaacgtgtgtaagagtgcgttccataccggtagggacctacccaccataagtatacgttctgatgtaatagacaaggcacaacccaacttttctaccgattatgactggctttacaggggggagaccaacatcaagcatcgttgaaaaggtggcgactgacagg

SEQ ID NO: 38570 - DNA, 360 bp, Gossypium hirsutum
  Clone ID: LIB3146-018-Q1-K1-F7
actcttgttactcttaaattggttttggttcattgtgaagctcttctagaattcctattattattgccaaaaaaaaaaaaaaaaaaaaaaaaaaaaaaaaaaaaaaaaaaaaaaataaaaaaaaaaaaaaaaaaaaaaaaaaaaaaatttaaaaaaattttttttaacaaaaaatatttaaaaaacaggggggggggggcaatttaaaaaaatcaaagataattccccgtccgtgggaggaaaaaatttttatttgggggccccaaaatcaaattaactggtcctctattaaaaactccttaattggaaaaacctttcatttccaaaaattaaattcctttggaaaaaatttttttttat

SEQ ID NO: 38571 - DNA, 302 bp, Gossypium hirsutum
  Clone ID: LIB3146-018-Q1-K1-G8
acccacacgtaccaaacgatcctatagagcactcacccttttttttttttccattatcaatcacaaaaaaaggcgagtgtttttaatacacaacctcccccatcaatccaacaatcattctctttaataaaaacacaccccaaaccaattactccttacaatattatctacctgccaaaacatcactcctccacacactaaatttaatccttacaatacccaataccatacacaactagccctttgtcaaaaataatcaaactctatttgccactcaataccatattactctctctcattta

SEQ ID NO: 38572 - DNA, 295 bp, Gossypium hirsutum
  unsure (1)..(295): unsure at all n locations
  Clone ID: LIB3146-018-Q1-K1-H10
aatgaaggncgaccacgcgtgcgtccgccatgcgttcgagcagatcccaagatgtcatttgctgccattgtctgtggaactaaggggtggaccaacattggcgtgatcgaatcactctcggccaaggtcgatactctcatactgggacgtgggcgtgatgttaaccttctacaacggccaaagatctgcggttgcctctctacttgtgcaagaagaccatctctatctagcaacatggcttaatgagaatgacaacgctaaaggaggctctctcttgctccccactgatgtgaat

SEQ ID NO: 38573 - DNA, 268 bp, Gossypium hirsutum
  Clone ID: LIB3146-018-Q1-K1-H6
cacgcgtacgcggacacgtggtgctccgctcgttgcttatgttttcatcctgtgccgtcgcctcaaatgaacgcgagcggaccgtcgccgtccaaatttgagcgtcttcaaatttcaactccactcttttttattccttcctttttaatttcaaatcttacaattgtgtatttttcttttatcataatggtggatgattattcaagaaaaaaaatatccacaactgccgtattatcaaaaaagcccgcttcagaacgagcttacaaat

SEQ ID NO: 38574 - DNA, 407 bp, Gossypium hirsutum
  Clone ID: LIB3146-018-Q1-K1-H7
cacccacgcgtacactcacacacactaaagagaaccccaaatttttttactttcatcattaacaaaaacacacccgctgtttttaaaaatacatcccccccctccaactccaaacttaaaaccactcctttttattcctcccatcataattacaaaactaacaactttcaaaatttttttttattctcaaacaataaaaaaaagccaccattaatatttccaaaaaatacacaaaaaaaaaatcttacttaccaaattttttcttccttccacatacaaaactctctacataatcaacaactccttattatttactttttactcttcattccttacttatttaaaataaaatattttttttacttttttaaataaaaaaccagcgaattttcatcacctcctttttt

SEQ ID NO: 38575 - DNA, 319 bp, Gossypium hirsutum
  Clone ID: LIB3146-018-Q1-K1-H8
aacggctggatcctgaacgactcgcattatactgttttgttagggcctagggaaaccaatcactagtcagctggagcagccaaatcataatcaaaatcgtatctttttaaatacataccgaaaattggggcgtactctagatacagatccactatatgctatactgcatgagtcaatatactgacagggagcatattctcggtggcctgctcacagagtgatggctgatcacgagagcaaatatgatgcaatcaaagctgcaaaagaagggcgtcctgggctattcacaagcgagatgatattttcatggacgcttgat

SEQ ID NO: 38576 - DNA, 449 bp, Gossypium hirsutum
  Clone ID: LIB3146-019-Q1-K1-A11
gtttacactatgaagaatgtaattcattaacagtagggataagcagggtctaaattgatccatttaatagtaggaggactaattttatccggtccctatggtagagggacttgtaaggcacattcacctcaattatttgattcatggggtgccagctttttgatccttttcttttttggttttctttgcccttgtaattgtagtataccacattgttccgaagaggagaattgcgttctgtcccttcatccattcaggggacaggatctattatctcttctgcatctctagataactcactctctgacttgtaccaatctcctccaagacccttgccttatgatgctgaggctaaatatttccgcttacaacgtgatggtcttgtttcaagacatgagaagggttcaagtcagtcacacgaagagtcagaacctttaagaggcgaaaac

SEQ ID NO: 38577 - DNA, 347 bp, Gossypium hirsutum
  Clone ID: LIB3146-019-Q1-K1-A5
tcgtccacgcgtccgtccactcgtccgtccactcgccggtcccacgcgtccgcccacgcgtccgaaaagagtcgtctataatctcaaaagctaatatctgaaaattgctagttatcttctagaaaatccctttcttgtttcttctcccttcgaccggtcaacggcgagttgtgtgacacggacgacgcgtgtgttttgtgatccttcaataatgatattgaccgccgcgttttttctggcgatgggagatgacttatctgcggcgttgacggcgagtactgatcgtgagcttcttattccagttgctgtatccgtagaccatgattcccccaaaacttcttcttatt

SEQ ID NO: 38578 - DNA, 288 bp, Gossypium hirsutum
  unsure (1)..(288): unsure at all n locations
  Clone ID: LIB3146-019-Q1-K1-A6
acgcccacgcgtccgcccacgcgttcgaccacgcgttcgccgacgagtgtcccaaatactatgaacgatgctaaggagggtgaaattgagtgagagctggtttgcgtacgccaaactagcgtaacttgcccaacattaacagaagagagtagagaatatcatgtgatctctataaaaatcctgccttggntttttggggattacttgaacctatgtagtacgtagaaaatatagtcgaaagatgctcaagagcacttgcgtaggatagtgtgggcaaagggggaaaac

SEQ ID NO: 38579 - DNA, 190 bp, Gossypium hirsutum
  Clone ID: LIB3146-019-Q1-K1-A7
tcgaagcaaagtctctgcctttcaaaagaatttaatccagtaaatataccaactttcatatgcgtcggattaaagataggagggatcaatgtcaactgccacttttcaagaagggatgaacggttttctttacccaaaatcaaaccttgaagagtataaacctacatcgacagcgtatagagagtcccat

SEQ ID NO: 38580 - DNA, 213 bp, Gossypium hirsutum
  Clone ID: LIB3146-019-Q1-K1-A8
agtaaatgttgaattgttgaaacaacaacagcactcggacggttctccgctcaaggacgtttagctcggcaaatctcagccttagatatgtatgttcttcatttatcttttgtttctttttcaaaaattgatttggctaatgatttaagctcttggaattggctcgtcaaattttaaaagtttactaatttttttcctacgttttcttttttt

SEQ ID NO: 38581 - DNA, 370 bp, Gossypium hirsutum
  Clone ID: LIB3146-019-Q1-K1-B1
gtcccatcatgtaattactgtaatcctgattggatactcatacattacaagctttttccgcattggttcaattatccttgccctacatgatgcaagtgatgtgtttttggaagcggctaaagttttcaagtattccgagagagagcttggagcaagtgtgtgctttggattatttgccatctcctggctcttgctgcgtctgatattctttccattttgggtcattaaaacctcaagctatgatgttcgggagtttttaaatctttcggagtcatatcccatgtccctatactatgttttcaatactatgttgctgatgctacttgtgttccatgtgtactaggggtttctcatttgctcaatgatcatg

SEQ ID NO: 38582 - DNA, 334 bp, Gossypium hirsutum
  Clone ID: LIB3146-019-Q1-K1-B5
caaagaacctgcagcaaccaacatcttatcagccagcaagacgtttagcttctctttctgaagaatcaagatttgggaggagaagaaaacaaagctttgaatccaaaaagggaggagcggtgaactttcaccaaaatcaaagctaaaatagtagaacccaacatcgacagcgtatcaagagttccattccaatttgtccttcgtcgccatcgtcatcacagaattaagtactccatcatcctaagcaccataagcctgtcttctccgaccctccaccgacagcatgtgagccgttctattgacagatctgggtagtgagtccccttgcacgatc

SEQ ID NO: 38583 - DNA, 344 bp, Gossypium hirsutum
  Clone ID: LIB3146-019-Q1-K1-C12
acggttactccatattgttccttcagccattcttctcatattcctgcgagaacatgggtggggtggtcatacagtggatttgttgctcactctactactgctgtcaaagctgttccctgtggcttgccagtaactcgaggcggaagttttgggggtcaggttattcttccactagctcatactattgagcatgaagagttcatggaggtcattaagcttgaaaatatgggtcattatcgagaagacattgatcatgcctggtgatattcttccttttgcatcttagtataggagttgatgataatgcagattggtactttgttctgttcttatcttttgccccc

SEQ ID NO: 38584 - DNA, 337 bp, Gossypium hirsutum
  Clone ID: LIB3146-019-Q1-K1-C3
gagagggggtgggtgtttattggtgaatcaattctttaccaaaactagaagatctagataaaatgcatgggccattgataggtaagctcgtatactctaaagcgctacgggcagtgactaacaagacagatcctatgggtcctctacatggtgaagattatttgtcttctttgttcctaaagcctgttttaaactcacgtttgggaaaaattgaaaatctactcgacatttaacataaatgatattcactcacgcaccaaacatgcccgccaactagaggtacactctcgacaaaaacaagaacgaatcccatttattggattaagattatatatcc

SEQ ID NO: 38585 - DNA, 273 bp, Gossypium hirsutum
  Clone ID: LIB3146-019-Q1-K1-C5
acgtgcacgcgtacgcttgatcgatattacattcgcacactaattgctatgctattcatagaggcatggtgtggcttttctaccacatgaaagattcaccggcgtccattgggcatgatcgaaattaagagagagttgatctggcgcaccctatagagccagtacgctctcagtgcagattacaaggttcacctgattggactgtagaatcgcaagagtttatgcgatactcacaccatcgggatggatcccgattctgtgaagacccatacg

SEQ ID NO: 38586 - DNA, 263 bp, Gossypium hirsutum
  Clone ID: LIB3146-019-Q1-K1-C6
acgattatttatctatctaggaaaaatatttttatgcttaaaataaaaagcaaatatcaaatgcaaagtataaggagattaataggaactgccatctttgcccctccggaaaataaagccaagttcgggggctgcttttacctgtgcctcaataagaagccatgacatgggagaacctgctcctctatatgtccgcacatctgtaaaaaattgaaatcctgcacgaagtcatacaactgtcctattctcggacttaccaattt

SEQ ID NO: 38587 - DNA, 145 bp, Gossypium hirsutum
  Clone ID: LIB3146-019-Q1-K1-C7
cgatacccacttttcacagagtacttcttattgccttcatgctttcaggctcgcatatattgcgatctatcaccagaaatcgccatgaagaaaatacacgtcgcttgagcaaaaaacaatagctgaaaaagctccgaccgaaaaa

SEQ ID NO: 38588 - DNA, 466 bp, Gossypium hirsutum
  unsure (1)..(466): unsure at all n locations
  Clone ID: LIB3146-019-Q1-K1-D12
ccgtccgtcccacgtccgtccnnngccaaaatannnaaacttggtcnnatcaacanntgataatggnnngcagtgtnngatgaatgggcatnttnntcggaagggacccttatnnactggnnccgaaagannnagcagannttgaatnnccacatangnnccttcnntcgaagtggttngnngtaagaattggcaaccaacctaaannntaatctaacnnnaagttgtgnnngccacaanntgaaaggggtgcggtgnnngctgatnnncaagtttnnngtggcaggacctnntgggtgggaaattggccaacncnncaatgtttanngaggaaanngggaccanngaaatnngcttaaagaccaatnntattcccctgcatttttcctttgaaaccaatcagcagaaaagaatatgnaaggttggctttcttgcnnccttggggaaaatcaaaatgnncagtatc

SEQ ID NO: 38589 - DNA, 301 bp, Gossypium hirsutum
  Clone ID: LIB3146-019-Q1-K1-D3
cggagtatcctctaatgcatttgatgaagtactgaaagcaacaccaccttctttgtcagcatttttggctggcttgccttctatcgagggtccggcaccaaatgtagacattgcattgtctatttgtttgcagaatgactatccaactgtccagacaaaaaaagcaacgagccttccatctcaaaagactgcaggtcctgctcctagcacaagagatctctctgggtcaagcaagtcccatcccattcccagtaattcatctttcaagccacgggacagacagctcggctaaaggaaggat

SEQ ID NO: 38590 - DNA, 360 bp, Gossypium hirsutum
  Clone ID: LIB3146-019-Q1-K1-D5
agataaggttttgtgcacctaatactaacacaaaccagacaaaatctgatccaagtttgaggtattggtttagagccaaaggaaaactttcagatgatcaagctctgcatagatgtgtagtggcctttgcttcagatctgatatttagtgctgtcagtttgaatccacaccgcagaaagggttttaagtcagcttcccttagcctggaccactcgatgtggttccaccggcatcttaaggctgatgactggttattgtttgagattgttagtcctacagccagcgtcacccgaagctttgtttcgggccaaatgttcaacagaaagggagagcttgttgtatcattgactcaagaagcac

SEQ ID NO: 38591 - DNA, 195 bp, Gossypium hirsutum
  Clone ID: LIB3146-019-Q1-K1-D7
agatttggagaaacggctcgcaataacatcccgaatatgcatattaatcgagcgttaacccaataggaaaggtgatcgcttccaagccgtcttgagcttttactttagagactaccgtcacataagggtgcagggaccttacttgacttaacaggacacctttggggctatcactgacgggcctggcatttttga

SEQ ID NO: 38592 - DNA, 275 bp, Gossypium hirsutum
  Clone ID: LIB3146-019-Q1-K1-D8
tatagatgcaagttttgtagaactcacttggctctccctgatgatcttgcttggagggctttccattgtcgccgggggaaagcctacctcttcaataaagcaattccattcttcatggtgaacataacagttggagccttggaagagagggagatgctctcttgaatgcctactgcggctgatatattttgctgctagctgagacagattgttggctggaaataccaagctgcacatgagaagaatcaaaagttcaaagaacgaaagtttgttct

SEQ ID NO: 38593 - DNA, 405 bp, Gossypium hirsutum
  unsure (1)..(405): unsure at all n locations
  Clone ID: LIB3146-019-Q1-K1-E11
cccacgcgtccgcccacgcgtccgggagagtataatgttattagctgtgtaatatttgtgatatttagcatttggaaggtggtttttgattcatgttgttacctttgcattagtcagatctgttattatattttctaatatgaaagaggtgaaatggcaacaaggtacaagtttcttccctataaaaaaaaaaaaaaaaaaaaaaaaaaaaaaaaaaaaaaaaaaaaaaaaaaaaaaaaaaaaaaaaaaaaaaaaaaaaaaaaaaaaaaaaaaaaataaaaaaaaaaaaaaaaaaaaaaaataaaaaaaaattttannaaaaaaaaaaaaaaaaaaaaaataaagggggggcggttttaaagaaatatttttattaacggtggtttggaaaatattttttttttt

SEQ ID NO: 38594 - DNA, 310 bp, Gossypium hirsutum
  Clone ID: LIB3146-019-Q1-K1-E12
gccaatcgttctatctctgctcaatttttatttttaaactattaacgaatgcccattggggagattccatttatgagaggtcaactgtacattcagttcactgatgacttccctgactcgctgaccccttaccacttcaatgcactaaaggcttgtgctttctcccaatgcatctttttatctttctgacatggatctggattattgccaggaaactacccttcatgattttaacattgaagaagtgatgcgtttgatacataactcaatctcaacatgtagcttatttttaatatgtgtacatgctttt

SEQ ID NO: 38595 - DNA, 411 bp, Gossypium hirsutum
  Clone ID: LIB3146-019-Q1-K1-E3
ataatgctaaaggttcacttatgtagccttctttcgatgtacacttccttttttgtgctctggcggtcaagcaaggcacttcctaaaattgagccaaaattcataattcaagcaggcaaaagttatcttaacccaacaatgcctagtatttcttatgtcattgttggttggttaactctgtaatatccctgtcaacatggctgatttgatgcttatgtgatccctttgatgcttatatgatcccctgcaagatcaaacaaattccccagagtggagaagttaaaagtgttgaaaatagtaattgcaatgaaacagtcttgcatgcttagtcatatctccgaaagtagctacttttgttttatgcttttgtgaagcagtacatgataatttgagtcggaaattggtgattga

SEQ ID NO: 38596 - DNA, 449 bp, Gossypium hirsutum
  Clone ID: LIB3146-019-Q1-K1-E9
cctacacttaatacataacatcctgttttgtacatagattttgttcaatgcgacatggggggcctatgatggagacgtcaaattcctgatactgttgtgattaatcctccatttggaactcgaaagatgggtcttgacatggattttctatttgtggcattgaacggtgcttctcaagctgtttattccttgcataagacctctacatgagattatattaaaaggaccttcttgagggacttaaatgctatcaacgctgacgacttgtgtgagctcccatttgatgttcctcaactatacaagtctcacaagaaaaaggaggtatacatcgctgaacatctatgtcgatttgatcccaaaatgtgtcaggtaaaagacaattagctgctcgaagtgcactttgaaaccatgcatgaagcacatataactcagttaatcattctttaaaa

SEQ ID NO: 38597 - DNA, 349 bp, Gossypium hirsutum
  Clone ID: LIB3146-019-Q1-K1-F10
gccactcgttcgatgacacgtgggtttattcattggtgaaaacgcacattcagaaaggctggccattatcccttcggtcctgcacatagttctcattaatataacacgaaaattcaatgatgcccgaatgtacattacctttaatgggatggatgatgaagaggacaacagattgcccctaaatgagattcttgatgacaaaatatgagtctactaatttaagggataccttgatgcagtcgctcatgcaatcaatgattgagcagatttgaggggatactatgcatggtcattattagacaatttagagtgatctcaatgctataccaagcgctttgttttggattat

SEQ ID NO: 38598 - DNA, 433 bp, Gossypium hirsutum
  Clone ID: LIB3146-019-Q1-K1-F12
ccaagttgcttgagaagttgcattggctttgttacaaatatttcctaagaggtccaggggggaatgacattcataagacaaatgttccaaacatgatgattgcctttcgacatgagacatggatagatgatatgcagcatctttactcagggagagcaagaattccagaagaaatatatcctgcgatgtaactgaatgtaatacgtgaatcatgaaatttcaggtagtgggaagatgatgcgaagatttggagagctacgggttgaatgaggctggctagctattctttgaagcttaaccttattagtggcggaagggatttttacccttagctattttcttacagattggaaatcattcaattcttgctgcaatcattattgatactaatatatatagtgaattaactatgttatatatatttctttcaata

SEQ ID NO: 38599 - DNA, 237 bp, Gossypium hirsutum
  Clone ID: LIB3146-019-Q1-K1-F4
atcgtggggtcatgagatttattcatggttctcgcttaaggtcttctctgacatctccgtggagatttctaagagctaaagctgctggtcaagaaccttttttaaaagaactttctgtcgctactggcatgaaaccttctgttctgattggggctgaggatcgtattatttatcccggggctccctttgcaactaaaaatcggtcactgccactcattggaggtggatctaccaaaa

SEQ ID NO: 38600 - DNA, 351 bp, Gossypium hirsutum
  Clone ID: LIB3146-019-Q1-K1-F7
cggaggagaaggtgttggagacggtggtggtggcggtggatgtgaagagaatctagcggggaacgtcgaacaaaacggcgggtttttgactcaacaagaagttttacagccgttgctggaaccgggaacggaaacgcaaacgcaagctctattcacttctttgcttatgatgcaaacgcaagagagtgagcgcatcgttaatggaggaaatgtggtattaaacggtaatccgtacaatcaaacttctcaggtactttcctttatttcattaaaaaaaaattcaatgttacttggctttagaaaattgtattaacaataaattggttagaattgattacaaatttgggattt

SEQ ID NO: 38601 - DNA, 405 bp, Gossypium hirsutum
  unsure (1)..(405): unsure at all n locations
  Clone ID: LIB3146-019-Q1-K1-G1
agcagtccgctgatagcagcagaaaaatgaaacatagtttctttaggagtttcactagatcccttgagtagccgacagttcatgccttagtgccaaatgctctcgattatcgacaaatgacgagcatcaatctcggtgaggttccggcgagaaaaaaggtacaatctggagagcgagacgtacgtgtggggagagccgatgcattcacaagtgaaggagtctggctagagctgcggcgcaaaatcgctccagaaaccctaagggtttctggatgcttcaagaaaatgggccacttcgagttgggctatggtttgggtctggtgttgagctattcgggtttggaaatgtatttaggtaaataatngngcctgctgtgtaataaaactgacattattttttatttta

SEQ ID NO: 38602 - DNA, 308 bp, Gossypium hirsutum
  Clone ID: LIB3146-019-Q1-K1-G3
cccacgcgtccgggaaaatgtcttaccgatttctaagccgtaagacattttcccttctgttcggtctcccttcctctctgttcatctctgtccatcgtcccttctcttcgttggcttcaccaagtaaatctctgcctcgtcatctccgtcggtcgaccgaccgtcgtccttacctctgtattttgaagaaacttagcaaccacagtcgagaaaagaagacccagaataggaagctagttggattcctgatcaatggggtcatactcgatgtagagccttaaattgttctgcagacaacgcgacaaatc

SEQ ID NO: 38603 - DNA, 149 bp, Gossypium hirsutum
  Clone ID: LIB3146-019-Q1-K1-G8
cgctatgagccccgtttttttaagcttctcattacacattgcttccgacatcataccggcaaaacatgacatctattgagcctcgcacttttttttctgtctccgatggcgacggcgctacaagagcttcacggcctgctttcaaagca

SEQ ID NO: 38604 - DNA, 413 bp, Gossypium hirsutum
  Clone ID: LIB3146-019-Q1-K1-H2
tgctatcagccccgttttcttaggtttcgcataacacattgctaccgccatcaagccctcaagccatgaagtcgatttagcctcgaacttctttctctaactccgatttcaacgaagcaaagaaagattcatggcaactttacaaagtaagattccttctttcactcttctttatattttgaaatataatactgaaatattgaaaaagaaaatgcaatgattctaaaaaaagaaattaaaagcgagtaaaaaaactggaaatcacctttctattcttactttcgaaatattcaatgtgctaatgtaagtgtatattctgtggatgggtctgtgtaatccttttgcaggtacagaatgaggcttttatagcctggatttacagagaaaataagtaaaaagaaaaaatatttttc

SEQ ID NO: 38605 - DNA, 329 bp, Gossypium hirsutum
  unsure (1)..(329): unsure at all n locations
  Clone ID: LIB3146-019-Q1-K1-H5
cggacgcgtgggtttattcagatgctttgttctgcgttctcaaaaacaaatgtaagaacacagaattgccctaaaatctaatcctctactcaacagctcccaccatgaaaaggaacaaaactaacaaacacacaacacattgcatgccattgccttctccactaagcttcagattctaaaggtatgaattgcagtgtgaagttaggtttttctgtttgttttgacattaaccaacatgcttgcttgatcttccatttgagttaaaaatcgaggttcacttctgaattcaaactcgaattaaaattgactgtncnaaaatcattcctntt

SEQ ID NO: 38606 - DNA, 127 bp, Gossypium hirsutum
  Clone ID: LIB3146-020-Q1-K1-A4
ttttgcagatagattcttttgctccttggagttcatgtaatcattaaaagaaaaacgtataggtctcaatgtaggaacattagccttgatccaagttaggccttgaacaagaaaaaatttagaccct

SEQ ID NO: 38607 - DNA, 424 bp, Gossypium hirsutum
  Clone ID: LIB3146-020-Q1-K1-A5
cccacgcgtacgcggacgcgtgggcggacgcgtgggcggcgccattggagttgttgagtccgataacttgagactcagatgtcgaatagcaccttcggcttacataccttcgttatccgtcagtggcagcaacggtgcagcctatgccgtggtcatagcagctcacccatcggaaccaaaccagattgctctcgggatgagtgatggagcagttcacgtaatcgaaccctctcaagataatggatcccataatccatcaaattcatctaatccttcattaactgttaaacaaccaacagagttaccttctaggtgaatattattaatgtagatacaaaaaaaaaaaaactccttttacttttggaatcaatttgccttaaaaccactccccaatgttatgtaatattcattggaattttctttt

SEQ ID NO: 38608 - DNA, 420 bp, Gossypium hirsutum
  Clone ID: LIB3146-020-Q1-K1-A7
ctcgaagataagcatttttcatcactgggtcacagtgatgatgctattctaccagaaacacaggcaaacggccaccagaaatgtgatgtgactgagagtgttgatgaacttgctcctgactttgaagaggacctaaaaaatgtaggtggttcttcccaaggtgcggaagaatcaaccatctcaccaactgcctgggtagaaatagaagagcatcagaaactgcctgaccaatgtgaagaccaaacgggtgaaattacctcttcaacttgcactgcacctgttggatcggctagtcctcgtgtccgtcactctctgtcacagatgctgcaagaagaaagtagtgaagctgatactactgaatggggaaatgctgaaaatcctcctgcaatggtctaccaaaaggatgcacccaagggattg

SEQ ID NO: 38609 - DNA, 433 bp, Gossypium hirsutum
  Clone ID: LIB3146-020-Q1-K1-A8
taaaggcttgtttcgtgaattggagatgagttgcttcatgaagctaagatggagatgagttcttcatgaagctgtcagatcaatggggtgtgtttttgtttgatggggacttggggtctagcattgactgcctgagttttcttttttggagtttgttccccttgttttggtgtttgagtttgttgcatctttttggagtcataagtttatcgaataatattcatttacattatttttgtaacgaccatgttttgactcgaaattaggtacagtgatggatcgggtttggaattagtggagaattttttaaatagaacaaataggcactttgagtatgaaattagaaagtttgtcgacccgataggaaattagaaaatactccttaaataggaaaactttaaataaaagcattgactaaattgaaagagtaaaa

SEQ ID NO: 38610 - DNA, 229 bp, Gossypium hirsutum
  Clone ID: LIB3146-020-Q1-K1-A9
atcattttctcctgttctagaccatcaagaagtttggctgaaattttataggattcgcatagaagcggttctcttgaagtccaatgttcttagtgaagtccagaggtcattgatagatggtggaatgcgtgttgaggatttgccagttggtccattgcctcgatctggatcatctcctcatcttggccagcaaacacttacatcataatctcctggaaggcctagggaa

SEQ ID NO: 38611 - DNA, 374 bp, Gossypium hirsutum
  unsure (1)..(374): unsure at all n locations
  Clone ID: LIB3146-020-Q1-K1-B10
gtacctgaagacgtgggtgctatcttcatcggaatgtgacatcggggacaacgagcttgtactacaacttttttattctttagattagctagagttggaatataattccaataaattctacaacatgtaattttaatttttggagggatctgtaaattccataattttctatagaagtttctaatctcagtctgtataaaattattactaggacctgaattagtctcttggaataatttataagcacttgggactggatactcttctaacgggtctcctcttcattnnaaaaaaaaaaaaaataaatataagaatataaataaacaataattaaaaaataaaaaaatatcaaaaattgcaaaaatgtccaaaaa

SEQ ID NO: 38612 - DNA, 281 bp, Gossypium hirsutum
  unsure (1)..(281): unsure at all n locations
  Clone ID: LIB3146-020-Q1-K1-B11
cctttttttttttttttttttataaaattnnnncnnaaggagatttaaaaaaaaaaaataaattttatatctacgcatttttccagttacatttattatcaaagtcaactaacaaaccctttatcatgtcattatacacataatcttttctatttatctttgcacattttctcaacctgaccacactccaatctctatttccttcctcacccgctgatcatattcttccagaaccttcaactattatataaacacttacttttcataacattcacatctat

SEQ ID NO: 38613 - DNA, 410 bp, Gossypium hirsutum
  Clone ID: LIB3146-020-Q1-K1-C10
cggacgcgtgggtgggtatgaagtcctagagtagaaaaaggagaagaggtgaccagctcttctcgtggcaatcctcaacacttacattagaaaactggcaagtgcctgctttcttacactgacaggacagcattaaggacatgggactcataagttttatatgcaagatgtttcaagttgtataaataggtgattatacttcaaaagtattgcggctgaagaaataggtttgtataaggatagagaagacatccatagacagaggccgattggtaaaattgaaaaagtggagtttgctattgttttggcatcatcattccccggaggctgtttttgttcacctgagatattaaatttagtgattctattttagtttggagcctcttaaggaaaatactgcgacaaaaagc

SEQ ID NO: 38614 - DNA, 430 bp, Gossypium hirsutum
  Clone ID: LIB3146-020-Q1-K1-C11
gagttcgtctcggccaagtttctcgaatttaccgcgagttagtctaatgtttcaaggagccgagatgagtgtatccggcgagaggctattatatcgggtacccgatatgaacaaagggagtgattcagtgtattgcttcacatttggcaactctgatctcctagggatcgaagcattcgtgattggtcatcatcatcaacaaaacgtgtggatggaatttgatttggtgaaatcaagggttggatttgctgagattagatgtgaacttgcaggtcaaaggcttggtattggaccctaagggccccacaaaaaagaatgtaaaaacgttgtgaaaggattttggatgggtcccacatcgtccaatctacggcccacctgttttgatggaaggtggaccattgatcggacaatgtatggtcatgattggaaa

SEQ ID NO: 38615 - DNA, 444 bp, Gossypium hirsutum
  Clone ID: LIB3146-020-Q1-K1-C5
atttatacatgctattataacttatagcatgaccccactctcttgtcttgactccaccattcctaatactgacattctgcgcggatctcagacttgttggacacatgtttcactctaggttgcttgtggagcatgcggtccttcttgttcctagaattgacattctgtgtgggctctaggtctactggacacctatttcactctaggttgcttgcggtacacgtggtcccccttccacgagctccttggacaagtgcaaactaggactgtgaccttcgtttggctcgtgtgagctaaacttacgagcttgccttgtgagttgggtctgcgaaatcctcttgatgtcctctcacggttcacctcaccctatgtcatttggcgaagcctatttgggtcacgagtgggtaacctggatcctatttaggactcgggttgatgattaca

SEQ ID NO: 38616 - DNA, 418 bp, Gossypium hirsutum
  Clone ID: LIB3146-020-Q1-K1-C9
atcatcgtcgctcgaggtaggagtagttccagatgggaactccgtgtcggatatctgatatactttgggacggaccatgggtgacccaagcgcaccaatctgggcagctacagccaataaccaagcaccaccccaggcccaagtcggtggaatggatcgagaagctagagttctaaggtacagagagaagagaaagaacagaaaatttgagaaaacaatccgctacgcttcgagaaaggcatacgccgagtcaaggccaaggatcaaaggccgtttcgccaaaagaagtgaaaccgacaacgaagttgaccacatgtataactcggcttcttccgctgctaccgcagcagctttcatgtacgataaccagtacggcatcgtcccatccttttgaggatgtcatgaatgaatctgattc

SEQ ID NO: 38617 - DNA, 429 bp, Gossypium hirsutum
  Clone ID: LIB3146-020-Q1-K1-D3
cccacgcgtccgcccacgcgtccgggcaaacagagttgagaaagctttgttattccttgaagagatggatgaaaaaggctttcctccttgtccggctgcatattgtagcctgatcaatagtctagggaaggcaaaacgatatgaagcagcaagtgagctatttcaggaattgaaagagaattgtgggcattcaagtgctcgggtttatgctgtgatgataaaactttttgggaagtgcggccatctgagtaaggctgttgatctattcaatgagatgaagaaactgggatgcaaccctgatgtttatacttacaatgcactgatgtcagggatgataagagcaggcatgatagatgaagctcattccttgctgagaactatggaagaaaatggttgcaccccagacttgaattctcacaatatcattct

SEQ ID NO: 38618 - DNA, 238 bp, Gossypium hirsutum
  Clone ID: LIB3146-020-Q1-K1-D8
cccagccaagcactaaaatcaagcaatcatgtcatgatgtcttagctcgtctggggtcattattattttttacttctgttttgaccccccacccaccccccctttaacaactcgtgtttttgatttttttaccctctcaatatcccatattaacacatacatgcatttcctcctttgccgtgctgaattccctggctccaaatcttttatatttttttctatcaagtctctttcttaa

SEQ ID NO: 38619 - DNA, 386 bp, Gossypium hirsutum
  Clone ID: LIB3146-020-Q1-K1-D9
gaaaaaaacccagacagtcagacaaagtttatctcgtattgttcaaccaagatgatggggtatatggtaaactggagctggacctccacattcgtctggacttcgtcctccacagtggtggctactcttttcagtacaggaccaaataacccaactttccacttaccttcaatcaaacttactgattttaagcttaaccttcctcacgtggacactgagttaattcctaacgtgcacgctactatcatcatcatcgtacacatccattaccgctacaccgccatgtttattttttacgaaagcaccttgcttatagcggctcaagtgaaatgcctgtcacaacgtgctcggtcttgtcaagtactaaagcttccgactcggcttga

SEQ ID NO: 38620 - DNA, 431 bp, Gossypium hirsutum
  Clone ID: LIB3146-020-Q1-K1-E1
cggacgcgtgggaagaaaacaagctggttaacagtgttactaccagccaagggtggtcgagctcttaaacttaacttcgatgattccaaaaaccatgttcaacctcaattgaaatccacttttgcattaaactatgatggtttggttgcaagaagaaatgccctggtggcaccagccagaagaaattattgacccgatgggagctttaacttgccttaagaatgggcttactggaaatttaatcccaattttggcccaattttctcttaaaataatgtttattttgatggaaaaagatagtagggtggttgcttttatgtaagggcatatgggagtttgggtcatatatctatctatatgtatataaagaagaattccagaatgtgagtggtgtttatgaattaattaaactaaattgtcttttttaaggt

SEQ ID NO: 38621 - DNA, 340 bp, Gossypium hirsutum
  unsure (1)..(340): unsure at all n locations
  Clone ID: LIB3146-020-Q1-K1-E10
gagttntctactggagctattcagaattttttagatgcccaaacactctgtaaagtaggactggtccacaatagttggtcaatattctctgtgactgccttgcaaaggggacaaacaacactatcccgcaaggttctttgattcagatttcagtcattaggcaagaaaatattgagtaattccagacctgtctttcaactgattgctgccatgcgcataccctataataacctataataattcttgaaaccgacatcgccttgactgatatacttactgcttaccaaatgctctattattaaaggcacccgaccacattcttctccgtttcagcaataac

SEQ ID NO: 38622 - DNA, 272 bp, Gossypium hirsutum
  Clone ID: LIB3146-020-Q1-K1-E12
agcagactcatagacggacttcgtagagacgagtattcttaaatcaacccagagatttccaggtcgagatacctagtcagtcagttcctaccattaccttttatagagttaaattaatacatttatgtatcactcttttaagtcttataacattgattttaactattatattgcatatcacattacataaactaattggtctaaattgactaattctttaagaattaaaaatttttttatataaccacaatttttatactatttatttaata

SEQ ID NO: 38623 - DNA, 416 bp, Gossypium hirsutum
  unsure (1)..(416): unsure at all n locations
  Clone ID: LIB3146-020-Q1-K1-E6
cccacgcgtccggcacattcaagcctctcgttttctggccttactggagagagtggcgctggtgattatcaagattgtggggcttcatcaatgctcctcatgggagagcctccctggtgtcctccatgtactgagagctcgatcccatcagcaactcgaagtgatgctgtcatgcgttacaaggaaaagaagaagacacggaagtttgaaaagcgagtgagatatgcctcgcgcaaagcaagggctgatgtgagaaagcgagtgaagggacgctttgtcaaagctggtgatgcctatgattatgatccgttgaatcaaaccagaagctgctgagagtacaaaatnttttaaccatgcttacaaaaaggaaagaaacacatgaatgttagtttgaaagaatttattattctttgcct

SEQ ID NO: 38624 - DNA, 425 bp, Gossypium hirsutum
  Clone ID: LIB3146-020-Q1-K1-E7
cccacgcgtccgttttgaatgttccgaggatgatttcaaacaatttcaaaatggatttgatgcatcaccagtatctgatgcaaaggtggagtctaaaagacaaaagagatgagtaaaccatgggaaagtttattgttgcatgagagaagactcattacgcagatttagcttgtggctggttagtaacttatgtgtaggagacatcatttgtatctgtgttaggtttaggagattaatgtctgtgcaggaggatcaattgtctgtagttctctgatgttgaaccgatattttcgggtaactcatcttattgacttattgattatgctttgccatcttacttgggaagaagtgcaaaaactctgttgagaactcaagaaaagcatttttccagagtttatgagattgtgattaagaaaagttagtgc

SEQ ID NO: 38625 - DNA, 420 bp, Gossypium hirsutum
  Clone ID: LIB3146-020-Q1-K1-E8
caatgacttacatggctgcattattgattttggattgactcctttaatgacttggcgaggggtttcgtctagatgtgcacgattcctagcaccctgtgtgatcgaatctcgaaagattactcaaaagtctgatgtctacagttactgtgtacttctcctatagatgctgacaggcaaagcaacaacccaatcatcatggcatgaagacgtggtctaccttccaaggtgggtgcagactgttgttagagaggaaaggactgttgatgtatttgatgtagagctgatgaaatatcaaaatattgaagaagagttgttgcagatgctccatatagcaatgacttgagtggcaaggctttcggacatgagacctacaatggaagaagtatctcggatgattgaagaaatttgacctttttgttt

SEQ ID NO: 38626 - DNA, 369 bp, Gossypium hirsutum
  Clone ID: LIB3146-020-Q1-K1-E9
cgctgagtttaagcatatcaataagcggtaggaaaagaaacttaccaggattcccctagtaacggcggatctcgttactcaaaaagcggcggtgcatctgatggcagctggaggtcttaagtttaggtttcaaagtgggcttgggcctatattgctatgggtttggttagggtttagtagttagcaattataagtgtctctattactggttggtttagattctctattctttgatcgattttgatactgttctcttaaaatcacattgatggtgttgagagttatgcttttctttttggaatgtatggacctttagcttatcgggagccaggaagagcattccttcatgctgccgtttaaaatctgacg

SEQ ID NO: 38627 - DNA, 423 bp, Gossypium hirsutum
  Clone ID: LIB3146-020-Q1-K1-F10
ccagttttcacagcaatcttcactccattagctctagtcataacagcaatcttctctggattcttgtggaaggaaacccttcactggggaagtgttgccggggttgtcctactggttggtggtctttacagtgtgttgtggggtaagaagaaagaagatgagaaaatggttagaaatgaacaaaatcccggtactaataaagaagaaattgtactggagtgcattacacatcagtgattgatgggactcaaatattagctataatggcttttggttttggccattttgatgctcacattttccacagtgtgaacctcttcaaggaagacaacaccagcttagatttcatcctttttttctcttcttttctttttttgcagcttgtgttattagctagtttgctgtctttggtctaacttggta

SEQ ID NO: 38628 - DNA, 342 bp, Gossypium hirsutum
  Clone ID: LIB3146-020-Q1-K1-F2
ggcgcatatggcgagggactgtggacagggctgcggcggcggcggcagtggtctgtcttgttacaactgtggaggctccgggcattttgcaagagactgtgcaaacagtgatcgttaaaagcatactctgttccttattcaaagcagcttcgtttgtttgttttttgctaatgttttttttttgaaggattgttgtttattcaaatttttttggcttttggtcctttgtttttgacaaatgggaatagatttagaattttgtttttttatttgaaagattttgaattttgttaattgtgaaaataaattggattttattaattatattttgtctttgattct

SEQ ID NO: 38629 - DNA, 417 bp, Gossypium hirsutum
  Clone ID: LIB3146-020-Q1-K1-F8
acgactagttctaggccaagtgtatatccatcgtctgatactttatgagattttgtggaggtggcactgcaatttggaatgatcatgatgtttgcctgtgcgtttccccttgcatttgctttctctgccttgaacatcattgcataaatgagaacagacgcctttaagctgcttgccatgttgagactgcctgttccacgagctgtcttcacaattggagcttggcttaacatttttcagttcctaatattgatgtcaatatgcaccaattctgcacttctagtatggttatacgatcaggaaggaaaatggaaacttgatcctggccttgcagccattcttgtaatggagcatgttctgctattgattaaatttgtgttctaccgctttgttccctatgaaccttcttttgtgaga

SEQ ID NO: 38630 - DNA, 286 bp, Gossypium hirsutum
  Clone ID: LIB3146-020-Q1-K1-F9
cccactctttcatccactcgtgcgcgagtgtacattcgagataagtacccatcccttagagaaagatttattggagagcattttaagcatcgacgccttcatgtgaaaagttggcgacaagacgccaaagtcgctaagtattgaaaggaaaacaaatcacctactcttagtatattcctaattagaagaatttatttttcttttgttttctgtttcttgtatttcacttcaaagttcttaattttagtttcctattttaaaaatcaatttaataaacaaactattt

SEQ ID NO: 38631 - DNA, 204 bp, Gossypium hirsutum
  Clone ID: LIB3146-020-Q1-K1-G12
gggtcctctttctacacctgaaagtctgtatgttctatctctgctaaaggaatcttagaaattttttgcagctatgtccgattgaaaggtattgttgattagatttcgcttccaagtcctgttagtactgttaattaaatctgaaactaataatactccactgtttgtctcaaataaaatatataaacattatattaatattaa

SEQ ID NO: 38632 - DNA, 443 bp, Gossypium hirsutum
  Clone ID: LIB3146-020-Q1-K1-G2
cccacgcgtccgcccacgcgtccgggccaaaatcctctttcagtctcgaaatctttcccctctgccacttctatattctcaggtggttggttatggattctcagcttctacgacttaacccacccaacaatctttctattaaaccattacactccccccattttccttccttcgccgcccctagtttcatccgtctttccccactttcttttccttcagctacagtcacaggatcggcttgtaagagaataaggtgtgcaatgaagtcttataagttatcagaacttagtcatgttgaggtagagagcttgaaggctcgtcctcgcatagatttttcttccatattcagtgtgatccaaccaatagtggatgatgtccgcagcagaggcgatgctgcagttagagtttatactgaaaagttcgataaagttaagctagagaaa

SEQ ID NO: 38633 - DNA, 417 bp, Gossypium hirsutum
  Clone ID: LIB3146-020-Q1-K1-G3
cttcacagcttcaacaacagcagcagcaacagccacccacacagtttcaacaaagccaacaaggtcatcagaacactagcatgtccagtggttcatcctcctcccagaagaatttgcagaaccagcagcagaggtcacatggaggtgatgtcagtagtggcagtggaaactctcaagtgtttcatgcctctaaaaaggattcacctcatcccttacaactatggcaacagcagcaacagccgagtcagaatgattctcatcaacctaggcaacttgatggtgaatcagatggcaaagatggcccatcaactgctactgatagcagagtatctcgttcaaatatgaatatctatggtcagaattttgctatgcctgtacagccttcaaactttgctttgatgaccgctgcttcaatga

SEQ ID NO: 38634 - DNA, 184 bp, Gossypium hirsutum
  unsure (1)..(184): unsure at all n locations
  Clone ID: LIB3146-020-Q1-K1-H10
cggtttcggaatttcccgggntcagacccacagccgtccggttaggcatatcacatgctcatagtagccattcctttagctagataccatgggagatagaggttataggcgctgcggatcataccatgtctgccattaggtagctagaatgataattagacaaagagagattagctagaaaaga

SEQ ID NO: 38635 - DNA, 443 bp, Gossypium hirsutum
  Clone ID: LIB3146-020-Q1-K1-H5
ctttcctatggcaattgaggactatatgactaaactaaaggacacctccacttcgggagcagtattttttgcagtttgtcgtggcaaggtcagtgaaggattagattttgctgaccatgctggaagggcagtggtcatcactgggatgccatttgccacacggacagaccccaaggttcgtctcaaacgtgagtacctggacctacaggcacaatcacccagggaaggatgtaagatgattaagttgttatctggagaagagtggtacaatcaacaagcatcaagagctgtaaatcagtcagtcggacgagttatccgtcaccgtcatgattatggagcgattatcttttgtgatgaaaggtttgctcaatcaagtcgacagtctcaaatatcagtttggatactgcctcatattaagtgttattccaaatttggggatgctg

SEQ ID NO: 38636 - DNA, 305 bp, Gossypium hirsutum
  Clone ID: LIB3146-020-Q1-K1-H7
gaagaccgggcccgacccacgcgtacaacgacgcatccgcatacccgatttggtgtgattgatgtgtgcacattgaagcagcggcacggcatccaaactctacgaactaatgtgcaattgggacacaccgattggtggagtacttatatcacataggagaatgtttgttgcgctgtaagaacaaagctcttcgacgctcccatcaaggctttacatttgaacatgctcacagctggcactgatacatcttcaagcacaattgagtgggcaatggctgagctaatttggcattccaacatcatggc

SEQ ID NO: 38637 - DNA, 191 bp, Gossypium hirsutum
  unsure (1)..(191): unsure at all n locations
  Clone ID: LIB3146-021-Q1-K1-A1
cccacgcgtccgggtttacaatttttctttttatccatgcacgttcccattattggtgggtccatgctcttcgatgttgccaaccatgagtacatatccaaactacttgtttacaattttccatataaaagctaattatttgtcccaacgtctcanagcacaagatttataaaatatatttcaggttattc

SEQ ID NO: 38638 - DNA, 344 bp, Gossypium hirsutum
  Clone ID: LIB3146-021-Q1-K1-A11
cccacgcgtccgatcgacgcctgcttgggacagaagtgagcttgccaccggaaaatgggaacaaaactcatgattcctaccttagcgagacaaatttcgataccaacttggtggttatattggcagctcttttatgcgctctgatctgtgcagtggggttgaactctatagtccgttgcgctctacgttgcagccgaggttttcgacggagaccccagaacaagcagctgctcgcttggcgacaacgggcctgaagaaacgagatttgagacaaatcccggtggcagtgtatggggaaggagtgagtttgccgtcgatggaatgcccaatatgcctgggagagt

SEQ ID NO: 38639 - DNA, 244 bp, Gossypium hirsutum
  Clone ID: LIB3146-021-Q1-K1-A2
gcaagaatagatgatgtcctttatgttaacgatgttatcaagcgctgtgctgaggcagaaacagtttcccttttcgacaggagaggattgggtggtcttccaatccaaaaacgaatgtccccaagccccttctcaattcagcacactccttatgcctctccttttgcaacgccaaccttctgttcttcaaccccgctcactggaagccctggaagggcaccttcctctttgaagagaaacattc

SEQ ID NO: 38640 - DNA, 270 bp, Gossypium hirsutum
  unsure (1)..(270): unsure at all n locations
  Clone ID: LIB3146-021-Q1-K1-A3
cccacgcgtccgcccacgcgtccgcccacgcgtccggacccacgcgttcgtgaagnaggggcagtttccatttttgacaggacacgattgtacggcctttcaatctaaaaacgaatgtgcccaagcccattgttaattcagcacactctttatgcatctaattttacaacggcaaccttctgttctttaaccccgcttactggaagccctggaagggcaccttcctttttgaaaaaaaacattcttaaagaggaattcaatttggaaaat

SEQ ID NO: 38641 - DNA, 294 bp, Gossypium hirsutum
  Clone ID: LIB3146-021-Q1-K1-A5
ctcggttgatagacatttacagaccctacttgttcttcgatgcaatgtatgcatctataaattcttctaattttatttttttacattgaaatctctaaatttaattatattatcaaatcttaaaaaacaacatcgaactgcacaatggtgtagctacggcttaattacaagattgaagtctgaaaaaatttaaaattcttaagggcaagttaggaaattattaataaaatatttagagcgagacaaaatgcaataatcaattataagaacgcgaggagatctctgtttggttaa

SEQ ID NO: 38642 - DNA, 246 bp, Gossypium hirsutum
  Clone ID: LIB3146-021-Q1-K1-B10
ctgtattgaggccttcagaaaaccgttcagaaactcaagctattgaaattgctattaccaaactgctcttaagatcatactatgacattgttaggaagaacatagaagactctgtgcccaaagcaattatgcacttcttggtaagtttaaaccgagtagatttgctaattgtgtattttttggtttctttctgctatctatccatgttcacattcaagctcctgatgactggaattcaaaaacgca

SEQ ID NO: 38643 - DNA, 236 bp, Gossypium hirsutum
  Clone ID: LIB3146-021-Q1-K1-B3
atagactgtggcccaacacggaaacgggcgcatcatgcatgcgtatgcagcattttaaggaatgctttgatactaacttatggacgcaatcgaaaatccataactactgcatagaacaaactcaagggggcaatctgactagctttaccaaagtaaacagccatcttgggtatcgagcctttcgcagttcaactatgtctggttccaggggatataatatgcgaatgatgtgagga

SEQ ID NO: 38644 - DNA, 305 bp, Gossypium hirsutum
  Clone ID: LIB3146-021-Q1-K1-B4
tcttttaggtttttaattaataattttaaaaaatttggaaccttgttcgacatggattcgaaatcggagtggacctctgtattggcgattacggatgatacaagttacgctgttactgctttaaatgcatattgggagtttgagaatgaaaaccccaaacgcttcgaccctcaaattatcttgcaagcttcttctttagctcggttgccgctcgaatcatacaatgtagacttggtcatttacatctctaggtcagttgaatttccttttgatgagctgtatgctgaaatctttatagttttggt

SEQ ID NO: 38645 - DNA, 409 bp, Gossypium hirsutum
  Clone ID: LIB3146-021-Q1-K1-B9
ctcctccagttgaagccttaaaacctgcaaacagcaccgcagcggagaaagctgcagaaaggagattttgaggtaatcttaagtaattaattggttggtttaggggcgaaatgggaaacgaagcaaaaaccacctccaacgtgggaggaggaggattcagggcgagaatggaacactacatatatagcggtgaaaagaagcatgtaatggctggcatcgccatcgtcgccctcgtttttggtgccccttggtttctcatgaaccgaggaacaaagcatcagtcacaccaagattacatggagaaagctgacaaggcacggagtcaacgactttcttcttcaaaataatagttaagttaatcaattgtttccttcagcagctttttgattgtcagcgcgggagctgctac

SEQ ID NO: 38646 - DNA, 220 bp, Gossypium hirsutum
  Clone ID: LIB3146-021-Q1-K1-C10
aataaatgataaaaaaaaacaaaaaaaatttactaaaaaaaaaaaaaaaaaatggtagaggcctattttcgggtcgcactataaagaatccagattcattaccacttatatgctacaacaagccttcttatacttggtatttaactacattcatctggcctagattattcaataatttgattgagataacgctggtcaaatccactataagtagtttgta

SEQ ID NO: 38647 - DNA, 258 bp, Gossypium hirsutum
  Clone ID: LIB3146-021-Q1-K1-C12
gtcctcaacaaaagatcatcaatttaaacggagggtgatgacttatttgtagaacatactgacacttactgaggcttgggttcagtatactgacccactaatgcagactttattaaacatctgtaatggtacctataattaagcataatataagatcctattataaagcacatgaggtaactatcatattatgcatttccgatctgccccagcaggcaggactcagtggctactcgagacctatcactacaaatgact

SEQ ID NO: 38648 - DNA, 329 bp, Gossypium hirsutum
  Clone ID: LIB3146-021-Q1-K1-C3
cggacgcgtgggcatgaattcatggcatgtttaaatttatttgtatcactcaatatcagggacgcgtgacaagcactactggcattggaggtactagtgcctatgcagacccctactagcaatgcacaaacacatccgacctatctgacgagccataacgacaccgcacctttagcgttcccaagccatttgtggctaacctaaatattgactgctgtgacgaaatcacatcgggcaccattaatgtttttgcagcactctaatgatcgctttaaaactcccttttgaatacaaaattctatcaattacttgtgctttaaagaaatgca

SEQ ID NO: 38649 - DNA, 207 bp, Gossypium hirsutum
  Clone ID: LIB3146-021-Q1-K1-D12
gcgaccggccgaatccgggtccccacgcgtcgagaattcgcttcgtacatctaggaactggctcaactgctgaaaacaagactgattcaccacaaaagactcgaagaaggggaagctcaatgggcactgctaagacattacatggactcaacacaaactttaacctttaatgcaggactcagaagtgctaatgccacgccagagcac

SEQ ID NO: 38650 - DNA, 324 bp, Gossypium hirsutum
  Clone ID: LIB3146-021-Q1-K1-D3
gatgcgcactatataaaggtaaatggagatgctttcgaatgctcttttcgatctctaaaatttgtcaatatcacttttgttgctgaagggaataggattcctgtgcctaagttaaccaagagaaacgagacgaggatcaagctgagttttggaaatggagcttgaactagaaaaggtttggcaagtacatgcagtgatgaccagagctttgaaaccaataggcaagatggatctgtatggtttggggttcgagccagatatgggctaaagaaggaagcagttgtagaagaatcaagaaagaagaatggcaagaactttagatct

SEQ ID NO: 38651 - DNA, 349 bp, Gossypium hirsutum
  unsure (1)..(349): unsure at all n locations
  Clone ID: LIB3146-021-Q1-K1-D7
cccacgcgtccggggttaatggtgtttcctgatgtgttgagcagcagcagcaattggtgattatataagatattgtatacatgatacatttaaaagaaacaaccaaatgtttagcttatggttgagctctgaagcggaactgctatttgtagatctagaagaacaggatacttacaggctgcactctaatcctttcttgtattcatttaatttttcatactaatttctcagaaaaagcgtcttttaccttgtgaggattttaaattttgtttcagatgacatcagttgaagacagaaattcacctgngatgcatatatatgcntgtgtgtgtgtgtgtgtgtgtgtgtg

SEQ ID NO: 38652 - DNA, 357 bp, Gossypium hirsutum
  Clone ID: LIB3146-021-Q1-K1-D8
gatcagtagagctccgctttttgcagagacaaaaatggaagacaaaacttctcagttcaagagtgcagacattgacgagaaaggtatcagaaaggagaagccagaggagttggtcatggcccttgctgaagcaaaggcagacgcaatcttacagaggcttcctgtcagtgattatgtaaaggaagctgagccaacattactaattacttctgatcaagtggtggtctatgaaggtgttataagggaaaaaccggccaatgaggaagaagcacatcaatttataaaaggctattcaagtgggcatgctgcaactgtgggatctgttctagttacaaaccttaaaactggattcagaaa

SEQ ID NO: 38653 - DNA, 371 bp, Gossypium hirsutum
  Clone ID: LIB3146-021-Q1-K1-E1
agatctaaatggtctctttattatttgttctaagatgaaattccactttagctcatgtaggaaatacgttaccatagtacacaattatagatgctaaacataagaacaaagtgatgattcctgacaaagcaatcttgtcagcgcctccgctttcacctcctggtgaggggtggagcagatgtggaagaagtagcttatggtgtaggagctagaagaaggtgtaaaacaagtaattgaagcggctgcttttgaaccaggttgctgaaatttcctcaatttgtaagtgttcctaaacaatcttaactatatgtcattggaaggcaaatgctgtggctccatccaaaaagggtgtcggattcgattgcttttta

SEQ ID NO: 38654 - DNA, 455 bp, Gossypium hirsutum
  Clone ID: LIB3146-021-Q1-K1-E10
ctgtctcgcttgtgagttggattgaggggaaggctgaattgtctctggttgttgccttgatatcacactattctactgcaactagccagcttgtgaagaaatgtttggatgtgtggagtgtgtagctcagtggagtgtttctcgtgaacctcataccatgctattgcaatgaactgcagttgctgtttggagtggaccggaattttcatggaggtgcatgataatccattaaatgcaccggttgatggtcccactcaatggccactgcgccatttggaggaacttctggaagagctaattgcaatagctggagtaagcaaagggaagaaacgcttcaacattgatctcacaccctattcaggttaggaagattccaagagttgttcgagtggataagcaagtgattgtttaccgttaaagcacgtttaagtagaaacagcggttgattcttgaat

SEQ ID NO: 38655 - DNA, 462 bp, Gossypium hirsutum
  Clone ID: LIB3146-021-Q1-K1-E4
cccactcgtccgaagaacaagccaaggttcttcaacattcgccagtgtgcataggggcggtgtgggggtgtttcataagaacaataacaagtcgaatagcccaaatctctaacactcatttgtcaaattaccttgcactgtctatttcattccctttagatatttttccagtaatttgcctggacaatttattggcatatattattattatttcctgtttatgcttttttagtttaactctaaattactgatttctttctaaaaactatttacatacctctttattttatctatattgatatgtttttctatatatcaatttaatattattttatattttttacatataattttatattttttattaatcttatctttaattatatatttgcttgacttcttttttaaaacttttatttattattttatttattacttatttacttttactttatatctatt

SEQ ID NO: 38656 - DNA, 394 bp, Gossypium hirsutum
  Clone ID: LIB3146-021-Q1-K1-E6
gaggcagtcgaaagacgatccgccgactgagctcgatcgggccgcacgttcttcatgtccggtcatttttcctgcatactcccggcctgaatttttacccttgtaaaaattttggccagggagaataacgcgctgaaacagcgcgtcatctgctcatgcacagcccccgcaagccctttcagacccacccccatcgcccacgggagacaagatgcccacgaaccaggattcacgcccgacggccgaatcggatcacggagaattctcgctgagcgaagtcccgctcgagaaacgcaccggatttctgtccatcacgatggtgctgctgagcttcacgttcttcaccggcacgatgtttgccggcggcaagatcggcgtcgccttcgacgtcgtc

SEQ ID NO: 38657 - DNA, 393 bp, Gossypium hirsutum
  Clone ID: LIB3146-021-Q1-K1-F10
cccacgcgtccgatactgtgaagcagatccagagcacttgtagccaaattattacattttctcactttgttcctaggcaagagctctgtccagagaaaagaatgctgttctatccaaacctcccaaaaatcattggctctgattggctcgaggatcgtataaggtctatacacggggttgaaagtagttcctttgcatgtcatgtgttcggccacacgcatttttgctgggatgctgtcgtggatggtatcagatatgtacaggcaccattggcatgccctatagagaggaaaagaagaatgaatgggggtgagactttggtaccatttcgtatttatttggatggggaatttggtgccaaaattatgccttgctattggtctgatttttatg

SEQ ID NO: 38658 - DNA, 263 bp, Gossypium hirsutum
  unsure (1)..(263): unsure at all n locations
  Clone ID: LIB3146-021-Q1-K1-F7
ttaacatgctccaaatcccttggaaaagccactatccgtcgtcctttactgtcttggataacaccttccaccacccttttggcggtcccttccacctattgcagttcgaacagtcttttagctactacctaaacctacaggcgcaacatcaaatatgcacaaaaaagaagaagaagaagaagaagaagaatgaagaagaagaagaagaagaagaagaagaagaagaaaaagagagtnaagaacacaagaataatagataaaag

SEQ ID NO: 38659 - DNA, 413 bp, Gossypium hirsutum
  Clone ID: LIB3146-021-Q1-K1-G10
cccacgcgtccgcttctcaacttagaacctacaatcttacagcaagtgatttggttaaagatcacttgcgatatttgatgggaggcagattgaatgtagaaaacgaggttctatgccgatttgttttcccggagaggcctggtgctttgatgaagttcttagacacatttagtccacagtggaatattagtttgttccattaccgcggtcagggtgaaacaggagctaatgtgttggtcggaattcaagttgggaagagcgagatggaggagtttatacaaagatcggaaagtcttggatacgagtatgtattggtaaccaatgacagcaatttccaacttctgatgcattagttaagaaataagttctcatatttatagaaatagaatatgtagctcgcaataaaggttaaa

SEQ ID NO: 38660 - DNA, 328 bp, Gossypium hirsutum
  Clone ID: LIB3146-021-Q1-K1-G11
tggaattctgcaaatggcttttaacatgttatcaatcaatagttgaaaaaaaaaatcatgttaaattcatatctaatttattttagcacttagaattgattgcaacacatctatatttgtttttccactttgcacccttcaaggttagctgaggatgtcttagtgggagtttatattagcctgttgtgcagaaaattcatacatgtattggggatagagattcaagggttcccccccccccttcctgtatgggtattgattttgttccattatgactctgttaatgcaacgcatagaattcagtagtgcatagggttataaatatacc

SEQ ID NO: 38661 - DNA, 214 bp, Gossypium hirsutum
  Clone ID: LIB3146-021-Q1-K1-G2
attttacaataagattctttttcttctttttcttcttcttcttcttcttcttcttatttttgattaatggttaacaaagtataaagtaataactattgtgaggaaatgacaagggagttttaactgcgataactgaatgtgttgttcacattgttttcaagttaattatataccagttgcatattatggttggaacaccattaccatccagctt

SEQ ID NO: 38662 - DNA, 260 bp, Gossypium hirsutum
  unsure (1)..(260): unsure at all n locations
  Clone ID: LIB3146-021-Q1-K1-H3
aaaaaataaatcggtgttgaagaacaacgtaaagagccatcgatcatcatctcagcagcatcacggtgatgtaatcacttgtgcaaagcctcagtcgaaacccaagattaagtctaagattaaatcatcaagaaaattatgacaaccgattttcattttttttttacatttttcctttactttttttttttgtattttcttttataatgtatgaaacatctcattttgttggtatatatttggctgcagattnccngnna

SEQ ID NO: 38663 - DNA, 420 bp, Gossypium hirsutum
  unsure (1)..(420): unsure at all n locations
  Clone ID: LIB3146-021-Q1-K1-H4
ggaannacccgggntcggacccacgccgnntccgctcttggtcgtttttcacttatactnnctggccttcaaacctccttccgagcccttannnatctgcgttgatgaaggacatgagattgcccgatttggggttttaattcattnntcaagcgtcatcgcgagaaggtgcgagcctcaatttgaaaaatggtgcaattttatgtgatttcatgtgttcttagaacttcacacgttccctccagatggaaaccggggtttggagaaaaatcactgtattgccgttttgttattattgtcttgattgtttagtttaatcttttattctgatttctgcacgtagatttcagctcgtaatgctggtcacttggcaagcacgtattgcgccctagccatactaaagacaggtggctttaatct

SEQ ID NO: 38664 - DNA, 302 bp, Gossypium hirsutum
  unsure (1)..(302): unsure at all n locations
  Clone ID: LIB3146-021-Q1-K1-H5
ggaaaacttgcgttgtgcgaggcaactggacgtgcgagcaagaacgtggagcaatgggacggttgctgcggcgtgaggacgtgtgtggcgcanggcaaactgcctaaggtttctgctgaactttttgggccactctgtaattgggctaggattaatagtttgggctttattgacttgggccttattgggccaaatgtatttgggccgttgttttatttttttatgcttatttatttgggcccgggcttaaaattgggtattacaattatattttagtaataatataaaaaatttattattna

SEQ ID NO: 38665 - DNA, 282 bp, Gossypium hirsutum
  Clone ID: LIB3146-022-Q1-K1-A3
gttgttccagcgccaggattgaggttgaagagctattgccacagtcacacggatataccgaacgtcagtttcttttgagaaaatctttagcaatccatattctgcggtgtaacttaggggaaatgcaacaggaccaagttcacagttgtataaaggatatcatgaagaaacgtgcgattcacattcactcgggaattctaaccctggcctctctctgcaatcagtcaggtgggcactaccctatagaaaaactatacgaaccatggtggcaataaagacatg

SEQ ID NO: 38666 - DNA, 276 bp, Gossypium hirsutum
  Clone ID: LIB3146-022-Q1-K1-A6
caaatctgattatatgccacctattctcactacttaggggatctttactgggatcttgagcaataataacttgaatagttaggtgttactggctgtggtactgacaataaaacttgcttttgagcttgtgtcatagcctgcagagctgcattgttgggttgatattgcttttccgatagctgtgataccgagtggtgattctagtgctgactggtataataaaacttgtagcctaacgtgtatgtgtactgctgttattgctaatgatatggtaaa

SEQ ID NO: 38667 - DNA, 322 bp, Gossypium hirsutum
  Clone ID: LIB3146-022-Q1-K1-B8
cccacgcgtccaccaaatctgacaaaatctaaaaaacgttttcaatctttcctttgcttgtgcttactttaaatccccttgtgctcattgatttttccctccatcgaattaccaaggcacaccacactcggtggccaacaacggctaaaaatgggtctttcaaccctgtttcaaagccatgttcggataagctgtctcttctactcttattttttttttttaaagaagatttatatatattttttaaagaagaaaacacaacacacaaaaatgatatttttgtttgaatcacaaggggagaaaactcccctattcttcgctt

SEQ ID NO: 38668 - DNA, 450 bp, Gossypium hirsutum
  Clone ID: LIB3146-022-Q1-K1-C12
aaaagctttatactatatcccctaaaagctttgcaagtccggccactgtcgctccagcattgaacttggtgttcggtcatgcgcaaagttgagtctctaactccgctcaagccactcggagggttagttgctccacaacatcaagagaatgaagggagaaaacccaaccccctcccttgatccgaccttggaggaatcgaggctccaaacgacgaaccaaaggtcacgaagacgtggaggaggaacgggcctgggacgtgctacacgcgagctggggcgaacatgcgtaagggttgcagcatgtggtttacaacgtgggtgacctaaggtttcctaggttggttgtataaattttgagcaatgggtattgggtctgtttaatggaaattgaacctgtttcatttttttaggtttatttattttttggtgatttgggcctgggcaattttt

SEQ ID NO: 38669 - DNA, 215 bp, Gossypium hirsutum
  Clone ID: LIB3146-022-Q1-K1-D2
atcctagcatggcggataagcaaagcctttgtatccatctaaatccgaaaataaagaagggggggtgcatgaatcgactcacattcagaaaaaaaaagaaaaacagaaggtcctgtcaaaactgtgagcataggccttacaaaaggcatcattgggacggtctgggcttaagaagagcggcatgaaatgatgtgtttttaaaacctgaactaaac

SEQ ID NO: 38670 - DNA, 338 bp, Gossypium hirsutum
  Clone ID: LIB3146-022-Q1-K1-D4
atccatgcaaggcggcaaagctaaaacttttaagcaacctaaatactataacaacgagtgcggggggcatgattatggctaacattcagaacaagaaagaagaagataaggtccttaaagagctcatagcaaaggcattacacaagggatcatctggtggtactggtcttaagaaaattggcatgaaatgaggcatttaaaaacctcaactaaaccgaacttattgagacatgtcttgggattaaaacatatattatgctaatgtctcttcgctcaattgtgattgtattgatgattagatggactagattcattccgagtttgctataaaaaacatt

SEQ ID NO: 38671 - DNA, 393 bp, Gossypium hirsutum
  Clone ID: LIB3146-022-Q1-K1-D6
cgttctcctggtccatggtcttctcttatgagaagatcacctgatggatttgggggccgttgggaattacctcatcgaagatcaccaccactttacaggatggagagaataaggtcacctgatcgtccttgttttgctggcgaaatgggtgttagaaggcatggatctccaccatatttgcctcaaccctctaatgatttgagagacctggatcccagtcgagatcatggtcatccaagatctggcatctctaataagagcccatctggtcgaattttacttagaaacagtagaaggttggatcttgtagatcctcgagaaaagaatgaatgtgacgattactttggtgggcctatgccctctggcaaggttcatgatctttgaactgatggg

SEQ ID NO: 38672 - DNA, 397 bp, Gossypium hirsutum
  unsure (1)..(397): unsure at all n locations
  Clone ID: LIB3146-022-Q1-K1-E1
gcagaaanagaaccgtccaacggcaccgagctagagacgccgcgcgaggggactgttggcgcgcggtgtggtggttcgtccgtatcacatggctggttacctggtgatattccacgaagccttctggcccttgcttttgagtaccgaacctgcttaggagcaccacgactatgtgctgtggcgcctgatctagcaacattgggatttgggcttagggnnttagtcttagaattgggcccacctgtgaatacgggcttagggattttaggttttgggccttttatnttgggtgttgggttttgtactancgcttactataatttggggttaatgggttttgaaatttggaatgtaagtggactgttaaagtttggactttttatttttattttnnaaa

SEQ ID NO: 38673 - DNA, 318 bp, Gossypium hirsutum
  Clone ID: LIB3146-022-Q1-K1-E10
gaatacggggccgacccacgcgtacgctctattacattccatcaccagactatgattataaacaaatctgaatgccactgggggaagcattattttacaccaaattactccttctatgcaacttatctatccaaagcacatatcatcacatcttactgatatttcatataaaaatacctatcctcagatactatcaacttcaagtgcactactatgcccaacaaaaaaattaaaataaatcagcctctagatctattacatattaacgcatattagcttatctaaaaactctaaaaaatttttattgataatatttac

SEQ ID NO: 38674 - DNA, 254 bp, Gossypium hirsutum
  unsure (1)..(254): unsure at all n locations
  Clone ID: LIB3146-022-Q1-K1-E12
tggacgcgtgggcggacgcgtgggcggacgcgtgggcggacgcgtgggttgtaacgttcctttttttaggtctgtgtgctttctcacccaaaggtctttttgttggtgccattgccatcttcgttgttttagcttgtaagcaatttatatatatatattatccagtgttgggttttcaaagcattaggggagctgcaggtgtttcacttgtgcgtaattcattatatatatatattatccagncttatttgatc

SEQ ID NO: 38675 - DNA, 307 bp, Gossypium hirsutum
  Clone ID: LIB3146-022-Q1-K1-E4
cggacgcgttgtctgacgctcggactgttttttatcacacttatgcaactaaaaacctggaagggagtgtttcaacctgttttattgaacctagatcatgttatctcatgatttcaacttcataattgtttacctaacataatctattaggcatacaactgagatatatggatgaacgtttcatgatgtttattgtgtcattgcagttaggaaggttaaacttcattcttggtctgtgatcacattgcttcctgtggatggttatgatgcttaaacgttccatcatgttttggccttattgaatgtg

SEQ ID NO: 38676 - DNA, 431 bp, Gossypium hirsutum
  Clone ID: LIB3146-022-Q1-K1-E5
cccacgcgtccggtgcttggtccttcgcacggccatttactccattgatgtgggcggtgacagctgcatttttcctcattgtgggatcagttgtgtggatccttgagcatagaagaaatgatgaattccggggccctccaaagcagcaatttgtcacaattttgtggttcagcttctctacgatgtttttttcccatagagaaaacacagtgagctcacttggacgcctagtactgattatctggctttttgtggttttgatcatcaactcaagctatactgcaagcctgacatcattcctcacagtgcaacagttatcatcacccatcaaagggattgataccttaattggtagcaatgaacgaataggcttccaagtaggatcttttactgaaggctatctgatggaagaacttaatattccaaaatct

SEQ ID NO: 38677 - DNA, 391 bp, Gossypium hirsutum
  Clone ID: LIB3146-022-Q1-K1-E6
tctccactcctcccaatgatactcttgtcattacaccccaacaagataccctcctgcggggctgtgacttaatacgagacccacaccacaacacttctaaacaagccgtataacgtcgatccccaacgatattttctacaacataatgacaatcgatcttccgctctttctcatgctggatacaacctgattaacaagctccttacctatgaccctgctaaaagaataacatcagatgatgctcttaatcatgatgctttcccggagctttctctgtcaaaatctaattatttcttacctacttttccaccaaaactgttaattgaacacttttcttggctcatttggcgaaacctgacacaacccaaaaatttttacccccattttacct

SEQ ID NO: 38678 - DNA, 346 bp, Gossypium hirsutum
  Clone ID: LIB3146-022-Q1-K1-F10
gttctcaataattacagaccaggataaggttcaaatgtctaaagttatgatgggggggatgcttgcaaagagcttgcaagccccggatgtagtgtttgaaaaggtatggcgtgctgtttatttagcttttataggggttgtgtttggggggagtggtgtcttccgttgaaagttggcggaaaatgccctccggctagttttggctgtgacacgcagcggtttacttactgaaaaggttttgaaaacaccacaggtgtttttaaaaacacctacactttctgtccacaagcacgggccttggtatattaccccgattggcaatatgtgattgttttttttggatccc

SEQ ID NO: 38679 - DNA, 380 bp, Gossypium hirsutum
  Clone ID: LIB3146-022-Q1-K1-G5
attgtcaaaaatgcttcaatctaaaagaagatcatcatgacaagcttaactaatgtggggagtgttatataataaacagaacatgttatcagatgttatacataatcaaaacctcaaatgatacgctttgcaatgcaagaactttagactctatataatacatatgttctgcttcgaagaatggataatgtaatgcaaccattcttacaaactaacacatttgacttacctctatgattatctatccattatgactaccgatttgcaagtgtaagttggtggaatgtttatgggtttacttcaaatttcatctttctttgtttgattattgagtgatagcaataattcattccgaacttatgtaaacttttgcctttttt

SEQ ID NO: 38680 - DNA, 395 bp, Gossypium hirsutum
  unsure (1)..(395): unsure at all n locations
  Clone ID: LIB3146-022-Q1-K1-G7
gaaggaanaccgggccgacccacgcgtacgacacgcgtacgattgtcatgttaagggctttggtgttaacggcttaacggtttgttgggtatacatggatatgcgacgattgatccattcttgactttatgagggtagattttcgcgaggagggttgggagtcttagtcgttttatattaaaatgttctcattttaagatatggaattattgatttgggcgtgggactatattgtgggagatgttgcatcttgttaatttgaacattcttcgcttttgcttattgtgtattaattaagcaaaaaaaaaaagataatttgtaccattttagtcgttatcaaaaaataaaaattatatgttctttggataaaaaaaaaaaaaaaaaaaaaaggccgc

SEQ ID NO: 38681 - DNA, 147 bp, Gossypium hirsutum
  Clone ID: LIB3146-022-Q1-K1-H11
ttaagcaaaaccctatccactctcttctcaactccccaatgggggcttataaccacgtggcggatctattgaagaagaaccactcccccggcatgaggtttttacacacggtgaggcgctgggaataccgcctgcatcttttctatt

SEQ ID NO: 38682 - DNA, 257 bp, Gossypium hirsutum
  unsure (1)..(257): unsure at all n locations
  Clone ID: LIB3146-022-Q1-K1-H2
cccacgcgtncgcccacgcgtccgcccacgcgtacggcaataatgaaatatttatgtggtgtataaaccaccctttcactagctttaacaaccctagcaaaaattacaaggtttgctcagttatcactactcatttttgtgacaaaaactacactcataaagctaatcatctatcagatgcctgcaaaaaatgcaatcattcacttaaagcatatagtgcaaatgctgctattgatttatcaatttttttgaattac

SEQ ID NO: 38683 - DNA, 340 bp, Gossypium hirsutum
  unsure (1)..(340): unsure at all n locations
  Clone ID: LIB3146-022-Q1-K1-H3
ccaacattcaatagaccacagcaccttaatttcgggagataatcgagaagtggaacatggtttatctgttaaactgcaagttcaaaagctaataatccaagctacttcccatgaaaatttatgccagaactatgttgggtggtgtcccttttggtgaagaaaaacaaatgtatattttgtataaaacctgtacatatctgtatttaatgtaaatatattgttttctttttcattcttctttctctgttagtattgaagataaaataaaattattgtggtaaatctatttatcacattgaattaagttatcaatttcatttttcccatgccaaacangnna

SEQ ID NO: 38684 - DNA, 296 bp, Gossypium hirsutum
  Clone ID: LIB3146-023-Q1-K1-A1
atcgattccaagtttgtggatcggttagtgaaaattggtggcattgttgctatgcaattaggtgatgaaatctcaccaggttttcaaaaccatccggttatattaatgggtatcttaagaaatatcattccaccattggtgcaatgaaaaagcttggttcaaagaaccatttattggattcttcagctaaaaggaaagcttttcagttaacaacggaagctaaaaaggcagcattgagtggtttggagatgtttgttgaaccaccagaaagctggctaatacatctactgagaaat

SEQ ID NO: 38685 - DNA, 158 bp, Gossypium hirsutum
  Clone ID: LIB3146-023-Q1-K1-A12
aacaagtagaaggtaaaagttttattatacattgagatgcgctcaaggggggctactagggtatgcagtgccgcaaacatgcaaggaaaaccgtggattctacaacaggccatggatagtataaactgtgtttaggtgaagataaatgtgtcatggca

SEQ ID NO: 38686 - DNA, 388 bp, Gossypium hirsutum
  Clone ID: LIB3146-023-Q1-K1-A7
gtttgaatcaaaggggaaatggaggaagagaagggaacaacaggaagcataaacctaagcctgaatggtaaagaagagaaaataaatctgagtggtcaggttcatcatcttccattctgcatcaaattcaatggcccttgcactgtttctcagtacttcaaacccaaacttaaggggatggagattgatggattagcagtagaggaagcgcattttagaggaaggaagcttcaaggaactactatttctcttccaaatggatatgctggctttgttcttgcgaagaacaactctggaaagaggaaagcttgtgatgtatctgaaggaaactcaaacgattgggaaatgaaagccaaatttgataaattgacatattggaatcatgatg

SEQ ID NO: 38687 - DNA, 341 bp, Gossypium hirsutum
  Clone ID: LIB3146-023-Q1-K1-A9
cgaaaagtgtgaaaatgaccttaactcaagcagaccctgcatggacagggctctctcttctaacggagaaaccgacgctaatgatcttcggtagatacactacaatatacggagtcgcttatgttatactatccattcaaattataaacagatgttggagcatgcgtatgaaacctaagactgaattgaggaaggaactaaagtaaactgctaataaacggttattccacgaacgctagaccctcgaacggcatgtctatcgttcggtagaacaaaattttgaagaccaactctatcatagcggtgatgtttcatatatactgatgtaaaaaattgtcggg

SEQ ID NO: 38688 - DNA, 426 bp, Gossypium hirsutum
  Clone ID: LIB3146-023-Q1-K1-B1
ctcttttaatcctaggaaaaaaacttcgtttatggactttaatttcgtttttttttgttgttgcaggattcagttacagctgaaggagcaaaagtttctgaggaagggataatagaaacgtttgaaaatgacgatgaagctttggatgcattcgataatgtcttggtggttatggacctttcacattttggaaggttaagagtcagtggagatgataggattcagtttcttcataatcaaaccactgccaattttgaatgtcttagtgaagggcagggatgtgaaaccgttttcgttacgccgactgcaaggacgattgatattgcttatgcttggattatgaagaaggcagttttattggtgctttcaccagagacatgtggaaacataactgaaatgctcaataagtacatattttttgcggat

SEQ ID NO: 38689 - DNA, 288 bp, Gossypium hirsutum
  unsure (1)..(288): unsure at all n locations
  Clone ID: LIB3146-023-Q1-K1-B12
gaangggcggggcgacccacgcgtacggttcaattctttcattccttgtttaccttctaagccaaacgaattcgggtggtgtttaaaaatggcgccaaatgctgaaaaaaggccagtcgataagacccctgcagcggaacaataaggctgggttcataaatgggtgtcagagcctaactctaatgctgcggaaccgcttcctatgggaggccgatcgcttgtcggagacacgactaagttttgagggacttatagtgagttggcaatgaagcactacataggccttgt

SEQ ID NO: 38690 - DNA, 367 bp, Gossypium hirsutum
  Clone ID: LIB3146-023-Q1-K1-B5
acttcacgtgggctcgttaaatcactgatttaatacttgcaatgcacgaacattgaaggtggctaagtgacttacatggcgtgctgtctggaaagaaagatgcgccaaggtctcttcagaggcatcgtgcgttgctatcggttagcctattgcctccggtgatgccggtgattcgaggctgaggatgtctatatgtggtcactgatcgatgctgcatctcttcataatcagtcacctctatgaatatcagacaacaacaacactgtttgagacgaggtcggtaatcttgctgtgtaggtcacggatcgcatataatttctagggtcaagaattgtaaggtaaagttctatttacgactttgaatcat

SEQ ID NO: 38691 - DNA, 349 bp, Gossypium hirsutum
  Clone ID: LIB3146-023-Q1-K1-B9
ctcctgcgatgcatttcgggttgcttttctgcacacaacgacctaagggtgggactcctgcaatgcgtttggggaaaaagccacgacgaagccctatcataacatatctttacatagccagccgtatctatgcgaacgatcggatatgacgaattgccggccttgcgtgaggggcacatgttatctacatgacctacgatcacaaacatacatactgacagttacttcggagagatctgtagattgacgagaacatagtagatattatttcctcccaccattaatatgtgttatgtatttcatatcaatctgcctatctatgaaatgaatgatatttctgaggattgat

SEQ ID NO: 38692 - DNA, 397 bp, Gossypium hirsutum
  Clone ID: LIB3146-023-Q1-K1-C12
gtgttacagattatttgaagtttttttctaaaacttttaccaaaaatgcgcgggtttgattcataaaatcccagccttgccaaattactcaccaaacgaaaaaggcactctctctaaaattctgcattagctttgacctctgcacgtcacatcctctctgcttaaaatacttacatatcactctatgtttccgctcctaataaacctgacaaaatctctatctctattcataccgattatattgatcattaccagtcaaaataattccattatatacttatttatccactacaaaataatatctatattttgactacatatttatcacaaagtcttgccttttataacttaatatttaatttaaattttttgtattattaaatttttttcatttatt

SEQ ID NO: 38693 - DNA, 353 bp, Gossypium hirsutum
  Clone ID: LIB3146-023-Q1-K1-C2
tatatatatatattgttcatatatacataaaaaagttccctcggcgacctcgtccgctcttcgtggcctcgctcgcaaggtaataatgtaccgagaccagctgccgtttttgctttgcaaaatgtgtgttgttaattgctattagtgaaaaatatgaaatgggttttccttattattattatcattattatcattattattattattattattattattattataggctccagaggggtctcaagagaaagcccatggctctaatcaagaaacttcgcaaggcggtaatttgttcttacctttcctctttcatttcttatgtttatcaattttggattatcttaatctaaaat

SEQ ID NO: 38694 - DNA, 426 bp, Gossypium hirsutum
  Clone ID: LIB3146-023-Q1-K1-C3
gaaaggtttgctcctagaaatgaaacaaattttcaaacctaatatctccaatggagacctttatagagatgatcaagaggggagctcaagaactactatgtcaggaaatggtgataccatgatccaaacctccggttttcacagatttttacatgccaaatatctcaaccccgctcaggcggtaccactttacatattggcacaaattctgggttcaattatggcagcattaatgggagagtttatctatggcataaaatcggatgttttgacaacccggcctggccaaggctgccaagccgccttcttggcggagctcatcgctgatttcatcgttgtgtttgtgattgcagcggtgacacaacaagcacgttcagttggtccactgtctggactggttattggaatgtccattgcgctagcagt

SEQ ID NO: 38695 - DNA, 267 bp, Gossypium hirsutum
  Clone ID: LIB3146-023-Q1-K1-C5
gcggatttgctctcattgagacaaatctaaaatcctaaccctttgcattgtgcacctccattgcgatgatcacgaggggaactctagaactactatgcctggacagggagctgcccatacccacacctaagggtgtcacagagccttacatgcccattatacttacctcgctccggcgctagcgctctccatttgcccactcacacggggtccaactcttgctgcttctatgcaagagggcctactatatcccataatgccatgact

SEQ ID NO: 38696 - DNA, 278 bp, Gossypium hirsutum
  Clone ID: LIB3146-023-Q1-K1-C7
gcattccatcaatgtctagcccgcgctgaattactatgacaaggacccgtggtgcgaagccatgaagaccatggaatccatcgttagcttgattcctatagcaactgcttgaaccagccattgagatcaatgcatttaatatatagaaagattttgttaataaacaaagtatgataaatgctctgatagatccatgctgctatattatatgaactgagcagtgtgactaatctactaagagtttcactaggaacgaagagagtagtgaatatatatga

SEQ ID NO: 38697 - DNA, 370 bp, Gossypium hirsutum
  unsure (1)..(370): unsure at all n locations
  Clone ID: LIB3146-023-Q1-K1-D11
gaacatccaaaaacaatatggttagattttgatggactaggacaaggggtgggacaataacaaggcggtccaagaactgaatgttgatgtggcaaacttctcattcttattggatacacctggcacggaaacgtccgaaatgtaatgcgacggaaagaaacgaatcaccatgaagccctatagggggcatgactcacaatctcgcctttttcagatcgacctcatctgttatgatataatcgacagcgcaatcaaaggctgtgctggtggtatccacctcccttctacatgcagngtcaatcaagttcacgaaccttagaaggagctattggatcctgcaagtaaatgaacgcttaatgttctgacaagc

SEQ ID NO: 38698 - DNA, 323 bp, Gossypium hirsutum
  Clone ID: LIB3146-023-Q1-K1-D5
caatatccaaggaagattgttgctgggctttgaacctgacgcgggtgtagactcgaacagagtgattgaccaggataaatcgctcctagcccggaaatacttgatccatgtgatgtattttgtccatttacatggatttatgatctggacctgaaaaagacaggtgtggatgacgctcatgccgaggctaaaatgctctcatgattgaccgaaacctttttttttgtagggctcgactcttctcgtgtagattgcaactagggtttggctatgcatcttggtatggatgcctatcgctttcgagtcactgttgaacaatcata

SEQ ID NO: 38699 - DNA, 228 bp, Gossypium hirsutum
  Clone ID: LIB3146-023-Q1-K1-D8
accactgcgtgcgaccgttacagggctacttttacaaacctgcagatggcgtttgggcgcggggcaaatatgggacaatgccggtctaaagataaatcgaactgacctacttgctagcaatctgagagagttgaaaatagatatgtgcacacgctcaacctctgacgacgataatgatcatacaaagtctcaaccgaagagtgacgcattcgttgttgctgaagacaa

SEQ ID NO: 38700 - DNA, 192 bp, Gossypium hirsutum
  Clone ID: LIB3146-023-Q1-K1-E1
cattcccttactctgatattcactagaagtttgtcttttcggcggcggcgggctgccactgggccagggttaaagatgggtccacaaatcaactatgctagaggccgtgaaaactactggaaggacggtatctaggggccatgtgactctagttagaggcttgcttgtgatgatcacaaccgtattattatg

SEQ ID NO: 38701 - DNA, 257 bp, Gossypium hirsutum
  Clone ID: LIB3146-023-Q1-K1-E10
gggagacccacgcgtccgttctggtgttttccttcgctttttttttttcacccacaaaacaggggagggtgaaataaaaatggggcggtccaccttaagcaaagtatgaaatcctttcctacttaacgagatgagaaaactcatatttaaatgcatgttattaaacaaacgatacctaatattaaaattataatcaaagatggcactaaaacaatctttttaaaaaacctgaagtccacactgtgaactacaactaa

SEQ ID NO: 38702 - DNA, 156 bp, Gossypium hirsutum
  Clone ID: LIB3146-023-Q1-K1-E6
gcgggggtcctttcttccttttaggcttattctttctactgctacgttaactgatgacgacgatggtctatgtcattatctacctcacctgcatgaacgccatcaagaagacacttcgtgcgcttgtacaagaacgagagcatgcagattagatgc

SEQ ID NO: 38703 - DNA, 326 bp, Gossypium hirsutum
  Clone ID: LIB3146-023-Q1-K1-E7
cccacgcgtccgctcaagctgtgctctctctcttctgtcaaatcaaccgtggggctccaggaaccaggctttgaatttttctgtaaatggcgtgataagtactgaagggtcctctgcggcacaaccaacaacgcttcatggtgcagttgtgaacccttattcaaatgcctctttggatttcaatggcagtgacactgttcgcagttctcacaagatgctgccacacctagatttgggtcaaatcccagaccctgttaactgtcaattctctagtgaccttgagttgtctcaacaaagctggatgtcatatatggaacatgagcagt

SEQ ID NO: 38704 - DNA, 390 bp, Gossypium hirsutum
  Clone ID: LIB3146-023-Q1-K1-E8
cgacccacgcgtgcggtatctttcatgcattaggcctattctttctcgtccacggtgactgaggaggacgagtttctatgccctaatctcaatcaccagcttcaacggcatcaaggaatctgttctgatactcgtacaagaacgagtgcaagagacttagttgcaaatgctgtagagtgaccacttgcttctgaccaacaagaacaagatctcgtggacctggataaggaccctaaacttgactatgactgtggattgacttcaagaaaactacctgtattggtggaagagaattcgactaatgctgccgatgttcatatcatgatgaataagtctccataaacagctgatgctctaacaattcctgttaacatggacatgagtctacac

SEQ ID NO: 38705 - DNA, 257 bp, Gossypium hirsutum
  Clone ID: LIB3146-023-Q1-K1-F11
acaacgcgttctaacgaatgctaatgttgccatatactaccatgggaaacaggattgttcaaaggtgatacctgctactgttgatgtgctgcatagtgtatatggggaggtattctgatgtgctctagaagcacatatgctgaactatgtagctgaaacgtatacaacgggttcttgtttatagtactgtactaatggaaaaggcaatgcagaacctggatctcatttactgctaagagaaattattgcagtctctc

SEQ ID NO: 38706 - DNA, 427 bp, Gossypium hirsutum
  unsure (1)..(427): unsure at all n locations
  Clone ID: LIB3146-023-Q1-K1-F5
ggttgacagcacttcttgacaagaaagaagcgcagcttttggccatgaatgaacaatgcaaagtaatggcactaagttcttcaaacatatgaaatctgatctcattgtctatctcgttctactgcctgttggactgcgctgcctggttgcttagttacaacagactagatcaccagccagataaatattaggtgggacaactaatgctgcataggcgtgtttgcaacagatactcttgaaagtttaacatggaactngaattattgccattgttgtgctttcgaaattgagccagtatgcatggatgcatattattgtgctttcggaacacaattttcatcttttctgtaaagctagaaatctctgtgtttgtcgaatatcccacctttctcgctgtctcttttcatctgaaactaaaatatagtgc

SEQ ID NO: 38707 - DNA, 179 bp, Gossypium hirsutum
  Clone ID: LIB3146-023-Q1-K1-F7
tcgcccacgcatccgctcacgcgtggtttggattattagattgggtcgacaaccgaatgtgatcgtgctttaccaggtgatggctgctcagacgaatatacatttcgttatatattatgcctaacgtggtgaaatgctcaacaacgctgcgtcagggaaatttgcagatgatgctgcat

SEQ ID NO: 38708 - DNA, 250 bp, Gossypium hirsutum
  Clone ID: LIB3146-023-Q1-K1-F9
gaacccagaaatttctcgcacctgcatcatataatccgcgtaaagggaaaggggcacagcatcatggggatgtcatatgcactctcactcctataatacatccagggttggcttaagacatggctagcgacaacaggacaaccttccatacatcaattctgaaatgagccttgaaatgaaaaaaacaacttgttcatcctcagccgaaacataggatactgtcgcaagatctgtcttggcgatatgaaac

SEQ ID NO: 38709 - DNA, 268 bp, Gossypium hirsutum
  Clone ID: LIB3146-023-Q1-K1-G11
ttcacacattttctttaccacttaattttcccaaaactaccatttgcggcgggcttattcaaaggtgggacgcacctactcataactatcttcacatgttaaatattgcggtataccaatctgccttaaaaacgcaaatactttatcatgttcctgaaactaaatcaaaaagtttttttttatttcactctactaatgtaaaatgagatgacgaacactcgatctcctatattcctaattataatgattagactctctcatactatcc

SEQ ID NO: 38710 - DNA, 216 bp, Gossypium hirsutum
  Clone ID: LIB3146-023-Q1-K1-G3
cccactcgtccgctgtagcagcttctgtggctcctccagaggctactgagccgaatccggagtcggtgctgaattcaacggacagtctagcggaccgtcccgtttcgcaaccgatctcatatccggccacatatttgtgtcctcagtttgggcctgattatgatcatgctgctcatgactctcatcatagaccacaacatattcctgcggatcatg

SEQ ID NO: 38711 - DNA, 257 bp, Gossypium hirsutum
  unsure (1)..(257): unsure at all n locations
  Clone ID: LIB3146-023-Q1-K1-G6
cacgcgtgcgnccacgcgtccgcccactcgtccttccactcttacttccacgcccacgcgatgacatacgcgagctggctcttactctgatgcggaggctgtacgcgctaaatctgctgttcatattcaaagccatactcaaacgcataagtctaaggctcatgcgcattgagttcatgacaatgatctccattgactaagataaaaggataagatctattttttaccaagaacctacattgactaagaaaaatgac

SEQ ID NO: 38712 - DNA, 272 bp, Gossypium hirsutum
  Clone ID: LIB3146-023-Q1-K1-G9
atcacacgtttttctttccacttaaatatccccaacctaccatatggggggggcgttttcaaagaggaggccggctacaaatcaccatccgaacaaaatatatattgtgggataccaccctcctttaaaaaaccaacatctgcaaaaagattctctaagcatagtcaaactgttttcgttctcaaacacaaaaagatgtaaaaggagagtactgacacctacctcatctacatctttaatgaatgatacaagtctatccacatatccctatc

SEQ ID NO: 38713 - DNA, 328 bp, Gossypium hirsutum
  Clone ID: LIB3146-023-Q1-K1-H10
tccacgcgttcgcttcattacattattccctaccctacattgctctgagagtgaatttttgaagtgtggatatttggacataaatatgatatatgattgatactatttaaggttaaaaaaaaaaaaaaaataaaaaaaactttctgtatttggtggtgcgactttaacatttcaaatgaaaaagaaagatgataaccgcaagctgttttactctagagccaagcagaatgcaaaggagtatggagctcatgaaaaagagttgattaagatgaagctcgaagccagataaaaaagagggttttatgttaatacggaagcttaacttttg

SEQ ID NO: 38714 - DNA, 159 bp, Gossypium hirsutum
  Clone ID: LIB3146-023-Q1-K1-H2
tcgcccacgcgttcgcggacgcgtgggttcaaatgctccgggtgtgcaagaacaagtccttataaagaaaataatcaagccgcacgacaagtatattgcatatgtgaccgacttttttcaaaaccatactctcttccacaagtgactggtctaatatct

SEQ ID NO: 38715 - DNA, 142 bp, Gossypium hirsutum
  Clone ID: LIB3146-023-Q1-K1-H4
ccgacgcgtgcgtagacgcttgagttcaaatgatccttctgtgcaggaccaggtgcacatgaggaaagtcatcgagcaccacgacaagtctatgccgtatctggccaagtttgttcataagcatactgtattcaagacgaga

SEQ ID NO: 38716 - DNA, 321 bp, Gossypium hirsutum
  Clone ID: LIB3146-024-Q1-K1-A1
ccggaacgatattgcttaagaagcccttgtatcgagaatcaactgatatagtcattcactctgtaggagatcaacctgaatataaagccatcgccgaaataggaactgagcttgccggagacaagaacctgcaagaatcagaaatagatggtatgaaggaaatcaaaaccactgatgctggcaaagtggttgaaaaaccagccttaagagttacagaaactactagaccagtgctctgaccataatcgttgctcagctgagccggttgacaggctcaacgttgggccatgtcgagaaacccctgctgcagaactctgcagc

SEQ ID NO: 38717 - DNA, 399 bp, Gossypium hirsutum
  unsure (1)..(399): unsure at all n locations
  Clone ID: LIB3146-024-Q1-K1-B1
accggntcggaaannnccgggggagccacaccttcgctactatttaatttttaaaaacttatttaaaaagatatttcacgggtgcctggtttaataaggaggcgggccgcaaaatatcattctcttactccacagatagatgatctcttcagaagaaagaacgctagtgatccttcttaacctaccctcactgtagagattgaaacacacaagcagacacagtttttgctggaagcatctattcttcatcagcatgcatcttatactaatcgaaagctaatgacattacaaaccaacatagggaagagttactacatcgatgatattttaaggtcagggtcagccaaaccaagcacgaaacaatccatggattggattacaaacaacttacatgaagtt

SEQ ID NO: 38718 - DNA, 433 bp, Gossypium hirsutum
  Clone ID: LIB3146-024-Q1-K1-B10
aattaagcaagggcagtatgtgtacgatataccaactgcggcaaatagcattgggggtgcacctggtgatctatcaaatcacttgcagaatcttaaggcaaagggagaaataacatatgagttgaaggatccagcctactgctataagattgtaaaggttcctagtgatttctgttctctcacggaacttcttaccagatggttactggatattgaaaattgcaaggtatggaaataggatgccatgtacagttctgcagtttttgtagtggatacatgtgagaagacacatgattgcaatgttgctcagcagacaacatgcttgcaagagagaattttggattattttaagggggacaataaccttgacgttcttgataagatgggtcagaacagcccttttgttccagcagatataaaggtctttctgcag

SEQ ID NO: 38719 - DNA, 400 bp, Gossypium hirsutum
  unsure (1)..(400): unsure at all n locations
  Clone ID: LIB3146-024-Q1-K1-B5
gaactattgaatttggaaaaactaggcaaaagtgatttttcaagggtaccttcattaatgaggaagcaggccagaaggtatcaagctcttactgcaaagattgatgatctctgcagaagaatgcaggctagtgatccctctgaacctaccctcagtgtagagtttgaaacacagaggcagacggagtttttgctggaagcatttcggcttcagcagcatgcatctgaaactggtcaaaagctaatggcattacaaaccgagatagggaagagttactacaaggatgatattggaaggtcagggtcagccaaagcgggcacgaaacaatccatggattccattagaaacaacttaagggaagtacanagaaaactggagatatggttggccagaattatag

SEQ ID NO: 38720 - DNA, 104 bp, Gossypium hirsutum
  Clone ID: LIB3146-024-Q1-K1-B6
ctaaaatctgagacggatggacggaggaaatgatgcagctcgagcgttggatgattcaggagacagcttggactacggatgctataatggaacagaggtagaaa

SEQ ID NO: 38721 - DNA, 342 bp, Gossypium hirsutum
  Clone ID: LIB3146-024-Q1-K1-B7
gttctatggccatacggagcagaaatcgctcgtagtgacgtggaggaggcttgaatgctgcgatactggtttcgtgtgaggctgttgcgcacttgagcttggtggcttagggtttccagagacctcacctgtccgggccatttgggccagacaatcgggctattttagaagtggattgttaattttgttagggatttgggtttaggtttattaggttgggcttatttgggcttttattattgggttataagtgatttgtaaatggactttgatgatgaactttttttggttttttttaattttttttaatttcgaacacaagacagtacataaataaaaata

SEQ ID NO: 38722 - DNA, 333 bp, Gossypium hirsutum
  Clone ID: LIB3146-024-Q1-K1-C12
tcggtcacgccgttcgattttaattgtcaggatgaagtatgactgcgttaggaaggtgccgggggtggatagacataatcaagtgctcagcttgtgatagatgttctgatcagaacaccatagtgtctaatgcgtctcgatcgtttccatgcttacttcttcttagatgccgcatcgcacatctaagcggacgaagatgtacactcatcgaatcccctgttggttcgcttgttgcaccttcatgaacattaataagttgtctgatgtggataatactgctatctattatgtaccttttatgatttaaagattgaatggacttacgatagaatc

SEQ ID NO: 38723 - DNA, 430 bp, Gossypium hirsutum
  unsure (1)..(430): unsure at all n locations
  Clone ID: LIB3146-024-Q1-K1-C3
agaagatgtttgaggtatttgctgacatggaagagcttggtgtcaaaccaagtatatcagttgtttcaatggttggaaatgccttccaaaagttgggcatgttggacaagtacgacaaattaaaaaagaaatatcctccaccaaaatgggaataccggtacatcaagggaaagcgtgtcaaaattcaagtaaagcagctacaggaatttgataaaaaggccaaaggtgtcagtgaggacaaggaaactgaagagaattcgagtttagagcatcaggaagcagaagcaagtttaaataaaattgccaaaggtgccactgaggacaatgaaactgaatggattatgaaatntgaagcatgaagaaccagaagcacaatcaaatacattcactgctggagttgatataatttcatgattaatcaatagtctta

SEQ ID NO: 38724 - DNA, 319 bp, Gossypium hirsutum
  Clone ID: LIB3146-024-Q1-K1-C7
accggatcgaatgtttaaatgattttctctatgaggtctttttatgattggtggaaattcttaatgcccaaagcttgtattattttcgtcaaaacaaaaaaaaaaaaaatctccgcagaaagcaagcaaaacataccaaaaaatcaaccggactaaaaaagaaaaaaaaaaaaaacattcaaaaaaaaaaaaaaattgaactaaactaattataaaaaaaaaagcgctggcccttttagagattcaaactttattttgccttgctggtggactcaaacctctattttagtgtagcttaaataaaaatggggggcggtca

SEQ ID NO: 38725 - DNA, 426 bp, Gossypium hirsutum
  Clone ID: LIB3146-024-Q1-K1-D10
cccacgcgtccgcattcgcgtgcggttaagatggtgacatcactggattctggatgcttgataaagaaggaggacttcaaccggtccatctgaatgccaaattcgagaacgagtagccggcccgtcttgaaacaatgttcgtattgcaaacacctcgaaagtgggattatgttcatgagattcatggagctgttttataatgaaaacggctagaagttcatcaaaaaatgactgcatatctattattacttgtcactactctatcattatatctgcttgcctccgtagcgtcatttattttgggttgaagcataacttgaaatctcatgtagcttttatgcagatggatcatattgcaggtatattccaatgtaccgatgatgcagagacctgattgcttccttttgcccaacatgctactctgga

SEQ ID NO: 38726 - DNA, 363 bp, Gossypium hirsutum
  Clone ID: LIB3146-024-Q1-K1-D12
gtacagaacagaactgggtgttaagatcttgtattggggggctgagtcacaggcgggggatcaacacaggcgtgcaaaaattaggggttgtggtttgatgaaagctgaattggtttgcttaatgatgagcctggattgctgcaaggaagaaaaagagaaacttgaagcttctatgcaagactgcaggggggaaaaatctcaaatctcacttgaacttagcgtagcgcaagaattgctcgtggcatacacataaaccatgaatgtgcagaaggaaatagatagcaaactgcaaaatggctgcttgtctgatgaactagttgccaataatgctcaaactaccgacatttatactaaatatttgga

SEQ ID NO: 38727 - DNA, 403 bp, Gossypium hirsutum
  unsure (1)..(403): unsure at all n locations
  Clone ID: LIB3146-024-Q1-K1-D2
caggaatgtgagagacaattagctgctaaagaagcttctctgcctctggagccatcagccgatgaggaaaatgctgtaaaccttctagtgcgaatgccagatggcagtcgaaggggccgtttatttctcaagtctgacaggctgcagtctctctatgacttcatagatatcggtagaggagtcaagccaggcacttaccgattggtgaggccgtacccaaggcgtgctttcagtgatgatgaatgcagcttgacgctgaatgaacttggattagcaaacaaacaagacgccctattttggagttgatctaataacatcttaactattacatgaatatcatagaataccactaggtaatnttagttcacttagatatggaatttcataaggttcgtgaatgttg

SEQ ID NO: 38728 - DNA, 290 bp, Gossypium hirsutum
  Clone ID: LIB3146-024-Q1-K1-D5
cccacgcgtccgattttcttcatttttttgggatggaaggtgatgaaggggcggctaatgatcttaagggatcagtgactcatacgaatgctttaaacagcttcactgctagctctcagataatttttgcaagagtagtgggtgtgctgcttcttttgcttgatagcggctgactcaactaccttgtgatggaaaatctgaaatgtaagaccctggatccgtctttctgaccatggtctttatggtactatgtgcgcagccacacgttaatgctgtaccagatgcatatt

SEQ ID NO: 38729 - DNA, 409 bp, Gossypium hirsutum
  unsure (1)..(409): unsure at all n locations
  Clone ID: LIB3146-024-Q1-K1-D8
cccacgcgtccgaatctttcaccttatcgtatttttgtagtagtttcaaatggaaacaaaagagaaaaaaaagaaaaagaaaaatccaaacagaataatcaaagcaaaaacgaataaaggaaccacctttttattatttttgattttgatttctatcggatttttttttatatttcgaatatcgagtttttatttccaaaatcccccttttgacaatcgttttttgtgtggctttatagccaaaatacttgttactgttctatcactattcggccttgcttctgctgcagcgttttcgctgtgtttttgctacttttgggttactctgcaggtctgctaagagttaacgggggcaggtntacgttttggtacaggagcgagtggtgcgctcgagcacaggggggagctg

SEQ ID NO: 38730 - DNA, 371 bp, Gossypium hirsutum
  Clone ID: LIB3146-024-Q1-K1-D9
cccacgcgtccgaatatgcgaccggatgagatcaaggtcccgaactggattggtcccgatgtacgcaggttgatatcgaaaatcttggatccgaatacaaaaacaaggatctccatggaaaaaataatggagaattcatggatccgtaaggggctagacccgaaacctgaacttgtagatcctgaagtcaaagaaccggctattggactccaaactggaactccttgcaacttgaatgcttaagatataatctctgtgtctgcaggcttcgatttatccggtttattcacggaacaagaacaaaagaaagaggtcagattcacgttcaacaaaacggcttcgactatcctttcaaaactagaagatgtagc

SEQ ID NO: 38731 - DNA, 435 bp, Gossypium hirsutum
  Clone ID: LIB3146-024-Q1-K1-E10
cccacgcgtacgccctcgcgtccgcttcttttcatcaaccagaaaaaaaaaaggaagaagaaacaaactatttttatataaaggaaatggaaaggaagaaatcggatgaagctcgtggtgatgagaaaaatgaagttgaagctcaagtgaagaagaaaaagaaaaagaaaaagaaaaagaagaagaagaagaagactaaagaggatggtgatgtggaacctgaagtgactactgagaaggagaaggaacatgaggttgaagcgggttcaatatgatactgagaggaaaaataagaagagcaacagagagtgatgaggctgttgctgctgctgttgatggtgctcatgacataggggctgatgaaattgagacaaacacaaataagaagaagaagaagagcactgagaatgtagatgctattgaggctattgctgt

SEQ ID NO: 38732 - DNA, 422 bp, Gossypium hirsutum
  Clone ID: LIB3146-024-Q1-K1-E12
tgctggtgagttttccgggccaattgcaattcccctacctgtcgggtcagttctagttttaaatggaaatggagcagatgttgctaagcattgtgtgcctgcagttcctacgaagaggatatcgatcacatttaggagaatggatgaattgaaacggcctataggatatgctccagaatcagacttgcagggcattgaaccattgtcatatgatgcagagaggcccaagggatttaattcaccaaaatctgaacgccctgtaaggcaaccgtttagaagagaagataaaagggaagccaagggcttaacagagaataatgagccctcagaatggcgttcctcaacccggcctcgaagaggcccttcatataggagaaggttcactgtgaatcagagcaggtgatgggtcgctgaatgtctac

SEQ ID NO: 38733 - DNA, 423 bp, Gossypium hirsutum
  Clone ID: LIB3146-024-Q1-K1-E8
gtcagctccgccatgctgagatgtttttgcggactttccgtcacaagaggcgagttcgcagatgtgtccatatttgtattaccggtttgacaactccctgtttaccttgttttaccattcctgatgagggccaaagacacatatccatgggagccttaaatagtaaccgaccagacacacttaccacgcatatgccgtacttcaagaaggtgacatcatgtcttacttgcgtcgtatgtgatgaaccacatacactacgcctttatcttgtacataagctgagtatcagatagtcatcggttgcgctctgacactatcgcacttggtgtgtgtgtctgtgtaatataagacgggatcgctaactccactttgatatggcgttttacagatcgtaagcacctacagatctatttgtactagata

SEQ ID NO: 38734 - DNA, 362 bp, Gossypium hirsutum
  unsure (1)..(362): unsure at all n locations
  Clone ID: LIB3146-024-Q1-K1-E9
gaacattttaccaaccttcacaagtgctttccatagttcaagcttagcagtgcacattttagtgtctggactccaagcaaaaccacttctgcaattgaaaaggtcgtaacactcataaaagtatgcttcagagtctttatacgatttttcaagaggccattgatttctctctttgacttacactttgtttataaactattgttaaattattttatttatatgtatattcaaatatctgtctaaataatagttgagacatcgatttgaatatagaataaaccgacttatactcctcaaaaaaaaaaaacaaaaaccataacaattattgctattaaaaaaacattaaaagccggaacttntgg

SEQ ID NO: 38735 - DNA, 312 bp, Gossypium hirsutum
  Clone ID: LIB3146-024-Q1-K1-F10
accacgcgtccgctggaggggagcaagtagctgctgatttgaatgcggactgggtttccatggggcggggcacacagtgggtgggggactcaaaatatgcaagcaaacaagagagctggcgtactcccgtgttggtggcactccgattggcctcttagattaattcttggagcacatacaagccgcacttgatgcagcaacagagaacctggtaataatacctcattcaatcgtcagtcatatggggcttgcattgcatctgttgtacatcactataacgcatccgttggatatatatgtaaacttgtactc

SEQ ID NO: 38736 - DNA, 226 bp, Gossypium hirsutum
  Clone ID: LIB3146-024-Q1-K1-G11
gtctcattgtttcttttccacccagtctttttctaacagcaggccaatggcggcgggtgcttataagatggcggcctacaacaactcaccactggagataaatacggtgggaggcaataccaaccgctttaagaagccatatgctggcaaaatgttccccaaggtatgcagagctgcggtcggaaacatcaagaacaatagggtcatgcatagtactgccaccttc

SEQ ID NO: 38737 - DNA, 273 bp, Gossypium hirsutum
  Clone ID: LIB3146-024-Q1-K1-G3
gaatgaacagccgctttttcttctttagaagacaaaaaaaaaataaaatgagggagaagataaaagaaaaaaaaataggtcgaacgacctgagtgttccaatctcacgctcacgtgcacgcaatgacatggcttttctgtagagtaaaataaactaaactaacgggcggtcgcttgactaagagtagaatgggacacccattgtttttccgaagttattcctgttgcagtacatccaaataataccagtgggggttataacaagaaggtcttt

SEQ ID NO: 38738 - DNA, 311 bp, Gossypium hirsutum
  Clone ID: LIB3146-024-Q1-K1-G4
tccacgcatgcgtccactctttcggttgtgttatgcgaaaacgtgtgaagaacgtgctgcttttacagtggcgcacaacccttgcacttgcttagcaacaccttcgtgcacagcttatggacttatgtttaaaattggctgcaacttcctccaactctggaacggtgatgcaatcataacggtttatgcacttgtaggaaagttgtacatctttgttatcggacactttgaatgcctttgcatccaacgtggaaagatacagtctgctttaaatactgagaagagcgtcaccagtgtataccggatggatc

SEQ ID NO: 38739 - DNA, 306 bp, Gossypium hirsutum
  Clone ID: LIB3146-024-Q1-K1-H1
tggcggaggggccaggtgggaggggaataactagggttcttgagaaagggccgaagatctcgaatgtgaaagtgagtcccttgaatattcaccaaccaatgtagatcgattcctgcagatatgaaatgggaggtcttcttagagcccaaaaccgacagctttaagttttatcttgtgctaactgtcactaggtgatccatctctttttaaaagtctgaattggtgaaattattgtgtacagaaggctaagcctgtaatctgtaaccttgtttcaatgatacttgaattacctcccatattccacat

SEQ ID NO: 38740 - DNA, 323 bp, Gossypium hirsutum
  Clone ID: LIB3146-024-Q1-K1-H11
cttacacggccgagttaagttcagcttgactgactgaccctgcggatacggccggggttgtttcttagcgggcgcaacataatattggaccttgataaaggcagggcttcactactgcccatctccaccatcacattgaaaacagcgaggatcgactactaactagcggcgcgactggtacaccccctgaatcagatccaatacacgatatcttccatattgataccactatgtcaagctataaatgtacgctacaaaggtttgagtaaaaaaacatatggatcctctgtaaaggataacctttaagactttcacgcaaattt

SEQ ID NO: 38741 - DNA, 419 bp, Gossypium hirsutum
  Clone ID: LIB3146-024-Q1-K1-H4
ggaattggggcagatgaccaaaatgaaacattatttacaactctggtagacaccgacatcttgttgaagccaaataggccggctcttgttgtaagcagtacaagctggacaccagatgaagattttgggattctattggaagccgcggtgatgtatgatagacgagttgctgctctactggatgaaaatgattctgctgatgaaggggtcctctggaaggagatctctggtggaaagcaatacttgtaccctaggttattgttcatcattacaggcaaaggtcctgaaaaggaaaagtacgaagagaaaataaagaggctaaatctcaaacgtgttgcatttcgtaccatgtggctgtcagctgaggaatatccattgcttcttggttcagcagattaagtgtttgtttgcatactttc

SEQ ID NO: 38742 - DNA, 405 bp, Gossypium hirsutum
  Clone ID: LIB3146-024-Q1-K1-H5
tcggccacgcgtgcgggcaaatgtacttgtccatgaagatcaagcctggggcggacgaatccgtgggagcatgccattccgacggaccttgatcctattattagcagctgaacccctccagcattacctgcaggcctatttagggaacccacacgcccaaaaataaaaatatctgtatctgcacattcaacatgtgacacggcaccacagtgttttaacaacaaagctacccgcgtgcgtgacaataaatagatccctgcgtatgttatcgcaatcacaggccaaagtaccagaaagacaatcttcattgatggatctgcaacggtgtatcctcatggcgtcattgaccctactgaggagcttggtacactggctgatacctatggaatttgtctacatgatgac

SEQ ID NO: 38743 - DNA, 263 bp, Gossypium hirsutum
  unsure (1)..(263): unsure at all n locations
  Clone ID: LIB3146-025-Q1-K1-B11
taaaaaatgttttagatttgtatttgtgggaaaaattatgggggtntgttagggattaatgggggtnaatagatagggtaatgtaattgtataaaaaatagatttggttagaagattaattanttggtttntaatttgtgatggatgatataggtaggtaaggagaatgtaagaatgatgtttgaaaantttgatgttgtttgaaaaataagatatatagtgtgtgttttgtttaaaaaaaaanaaaaaaaaaaaaaaagaag

SEQ ID NO: 38744 - DNA, 330 bp, Gossypium hirsutum
  Clone ID: LIB3146-025-Q1-K1-B3
gtccgatcaacgtattcttacatttttttcctccaaagactccccttcggaggtgtttgaaaagctgttcgtctgcaaaaaataataagacctgttatatacctcggcgaacatatgacaggagacgattggaatgcacatttctacatggcgaatagcctagtctatcaaggccaaatgactttctcgctgtataacctaatcactccttcaccttgacctatacttttagctttccctactctaacatcaacatctataatcggaacgctcatcaaatttaagctcgactccaaagcttaaagacgatgacaatctttgatggaattg

SEQ ID NO: 38745 - DNA, 285 bp, Gossypium hirsutum
  unsure (1)..(285): unsure at all n locations
  Clone ID: LIB3146-025-Q1-K1-B4
gtccgctcaacgtatacttacatatcagttctgccaatgcttcccttcatctttggtggccagtgctgatcgtctgcagattatgattgacactgtttcagacgcggcgtagctatgcctggggacgatgggattgcacattcctacatggcgagaggcctggtctatcaatgccaaatgactntgtgcttataatcgaatgcacgcgttccccttcccctatgcttctaccgttacctactctatcgtcgacatgtatcaccggaacgctcatagaagttgagc

SEQ ID NO: 38746 - DNA, 416 bp, Gossypium hirsutum
  Clone ID: LIB3146-025-Q1-K1-B5
gggcgacccacgcatgcggtcttatgagctgatttgttgctggtcttcttagccttgcgaaagaactgcctgtgggttaactgattctcgttgctgaaaaaagaccgtcactttacaatgccttcggatgataaagaaaggcgtggcttccaacgtcacaagagttactaccctactgtttgattcacgctgccccataaggtgatacatgtgtctatatccttcactgtgtattgttgcaaatacttctactcccacaaacactacatcttcgaagacctgaagcaagttcactctgacatcggaatctctagctttgctatgtggatcatgatcacgattcataattgatatcttttagaagctggctcatgattcctatttgctaacaatgtacaccaagatacccaccatta

SEQ ID NO: 38747 - DNA, 319 bp, Gossypium hirsutum
  unsure (1)..(319): unsure at all n locations
  Clone ID: LIB3146-025-Q1-K1-D5
gaccggaaggangggncgggccacgcgtccggccattcgaacccctttgtcggtggtttttttccgcgtataactcctatcggggcgggcttttaacttcaagtcctcggaaatcccatgctatatcgcgaattatctcccgcgtttgatgaaattacagcctgcttcttttgaattccactcgtgctgctaacattcatataaaaggggtggaagaggaagtagctgttatggctactatggaattccaatctcttggggtatctttttttcatgcaggggatgggtctgaagctgaggatgtagaacttcaacctat

SEQ ID NO: 38748 - DNA, 454 bp, Gossypium hirsutum
  Clone ID: LIB3146-025-Q1-K1-D6
cccacgcgtccgcccacgcgtccgaaagattggtatgctggaatcaggtcagtaatatattctcgtggtgacctcaatcatagctgacaacagattagaatcccttttcacctgtttggcgtatgtggatgatttggagaagtgttagtcttctatgtggtctttgtcaagttgaagggaagaaaaatgttaacaaaaataaaaataaaaataaaaataaaaaattaaccatttctcgtgtttcttctagccatatcgtttgcaaatctttggaggaattctacgtaaaattattattgcttcgtaaaatcgatagatgatgaatccgtcatatctcctttatacttatactgctctaaatttgaaaggacacagaatcctgtatgttctagtatcttgtatatagcatatatgtatcctgaggttgggaaaactcatttaaaaatgtaaatta

SEQ ID NO: 38749 - DNA, 447 bp, Gossypium hirsutum
  unsure (1)..(447): unsure at all n locations
  Clone ID: LIB3146-025-Q1-K1-E2
atttaatgtcaaaactaatgattagattaatcaaaatatttgattaaaataatactttaatttaaagatttaattgaaaaatttttaaagtttaaaatcaacttaaaatttagtcaatttattagggcggttggtgcaattaagctctttttttctttttaagtagttcatcttttatatcaaggatgtttgaatcgagaaccgacagatgtatcgatctgaaaaaggttttgaactgatagactaaaaattggtatagaccgattgaatctgttaaaaatcaattgaataaggattttaaaattgtttaaatgtttgatggttttttaatcgaattgattagattgatggagctagcanaccggtgggtcttgatttaaaaaacaattgaatttgagtacaaagacactttatatagcactaatatttgagaattggnggtgatgt

SEQ ID NO: 38750 - DNA, 333 bp, Gossypium hirsutum
  Clone ID: LIB3146-025-Q1-K1-F3
cttaataactgctataatgtcattattaacagcggccaatcaagtgagggcgggtcacatactcatcaagcaccaagtctctagccaaaaggcttattgtaaggatccagagggtctcgtcttctacaccaacaatcgaaacacctctgtctcactgctgaaacaacatctcgacgacatcatttacaacattcctactgtagacaaggttgtgtctaaattctctctgatgctctgcgacaaaaattactaacatatattttcatacattcttttctagatgattagtctttttagagatgcataacatacaccgtacttcagttagttatg

SEQ ID NO: 38751 - DNA, 405 bp, Gossypium hirsutum
  Clone ID: LIB3146-025-Q1-K1-G11
aaaaaccggaccgacccacgcgtacgactatacccaatagccatttcaacaacgcctttcaagacagacccaacggcgaaaaatcactgtgaatattcgcataacatgcggacaaaccacacctactattaccctcactccgaatacccagccactctgctcatctcccaacaagatcatccaatcatataacaccgaaacctacaaaaaattgaacggtatcctcttcaccgccaagcacactctccaaaaccctcagacaaaacccatggctgtaccatctattactgatctcgatattaatgctattaatgatcctgaaccgtatatgacgaacaccaaaaacattaaacgtcatgtcaacatcaacctttataacaaaatctatattgctaaaataatgat

SEQ ID NO: 38752 - DNA, 454 bp, Gossypium hirsutum
  Clone ID: LIB3146-025-Q1-K1-G3
ggctttggtaccatctttggtgagcaacagacaggggatgttggaaatgttggcattgatcttttctttgagatgctttttgagagtttgtccaaggttgaagaacaccgtgtagtatcagttccttatcagtcagtggagattgatatcaatataaaccctcatctcccctctgagtacataaattatctggagaaccccatggaaatcattaatgacgctgagaaagcagctgagaaagacatctggagtttgatgcagtttacagagaatcttcgccgtcaatatggaaaagagccatattccatggaaattcttttgaagaagctttatgtaaggcgaatggcagcagatcttgggatcaacagaatctatgcttcaggaaagatggttggcatggaaaccaggatgagtaagagggttttcaagctgatgacagattccatgatatctg

SEQ ID NO: 38753 - DNA, 374 bp, Gossypium hirsutum
  Clone ID: LIB3146-025-Q1-K1-H6
cccacgcgtccgcccacgcgtccgccttagagctgggctccatggtttgccacaaactttgaggcgctatagaaagttttgtttggtaaaggaatattgaggtgagcgtagaagagaggcgaatgtttgaagcatgttgtactttgcccatttcataacttggtcagtcagtcagtcgcatcataactgtagtatttgttaatacataaacgtggaaaattttgccaatggaaaaaaaaaaaaaaaaaaaaaaaataaaaaaaataaataaaaaaatataaaaaaagaaaaaaaaaaaaaaaagagtaacaaaaaaaaaaagtttaattttataaataaaaaaaaggggggggccgttttaaaggatcaaagtt

SEQ ID NO: 38754 - DNA, 313 bp, Gossypium hirsutum
  Clone ID: LIB3146-025-Q1-K1-H8
ctgacgcgtaggcagacgcatgttttttatccttgcatgtctaatactggggggggtatatgccgctaatcctagggttctaaaggtcaatctatgaacttaaaaagctagtacaaaatgttccattcgggcttgtgattcacataacagattttgaaacaaaatgaaggaactaagtaaaaacaaactgatgtcctttgtaaaacctaaagaatgagaaggattattgtggagcatctctactgatttaataaacacgagtatatattcaaaatactatcaactctaagacaaccaaaagtgatttccatac

SEQ ID NO: 38755 - DNA, 404 bp, Gossypium hirsutum
  Clone ID: LIB3146-025-Q1-K2-A11
ggaattaacaccaagatcacagcatgcttagatcctgatggttggaagacggtttttgttgataatattgatttcctcaaggaattggagtgaggtttagagacattctgatatgatccttttgacacggtccaaatccgagctgcaaggatttgtggaagaactccaccaatcccgttttgtagatgagtcttctacagtgacaattgcataacttcgtggaagtgaagaaacaccgagatgtcagttacaatttcaattatattttcctttttttttttttttgtttcaatcaaattcactctctatgtaggaaagagaagaatggcacagcaaacatacctgcttatcttatgtgtttgaggttgatttctcttcttttgttttttcagtcccacaaataa

SEQ ID NO: 38756 - DNA, 254 bp, Gossypium hirsutum
  Clone ID: LIB3146-025-Q1-K2-B3
ccgacgcgtgcgcaggcacgtgtgcggccgcatggacatcgagtatatgttctacatcaattgggaaacgtcgagggcataggctagagcccacaacgcgttcgctgatggccacaagcatacttctctatggagggggttgctcacatacccaatggatatgactcctagaggcccttgcatcctagattgacaaaacctatgttcgtccagctgccgaagaagctgaagtgaattctttgcacataaaggat

SEQ ID NO: 38757 - DNA, 407 bp, Gossypium hirsutum
  Clone ID: LIB3146-025-Q1-K2-B5
atttcagcaggggaagaagatgatgaagaatatcctttgatggaatcattatatccagcagaagaaaacgaagaatatccattgatggaatcattacatccagcagaagaaaacgaagatgaagaagaatattcaccactaagatcgtcatttttggtggaagataaccgaattgatgatgatgaagaagaagaagaagatgatgatgatgatggagagtattcaacaaaggaatcatcattttcaacagaagaagaaaaagactcattgttgcaatcaccactttcaacagaagatgagaagggtgaaaatgttgcagggatggaagaagaaagctcagaaggagcatggagctcttccacagaacctaacacggaggtaatttggccagcaaagatgatgggggt

SEQ ID NO: 38758 - DNA, 407 bp, Gossypium hirsutum
  Clone ID: LIB3146-025-Q1-K2-B6
aagatgggagattcagcacagacgccatcgacgccgttggttggcgacggaagctttgtatggtgaacgtggctaaacaagggattctttacgacgccgctaatgacatatgggaacagatgccggaggggatggtgggtggttggagaggacccgttgccgccatggatgaggaagttctatatgccgttgacgaaggtaagggattactcacgaggtataaccaagacagcgataattgggaggtgataatggaggtagagagtcttaaaggggcatgccaaatggccgccgctggaggaagattatgcgttatttgtggcgatggggagattctagtcatcgatgtggtggcggcgccacccaaattctgggcagtccaaaggccggcggagttggaaccgttg

SEQ ID NO: 38759 - DNA, 407 bp, Gossypium hirsutum
  Clone ID: LIB3146-025-Q1-K2-B8
cccacgcgtccgcaagtttcataaaattcctcgtccatggacatgtgctaaattaaaggcttcagcattttatcttccttttctaccttgttttaagattctttgttgcacttaacggcatgaaaccttgcattagtaattgtcattgttcatgggttagaaagacaagtgccaaaataggctttgagaagttttaaactatgatacaaatatgattaggtttatatgcatataaatagcattcagataggcttcagaagaacaaatagcaaaaagtcttaacaaggttgcaatgtctctgctgattgttctgtggtggattatatgataggaagttgacgacagttgcatatgtttaatatttgaatactccttttttcatcgaagatgttagtatcttgatttct

SEQ ID NO: 38760 - DNA, 336 bp, Gossypium hirsutum
  Clone ID: LIB3146-025-Q1-K2-D5
cccacgcgtccgggaaaatgacggaagcgggagacccattcgttgaatccgaggtaattggaagtgatcatttgatggagccaagttttcacaagtacgtgacagttaggagaggtggtggtggggcagatatggaggaacaagaatcatcagggagcaatagtatagcgggcagtgggcagcagcattggggattttcatcctcctcgtgggaacccaattcagcagattcaacggatcgatggagtttaaggacaaaaagcagacaagaggattacaacagtcccctgggactccataggcatgcctttgctgaagcaggtagtggcatgaaaa

SEQ ID NO: 38761 - DNA, 406 bp, Gossypium hirsutum
  Clone ID: LIB3146-025-Q1-K2-D7
cggacgcgtgggcggacgcgtgggcagccatgcaagtgctaatttcccatttgttgaagggaacccattcacagctaccttatgggtcggtttagaggggttccatatgactgtaaatggaaggcatgaaacatcatttgcatacagggagaaacttgaaccatggtcagttagtggagtcaaagttgtaggtggtttggatctcttatctgcgtttgccaaaggcttgcctgttcctgaagatcatgatttaattgtcaattccaagatacttaaagctcctgtgattactaggaaaagacttgtaatgttagttggggtcttctccactggaaataatttcgagcgtcgtatggcattgagaagatcttggatgcaatttgaggctgtacgctccggggatgta

SEQ ID NO: 38762 - DNA, 408 bp, Gossypium hirsutum
  Clone ID: LIB3146-025-Q1-K2-D8
cccacgcgtccgggagaaattaacaaagcaaaccttgcttgagcaaacgatgagtgagcagctaaaggagaggcaggaacaggagaagagactacaaaaggttgcgaaaacaatgaaccatatggaaagagctaagagagaggaagcagcacctttgattgaagcagcttttcaacgacgactgctagaagagaaggtgcttcatgaacgtgaacaacagatgttctatcttcatctgcatttccatatcttgaagggaagagcagcgtttatatgtcgcagtctttcttcatgagagctggaagttgagttgagtaggcagcatcatgatggggacttgaaagagaagaataggttggcacgcatgttagaaaattattcaggcctggaagcaggaaagggatatca

SEQ ID NO: 38763 - DNA, 241 bp, Gossypium hirsutum
  Clone ID: LIB3146-025-Q1-K2-E9
gttgaagtagtaatatctatagcatacagatatggataggcaaagaagcaagcacgtttgtttggtgatgtgggttttggttgcttcttttttcactcacaatagggtcattgcaattatctttactggcctttgttggcataaaaactaatatttcagttttttgacccttatgctggaactttcctttagtgttacatttcacttctaccattctttatgaagttgtttatcttgcttt

SEQ ID NO: 38764 - DNA, 376 bp, Gossypium hirsutum
  Clone ID: LIB3146-025-Q1-K2-F4
cgccaatgttaccaggattggacatgcgggggctattgttagattgcaaggctcctcctccttgacctcaatgtacactcgcaagggcaagaaggggatcaaccaggacgctatgaccgtttgggagaactttacgggggaaaagaatgtgttcttctgcggtgtatttgaccgtcacggtccatcgggtcacaaggttgcacccacgtatgcgatgccttgccattgaagctttcgacaatgcattagcctcggcccagcgctaagaaggagggcgacaaggacagcagtcacaagcattgggaggcaagtttgattagaactttccaagaattggatgaagatcttagcatggaaaattcccttgatagttact

SEQ ID NO: 38765 - DNA, 244 bp, Gossypium hirsutum
  Clone ID: LIB3146-025-Q1-K2-G6
gctgatttgggtaatcactcaactgggtatagtcgtagactggatgtccctatgcagcctataaaatcattgtctgggattcttaatagtgaagtaactgcccatagggacttcgatttgaataatggccctgctgttgatgaggataatgctgagtaaactcggaaatagaatttggggcatgttttgccctgttatctttggtttggatgctataatttacttaaaaaacctgaatcttggc

SEQ ID NO: 38766 - DNA, 399 bp, Gossypium hirsutum
  Clone ID: LIB3146-025-Q1-K2-G8
cccacgcgtccgcccacgcgtccgtttgtctatattagtaaggagctgaaaccaaggacgtatagaatcaaggctggtaacacagttaatattgctggattaatgagggtggaacattgacaagtcatttgtggaatcactatatgttacggtttgggcatccccttatctaccattacacatggggaaaactgaaaatgcacaaagaatactagaggatcatattggtcatcagttacagccaccaattggagagcaacgagaaggacagcttggcagttgggtgagaaaggaattccatatttcgggtaatagctgggaatcgagttcagtggacattgctgctgctggtattggttggtttgctattggacttaaaggagaggcagttttaggggt

SEQ ID NO: 38767 - DNA, 412 bp, Gossypium hirsutum
  Clone ID: LIB3146-025-Q1-K2-H10
accttcacgaatctcgccatcttcatgcaatgaatcgaattcggggatccggcggacgttttcttagcaaaaagaaaccgcaatggtccgatccaacctccaattacatcttggatatcggttgcttcgaccaaaaggataataatggatcggaacttgagagccgttgctcacatacggcagaatacggtggttcatgtacgagctgctccaacatttcaagtatcaccaacaatggtggcgacatatctcgccgtgcggtcagttcgtgcaatggaatacaaaactgtgcttcgcttgtccggtgagaaaacgggcgacttcagaaaacgggcgacaagaagtcggcaactcatccttggcttatatatatatcaattatagtctttggttttcatgcatagtgtaaaat

SEQ ID NO: 38768 - DNA, 399 bp, Gossypium hirsutum
  Clone ID: LIB3146-025-Q1-K2-H3
ctcgcttcatagacccgatgttttaccgattaatgatctcgggattcggaaaggggttcagttactctacagtttggaggagttgccgaggccttcgcagatggatcaattgtgtgagaaatggaggccttataggtcagttgcttcgtggtatctctggaggtttgtggaggccaaaggagcaccttctagtgcagctgctgttgctgctggtgctagtcttcagccactgccgcaagaggagcatcaacatcagcagcagccccagcttctcgatcccattaatagcattctggaccttggggcctgtacttgggggcaatgattatcattggaacacaatgtatgtgatttgtcacaatgcattgatcaccttgaaggacaggcacttcaaatgcg

SEQ ID NO: 38769 - DNA, 337 bp, Gossypium hirsutum
  Clone ID: LIB3146-025-Q1-K2-H8
cttgccgaggaatttcacggttagatcatcggaagaaagtgacagttacgggagagtagcagcagagtttgaaggaaatgtggatgcagtctcgacagaggatcaaaactggtcaggtctggaaggtgtgacacgagtgaactcacttgtccagcttccaagattttccgaggaaagaccaaacccttaacttttgggtattgtctagaaacgaaactgaactggttttgctgtaatatccaaagaaaagaaagccctaatgaaatggtgcctattgtgttgtacatttctgctataattaaagaaatttctcaaccaaaacaaatatataacaatt

SEQ ID NO: 38770 - DNA, 394 bp, Gossypium hirsutum
  unsure (1)..(394): unsure at all n locations
  Clone ID: LIB3146-025-Q1-K2-H9
cccacccgtccgccacgcgtccggtttcatgagagggggacctaatgggcctggtctttttggccttctaaatgggcgtttttggaaaaatcgtaattaatcattttcacggcaaccctgaaactcaaaaaaaatggtnccaggggtctttttagttggggcgctttcaatgtctctccctatcttaagttggtaattcttctgtttcaatcatctcgctgaggcacattccactgaagaacgagtttttctcaacactaacggagccaatttatctggactctggactcgctgtagcaaggggtgcttcgtgataagttaggaaactggattgcgggttttcatagattcctggtaaatgctcagtttttgatgcggaactttaggtattctc

SEQ ID NO: 38771 - DNA, 283 bp, Gossypium hirsutum
  Clone ID: LIB3146-026-Q1-K2-B4
gtccgtcaacgtatacttcatatcaattctgaaatgctcccctgcatatatggtgcacagctgatcgtctccaaagatgaagacctgaacaaacgcggcatacatatgacaggggacgaatggatgcacattcctactggcgagagagctggacttcaatgtcagatggctttgtgcttataatcgaatcacgcgttccccttcacctatgcctttaccgataccttctctaacattgacatgtatcaccggaacgctcaaagaagttgagctcgattccaaa

SEQ ID NO: 38772 - DNA, 151 bp, Gossypium hirsutum
  Clone ID: LIB3146-026-Q1-K2-B5
ttacccacctttaattttaatgccaaatccaactacctttcgtttcttctcttcgagtagacccaccctagacccactaactttagctgactaccatattttttcttcttcttctctcgcttcgcgtgcgtggatttattctctttattcc

SEQ ID NO: 38773 - DNA, 327 bp, Gossypium hirsutum
  Clone ID: LIB3146-026-Q1-K2-D7
cccacagatgcggaatgcatggaaaacggtctttcaaatactgattttgtgcattgcgtgatggtaatcagatggttagattgcaaaggacatattgctaagaactttagactgaaatacctcacctgctacagcattacgatcaacctcgcatgaagtaaggagctgacatagcactccctaatatcagaatgcgcaactcagaatatctagctaagcagcatatggactctttctactatcgtgtgagcaacaaaggatcattcgtcattccagcagttttgtccctgaagctttagcatccacatcaacggactgaggccgttt

SEQ ID NO: 38774 - DNA, 390 bp, Gossypium hirsutum
  unsure (1)..(390): unsure at all n locations
  Clone ID: LIB3146-026-Q1-K2-E2
ttcccggtcgcccccccgtccgttttatggccaaacctatggtttgatttattcaaatttttggtttaaattattcctttattttaaggatttattggaaaaatttttaaggttaaaatccaccttaaaatttatccatttatttaggccggtggggccatttaaccttttttttctttttaaggtagtcatcttttatatcaaagatgtttggatcgagaaaccgcagatgtatcgatctgggaaaaaggtttggaactgatagactaaaaaattggtatagaccgattgaatctgttaaaaaatcaattgnaattagggatttnttaaaattgttttaaaatgtttgatgggttttttaaaatcgaattgattaagattgatgggagc

SEQ ID NO: 38775 - DNA, 209 bp, Gossypium hirsutum
  Clone ID: LIB3146-026-Q1-K2-E3
ttctttaatttaacctttgatgtgccggtgggattggtcagaagatttcttgctgaccattaaaccttttatttctggtgatgatattttcataaccttttctggttggaatatttgggatgggatgtcattaccaacttctaaccttttgatggtcttaaaccggtttacatatgggttattaccttgaaattcctggaatttctttt

SEQ ID NO: 38776 - DNA, 398 bp, Gossypium hirsutum
  Clone ID: LIB3146-026-Q1-K2-E7
cccacgcgtccgcggacgcgttagtcaacgttttcgtaacagatgaattacatgcggaggtaaataagtatagtattgaagtggattcaaatgtttttttacatgcaaccaggactaacgtgttagctcgttcggagtggattgatatgaagtatacagagggcagttctattgcagtcatctagtcattagatgagtagattggatatgatcatttggaaaggctaactgcaaaagaagcaatggcttattcttatttttacccgattagaaatgctgaaagcagcagaacttgaacctagcatgccaactagacggtgatgatgttaacgcatggaataatcttctttcttcatatgcatggttaaatcctcattcctttatagaatgacagaaga

SEQ ID NO: 38777 - DNA, 178 bp, Gossypium hirsutum
  Clone ID: LIB3146-026-Q1-K2-F2
tggaccaagccgtccgccaacccttcggccaagccttccggagggttttaacaaggttttattatggtctattccacaaaatattccaggtcattttattggccctttccagaaacacttgacttttacccacccctttgagaataaaaaaccgtttcaaaggaccccgccaatttcc

SEQ ID NO: 38778 - DNA, 361 bp, Gossypium hirsutum
  Clone ID: LIB3146-026-Q1-K2-F5
cttaaaaactggataaaggagcctactaactaccgccattcacgggtgggcgggacatatgctcataaggcactgagtctttggcgataagagctcttagaagcggacctgtgggtcaggtttatctgacaaacacacggaacgcatgggcctggctgcaagatacctatgccgtaaggaagtgtgacaacatatatgatagtgcgcacgatctgcctagaaacaggttatgttctcaacgtacacgacctgctgtgggaaacattcagagcgtgctaacgtggccataagtgcggttagaaagaatgatcatgcaccaaacggcggatggcaatgggtttggtcaatagtgcatcaaaag

SEQ ID NO: 38779 - DNA, 398 bp, Gossypium hirsutum
  Clone ID: LIB3146-026-Q1-K2-F7
aatactttgagctctaagtccagaggagatggggataatcttgatgtcctagctggcatggttcctgtttgacaggttatctaaggaatggtggatcgtctgaaagtggagggtaaagttgtgaatacgcgagaggggaacacagaactggtggtgttggaccaagctgacaatggacaaattcaaggtcgaccatcaggagtggtccatggggtgaaagcgacgcgatactcatggacgattcatcagaagagtgatggtgccctcaaaggtgtttatgggagtccccgtagaaatttgaggaaggatttatggtatggcctaagctgcattgctacaaatattaatctcccttggttgattactgggattttaatgctttgcttgatgaggatgag

SEQ ID NO: 38780 - DNA, 290 bp, Gossypium hirsutum
  Clone ID: LIB3146-026-Q1-K2-F8
aacgcttctacatttaattaaagaccgaccggggaccttagctatgtatttactcgaatgggacctatgagagtcgtcttcctttgcatggctgattcctttgacaaaaaccggcgatgctgtctatctgccttaggcgcactcacatatgtttgtgtctgtctgctctggcttgggagttagtgaagaagggcatgatatttgatggcgcaacaaaaagcgatctacaccttattggcactaggtaccaagagctatggcgcctttacaggggttaatgggaacttcac

SEQ ID NO: 38781 - DNA, 332 bp, Gossypium hirsutum
  Clone ID: LIB3146-026-Q1-K2-F9
ctcacgcggccgctgttctggtggcgggattacttaccgcttgacccagcgatagaccctgcgagacattctatgctgtctcttatgaaaactctaacgaaaatccttactacactggattcttcaccggattcaccaacgtctggaccgagaacggtcaaccgaacggaccaccaccatgacccgagtcgtgctatgtctggaagtgtattcgggagcgcagtaacgacatccttagtgtggtcttcggtgttcgttgcggcgctcttagcggcgctatcacggacgtgaccctgtacttggtctggaccctgtttgaggatcagtctgat

SEQ ID NO: 38782 - DNA, 253 bp, Gossypium hirsutum
  Clone ID: LIB3146-026-Q1-K2-G11
gcttaattttcctggattatcgtgggtctgttttgagtaaattgaaagagtgtcaattcatgtatgctattgcagctatagaaatttgtggtttctttccatcatttttttcagttaaatgctaagattaaatctttagataattcatagataaacagaataggaaaacaagaatgaggttcaaagtcgccagtatatggttagtgttcggatcatatttatgagtaatcttcttgagtgatggctgttttaa

SEQ ID NO: 38783 - DNA, 329 bp, Gossypium hirsutum
  Clone ID: LIB3146-026-Q1-K2-G3
gccttgggtcccattttgggggaccaccaaacaggggaggttggaaaggttggcttggacctttcttttgaaagctttttggaaagttggtccaaggtggaaaaccaccgggtaagatcaagtcctaatagtcagggggaatgaatatcatataaccctcatctccctctgagacataattatctgagaacccctggaatcattatgacgctgaaaagcgcttgaaagacatctgagttgagcagttacaagatcttcgcgcatatgaaagagctattctggaatttttgagaacttatgtagcgaaggacagatctggatcacagatc

SEQ ID NO: 38784 - DNA, 172 bp, Gossypium hirsutum
  Clone ID: LIB3146-026-Q1-K2-G6
tgggcaacacgtcctgtgtgcgaggtccatcacaaaacgggtggggtgctcatatggggaaaataatgcgacgtcgaaccctatctgattctatcaagcgagcttacatgcgcggggagagggtcctctagatttacccccgacaccccctcgtgtaagggctttttgagag

SEQ ID NO: 38785 - DNA, 335 bp, Gossypium hirsutum
  Clone ID: LIB3146-026-Q1-K2-G9
acgaaacccagttgccatttctgttttttatttcttgggagaatttagaaaaaagaagaaaaataatattctcttaacatgggtatttactcgaccgagatggaggccgtgacggacgcgacagggttattctcgacggcattcttcacaaacctggcaatgatggtggtggtgtacaagatagtgtgcggcatgtttttgggtcccgaagatttacgacaaaagcttcataaagagccaattcatgtcggagatattactgaatcaaagttaagagcttacaagggttcggacaccaaaaagcctatcctaattgccatgaaaggccagatcta

SEQ ID NO: 38786 - DNA, 415 bp, Gossypium hirsutum
  Clone ID: LIB3146-026-Q1-K2-H3
aactgttgaagcattaccaccaccctccttttcacgtgaccctttttcttttaccacgaaattcctctttaatgccaaacccagtagactcttttccctaactttccacataccgaggtctacattcgttacttgtacacaagatctatatctcttcattaatcctcactcaaacgatgtcgagtatcctactgttgtctatcacagcagctgtgagctgagggtcttttattgaggggcaccggcactgacatgagagctgggagcgctagctttagatttctcccacatgacgttcaccaggtttgattttcataaagagaactttttattccatgccagggtcctcggttatgagaacctaaaaaagaaatgcttttggacttacccgactctaaagacaggttacagcacc

SEQ ID NO: 38787 - DNA, 425 bp, Gossypium hirsutum
  Clone ID: LIB3146-027-Q1-K1-A11
cagaggttgtcattggtttggaatatcttcattgtctaggaataatatacagagacctgaagccagaaaacattctactccagaaagatggacatgttgtcttaacggactttgatttatcatttatgactccctgtaaaccccaagttttaaagcatcccttgcctaacaagagaaggagatccaggaatcaacctcctcctacatttgttgctgaaccatctacacagtcaaattcatttgttggaactgaagaatacattgctcctgaaattattacaggtgcaggacacagtagtgcaattgattggtgggcactcggtattttgctgtatgagatgctgtatgggcgtacgcctttcaggggtaaaaacaggcagaagacattctccaacatcttgcacaaagatctctccttccccagt

SEQ ID NO: 38788 - DNA, 429 bp, Gossypium hirsutum
  Clone ID: LIB3146-027-Q1-K1-A12
gaaaaattgccagttccggatatctaaagaacatagaaaagctggctgaagctgaagtttatgatgccaaaaaacttgtcaggaagttgtctaccaacagatttcgtagtattctgagtggattttggcattcttgaataaatggtggaaagcaattgaggtgcttgcacatgggaaaggcatgaaaatccagaataggcatgttagcagtggcaatcaaggttttgtcagctgccatcatgggacagaagggatagtgattgatgaaagttccttctctatctgtttgtgttgttgccagcattatcttcttcatcttatcatgatttttctaattcatgaaaaccacttaatattctgatataaaagcataggcttagatcgccaggcatcagtttattattagcttgaggattgagatataggata

SEQ ID NO: 38789 - DNA, 295 bp, Gossypium hirsutum
  unsure (1)..(295): unsure at all n locations
  Clone ID: LIB3146-027-Q1-K1-A6
cccacgcgtncggaaaaatttgataatgggccttagttatttgggttaatttttggactggtgtaatgaatatttgggttggtcttgttctgagtgggccgggcaaaaatgggctattacagttgcccctctttgctcgttgtcatgtaatgggaacagagcatagactaaaaagcccaattttgcccggtcatactagaccttggtgctcctcttcttttttaaatagcctcattcctttctttaatataaattttatattaatataactataaaccttttattagcttttatt

SEQ ID NO: 38790 - DNA, 403 bp, Gossypium hirsutum
  Clone ID: LIB3146-027-Q1-K1-B11
cccacgcgtccgaaaccttagagcgcatcctatgaagcctgttatccattgattgaacaatgaaagctcatagagttgctatagacagcatgttggattaaattccttagacaacatgttaaaagaacctatcatgatgatgagaaacccaatatgtcttaattaacttgatgcatacacatgttatattttattggtagctgattaaatgcttcattcatattgatcacgagctatgcataaaaggtgaaaattttgaatgctgatatctaatctaggactaaatgatagggttgccaattcaacttgctaatatttggtgcaattttattaattgtagtttaacccaaatgagaatgggaagcccttttttttttaatcttacgaaattggtttttttaga

SEQ ID NO: 38791 - DNA, 268 bp, Gossypium hirsutum
  Clone ID: LIB3146-027-Q1-K1-B12
acaggacggcattcttggatcattatcgctaaacgcggtgtagagagctatcgctactctctcatctgctctttataatacacacctaattggatcctcgtaccactgtgggtaaaaacactaatcatttatttctggtgaccctgccacacatgatagatattccaccaacagatactattcagagttttgatgaggcttagatggatgtcttagaacacgaactgcaggaaaaatctgtgatgacttacatgaaatgtgtatcttg

SEQ ID NO: 38792 - DNA, 245 bp, Gossypium hirsutum
  Clone ID: LIB3146-027-Q1-K1-B5
gccattcatcccagggtaccatttgttcatggtcggcgtatcagatagcctgaacatctacagtttatgctgaaaccactgctctaggcgtaagaattgctgccggcccaaaaatgagcactgccaaggttgcgtcattcaatgctcttacttgcgtctattgtgcgcctaagacacacttatcaacaggctcttgtgtgaggacattttggtgcctgctgcctttacaagatgatcatgatggt

SEQ ID NO: 38793 - DNA, 359 bp, Gossypium hirsutum
  Clone ID: LIB3146-027-Q1-K1-C1
gtgaggtacctgctgcagactctcaaacatgtaactcgcgatgatgctcctattgatcttattgctatgtgccataaacccatagacgaaaatccctacttccaatatgagtccagcttacctggccatgacaagctacgcacatatgtgcatggacttatgcttcgcctgttcagttatacgtgtcatttggagatgctgtgattttcgatacgacgcaccgcctggatgcctatgacatgctattaggtgtatgggctggagtagaaaatcatggaatgactactttttttggatgtgtccttttacgagatgaaaacatacaatctttctcatggggattgaaggtagaaaaccta

SEQ ID NO: 38794 - DNA, 415 bp, Gossypium hirsutum
  Clone ID: LIB3146-027-Q1-K1-C2
cccacgcgtccgtccacctcttcatttaccttatgtggcgggtgcttctccagtggttacaatagatcacacattgtaacatagagaggttatgcacaaggttttaaaattttatctcactcgggcttaggatcggatgaaatagatggcagacaaatagaggtcagtgcattagaagttgtcacctcaatattttagccattttttcagtagaggctcgtgtgggacaggttgcttacaaactgttattaccatattctgctcgtattcattcaacttttcatgtctcccaattgaagaagcatattgggtcctcggttagtgcttttacctaaccaccagtggggtctgatggagctcttctcaagacaccgattcgagtattgaacaggcgcctaatcaagcaaggtaacca

SEQ ID NO: 38795 - DNA, 412 bp, Gossypium hirsutum
  Clone ID: LIB3146-027-Q1-K1-C8
ctcagataagatttttcatgatattaaatcgaatgaacttaggttgcgatattaaatcagcgaagcttaacattattagctgtgatattaaatcagtgagctatttagagtagcggtattaaatcagctagctcaaagataattattcatgctagatggaccaaaaaacatttgcaaatagtgtatctttattgaaaaaaggggatagattactcaaacataatatttctttagatggcgtgcattccatgtacgaggtaggacagagccatccatttttgctattctataagctccatagcctattttttctacaacgttgtagggtccttcccaattaggggccatttttccttgttgcaatgctaaaaaactagcttcagtatttcttaaaacaagatcacccacttgg

SEQ ID NO: 38796 - DNA, 426 bp, Gossypium hirsutum
  Clone ID: LIB3146-027-Q1-K1-D10
cccacgcgtccgcccacgcgtccggtcctctggcatggagattctttcggatccttgtattgatttccatgacctatatcatgctcacaagcttaaaagtgatgatcggtatgggactacaaaaacatgcaacctggtatgtcagtaggtgtcgtaaaaggaaacatcatctcgattgatttgattcaaaaatggtggcccgttacctgttgcatgcatatggttgttttgggttcagcacttatcaatcaatcatataataaatgcaacaagaagatggaggtttcagaatgagagtggtagcaggacatagcatatgatatcgcgatctgactaccgacgagtatactgattcttttgtagagaagatgttcagttgctgggttcagggagttagtcttttgatatgattgaaggtttaagtat

SEQ ID NO: 38797 - DNA, 414 bp, Gossypium hirsutum
  Clone ID: LIB3146-027-Q1-K1-D2
aaaaactccaaatgagttccttgtaaaaagttctagcatgataactctctgcatactgaaattgaaacaggacattcacggaagagatggtccatattctttgttcctctttcacacctggggcagatggtagtatttgttaacatcctatttagcatattaactcgtataggtagatagttccatgatattttccagattgtaatttttattttttaaggtagattgagtagccataattttttgtaaaattccttatagtcggtttgtaaagcataagctctagatcaccttcaatagctctgtaatagtttataggcgctacgcattgtgtattctcccgaaagctcaccactccaagcccgaaaatcatcatggggtttttctgccaacggaatgcggaaaatcttttca

SEQ ID NO: 38798 - DNA, 411 bp, Gossypium hirsutum
  Clone ID: LIB3146-027-Q1-K1-E1
gtccaatcggtgctgcatatgtagactcactctttggactcgagccaccgacccgaggtccgttaggtgatgaagagtacgtgactctttgttcggaggcgatcagtgccggtaccgatactagcgccacgaccgttgaatgggctatgcttcacttggtaatgaatcaagaaattcaagaacaactgtaccaagaaatcattgattgcgtaggtaaagatggagaaatcaaagaagaagacgtggagaaaatgccgtatctcgaagctatcgttaaagaaactttccggcgacacccaccaggtcatttccttctatctcatgcagctacaaaagatactgagctcgccggttacacgattccggcaggtgtttacgtggagatttacactgcatggattactgaagatc

SEQ ID NO: 38799 - DNA, 397 bp, Gossypium hirsutum
  Clone ID: LIB3146-027-Q1-K1-E9
cccacgcgtccgcccacgcgtccggagttgctcaacactttgaaactgggtttacattgcgtggacccatcgccatcggcaagacccgaagttcatcaggttctccagcagctagaagagattagaccagagagtgagacacctgctagctctgcaccttctggtgatgatggagctggaggagttccttcaacaagcgagtgaaaaaaggggggtgttcatgtattaggcataggcactagagagcattgattcttttattcttacaagagatatccttagatattaattttgtgtgctgtctgtaaatatgtttttaatagttccaggttgtttgcccctttgaattgttatgatgtagttcagttccactccctggaaagactaggcgattttg

SEQ ID NO: 38800 - DNA, 344 bp, Gossypium hirsutum
  Clone ID: LIB3146-027-Q1-K1-F1
cgttcaaaactctaggagttttacctactgcagtcacttgtcccacaaacatgaacagacctctagatcagctctcccttctttcatcgcttaagtcgacgatcttgaaaggctgaagatgcccggttgtggaaaagttcaccctgcgtttggtcctgttgaggaagaaactaaacgtctggctgtgcttcatgaggagcctggcgcgctggcctatcctttgaggtatgacgtctcccaagcgaggaagtcgattgatgcatctgacacagatttgaagccgtttatgtacacttgcgcaaaaaatgctatggagcgctcagtatctcctgatgcattcattg

SEQ ID NO: 38801 - DNA, 423 bp, Gossypium hirsutum
  Clone ID: LIB3146-027-Q1-K1-F11
aggcgctcaatgctaatctgaaaagaattgaagaaagcactgcagctttggctgctgctgatgattgggtgctaacctatcccccaggtggtactaggcaatctggctggccctctagtgcatccgttggtaatacaacaatatttcaacataaacttacgagtagtgctcatcgattcaattcaatggtccaggatttcttcgaggatgttggaccactattaagcatggagttgggagggcaaacactggaaggtttgtttcgagtgtttgactcatatgtaaatatgctcattaaagcattgccgggtttgatggatgaagaaacgaattttgaggatactggaaataaaattgttcgaatggctgagactgaggcccaacaaattgcattgctagcaaatgcatcattgttggcagatg

SEQ ID NO: 38802 - DNA, 278 bp, Gossypium hirsutum
  unsure (1)..(278): unsure at all n locations
  Clone ID: LIB3146-027-Q1-K1-F2
gtttcaaagtagagcttcatgctagaacaggaaaactggtttgaagaagtcttaagcttgatcactatttcaccattttgaaagactggtcttgtctgcagtgtaaatatgctgtctttgtcccaatggggacaatgtcacatgaataaggaaaagctggtagtacttttgttcttcattggcttaatgtataatttgatacacttttttctaacanaaaaaaaaaaaaaaaaaaaaaaaaaaaaaaaaaaaaaaaaaaaaaaataatcatttatttt

SEQ ID NO: 38803 - DNA, 344 bp, Gossypium hirsutum
  Clone ID: LIB3146-027-Q1-K1-F3
cccacgcagcctgtgtccaatggttaagactccaaacatggctatttccagcgtgggtttcaaagtctccatgactctcatggtgatccagacgatacctacatcacccatggctgtcaatgccaccatcactgtgcaaagacataatccaaccacatagatggctgagcttgtgctacttacaaaaacagggttcacccggtgatccttactatgatgctgtaactgctctctaccgagatgctcacacctccccggcccgtggagacgtgtaccatatcatcaaatatggatcaaacggtgttaccgacaacagccctaacctaactgtgtgagccggtcta

SEQ ID NO: 38804 - DNA, 227 bp, Gossypium hirsutum
  Clone ID: LIB3146-027-Q1-K1-F4
accactcgtacgataacgtaacacaggttaccttctcaccttccccaccttactactttaaaaaatcctctctctttcgccatgcatgggctgtaccggccccttatgtgccctcaccaccgccactgttctaacgagatccacaacgctctgttcaccgttactgcggagaggcccacctacactgatgtgacagctgctacatctattaacgaaggcgcctgcta

SEQ ID NO: 38805 - DNA, 292 bp, Gossypium hirsutum
  Clone ID: LIB3146-027-Q1-K1-F8
aattgccggatccactccacgcgttcgggacagaatggttagacagataacgtgtattcaaactctactcttctctcttgcatgtgtcgagtggcaaaggggattcttgttaagcagggcctcctccagtaaagtcaccggcgtggttgaacattccgaatccatatcgctctaaccattccttacatcggttgattaaatgcgcacttttaatgttccagcatctcctgaaaccattaatgagagacacgtaccttaccgacagattatggacactctcttgccgagcact

SEQ ID NO: 38806 - DNA, 370 bp, Gossypium hirsutum
  Clone ID: LIB3146-027-Q1-K1-G1
acggggaaagcatctcgacctggacacaagcatgattgtcaccaaccatgaagttgatgccattactgaggaatgcagccagaaaatctatcccggacaaagcttcatctttgcgattcattttaaaggcaggctgcatcctttgctcctaacttgctctgggaagctggttgaaacttgattatttttggcctcaatgcttgaactttgatcattcctctccccaatgctgataggaagacttacatttagcatgcgtgagcaagaatgggacccatagatcgcatctgtacgaccatgacactagaattttacactacgaacttgaatgcatggtcctaagctctgagcccttctatttgtccaacct

SEQ ID NO: 38807 - DNA, 225 bp, Gossypium hirsutum
  Clone ID: LIB3146-027-Q1-K1-G12
gctgattgctttcccaggagcttttgttgaagatggatgttggtaatggtacaaaatgaatcagacactttgttgatgttgcttgtgctacaccactttttgtcattttgtgcctatggtactgtcatggtatggtatgggtcccttactatattagatttagggttgtttgaacaaaggtgaatgacattattataatgggaaaatatagggtgattgaccgat

SEQ ID NO: 38808 - DNA, 303 bp, Gossypium hirsutum
  Clone ID: LIB3146-027-Q1-K1-G3
acgaaggctaggtgttgtataaaggcacctcaattcaactcactgagggccttcttactaacatccaacggataaaaccaccgcgtatcccaactttatctccttggggaagatttcaccgtctccagctgtcgttctaccaagaaagcccgcgactgtcgaccattcctatcagataaccagacccaataggccatgagacacactctgcagcggcgcattaagacgcggacgcggatgtgattacgctcatgcccgtccagatacacttgccagactccctaccgcccgctgcgttagatt

SEQ ID NO: 38809 - DNA, 319 bp, Gossypium hirsutum
  Clone ID: LIB3146-027-Q1-K1-G7
acatccacacatccgggagtttatgagctatactttcttagactgccaacccccacatcaggaacgcgcagttttttgaaatggccgctcaaacctctcatctatggtctctccaaaaagacattcgacgccctacaattccagaaaacccacctcaatctattctgggaagttttaaacctagcatatcatagatctaccaagtatccccagcaagggggtccatcgatttggatgtcacaactccaaagcacttgaatcacacagtgtacctgaaacatataacagtagacttatttgcaattgaacataaaattct

SEQ ID NO: 38810 - DNA, 426 bp, Gossypium hirsutum
  Clone ID: LIB3146-027-Q1-K1-G9
cttttgcatgtttctgcatgtacatacatctgtttgattttttgaaccatgctggcattctaacattctattttggatgcaagtttgaagcactatttaagggttttgatagaaggggaaggaaaaggaaatgtctaaagcactacataattctttctgacttaataaaatgacaactccatgatgccgtgatttgctatgttggttttcatcaagttttttggaagtacatacaatgattcttgcttacagtttctgctttactgtaattgtgatattgttaatcttcagtttcaatctttaaacaacaagcagaactgaaattttatatctgcttataaatgttatgcagtctgcatttgcattcatacattacaagacattatcaaaatgtatccatcgcctttatgtttttattatgatata

SEQ ID NO: 38811 - DNA, 410 bp, Gossypium hirsutum
  Clone ID: LIB3146-027-Q1-K1-H1
cccacgcgtccgggagttaatggcatatgcttacttggcagtcagtcccccaagcatgagcaagcagtttgatgagatcgccgctgcagcatcaaataaatctactatcaaaaaggacttaagataccctgatattgaagaaaaagcactgcaatttattctcgatagttgtgaatcaagcatatcaaagtactccaagtttttgcaagcaagtggctctatggatttggatgtgacaactccaaagcagttgaatcgaagagtgtttctgaaacagctagcagtagatttatgtacaagtgagcagagaatactatttcgcgctcaatatatactgaggacgagattgagggatatgaggagtggtgaactgagagctttaagaatcttcgatggattgcgaaacattt

SEQ ID NO: 38812 - DNA, 437 bp, Gossypium hirsutum
  Clone ID: LIB3146-027-Q1-K1-H10
cccacgcgtccgcccacgcgtccgcccacgcgtccgaaaaaaaaactaaaggaacctttaatctctcccccctcttccccatggccaacaatcgggtttcttcgccgcaccaccgtaccaccaccgtatccggtggccggtgatgcgtaaaaaggggcttttaacctgcttcaaacggatccaaagcgaggctcttcaaatccgaagaaaaacgaaagaaaaggcctctccccctcacttttagatctgatctagacgaaggagaagagtccttcgacgacgtaaccgtgggttctccagtaaggtgcttcctttccattttttgttcaaaagcaaaaataaaatataataaaacgaaaatttgaaagtaaaaagatccacctttttcttgtttttgctctttgatttcttaaaagtgcgcggtaaaaaaaaaacaa

SEQ ID NO: 38813 - DNA, 428 bp, Gossypium hirsutum
  Clone ID: LIB3146-027-Q1-K1-H11
ccaacctgaatcgactagtcctggctggaaacaggtttacaggtcgaatcccagatagtttgggaaggttaaagaagctgttaatcttggatttaagtagaaattcactctccggccatttacctctaggtcttggtggtctggcatcactcttgaagtttgatttgagtaacaatcaattgaaggggaagctgtttgcacgtaatgcatatctgaagaatttgacccttttagatgtgagaaacaaccagttttcaggtgggttaaaccagccaattctagacatgcattctttggaagagttgatgctgtcttgcaacccattaggtggagatattatgaggctagattggcaaagtttacaaagtcttgtggtgttggatctcagtaatgtaggattaaaaggtgaaattcctgaatccctatct

SEQ ID NO: 38814 - DNA, 347 bp, Gossypium hirsutum
  Clone ID: LIB3146-027-Q1-K1-H12
gctacgcgaacagatgccggactagacgcggggcggctaaaagggcggcgacgaggacgacgaataggatcccacacctgaccggggtggatacagtggtggcctcactcacggccgaacttagggaccctccgaggagacttgctacgatactggttcaccttccgatggacactttgatgatgcacgtgatgatgcacgttccggttactctcactgagacgatcacttagaagatgccgacactgcttacggaacctattacagaccctatctcagacctgaacgatgacgcagctggacctgcacctggcgctggatctggtgactgttgaagggaccctgga

SEQ ID NO: 38815 - DNA, 263 bp, Gossypium hirsutum
  Clone ID: LIB3146-027-Q1-K1-H3
tcgagacataataacaaaaagtgtatcccatagtcctctggatgatttggatggagatcacggaattgctcattttgcctccttacaatctgttgaagatggttctgaaatagctttttacatatcacctactatactataggaggcctcacctgaaaattcggtgtgcattttctatgtactgggttggctgattttccatctggaccaatgtctattggagagggacttgaggaaatgtgtttggtgatgggaaggtaaaa

SEQ ID NO: 38816 - DNA, 320 bp, Gossypium hirsutum
  Clone ID: LIB3146-027-Q1-K1-H5
acgcgtgcgggagttaatggcatatgctttcttggcgggaactcccccaatcatgaacaagcagtttgaagaaatcgccgctgcaccatcaaataaatcttctttcaaaaatgacttaagacaccctgatattgaagaaaaaacactggaatgtactctcgatagttgcgaatcaagcgtatcaaagaactccaagcttttgcaagcatgaggctctatggatttggatgtgacaacttctaagcagttgaatctaataatgtttctgacacagccttcagtagatttatgtacacgtgatcagagtaaactatttttcg

SEQ ID NO: 38817 - DNA, 400 bp, Gossypium hirsutum
  Clone ID: LIB3146-027-Q1-K1-H6
ggattcggcatgttagggatatcggttttcgtggttgttctcgtgccttacttggcggtactggtttatatttccttggtttggcaattggctagcgtggtttcagtgttggaagacgactatgggatcaaagccatgaagaagagcaaggcgttgataaagggtaagacgggggttgcggtcgccatgtttcttgtgctggttgtttgttttattgggattcaagtggtgttcgagatcggggtgttgttttattggtcgatgagtgttgaaatgaggattgggattccaatcctttgctttttgatgctgtttatggtggttctgttcggacttgttgctcaaacagttatctactttgtgtgcaaatcatatcaccacgagaatatagacaagtctt

SEQ ID NO: 38818 - DNA, 281 bp, Gossypium hirsutum
  Clone ID: LIB3146-028-Q1-K1-A12
ataagactcaaggttcgatatgctgaccgatttgatttcaaaacaacatatgtgggtgattccaaggaagttatctcgaatttgtaaggcattgattcaggactgctggagcaggatgttgcaccacatgcactcatccacatgcggaaagacaacctaaacttgatatggctacactttctaggctgcgagcctctgttaacataaaaacaaagccccgtttcattctccatcatgatgattaatatctttctgtcattacattaatgctcactttatct

SEQ ID NO: 38819 - DNA, 393 bp, Gossypium hirsutum
  Clone ID: LIB3146-028-Q1-K1-A6
cccacgcgtccgcggacgcgtggggttggagaagggtgaccctccagatgccatcacatataaggtaatatttcgcggcctttgtagtggtggaggaccaattggagaagctgttgattttgtagttgagatgaccgagaaaggatttttacccgaattctcatcattttatatgctggctgaaggactttgtgctttatctatggaggataccttaattaagctggttaatatggtgatcgataaagctaactgttcagacagtgaggtttccattataagaggttttcttagaatccgtaaatttcaagatgcattggctaccctcggaaacatcctggacagcagaaagcagaagaaaccttactggtcaggatgaagctagatagtgct

SEQ ID NO: 38820 - DNA, 418 bp, Gossypium hirsutum
  Clone ID: LIB3146-028-Q1-K1-B11
cccacgcgtccggggagctcaaagaggacaaaatgggattcaagtggaatgagtgatagacccggaggtttgggtgtaacagggttcaatatgtatgaaaccaggagttattgaaacataatcattgtattgatcttgaaagccattggagcttctagaacgtttggaaacacaaccctgaatgaatggggatgggatgctcacacttgttggatattagtgagggatgtgctagtatttttgggatttggatcttcaggttcggcatggcaagatcagattgcttaggcatctaacactcctcatctttggtgcaatttcattaattgtagtttaaccaaatgagaatgggaagccttttttttcttaatcttccgaaattggttttttgagaaaaatcgttatttgtagattgtag

SEQ ID NO: 38821 - DNA, 372 bp, Gossypium hirsutum
  Clone ID: LIB3146-028-Q1-K1-B3
gccgtatcgatgctcgaggtgcagagattgaaccagctagggaggggatgaggatttggtgtgagctgattgagatgcttaacgctcacaagatgggtatgacaacagatactgtcaatacctatggatatatagctaaagccattgatcacacatgatgtacatggcaactcataaagaacgaatatcaaagtgcatgaaccccagaaccgagttagcacaactgtggctatcctcaatcgtcgctgaaacaacgatcacacaactacagaaagagccagcattgatgaatgagtaccgagtgccatatctaaatgtgcacaatggtgactcgaagggatactactgcctgatggagtatactggacaaat

SEQ ID NO: 38822 - DNA, 391 bp, Gossypium hirsutum
  Clone ID: LIB3146-028-Q1-K1-C5
atcttctgaagccatctgatgttatacttagttttgatggggtaaaagttgctaatgatggaacagttccattcaggcatggggagcgcataggcttcagctatcttgtttctcagaagtatactggggatactgcactagttaaagttctccgtgattcgaagatacttgaatttgatataaaacttgcgactcacaagaggctcatcccagcgcacaccagtgcgatacctccttcttattacattattgctggatttgtttttactgctgtaactgttccatacttgcgttctgagtatgggaaggattatgaatttgatgcacctgtcaagctattggataagcatctacatgcaatggccgagtctacagatgaacagcttgttgt

SEQ ID NO: 38823 - DNA, 394 bp, Gossypium hirsutum
  Clone ID: LIB3146-028-Q1-K1-C7
ctccgataacgtttccggcaagatatctggctccggcaacagcaagtgccattgctcaaagcgaaggaaaaatagggtgaagaaagtaataagggttcctgccataagttcgaagatcgccgatattccaccagacgagtattcatggaggaaatacgggcaaaagccaatcaaaggctccccattcccgcgaggatattataagtgcagtagcgttagagggtgccccgcgaggaaacacgtggagcgagcccccgatgatccgtcaatgttgattgtaacgtacgaaggggagcaccgacacactcaacccgcaatgcacgagaatatggctcctgccgtgggaatggactggacttcgagtcaacgtgataataagcaaatattaatctaa

SEQ ID NO: 38824 - DNA, 394 bp, Gossypium hirsutum
  Clone ID: LIB3146-028-Q1-K1-C8
gctcatcaacggtccaaccaacgttaccctcaactccactggcgaacaatattacatttgcacaattgcgcggcactgtgaactgggtcaaagattagccattaccgtctccgccacttccagctctcctttgcctgcaccttcacctactactcctgcaaccccttctcctacttccaatgattgtacaccggctcctacatccggtccaacagctggctcgatacctgctcccaatgccactcctaattcttcatcttcatcatctgtccttgccactctgttgctgtccctattccccattttcatgggtttaattttctgatctatattgaggatcgaggataccaatcttcttatacttcatgattaattatttgttccttccacgata

SEQ ID NO: 38825 - DNA, 415 bp, Gossypium hirsutum
  Clone ID: LIB3146-028-Q1-K1-C9
cattgtttgaacatacaagtgctgacaattttattactttctcttaacttttagcatattctttggaggcattatcacaattgtttttttgaggcgagtgccactttgatatgtagaaagaaaactgagaattagtgatgattttacccaattcagtccacttttattgttttaaatcttagatgctaatttgattctcccttttgaggctgtaatcttttttgggattacatttgcagtctctcctccaaatgaaacttgtaatctaaacatatatctattaaaagaaatgacttttcatgctcttgcagttgcaaaaaaaaaaaaaaaaaaaaaaaaaaaaaaaaaataaataaaaaaaataaaaataataaaaattattaaaaaaatatatattataaataatatattaaaa

SEQ ID NO: 38826 - DNA, 242 bp, Gossypium hirsutum
  Clone ID: LIB3146-028-Q1-K1-D1
cttatatcaccttaccgttaacaatataagcttagataacaaacaatgcgatagcttaatgggtaggataaattcggtgaagaaacatataagggttcctgtcataactactaagatctccgtatattccactatacgactattcatggcagaaatactggcaaaagccaatcaatcgcttccccatttccgctaggatattataaattcaatatcgttagaaggtaaccccgttaggaatc

SEQ ID NO: 38827 - DNA, 404 bp, Gossypium hirsutum
  Clone ID: LIB3146-028-Q1-K1-D3
ggcctgccatgtttgaagtataccagctcttaagagctatcggtgaacaatacaatttcactacagaagatgaaatttcgatgccttcagataccaatgatgtcggttatttagaggaacttatagttgctcgataaatcaacaagaataagtgcaaagatatgggatacggtgagtatttcttgttgtttacgtttaataaagggttgagattacatgcactttctaattaggtctgtgtcttttgtttcatagtagaatacttgattagtttcatggaggaaacactttagattcattactaagatattcttatctccttaattaggctttcacccttagttacaccaaggaaatgctacattgtaaagtaagatcaatttataattatggattcttgttct

SEQ ID NO: 38828 - DNA, 394 bp, Gossypium hirsutum
  Clone ID: LIB3146-028-Q1-K1-D8
gagaaatgatagggattacagagatagattggagcgctctgaaaagtcccgggcagatgatattttgattgagaagtcgagagatagatcaatagagagacacggaagagagtgttctgttgagagaagcattgataggaatttggatagacttggtgataaagctaaggatgagcgcagcaaagacgaaagaagtaaagtacgatatgctgatacatccgtagaaaagtctcatgctgatgaccggtttcatgggcaaagcttgccgccaccaccacctttacctcctcatatggtcccacaatctgttaatgctactggtagaagggatgatgatcctgacagaaggtttggtagtacaagacacactcaaagactctctccaagacatgaa

SEQ ID NO: 38829 - DNA, 183 bp, Gossypium hirsutum
  Clone ID: LIB3146-028-Q1-K1-E10
catacatgtgggtcggtaccttacacaggattatttacctgtacgaaaattaatggtgaaaaagattgttttgattgccattgttcgacataaagagcatgacaatgtacacattgtcctgtccaaagctgccacactttctgacctcacggttaacatggagcttacaggactttttaacaa

SEQ ID NO: 38830 - DNA, 395 bp, Gossypium hirsutum
  Clone ID: LIB3146-028-Q1-K1-E11
gaaagaaactcgaaacgagaatctgaaatttcatctaatggtgacaccaaccaaaatgcattggaaagagcagcatatgcagatgcaaattcactacttgacaaggaagaacaagatattgaaagggcaattactgggattacagaagtgcagatgaaagagatacaagacaagtttcttcgttttgaggagatggatttgcagactgagaaagagaggcaacaactggagagcatgaagaatctactttttattgaccagctcaatctttcatttcgtagaaactatacatgaaatactgaacaagtggtgaagaacaattgttttctttttcttctgtattctgcctctgcagatggttatggccaaaggagaaaatttcttgaattgcaggt

SEQ ID NO: 38831 - DNA, 393 bp, Gossypium hirsutum
  Clone ID: LIB3146-028-Q1-K1-E5
tcgaaaatctgtcatccagcggaatttgatttttacctttgcagtcatgctggtattcagggaacaagccggccagcgcactaccatgttctttgggatgaaaacaattttacagcagacggtatacagtctctaacaaacaacctttgttacacatatgcaaggtgtacgcgctcagtctcagtcgttcctcctgcatattatgcacatttagctgcattccgtgcacggttctacatggaaccagagatgcaagagaatgggtcgaacagctgcagtaatggtcaaaataaaggtacaagggtagtgggagaatcgggggtgcggccattgccagccttgaaggagaatgtgaagagagtgatgttctactgttagaatggatgagtggag

SEQ ID NO: 38832 - DNA, 162 bp, Gossypium hirsutum
  Clone ID: LIB3146-028-Q1-K1-E8
cccacgcgtccgctatacttaaatctatcatgcgagtgttgaaatagtttttggtagcccggaaatcagggtttgtttttggtagtattgcagatgatgatcttacatatgaactttgaactgctatggatatattttaatatatggacttattttggtacc

SEQ ID NO: 38833 - DNA, 246 bp, Gossypium hirsutum
  Clone ID: LIB3146-028-Q1-K1-F9
ggtggacagatgggaatgaggcagcttgatcctaaggcatcgaaggctgagggtaatggccttgctactgctaaagacttaaaccgtcttacggctgtcttaataaaaatgcgcggtggtcattgatctttgatcatctttgtctatatgatgaattataatggatgtatctcctaggaaaaaatttacctagtatatttttgatagtttacatgaaagagatcacaaactgttcttaaaacaaac

SEQ ID NO: 38834 - DNA, 408 bp, Gossypium hirsutum
  Clone ID: LIB3146-028-Q1-K1-G11
cttttttttcccgagaaaattaagatttccattttattttcttcctaatgtcatgtttcagtatgtcttctgttgggccatccatccctatcagaagttagtttctgcacccatatgcctcttcgaagcaccgacaatttctgagatgatgctttgttgatgtaacctttttatgtagagccagtaaaaaactgttattgtgtgatgtccagggggatgatcgtcccattttattttcaaccaaagggtagtaagaaatccatgtaaatgttagtccaaaatggctgaaaattgtaaaagctgtatgtcttatgcttgattgtatataattaaaagagctttcatgttgcaaggctcatcctcctaaaaaaaaaaaaaaaaaaacccacgcgtccgcccacgcgttcg

SEQ ID NO: 38835 - DNA, 402 bp, Gossypium hirsutum
  Clone ID: LIB3146-028-Q1-K1-G2
gatcaaaatacaatttaccattatattaacttataatattttaaaaattaaaaagaattaagagaatttttaattttggggtcaagaccactgtctctctccctctgcccttgtgttttggttaataaaaataaaaattatgcatattttcaaattgggttcgaagtaaattaatatttaatttcgaatcggattctattgaggcatattaagtcgagatcgtagaatggacatgctgggtttttgctatcatgttatgatgctaaacttagctatgattccaaaactgacacctttcaagcaagatactcgcctcacgtccggcaaacaacagagcagaacatatcatgggataggctaagagcgccgccggtcgatacttgctcatatgatcttcacatt

SEQ ID NO: 38836 - DNA, 247 bp, Gossypium hirsutum
  Clone ID: LIB3146-028-Q1-K1-G7
cacatgcgtgcggcttgatcaatggtgcgattacttcaaacggtggacaatgacgcttggcggcagcttgtagaagtgaacaccttgtataaactgcttaactgatgtttcttggctatgaaaaataggcatggggttaaggaacattgcgaagttgggatataatatggaaatactattatttacaggtagatgatgtggatggatattaaatcaaattggaatgcaacatctatcagtttcagtt

SEQ ID NO: 38837 - DNA, 392 bp, Gossypium hirsutum
  Clone ID: LIB3146-028-Q1-K1-G8
cccacgcgtccgaccacgcgtacgcggaaactacattacaaccctggtggcatatgcactattgtgcagatcaatgacctgaagaattccacacgacttactaaatgggagcttagacaagctaccaaacaagcccttcagttgctgtaggataactaccctgaatttgttgccagacaggtgtttatcaatgtgccatggtggtaccttgcggcgaataagatgataagtccatttttaacgcaaagaaccagaagtaagtttgtgttcgcaggcccttcaaaatctgcagagaaccttttcaggtacatcgctgcggagcaagtaccagacaggtacggagggttgatcaaagacggtgaattcggcaacaccgatgccgtcaccgaaat

SEQ ID NO: 38838 - DNA, 233 bp, Gossypium hirsutum
  Clone ID: LIB3146-028-Q1-K1-H11
gaaaaaaataagaaatggttgaaaacatcgtaaaatagacgaatcccaatatagattgggaaggataaaataagatgagaatattggaaaataaaataaaaataaaatataacagacgtttacctctccgtctttgaaagtctggcttgactcttgaaatttattgagagttcctttttttttttaggtgaagctgttagcactttatgcctttctgaataattcgacccttt

SEQ ID NO: 38839 - DNA, 402 bp, Gossypium hirsutum
  Clone ID: LIB3146-028-Q1-K1-H3
gggggttgtatgatggtttcatcactatcatctcggataggttgcatcacttttgcaagttcctccatgaagaagaccaagccaattggtttagcaaatgttaagtagtggttaatagcgtaagtgttttaagacacctcttgtttatttataaaactctaaaattgttatttgtttttctttttaagttaattgtaagtcggaattatgaaagtgtaagtgactttcttgacaattttgagaaaaattctcctaatgctctctctctctctctctctcccctctctaacaaaatatatattgaaatacactacatttataacaccaacatactggattgtttagaaatcgatgattatatatatttgtcatttttcatgttcattttactgtccatgttta

SEQ ID NO: 38840 - DNA, 390 bp, Gossypium hirsutum
  Clone ID: LIB3146-028-Q1-K1-H4
gcgcccacgcgtccgcccacgcgtccgcggacgcgtggggcaaaattggatttgagttttgatgttacggagaaccatttataggagactttgttttcttttccacaaggaaattagatttcttcggctcctttatcttatgtaaacccttcaatgccttagtttatcgggtaacgaaaggtttaaagatggtcactctcactcactttgtccttgttacaaaaagatcgattgggctaacccttcaatacacataaaaatttggactgcaaaaaaaatataccatctctaacaaaatatatattgaaaaaacactacatatatgacaccaacatactggattgattagaaatccacgattatatatatgcgtcatttttcatgtgcatt

SEQ ID NO: 38841 - DNA, 392 bp, Gossypium hirsutum
  Clone ID: LIB3146-028-Q1-K1-H5
cgattattggcagcaatcttgttcaaggtaatgcatccacacgaagttcttcctcctgttctcggggcgtctgtatatgcaatagcttggattctatcttatgatgggttatcaggcatcccaacgccagcagaatctgtagattcactgacttcgagggtgcgttctactgatatcaacaaatctatgccagtgatgaaagatacaagtcccaatccaagtaggttccttttgtcacttttgaaccgaagcccattcagctgttcaagtttccagaaaggtgttaagggccctgcagtaggggctgtaacaaatggagttgagtccatgagttacaaccaacaggcacctgtaatgtcagctggaatgagcttatatcaagctgcgttgca

SEQ ID NO: 38842 - DNA, 137 bp, Gossypium hirsutum
  Clone ID: LIB3146-030-Q1-K1-A1
cacggacggtgtatgataaggccattgttattaaggcttgctgtatgaactaggagctatacccaaggcatgtgcttgtttggagccaaataatcagccttctgtgccctttggggtatacaaaagcgacaccacac

SEQ ID NO: 38843 - DNA, 284 bp, Gossypium hirsutum
  Clone ID: LIB3146-030-Q1-K1-A11
ctgatataactttatatcaaactcggtccgcttctaatctccttagtcgtgcaataactgtaacggtgattgctttcagcacaggtagttatgtggttttaaaaccttctcatggacttgccatcgcttcatgtttcatctgtcctgccgtatatttctgttattacatagaagtatttatagcttgggtgaagatggatctgtgataataaagaattttgtcacaaatattgtattatatgtgacgagttttatatgtgacactaataaaataagtgtgattt

SEQ ID NO: 38844 - DNA, 392 bp, Gossypium hirsutum
  unsure (1)..(392): unsure at all n locations
  Clone ID: LIB3146-030-Q1-K1-A4
ggttctatgaggcatattaatagtcttgttgatgaaatgcaaaatgtccacctgtctatcaatccccctggaattctcaacagttttgcttgcttgagtttttgattcccaggaacaatcaacttatgtgaagcaaacaattgatggcagtttgaagatggaactttctcctatcatcagatgatgttccagagcaaggtaccaaagtattgaaatgaattatggggcagcatgaaagaaaagattgagttcctaaaaagagttccgaacactagcctatatccatccgattatcaagtcatgaaaagaaaggtagaaatatggtatggntcctattttttttttctttntctgactttttgttgatattcttttatcctaccgagagatca

SEQ ID NO: 38845 - DNA, 325 bp, Gossypium hirsutum
  Clone ID: LIB3146-030-Q1-K1-A5
gaccttgcagctgcacttaaagagatgaacggtaaatatgtgggaaatagaccaatcaagcttcgaaagagtaactggaaggagaggatagatcaggatgcccttgtgagacagaaaaaccattatcagaaaaagccaaagctacagaagaaagggatattgcacaagtgagcacagctctggtgaagctttttcgccttccttgtcttggtggagcctgtttgaccgactgaatcattagtagtaaatcaagtgtgtttgctctactaagcaattcttaaaatttgggggggggggggagggagaattgaaggattaaaaagaa

SEQ ID NO: 38846 - DNA, 396 bp, Gossypium hirsutum
  Clone ID: LIB3146-030-Q1-K1-A9
cggacgcgtgggctggtatagtcacagacgagatgctttccatgccaaaagctccttatcttgttattggtcttttggaggctcttgctgctgcgactggaatggcagctggagcaattctatctggggcatctattccaattctgtctcagacatttcttgtgtggcaaattctcctgtctactatttttcttgggaggagatatagagtaaatcaattacttggatgctttcttgtaactgttggtgttgtcataactgtagcaagtggatccagctctggtcattcattgaaggaagctggcatattttggagtctaatgatgatagtttcttttttgttgcaagcagctgatactgtgctgaaggaagtaatatttttggatgccgaaaagc

SEQ ID NO: 38847 - DNA, 196 bp, Gossypium hirsutum
  Clone ID: LIB3146-030-Q1-K1-B5
gcaagttcttgcatcatatgcggcatcaaaattaatcttcacaacctgatcagatgggtgcctccattttctaacactaaaagagtgttgcgtatttcttttatcactctcgtttagctctgatttttaattattaactaaagtcactatttcttttccagatttactagccttcttatgcactccagcgttcctg

SEQ ID NO: 38848 - DNA, 388 bp, Gossypium hirsutum
  Clone ID: LIB3146-030-Q1-K1-C12
cccacgcgtccgggcaaactcgctttgtatctcgcaaaccaccaagagatgtaatctcaagtgttgaagctgttgcggaatcaatgggtctcaaggttcatacaagaaattacaaggtatgacttgtaaacatatcttcattgacaaattgcaggttactgttccatagagttatgctttagagacttttccacaaaatgaagtaaatttatctttttatgtaaaaagttctcaccattttatcattttcttctcttccaaagaagacaaaaaggggcattgctaacatgatagtaagaaacccttgaaatggctcctttatagcaggcacttattcaatattgattttgattacttttcaaaacactctaagaagtattttttttat

SEQ ID NO: 38849 - DNA, 385 bp, Gossypium hirsutum
  Clone ID: LIB3146-030-Q1-K1-C3
cttgctatttcatttcctgatcaagaataggaagttgaaggatgcttcagtgctgttcaacgagatggttaaaaatgagtttttcccaagtaaaacagattgcattgcggcggttaagatttttcttgacattggggacccttatgtggctgtaaaagtttggaaattcatgatagagaattatgattctgatttggatgagactggaaatctgctgattaatgggcttcgtgatgcaaacatgcttcctgaggcagttaagtatgctgaggatatgattgagaaaggaatcaaggtcacctcagccacattgtcaaggctgaaacacagccttagccgagaaaaaaaggatggggtttatgaaagaactttaaagaaatggaaa

SEQ ID NO: 38850 - DNA, 406 bp, Gossypium hirsutum
  Clone ID: LIB3146-030-Q1-K1-D1
caaaaagcttgaagattgtttagaagaggaagaaatggagtcagagagcaacaggagggtgctggtgatgcaaaggaagtacattagctatgagacactgaggagagacatggtcccatgtgctacccctggtgcttcttactatgattgcaatggcggtcatcaagcgaatcattacaaccgagggtgtgaagttattacaagatgtgctagaggtatcaaaggtatcaaagcttgaaaaaaataaaaatcccccccaaaattttatgtttttaacctaccatatatagctgctttgtcctaagtggtatctttctgggtttttcttatattggtgtatatttaaggttgttaaatttaacctgcttaatataattgcatgtttaactttgaatttttggatctg

SEQ ID NO: 38851 - DNA, 275 bp, Gossypium hirsutum
  Clone ID: LIB3146-030-Q1-K1-D12
cccacgcgttcgggtgaatcctttggttttatcataaatttctttccagggggcattcatggcctgtaaatacctccaatctctatcgattagtcaacgatcatatttccttctttcggttacgtttcagacgacgttgggtgcttttcagatctgggttcagacgcaaactattttcatgtgtccatatctttcacagtgaaaacatacccttggtaaaaattcatactcaacttttctgttttttaccatcgattataatttgagacaccaat

SEQ ID NO: 38852 - DNA, 402 bp, Gossypium hirsutum
  Clone ID: LIB3146-030-Q1-K1-D5
cccacgcgtccggcttcctggatgcaaaaaccagaagcagaggattgtaatgtttctcaccttcaatcgaaagaaaccatttctgctcccagtttccagtcccaaccacagtaccatgcacccaaatcaagagctgctgcaattgatcgtcaacgcaggctacgaatagatgaaagtatcaaggcattgcaggaactgcttccaagttcttctgagcgtggcctaggaaatgcactggatgatattattgactatgtcaaatttctgcagttgcaagtcaaggaattaagtcgaagcagactggggggtgaaccaacttctaatccttttgttttttttgagggatatggtcactatgttctccatgaacagatgataaatgaacctcttgaagagatgatg

SEQ ID NO: 38853 - DNA, 394 bp, Gossypium hirsutum
  Clone ID: LIB3146-030-Q1-K1-D8
cccacgcgtccgtaggactatatatgaggaggctgatgcaaacaagcggaggaagcgatatgccagacctcttatcgatctgcatatgaagatatattactctgagggcatggagccatggagcttgaagaaaaatacgattagcgatgtgccagagggagccataattataagggaacatacagcactgaataatttgtttaactgcttgtggttcaatgaggtcaatctcttcacaccaagagaccaactgagctttggctatgttgtatacaggttaaaggggttgtttaagttctttatgtttcaaaattgcgagtactattcactttttatcctgcacccccatactcgggaacattcttctaaagtagagtgggtgaaaagcttgagt

SEQ ID NO: 38854 - DNA, 263 bp, Gossypium hirsutum
  Clone ID: LIB3146-030-Q1-K1-E11
cagtcatgttgacactaaatttagacttgaccattcatatacttgtgttgtgtgcgtataatattttttttcgtgttgtgtccgacatttccagtgtcgattaggaaatagtttctgttatcatattgttaatgtagatataatggtctgtacagaaatcaattcatcgccgtgaagtatgaatttgctgttgatttttgtgttggaatttttggaacatttaagaaacatagtgaccgataacctgtattgattcgtaatgg

SEQ ID NO: 38855 - DNA, 398 bp, Gossypium hirsutum
  unsure (1)..(398): unsure at all n locations
  Clone ID: LIB3146-030-Q1-K1-E5
tgttacgaaccacgacgtcgattggtggagcgcgtttgtatttaccttttaagccgctacataaaagattcattaacccatacaaaacctgactcgtttctcctcttcctctgaacgccggcctctcaaactccaaccaaggaagcaccaaacatttatttggttggagctgaaaatgaaaccttaccttattggctgtccagcacctcagcacttttgtgtctgctacagaaaaatttgcgatcaaatggctttttatctgctggcactcaacgctctgggggaaacactggttttcttgggagagtttcttatgataagtggattaatggtgcanatggtgaagctctagcgcgcagtgcnaggttttattgtgttgaacctattctatatgttat

SEQ ID NO: 38856 - DNA, 394 bp, Gossypium hirsutum
  unsure (1)..(394): unsure at all n locations
  Clone ID: LIB3146-030-Q1-K1-F3
gttctctgcccttttttggccatttcctgtggaacaacactgagcataaaaccaacctcaaagataaagatggaaggccggacgaggctgcaccccaaagcactcaaatgaagcaagtaatgtgcgctctctcaatacaaaaagaaaacatcagcaaccatcagtccccaggagctaatccaagaccagatgatattgcagcctaaccttgtgattgctggagagaaagtggttgaagtggtgggctcattggtgatgtattagaatgtacagttttatatccctaaccggaggaagttgtcatgaaatttcctgaactccactctttgtatatctttgtccttaatttgaagtttctaggaatgaggactngagttggaaataaaaggaagac

SEQ ID NO: 38857 - DNA, 392 bp, Gossypium hirsutum
  Clone ID: LIB3146-030-Q1-K1-F5
agtgattctgatgatgaggatgaaggtaggaggaagaggaggaaagaaaagagaaagaagagggatgattcttcggacgaggataatgatgaccatcgtcgtcataggaaaagaaagagtaggaaggagaagaggagaaggagaagtcataggcattctgatgattctgaatcatcggacgtgtctgatgatcctggtaaacgacataggaggaagagccaaaggcatgaatccctctctgattctgatgttagtggttcggatgattctcgggttggaaggggtgcaaagaggtctgagaagaggagcaggaaacgccatcacgaagatgatgagtagaggcttgttagctaagggatttagaagaggggatatgatgtttgtgctagaag

SEQ ID NO: 38858 - DNA, 373 bp, Gossypium hirsutum
  Clone ID: LIB3146-030-Q1-K1-F7
ggtaaagaagaataagattgtgaataggccattggctggaacaacaaggagaggaaagactcaggctgaagatgagctggcagaaaagctattgctaagtaatgaaaaggaatgtgcagaacacatcatgcttgttgatttgggtcgcaatgatgttggaaaggtctccaaatatggttctgtaaaggtggagaagctgatgaatattgaacgatattcccatgtgatgcacataagctccacggttactggtgagttgcaggatcatctcactagttgggatgtcctccgtgctgcgcttcctgttggaactgttagtggagcaccaaaggtgaaggcgatggagctaatcgatgagttagaggtgtcaaga

SEQ ID NO: 38859 - DNA, 324 bp, Gossypium hirsutum
  Clone ID: LIB3146-030-Q1-K1-F9
cccacgcgtacgcaaccatcaaggcttgggacatgcttaagggaccgcaaaaaggggcccaaagggaggtgtcaaggtcgctgccccgcccgagaaggaacaggatacggttgtgaatacactgttcaagaagcgtgcaatgcactttgctcttcccggagcactagctctacagaaggatctacatcgatctgtagagtggcctattgatgggcgcattcagaggcaaaagaggatgcttaagctgacgctgaaggtcccaccagcatccaaccattttaccaagactcttgatacgaacctatctacgattctattcaagct

SEQ ID NO: 38860 - DNA, 253 bp, Gossypium hirsutum
  Clone ID: LIB3146-030-Q1-K1-G10
ggaaaattatgaattcctttcaagatgtatcaaagaaaatttagggtttcacaatggtaaaccgctggctgcttgtatcatatataaatgtctccatcattggcattcctttgagtctgaacggacagctatatttgactacataatagaaggaaatcaatgatgttctgaaggttggagctgaaaatgaaaccttaccttattgggctgtcaacaccttagcacttttgtgtctgctgcagaaaaatttgcg

SEQ ID NO: 38861 - DNA, 252 bp, Gossypium hirsutum
  Clone ID: LIB3146-030-Q1-K1-G11
gaaggtttaagtctcttgtgatgggaagtgcttagctttaaagggtttgggaccttattagtttagcttgccgccctcctctggctctattattctcgcttttgtaaaaaaaggaaatatagtttgcatctaatgaatttataaaagataaatttgaatatctatgcttatcctaaaccaaaatgttgtttaacttgcgtcatcaattcatgtttgattcttggagttattgataattataattgttgcctt

SEQ ID NO: 38862 - DNA, 351 bp, Gossypium hirsutum
  unsure (1)..(351): unsure at all n locations
  Clone ID: LIB3146-030-Q1-K1-G7
cccacgcgtccgcccacgcgtccggattatagaaactacggattctatacaaagagaaagaaaataaagaataaccaagcagcttgatatatgattgaattacaatgtgctagctgtttttttttatctttaattattatatgaataaaagagatttaaagtaagcttgattgaaaattatcattaaaaatgcttgttggtttatgtggacattaaggagttaataagtgctgtgttttgagtggtaaaaaattaaatatgttgtttaaagctcaatgatgagtaattcanaagataattgagatttaatgtagtatgttactaaatacaaaaagtcttaattgttttttt

SEQ ID NO: 38863 - DNA, 389 bp, Gossypium hirsutum
  Clone ID: LIB3146-030-Q1-K1-G9
cggacgcgtgggtgctgctgctcagattgaaggatcagaaaaatctaagggaaaaaggcctactgtatgggatcaatttatttggaaattgccagataaaatattggacaatagttctttggaagtagcaattgatttgcacaactgttataaggtatgaagctttttgtgacattattgcactttgattcgtcggaaacttttcaagacaagtatggaggcttcttaaatcgtatccttgtgttagtactatgtttgattctaacatttatttagctcttactagactttgctgcatgttatacaaactataggcgaatattgggggaggttgacccttttaaacttgaacaatacaattcttgctctttattcattttataaattaa

SEQ ID NO: 38864 - DNA, 289 bp, Gossypium hirsutum
  Clone ID: LIB3146-030-Q1-K1-H2
gtccagccgattcaaatggaccggaggtggcctaatggcctttggctaaatgcaatgcgttacacgatgggtgatgttagcaaagctcatggagcatcacaggagccacaattaacttcatcagataaatttgatatctactctaaaccaattgtgctctagtatttttttgttgctcataatgaattgcatcccgttatactcggagatttctctatccgttccatattcgtgcaatacttgtgtttacaatacattaatccatgttcatgagaatgaaatatattca

SEQ ID NO: 38865 - DNA, 387 bp, Gossypium hirsutum
  Clone ID: LIB3146-030-Q1-K1-H5
gatgattctgaatttcgaaatccttttgctagggcttatatcagggtgaactcctatgaggccggtcctcgcaggggtcgaagccagagtagaagtcacattaagagtccaagggggaatcaaaggtctgtatcaaaatcgaggtcaccttcacctgccagattatccagatcaaggtcaaggtccaactaattgcaggttttgttgctgttgcaggaatgtttgcagaatggctagcatctgttgagtttcctgttgacttgtagcattagaaacttgaatagatatatgaatattttggtaccatatggttgtgacttgtgaggatagctcagtatctttatggtgtaatcttgtattggaccccgcttatttgatacatggact

SEQ ID NO: 38866 - DNA, 284 bp, Gossypium hirsutum
  Clone ID: LIB3146-032-Q1-K1-A1
ctttgcctaagctcatgtttagaaggcttactcacaaacacaaaccgatggggggagcgtaggcgcctattaacatacgatccgaacgcatggctactgagaaactccgcatcgaatgtgaggaccagacccctcataatgcaagctctctcagcgtggtgcacgccagtggcccatgtggggatgtactgctagtaaagaacgctggtcatatactacaagagaaacatgttatctatatggagggaaaggccaggaataccctgctggtcgccatgactttg

SEQ ID NO: 38867 - DNA, 330 bp, Gossypium hirsutum
  Clone ID: LIB3146-032-Q1-K1-B1
cccacgcgtccgggttttcattggaattgacaaaggtcatgtttgattaagttagggaattgatgtacaaaattgttatatgaatcaaagacctcacagctgtaaatacttttgagatcaaaaaaaaaaaaaaaaaaaaaaaaaaaaaaaaaaaaaaaaaaaaaaaaaaaaaaaaaaaaaaaaaaaaaaaaaaaaaaaataaaaaaaataattaaaaaaaaaaaaaaaaaaaaaaaaaaataataaaaaaaaaaattaaaaaaaaaataatttccccaaaaaaaaaaatatgggggggggctcttataaaaaaaaaaaaattttatcccg

SEQ ID NO: 38868 - DNA, 202 bp, Gossypium hirsutum
  Clone ID: LIB3146-032-Q1-K1-B12
cccacgcgtactgccactcatgcacgaacgcattctattctgtaaactgctcgccgtggccggcattctgtgctgttcgacaggtctgtatagaatcaaaatagaactggagctttatggatgtcatagggtacgagaaatcagtgccacttggaagcaattggtggcttatcacctggcctattgcatggtgagcgtcaaa

SEQ ID NO: 38869 - DNA, 355 bp, Gossypium hirsutum
  Clone ID: LIB3146-032-Q1-K1-B8
atcatgttagccataaaagtttgatgtaccaaaggatttggatgttgaacttggcttagactgaaatgtatgctagacatgaaaatgaggtccttgtattcttagtagtctctttgagttttaattttactatggatctagaaaggggaaattgaagttttgatgacttttgagctggggatatcaatggggactggggaggaatggtttaaaatccttgtgaatgttaatgtagtaaaattgattcaatgaatgcttgttgatcttacttgtagtaaatatactgatcttgagtttgtcttactacatgctatatgttaattgatgcaaattaaacttaacattatcgtatcat

SEQ ID NO: 38870 - DNA, 359 bp, Gossypium hirsutum
  Clone ID: LIB3146-032-Q1-K1-B9
cccacgcgtccgcccacgcgtccgcccacgcgtccgattttgtgaagtgctggttctggttggccttggatctcatttcatctgtgagtataagattaagatggatctctgtctgtctggatttgccagcggtgttggtttggttgtgatgtgttgggttgggttgcgtgactaaaacattattgagattatatcttatggagaaattacgatgataccaatatttatatgtacattgataccctttttttccatcaaggagaaaatgctatcctgtacccatttttcccaagaaaaagattactaacatgctatatgttaattgatgcaaattaaacttaacaattatcgtataatgg

SEQ ID NO: 38871 - DNA, 402 bp, Gossypium hirsutum
  Clone ID: LIB3146-032-Q1-K1-C1
cagacacttccctcttccggtggttggccgcctgatcttgcagtgaagccaagcgtcctcgtgtcgagaacgccttttacggtggtttctgatttagtgtacttatttttttggtttccctcatcgtagcatgtattattgtatatagtagaaaatgattgatatggatatgatgggtgtaaagtaaaaggtctgagcaaaagggaaaaagcttatgctggtagttgataatggcgtcgaagttaaaagcaaagggagagggccctagtccttgttttaaagtcattgcagtgcgactcgcgcaacctctcccacaacaaaattcaaatatgcctaaagcttattagcaatggctgttgatatgggttgaaataaaaaggcgtgggctgtgtttttagtatt

SEQ ID NO: 38872 - DNA, 429 bp, Gossypium hirsutum
  Clone ID: LIB3146-032-Q1-K1-C2
gcatcgggcaagaaagatgtgagtatgagaaggacctcatcttataatgaggctgtagtgtctgaagcatcattcatggagattcttaagaagccggctcttcatgggacagaggtccccgtgtatggctctgcttttgagccaccatcatctgatgttgcttcacaagctggacgaagtggcaagaaaaaagggaaaaagggaagacagattgatcctgccttgcttggttttaaggtttcaagcaaccgcattttgatgggtgagatccagcgtcttgacgattaatttttctcgtttacacgcgccatgtcttgttgtacatttcctgtaaatttttttactttctttttttttgctttctatagataaattttaattttgtatagtatattcgaggtaattaattgattttttgtccttaaaaat

SEQ ID NO: 38873 - DNA, 381 bp, Gossypium hirsutum
  unsure (1)..(381): unsure at all n locations
  Clone ID: LIB3146-032-Q1-K1-C4
caaaaaccaggtccgacatcagagagaaactatgggttattttaccctaatgaacaaagggtatataacataccgttatcacaaaaggggctgaatggtaaccagtcaccaccggcgagcaacgtgaatcagacggcgcctgtgaacaactggggaggagtgtcaaaggcgacgtcagggcagacctggtgcatggcgagccccaacgctgaggcggaggagctgcangaggggttggattatgcttgtggtgagggaggggctgattgtgggccaattcaaccaaatggtgcttgttataatccaaattcactcgttgcacatgcctcgtatgcttacaatagttactatcaaaagagggcacgtgtgaagtggtcatgc

SEQ ID NO: 38874 - DNA, 176 bp, Gossypium hirsutum
  Clone ID: LIB3146-032-Q1-K1-C5
agccatccatctgtgctggtttacgctggctttaattggaagcgggtcaacactgatgctgaggaggagactatgtgcgaacactactggcgtgtctgaaacgaacaatcgcgttggattccttgaaagagaagcaactcgctgaggtgcgatgaatgctacagcatatggctact

SEQ ID NO: 38875 - DNA, 388 bp, Gossypium hirsutum
  unsure (1)..(388): unsure at all n locations
  Clone ID: LIB3146-032-Q1-K1-D10
gaaaccggcaattgagcttctcggaaaatgaaaaggagggtggtggtcgccgtcgttgtaaagctccggtgagtttttcgatggatttggggaactggttcgatgattgggaaggttatagaagtaggaaaacggtgttggaagtgttgagagaattggacgcagatatattgggtttgcaagatgtgaaagcggaggaagagaaagggatgagacctttgtcggatttagcagctgcgttggggatgaactacgtgtttgccgagagttgggcgccggagtacggcaacgccgtgctttcgaagtggccgattaaaccggtggaaagtgcagaagatatttgatgacgcagatttcatgaatgtnctaaaagcaaccattgatgtgc

SEQ ID NO: 38876 - DNA, 227 bp, Gossypium hirsutum
  Clone ID: LIB3146-032-Q1-K1-E12
atcaaacgtgaaagcatgcatatcgaaagacaatggatatgcatggcctttggtgaaaagcagctttaatatggacgaacttttgccgattgtaatatccacaatgagtctagtgtgcatctggttctccgacttcggcgtggtatgcatacctttgtgaagactcttaccggatcgaccattactttggaggatgaaagttccgataccattgactgtgtgaaggc

SEQ ID NO: 38877 - DNA, 319 bp, Gossypium hirsutum
  Clone ID: LIB3146-032-Q1-K1-E2
gccaaccgttggattgactgccagggactacaccaggatgtactgggctgttcatcctgggggacctgcaatcttgaacagaatagaaaaacgactatagttgtttccagagaaactaagtgccaagcgaagaacgttggtggatatgggaatgctagcgtaacacacattgtatgtgttggatacatgatagacgagatcttgatgaatcagcagcagcagatgaaagagtgccaagaagaacagagtgaatggggcttgattttagcttttggaccagcggttaccttcgagggtattctcgcaagacacctgacag

SEQ ID NO: 38878 - DNA, 217 bp, Gossypium hirsutum
  Clone ID: LIB3146-032-Q1-K1-E5
gaggccacgaaattcactactgttaaactactcactcggccactgaaacaaccactcttgcatgcggacattggttcaccatgatctttatgccggatccaatcaaatttcactcttggcgcacctacaattgttgtttatgagacaatatatatactgtggagactcccacagctacctttaaaaacgccggataatgaaacatttatggattatt

SEQ ID NO: 38879 - DNA, 227 bp, Gossypium hirsutum
  Clone ID: LIB3146-032-Q1-K1-E6
ttcttggaaattggccctggtttttatcggcacgttccatctaatattcctctagtacctacaatgaaaactattcgacactgagctttagcatagcttagctaggtgtcgattctatgctgtattgctggactgcagcccgaaggattttggagtttgggtgggctgattttcaggttgttttcaagattctttggttttttatcaagaccattttttaatttttg

SEQ ID NO: 38880 - DNA, 344 bp, Gossypium hirsutum
  Clone ID: LIB3146-032-Q1-K1-E7
ctcacgcgtccgaataaatttttctttctttcctatttatctattcctttttgtagaaacgcttgcaaaacttttcttatattcactcttattcattaatatttcatgtttcgattgtttaatctattagaatggtgtaaaacccaagttaatagtgtttgaatgcatgattacgtttgattttacattctttgtttttatcagacatttccattctgtcggaatatattgttttattaaaaatatagtgtatgtatcttgtatttagatttttgattttttattattttttttgttattttttcattatttcattttcactaataatttcttttttcattttt

SEQ ID NO: 38881 - DNA, 322 bp, Gossypium hirsutum
  Clone ID: LIB3146-032-Q1-K1-F1
cgggactgaatggccgggccgacccgtgcgtccacgcgtccgcctttttcttttttgtgtgcgctctctgtcctcatatataattctctcttgtatttttaccttttaattccattaaacccttttaatttcaaagaattattattaggcgtctgttacgctcgcctgttctctcaggttcttttactttcagtttttcttttttgggtttgaatgggtcggatttggcgaagactatttttgtgaaccgccgggccgggtattttgggaggcacaccggggtgcaggtggtggttagccggtaccaaaccaggggtggtgg

SEQ ID NO: 38882 - DNA, 317 bp, Gossypium hirsutum
  Clone ID: LIB3146-032-Q1-K1-F2
ccgttcaattcctggttctttattctgatccgtctaaaaaccctcgtttcccatcttattcctatggctcaaggtgggagagaacccgcgagaaaaagcgcggaaaggctcgcggagaagagccaggcggagaagaagatctcaaaagaggcggcgcagatagaagaaaagaaggttagaaagcgtcagacttacaagatttacatcttcaggtattgaaacggttatcctgatacgggatctcgacaaagcgatgggataatgaacagttcataacgatatctttgagaaatggctcaagagcatcgagattggct

SEQ ID NO: 38883 - DNA, 285 bp, Gossypium hirsutum
  Clone ID: LIB3146-032-Q1-K1-G7
cccacgcatccggatctacagcgggtactgaatgcgacgcatgctctgcacctcggagtgagggatacaaacgcacctctattggctaacgctgttggagcgctggaggctagctgcggcgcaagcataagctaggagcaactgcctaggacatggcttttgggcattgtgcctatttgtatctgagccgtttctatcaatacagcttgcagtacttgaagctgctaactgggcatttaatggactggcacaatatagattattggttgaatcaaaggatgaccc

SEQ ID NO: 38884 - DNA, 269 bp, Gossypium hirsutum
  Clone ID: LIB3146-032-Q1-K1-H11
cggacgcgtgggatcgcgagggccgcccttttatttatttttatttacctttttctattcggggtagatgaaatccttactgttactaaatatacattatcaccaatcaataaaaaaaatgatttatggtatcaaactgtcttgttttaataaaaggggagaactggtgcttcaaacagaaggaatggtattgtaacccactgccttatgaagtgaaaaaaaatgcaccgtttaccaaaaaaaaaaaaaaaaacaatcttttgtttatt

SEQ ID NO: 38885 - DNA, 379 bp, Gossypium hirsutum
  Clone ID: LIB3146-032-Q1-K1-H3
cccacgcgtccgaaacacccttggctggctcctcctaaggaggaaggctacttgtcactggaaaagatatgtttttccaggccaaatgagggaagaagatattgatcaaattagtcaaaattgacaccgggggaagaagagacctgttgttcaagaaacgaagatgttcttgatgatgccacattggttcaaagcaatcatcatgaattacattactgtgactttcaaatagtgtacagtagtacatttagggttccggtgctatattttcgtgcttactgcagcgatggaagacctttgccattggatgaaatagaaaaggagctccctgcatgctcttcaaaggaattgtcaaaaaaaaaatggacattcataactc

SEQ ID NO: 38886 - DNA, 239 bp, Gossypium hirsutum
  unsure (1)..(239): unsure at all n locations
  Clone ID: LIB3146-032-Q1-K1-H4
cggaanttcccgggtncnngacccacgcgnttccggtgctannatggtgtnntggcgaanccaaannagaacttctnctcactttnacggtggcngtnntgggggcctancctctggagagttggcttcttaatgnnngctttgccatttgnnngtggagtttggnngggtcttgggtagggattacctnncccctcggtgggtgcacggttggactctggaaggtggaagtcgggggc

SEQ ID NO: 38887 - DNA, 460 bp, Gossypium hirsutum
  unsure (1)..(460): unsure at all n locations
  Clone ID: LIB3146-032-Q1-K1-H5
cggtgatttggntcttggnnttcggtcgccgctcgaccctaataagaaccctaanctaagcgcattgtnagccatggaaggtgatanaagttacctttctcgttagaaccccacttcggagncttcanngctcccgttctcttttgtggttccaaacggggcatgtttgtgattcaaggggggataacttgtattgtttcaacgtgattcacnggcattttggtcccttcttccttatgnggcttattgaaagggaaaagttgtttatgaaggggtatggcccacnnctagcaagctttggtttatttgggttaaatgaagaaagaatacattcaaaggtattataangttcgcttgttaagtgggcttttaaagaaactttgtgataatggttcgaagaaaatggtcttttctgggtgctaagttttaaaatgatgtacaaattgtttttttttttttt

SEQ ID NO: 38888 - DNA, 285 bp, Gossypium hirsutum
  Clone ID: LIB3146-032-Q1-K1-H8
gccaaaccaagttattgaggagaagcttggtgagccaaccgagagctctgacgatagcactaaaggtcttactgatggtgaatgtcgtgatgcagggtacgatgctgagtacgtaacggacgagaacgcgccaaagagcagaatctatagcattgcatggtctatcgattcatctacgatcacgagcaagatgatgtacgctagcatctacgacagattcaagcacaaactggatcgaatacaggttggattgcaagcgacatatccaaccgcaaatgctatcga

SEQ ID NO: 38889 - DNA, 387 bp, Gossypium hirsutum
  Clone ID: LIB3146-033-Q1-K1-A1
cggacgcgtgggtgaggaggtggctgctgctgctcaatacttaaaggatacgctgggaaaggagggtgtgcaagacctcatcaccaatctttcaaaagatagagatggaaaaattcttgtggaaaacattgtgaagttgggcagtcagatggaggatgacaatagtagggaggaggaagagggaagaatgtaaagattataatccattttggaccgagcttaatggctataatcttatattatctccgaatacccttttaggtagaaatagtagttggtggaatgcatatatgttcttggctttggcaggcatggcggtggtctccgaaaatggagtttcttctagatctttggctctctttctttatagggaaagccgaatttagt

SEQ ID NO: 38890 - DNA, 392 bp, Gossypium hirsutum
  Clone ID: LIB3146-033-Q1-K1-A2
gattcaataatggaggaaccttctaaatcgccattgcccgaaccgggccttggggttcttcaagcaaatgggatcgacccatcaatttatatagcctctgattcaacccctcgttacctaaggttgaaaccagggaatgaagctgaaattgaaggaattgaagctgagataaagtgtaagcttgaaaaagtgaattggttacctggtttttattctcttcgacctgatattttgattgccaattcaaaatcatacttggatgggaagatttatggaattgatgctgcttctggtgctgctgtctcagtcttgaatatttcaccaggggaccatgtgctcgatctctgtgctgctcccagggcataaacttgtatgattttggatcttctcgg

SEQ ID NO: 38891 - DNA, 403 bp, Gossypium hirsutum
  Clone ID: LIB3146-033-Q1-K1-A4
accacgcgttcgtccaagcgtacgcacacgcgttcgcggacgcgtgggtgcggaaacatttgcatgtgtttttttttaaataattttttgttaaagtgactgtaaactaattaaaaaactagttgtgttttgatattgataaacacgcttacgttcagcaactagaagtaagtggaataaagctagctcaacttgtacaagatctgcagagaacaagatcccggtgatttttcgtgggtgggtgtgctgctgctttcggaaatatcagctcacgagctgcaatgtttgacatggaatattcaagatggttagaagatgatcacacgcacttgtcggagcttacaactgggttacatgctcaccttcccgacaccgatcttcagaccatcgtcgacggttacat

SEQ ID NO: 38892 - DNA, 353 bp, Gossypium hirsutum
  Clone ID: LIB3146-033-Q1-K1-B5
attttgctcatcatttatgagcttgctaataaaatgtaagattgcagtattttgttcttgatattgaattgaattgaattgaattgttcatcacttgtaaagtcctgaaaatgtagaaaagttgcatacaagtggtaaaagctgtgaacttgatgaaagatgccatctaaaattagcagatactaaaatgaaatggtaaatgtaggaatggaatccaacagaggaagaattcttatgaatatggtgtatatggaacaacctgtcctattccaccaggaaagaactttacatacattcttcatgtcaaggatcaaataggaagattcttttacttgccctatcttgcattccat

SEQ ID NO: 38893 - DNA, 399 bp, Gossypium hirsutum
  Clone ID: LIB3146-033-Q1-K1-B6
cttagtgatagtgaaggatgcctgtaatgtcccagatgatgatagcgtgggaaatgaaagtggagttcgtttatttaaaaattctactcctgggatagtatttgaccacttagatgaaattcaaggaccccaaaagaaaccaaaacttcttcccagaagagggattgatgagaactcaaaagagttcagacgacaactattgtccatagctgttgatggaaaagatatattggctgcagcaagatatgcaagccagagatcgttagctagattggaagctaaagaagcaacagccaaagaaaaagcaaagagagaggaagccaggatcgcggaactgaaaaggattaggggagagaggtggctaccttcaatggctagagagatgcagttaagcaaaag

SEQ ID NO: 38894 - DNA, 214 bp, Gossypium hirsutum
  Clone ID: LIB3146-033-Q1-K1-C10
attttatgggaaaatcgctgtccggctcaaccaagcttcaacatctctcagagagtaccttcgccatccacgcatcttaacacaactgggaaaaacccataacccactactctgaaccggagcattatatatgtacacaacaaacccaattccaagaaaaatatggacagctccaataccagtcaacgcataacactttccgaactcatctccg

SEQ ID NO: 38895 - DNA, 310 bp, Gossypium hirsutum
  Clone ID: LIB3146-033-Q1-K1-C7
accacacgtccgaaggaattctgtatgaacctggtgaacattcagatcatgtcggggtcatcaagtatgtgccatatgtgggagacagcaatagagccattgatgtgtattcatcatagatattcatgggaggctagaacaccattgtgttgcacaacaaatgttagtatatgctgttagacgctactaatattctataaatggttctacttgctgaacttaacaccacgaatcaagttaatgctgatcgagaggggatgttacacttttttcatacttgggctacaatgctaatttacctaatcaaaac

SEQ ID NO: 38896 - DNA, 118 bp, Gossypium hirsutum
  Clone ID: LIB3146-033-Q1-K1-D9
ggcattcctagaccccacggtaaaacagcaaaatatcatttaaaggaaaaactcggagtctgaccactagctgcacactaaaattcgcttgttactggattgacatccctatggttta

SEQ ID NO: 38897 - DNA, 298 bp, Gossypium hirsutum
  Clone ID: LIB3146-033-Q1-K1-E12
tttcaaaccatacacacaatctttttttcacagctatcccttaacttaagaccagaccacttttgccgggcactattcattctcttgacagaccattctccccccatcgtgctgtctagccatctcatctcatctataagactatagacatcctttcaattcacctcaaccaccataaacctctctcatcttcactgcccaataacaaagcctgtggaccccaaccataaactcctcctacttgttcaactacacgtcatggacacatatatattcaaattttgacttggcgctacac

SEQ ID NO: 38898 - DNA, 279 bp, Gossypium hirsutum
  Clone ID: LIB3146-033-Q1-K1-F10
ggaagagcagactacaagcaccaaatagaaagtaaatgcatgagtgttctaccaaggccttgtgacttcaacctattcatggttcaaactgggtaaaggcccacgagaggcagcttcggctctatgatattagattgaggcataccgaactgcattcttttgggtggaaacaagaaagtagtgactcacaatcagctttgataaatcaagcttggtctcctgatggtttatacctctcatctggttcagcagaccctgttatccacatatttgatatta

SEQ ID NO: 38899 - DNA, 194 bp, Gossypium hirsutum
  unsure (1)..(194): unsure at all n locations
  Clone ID: LIB3146-033-Q1-K1-F11
cggacgcgtgggctgacgcataatacaacgcttttgcaaactcatgagcagacaagtaactatacttacaacaaaacctncaacaaccaatttaccatcattccaaaattaaagaaaaaaataacatgctaaaaatccaaaatgaagaactccgttttaatcttcggaaaaaagaaattgttctttcacattta

SEQ ID NO: 38900 - DNA, 400 bp, Gossypium hirsutum
  Clone ID: LIB3146-033-Q1-K1-F5
ggggggttctgatggaattctccacccaactttggatgaaaagttgaataacttgcatgaagctatagcagaacttgcagcaaagcctaaatccgatgaatccgaggaagaacatgtgcttgaaaacttccattccagtcgcaccatacggaaactaatcttagactgccctgcacttgcttccacattgtggaagaaatctttggaaggaaagtgtcaattatgggcccagggtcacagttcaaaggtagtgtctgcatttttggaatcctcagactccgaggtccgtaaagtggcaaaagaagagttgcagcccttggtagatgatggtactctcaaaatccctgaaaccaagcaatcagcaaatgaaaattaggtctgcctgaaacggagaagacta

SEQ ID NO: 38901 - DNA, 390 bp, Gossypium hirsutum
  Clone ID: LIB3146-033-Q1-K1-F9
cccacgcgtccggtaaactacaataaaaaggtattggaacttgaacgagaagtggggaaactatctggccaagaaaacctccaacaacgaattcaccatcatgccaaaattaaggaagaaaataacatgctaaaaatccaaaatgaagagctcggcgtcaagctgcggcgaacagaggttgtactttcacgtgtaagagaagagctcggtcattatcgtgcttctattgggaaaagcccttgcgttaatttcgacgaggagcaacgtttgaataacaaactgagggagtctgatgaagacgggtgcaactgcgcacaagttattggcattgtgtacaagtgttttaaaggctgccggtataacaatgcctatttctgatatatgccctgc

SEQ ID NO: 38902 - DNA, 368 bp, Gossypium hirsutum
  Clone ID: LIB3146-033-Q1-K1-G6
gctacgcgttacgataagagatgttttatatgcacacaatctggatgtgagctcagcccaataaattatatatcataagaatgttaacgaaactgtaagcaccatcaataacaactaatgactgaaataggtaacaaacaccaccttgaaagcgatatgctagaatggatggcactgaaaaaactgctgaatcataaaaactgtgtcatgaaatgtatgtaagatgactgaatgtatatatatacaatcacatatgggatcactggatgtggaatcagtcttatgtgataagctatactcagcagcatatgtgcttgtactacaatgagatgccacacgacctatggtgagccactcaacatatatac

SEQ ID NO: 38903 - DNA, 290 bp, Gossypium hirsutum
  Clone ID: LIB3146-033-Q1-K1-G9
gcttttggagagtcttggtaagggtaagatttggggtgtttttgccaggccgtaggaaatggaagggattatcttcaaagtggggctcattgaactgtatgtatatcataaattcatagttgtgttttttttcccctcttgttcatattggttgtttatttgctttacagctggtctatatgtttagtgtaattgttcatggagaaacaactatgtttgtagtttgtagacaaaatctttagttttggtgacataattagtctggttttcagttttcatgaaacatattt

SEQ ID NO: 38904 - DNA, 210 bp, Gossypium hirsutum
  Clone ID: LIB3146-033-Q1-K1-H12
ggtgtggggaattgctaaacgtgggtggagacggatgccattaccttggcatatgctgcagcaccaatttgcttcaatcttcttaaggtttctgctataccctgtgttcttttgggctaacaagctaatgctagcaatattggttgtttgggtattgggcttgtaaattggttattgggtcagggagatattgggtttaaaactgggtct

SEQ ID NO: 38905 - DNA, 397 bp, Gossypium hirsutum
  Clone ID: LIB3146-033-Q1-K1-H2
gtgattccctgcctagaggaagttgtggtccaagtaagatcaccattaaatgctgaacagaaaatgaacactctggaatcccttctcaagtatgggaaaaacttgaagaaaatggtaataaggattcttcaaatgaagagcagccatagcagcacggatgaattctttgatgagatttgcaggcttagatttatgaaccgcaaaatagttcgaattgaataaggctgacaacagccacctcctatttgttcttttcttcagcttccaagtgaacagcattgactgctaatcaaacaacggctcgaatagatggttgcttcatgatgattctcatggagatgcttttaacttctcaagtttttcatttcacacctcttctgttgcaatgtcttctgtt

SEQ ID NO: 38906 - DNA, 372 bp, Gossypium hirsutum
  Clone ID: LIB3146-033-Q1-K1-H3
ctctcctttccatcccctattccaccgtcgaccccatcatttcccgccattttgactccgagaaaaccgataattccgtttacatttatattctcaatctgggtgttgcccccaagcaaccttatgcctactcttactctcattccgagtcttccgcaggctacaccaattgtttagggacgctttggactggcaacaaaaggtatctttggattgatctcggggctggtcccgttgactatgggccggctttatctggtgatggggtactcccgagaggcgagtttcaccctttggcagctgcacatggaagacccaaatccgaaaaaaccttgcttgccgacttggcttctttgatatacagtgcttatc

SEQ ID NO: 38907 - DNA, 396 bp, Gossypium hirsutum
  Clone ID: LIB3146-033-Q1-K1-H4
cccagaactggtaaaatcattgaagcaagtgaaagaaaaggtggtacaaattagcctaacaaactcaatacactggaatgcccatacatttgcactcactgaatcagggaagctttatgcatttggggcaggagataaaggtcagctaggcgtagagctaatgaacaatcagacagaaaggataaaccccgagcgaattgatattgatctcgaatgaattccccctccaatctcttagatcatatcatccctttaacttatcatgtcacaaaattgcattggatgtctagattttcaatgtgttgtaaatagatacaaacagaaggatttgaagctttcagttaggttagtaagggccgataagcagtgctacacgtttgatttcctaagaaaatg

SEQ ID NO: 38908 - DNA, 328 bp, Gossypium hirsutum
  Clone ID: LIB3146-033-Q1-K1-H5
aaagaaaccaaatttgaacacgaaagcaaccaaatctcctggagatgtttgagcttgcctagtcctcgtggtagatatttaattccagatctgaaaaatagaatagattcaagacaagcggtttcctcaaacttttgggctatgtattccaactctggacattccccaattatcaaatgtttaagtgttatgggaaaacttggtgtttgaaaataggcaactcagctttgagcattcggtaatttggagaagttgaagctgattgcaaatatttttgtgccctttcgatgacaaagacattagagacgagcacttatagatagacaac

SEQ ID NO: 38909 - DNA, 390 bp, Gossypium hirsutum
  Clone ID: LIB3146-033-Q1-K1-H7
tgatgatcaaaacaaggaacaaagcaattcaactggattttggaataataatggtgtattaggtggtggaggatcatggtaaaaaaaagaagaagaagaaatgaagatgatcaagaaaggaactgctttttctagtttttaattttttttcactatttttcacatggttgatattattattacttgttcaaagtttcttttttttagaactaacagatcatcatcatcatcatcatcatcatcatcatcataggatacatacatatataatggggtttcttttctttgctttctttttttaaattacaagattgtatccaatttgggttttggtttcttgtatcagattcaagtctaaaatttgttgcagtgatgagtgatatatatgga

SEQ ID NO: 38910 - DNA, 386 bp, Gossypium hirsutum
  unsure (1)..(386): unsure at all n locations
  Clone ID: LIB3146-033-Q1-K1-H8
tgaaaatnaaaacaaggaacaaagttatttaccttgattttggaataatggtggtggtttaatttcttgaggatcatgctaaaaaaaagaagaagaaaaaatgaagatgatcaagaaaggaactgctttttatagtttttaattttttttcactatttttcacatggttgatattattattacttgttcaaagtttattttttttagaactaacagatcatcatcatcatcataatcatcatcatcatcatatgatacatacatatataatggggttttttttctttggtttctttttttaaattacaagattgtatacaatttggattttggtttcttgtatcaaattcaaatataaaatttgttgcagtgattagtgatatata

SEQ ID NO: 38911 - DNA, 403 bp, Gossypium hirsutum
  Clone ID: LIB3146-034-Q1-K1-A1
cccacgcgtccgtggggagggaaatttgttgtgaataactatctttagtaccaatagttccccccctcagatcccaccccaccagacctgtcgctgatttgaaatttctactgtcaaacgctgcatcaaagtagatcgttattctcgcataacagaaaagtcggtattgagcgtcgttaccactcttgaaaacctaggacattcacggaagaatgaaggctttcttctgcccaagagcagcaacggggatatttgtcgtttgagtttataggcactgcatactgaaaactcgctggataattctcctttccaaacttgagtatcctcgggatcaatctctgcaagagggatctgtagaattttctaagcaattttcgtttgcaagttatcttcccagatagaa

SEQ ID NO: 38912 - DNA, 264 bp, Gossypium hirsutum
  Clone ID: LIB3146-034-Q1-K1-A12
cccacgcgtccgccttaacggagatttcgggcccatcctgctcgcccaaggaaaaggagatcttccggggaggcggcgaataggagccgctcattcaatactgcgtagtgtcgcatttgccaagaagaagattccgctgagaatatcgagaccccttgtgcctacaccgtctgcctcaactattctcataggaaatgcgtgcaacattggtgcaacgtgataggagttatcatttgcgagatatgtcatctgccttatcaacct

SEQ ID NO: 38913 - DNA, 113 bp, Gossypium hirsutum
  Clone ID: LIB3146-034-Q1-K1-A2
cccacgcgtccggccaatctgaactacttatatatcgttcacgcttttcccagctttaagcgatcattcttttaacaatgcctcgcccaagctctggagggaggggagcccca

SEQ ID NO: 38914 - DNA, 264 bp, Gossypium hirsutum
  Clone ID: LIB3146-034-Q1-K1-A9
atcaaaccagattattacaccaacaaggtatctgatattctcagtttattgggagaatgatctgattgcttcattttcaccattttactccttattcttgcctgtttggtagtgttgtttgcaaatgtatactcaaaagaattatctccgcgatttactgtacccggtaaatgttgaaatattctcgcattatctagaaactggccagtttgcttcatggcctatccttgttctgaaaacaaactgataaatttaagctcatag

SEQ ID NO: 38915 - DNA, 399 bp, Gossypium hirsutum
  Clone ID: LIB3146-034-Q1-K1-B2
cggacgcgtgggtttcttttcaattaaacttctgccaagatccagagaactcaccagctggaacacactaacactcctcaaagcttctttaatctgaaactagtttactaccatgaacaatcataacaacctcctgctgccattctgtatcctttccggttctgctgtagtttacagtgatggtaatgccagaatctttgatataactcacaaaatcacttcccagttgcccacttttgactcccagaagggacttggtcacttcatttggcttgtttccagcattaaaaatgggtccatggctaatatttccgagtttaagctgggaacccacactggaactaacgttgatgcccctagccacttttttcaaaagtattatgaggagggctttgatgt

SEQ ID NO: 38916 - DNA, 310 bp, Gossypium hirsutum
  Clone ID: LIB3146-034-Q1-K1-B7
ataagaaacttaaggttatgcctttactggtccacacaggaaggaaatggctggggtgtggacaagtattgacagttcatccaatgccatatttatccgatgtgaacatatccagcaacaatcgttagccaaaactatcactgtgaactagatcaataaatcgtgatatgtttcaactggcacaatactctatttaacgtggattgcatttattctctatcaaacacataatatgtattgaatggagtggtaccaattttcaaacacaaatttcagtgttcaaagtgttactattattgtatttattaat

SEQ ID NO: 38917 - DNA, 249 bp, Gossypium hirsutum
  Clone ID: LIB3146-034-Q1-K1-C11
cccacgcgtccggctgcagctaccattcggagttattcatctccgctagaaattccaagtgccgttggccaaagatgggatgttcctgtaggcattagtccaagttctggacttcatcccgaacctagtattggttctgtaccggctggagctagcatatagggttatccttctcctctaaaagattcaaccttagtttaccaaagagatgacagtccaccgggcacaaattctggcattcccaatgcg

SEQ ID NO: 38918 - DNA, 299 bp, Gossypium hirsutum
  Clone ID: LIB3146-034-Q1-K1-C12
cccacgcgtccttccacataaacctatcttttcaattcatagtaaaacaatattatccaggcctttgaggttcttataaacttctctgatcttcattcttcaaacaaaacctctttaggactcaacctccctaacttcctttagaacacaactaagatcctccattattctaatatcatccttttctaaaacatcttatctctccatataaaaaatatattttctttaaatatccctctaccattatgttatttttccctaaaatataaaaatcaattaactcttgttcttccaaaaac

SEQ ID NO: 38919 - DNA, 321 bp, Gossypium hirsutum
  Clone ID: LIB3146-034-Q1-K1-C4
ctgttactcacacttccacatttgcaaagggatggaccgttccaagtttggtgaagtttttgacacctgcatcgggtctccaaggatactgggacccttatcccattgatatggaatttcgaccaccttgtatggtgttatcaaccattgggatatcaaagccgggaaaactcgaaggacaaagtaccaaggaatgcacaacacaccttcaccagcttcatgtatgcataccttcatcgagaaataagacgagattattatatagaatgtcactcgattttgctcccgtgttgaagcacatttcctttatgcattatttat

SEQ ID NO: 38920 - DNA, 179 bp, Gossypium hirsutum
  Clone ID: LIB3146-034-Q1-K1-C6
gttatgtgtttgcataggcccggtctcaaaattggttataacagctgcccttcggggctgatgttagtgtaaggagaatagcgcaaatactataaaacggccactcttgctcgggttggctgaccattgggtcttctaagcccttaatactcttcatgtaaaattagcatggtatgctt

SEQ ID NO: 38921 - DNA, 406 bp, Gossypium hirsutum
  Clone ID: LIB3146-034-Q1-K1-D10
cccacgcgtccgatcaaaataacccatagatgaagtccgggataagggtttgtgtgttggtttgtctaaaattatttctctatattatgaatccaagataccccaaagaaagtgaaaggtccaatttcactacgtggttgttgattcatgtaaattaatcaatgtatgatgatgtgttgaaagttagcagcaaggaaatttgcaatgtgtaatttggatgtttgaatttttttgtaatatgtaaactaagtcttgtctgattgtaattttgtttttgctaaggttagtcagctacttagctgatttagtagcttcttaacttatcattaagctgattttacagcttggatactagaacaagttattttttgtgttcttccaatgtaatgaactagctatttatgca

SEQ ID NO: 38922 - DNA, 338 bp, Gossypium hirsutum
  unsure (1)..(338): unsure at all n locations
  Clone ID: LIB3146-034-Q1-K1-D11
gcccaccgtcgatatatagccatacatgtaatcctgataagggttggtgttgggtgctaaaattatttcttatatataatccagatccccaaaaaggaaggtcaattcactacgtggtgtgancatgaaattaatcaatgttgagatgtgtgaagtagcacaggaaattgcaatgggtattggatgtttgaattttttataatatgtaaaccttatcttggctgattggaattttgtttttggttaagttagtcacctccttactgtttttataacttcttaaactattattaaacttattttacaactttgattcttaaacaaagtatttttttgtg

SEQ ID NO: 38923 - DNA, 270 bp, Gossypium hirsutum
  Clone ID: LIB3146-034-Q1-K1-D7
gtgatatgtacttggacaaagatggggaatttcgtgaaatgaatatatatacggccatatgcgaatttagaggaacttcacacacaaccaaacaatcttacactaaatcactacaaaacaaaatttccattctaaaaaaagaaaatgaaaggcttatgaaactcaaagagctataaaaactgtttgcctccctaccttcttccgatccaaaaaattaaattctttaaacattaatattccctcgttctaaacaaattccgtatcaattta

SEQ ID NO: 38924 - DNA, 394 bp, Gossypium hirsutum
  Clone ID: LIB3146-034-Q1-K1-E1
aagaggtgcccccgaggacatagttgagaaaaatgttgaaaggagacaaaagaggatgatagaagaatagggaatctgcagcacgttcacgagcaaggaagcaggcttacactaatgaactggagaacaaagtttcatgtctagaagaggaaaatgagaggctgaggaaacggaaggagctagagaagctgctgccgtccgcacctcctcccgagccaaaatatcagcttcgtagaacatcatcggccccgttctaacaatcccgtagcagttagtgtgaaagttttgcatatacaaaccagcttctggcatctgtttctggtttcaatttaggcataaggttaaagtcaatgcatcttccagaggcagccattgtttcatttgccggtaatgg

SEQ ID NO: 38925 - DNA, 317 bp, Gossypium hirsutum
  unsure (1)..(317): unsure at all n locations
  Clone ID: LIB3146-034-Q1-K1-E2
aaaaaaacaaaaatcctatttcgtggaggctcctttcatcgggcaaccactaaccttcatgagtttgatggctaatagtgctgatgatgatcggattttatcaactgagattctaattttagaaatccggtatgatgcatcaactgtacggagaaaatgcttcgtgaaagttgtgagaaatcgaatctctggtgcacttctagtatattccaagagctgttgctgaaattccctatattgctaggctctttcagatatgggctagactttanggtattaggattggtcttcaattcatgtaaagggtcttggggtat

SEQ ID NO: 38926 - DNA, 224 bp, Gossypium hirsutum
  Clone ID: LIB3146-034-Q1-K1-E3
cccacgcgtccgctagcgttcgaattggcaagggttttcaagcagaaattcctgactggtgtggtccaatggatattgatgatgataccattcgcgaacccctatacttgtattcttctgaatatacttattacctctattcaaacaagtcatgtaagtttaactcaacagggagctgtcttcaatgccatgactttctaaactgctaaggaggcaagatatga

SEQ ID NO: 38927 - DNA, 407 bp, Gossypium hirsutum
  Clone ID: LIB3146-034-Q1-K1-E7
acatttcattacaagccaagaagttcaaaatgtccaaacgaagcggccgaggaacgaagcggtgtacgatgaagaaaccgagttgcagaagagtacatcaccttgcattgatcagattccaagcaatcagcataataatattggagttggtggaaccagtggtttttgtttagcattgtgtctgaaccagaacaatggggttgaattggaacaacagccattgctgcctatgaacttgtgtcataatttcaggttggaaagcgatggtgaactgagtttgaaaccagggttttgatgttgggaagaccagtaccagagcatttgttttggtatgattgtttaattggttttgcttaatatttggccttttgaaaaacttttaaactttgttacttgttttttttttg

SEQ ID NO: 38928 - DNA, 217 bp, Gossypium hirsutum
  Clone ID: LIB3146-034-Q1-K1-F7
ggagggaatcctaaggaaattctaaatgaataagatgagaaactaacaaatctgaagctggaatggggtgaagagatttataatgcactggtaacagctttgaaagaactgaacgagtataatcccagtgggagatatgtaatttctgagctctggaacttcaaggaaaacatgaaagccacacttaaggaagtctttgggtatgttgttaggaaca

SEQ ID NO: 38929 - DNA, 362 bp, Gossypium hirsutum
  Clone ID: LIB3146-034-Q1-K1-F8
cccacgcgtccggttgcttttcccctgcttctatccatgtttgttgttaagtggtacttggtcgagttcagaagattgctttgttctttatttcccaattcttctcttgcaatctgcaaataatcataattctctggtatgaactcaagatttatggtgaatacaattgtgaatcttccatgcatacttaaaaaaataaaaataaatttaaatatatgtattaaaataaataataaaaaaaatgtattttttagtaatctttttattattaattttttttattaattctatttatttactacttttattttattatattttattctcacttttaaattattctcttttctttatttttttct

SEQ ID NO: 38930 - DNA, 215 bp, Gossypium hirsutum
  Clone ID: LIB3146-034-Q1-K1-G12
tataaaccacgcactgatactcgcatagatgtcgacttatatttgtacaaagagcttgatgctatatatggacatgttcatcacactctctgtgcctcttgccgatatttacaaggcattctactacattctccacaatatacgtctgagatgcatgaagcatagagatgcttaatgaaatggtgcagctatatatttaggcatccatagctcaa

SEQ ID NO: 38931 - DNA, 395 bp, Gossypium hirsutum
  Clone ID: LIB3146-034-Q1-K1-G4
cgcttatagactcaagatcctctgatgttgtgttcaaccctgctaatgcacagactatatggggaatggacaaactggtttcaatgaaagcatctttgcgaactgtgccacaaaaaatacaaaccggtatggatgaaaggaggaaatcactgtgattaggaactgtacccggattatattacgcatatgaagaaattcatctcaacaggttagaaagcaccttctcgaagaaatgctctttggaaaagtacagatggtatccaacagtctaagcaaactacttaatattgctaggctccaagaagaactatctaccgcatgtagaaaccaaggaaacgcaccgatacccggtacaagccaatgaacagcttctttaccctggaaaaaccaaggaa

SEQ ID NO: 38932 - DNA, 380 bp, Gossypium hirsutum
  Clone ID: LIB3146-034-Q1-K1-G6
cccacgcgtccggccacgcgtgtgcccacacgtgcgcaaaagcatgcctattacagatgggggcctatattgtgtgttacgtttacaccttttaggcttgatgttggcgttctggcttttggaggggtttcccccatacagtgcatgatgattcaaccttattcattctcaaatcatatgggggtatttaggcagctacacggtagtgctaaatggccatgtataaaggtgtactgtgtgagttttgcacatggaagaactgcttcatgctcgtgtttagtagttgccatgtgtttacagctttgatggggtgaagaaagcaaaaggtatcttctgctctgctgctcataataaatgtgctgatgctgtctttttgaagt

SEQ ID NO: 38933 - DNA, 370 bp, Gossypium hirsutum
  Clone ID: LIB3146-035-P1-K1-A1
cggacgcgtgggtttagaagcaaagcggagtaagctatcggcatcagctgaaccattcaatgccggagcactctatcaccctttaaactcagtttctgttacatgtgtttatgatgtaacagctagtcaaggcatgcttgttgagcctgttgtacctccagttgctgctcgagttccttgcgggccaaggtcgccattgttttacagaaacaataattcttacggtagctttcttagataccaaactcctattttggaacaaaatggatttggatctccgagagttatgaaccctcatgcacctgagttcgttccaagcaaaatttggcatatgactggaactggtgatttgagtggctctgaagaagct

SEQ ID NO: 38934 - DNA, 148 bp, Gossypium hirsutum
  Clone ID: LIB3146-035-P1-K1-A8
accaagttcccagccacatgagtaaattgtcttgttgagaaattgagtcatcagagaaaaatagggactgtcggtccaatttctgacattaaaacagagacaaattcacgaccatctgatgtattggaaagtgctcgagctgatattg

SEQ ID NO: 38935 - DNA, 185 bp, Gossypium hirsutum
  Clone ID: LIB3146-035-P1-K1-C2
cccacgcttccgcccacgcttccgtccactttttcgaaaaattggcaaacagaaccagagaaggggttctctaatatcatttttaacaacataccttctatcttagtcactccaagctcagagagatcactttctagttcctgacagaatgtttgctacttcatctagaatagctgctctaaatc

SEQ ID NO: 38936 - DNA, 140 bp, Gossypium hirsutum
  Clone ID: LIB3146-035-P1-K1-E5
ttatgttctgactataggcagtaaattcatgtatctggttcgttaaatgcttctttggtattagtgcatctgggggggaggggatttaaatttttaccagacccaatttactgtggaaggtccggagccagggagaacct

SEQ ID NO: 38937 - DNA, 280 bp, Gossypium hirsutum
  Clone ID: LIB3146-035-P1-K1-E6
gccacgcgttcggtagtctgaaggaaacttctcttagtatatgtgtttctagatgagcatgggaacatacagtgggacataatgtcagatcagatttatctgttgagattacagatgaggcagatgatgttgctcccagcagcattccacttgaaatagtgtgtgatacattgtcacatttgcgtacacagggctggccttgtcattgttcagattcagtctgtgttcagcttgttagcctgttaatctgaacttgtatgcatctttacctagttttttt

SEQ ID NO: 38938 - DNA, 227 bp, Gossypium hirsutum
  Clone ID: LIB3146-035-P1-K1-F1
cccacgcgtccgttcatttcttcggcgtacgttgccccagaaaccagagaaagcaaagatatgagtgaaaagagagatatatatggattcggcctgattctgatagaattattaacggggaaaagccctgcggatgctgaatttggagatcagcaccaaagcatggtagagtagggcccgttattgctactcagattgtcatcttgatatgagggttgatcccatga

SEQ ID NO: 38939 - DNA, 431 bp, Gossypium hirsutum
  Clone ID: LIB3146-035-P1-K1-F4
cgccaaagttccaattcccgttggatttgggttccgttaaagatggagagaggaaagaaacgcagaagagaagcagaagagatcgaggctgaaaatagagacgctaatcattctctttccctagagcaaaatctcagctttagcgatactaatgtggcccttcgtatgatgcgagctcagtttcctcaaattgataaggtcgcaattcaaccttttattttacagtcacaattgtatagcagtgtaaaggacagaactcaagtggatagggagctagagtctctaaggagggacaaggtagtgcgcatattcaaactaaatacagggcaagatgatcatggaataatgtttttagaagattatctaaaacagttagagcatgttgtcaaaagaatggaagaaaagaaacaaggtgatgttgatgtttttaa

SEQ ID NO: 38940 - DNA, 137 bp, Gossypium hirsutum
  Clone ID: LIB3146-035-P1-K1-G3
tccacgcgtcctcaccaacctgagtgcgatctctcgccaagcgtgttactataatgcccaagaacattcttttggctcgtaagatcactctctatcgctcttaatttccaagtgcgtcgatcacttaactcagaatg

SEQ ID NO: 38941 - DNA, 214 bp, Gossypium hirsutum
  Clone ID: LIB3146-035-P1-K1-H1
ccacgcgtccgaattatcaccaatccctgtttcaagaaagtgtttcaaagaaaccaaattcaacgctgaagaagtggtttttaaagagtatatccacaccaccaagtgcttaatctccttccatataatctcattatcaaccgtattcgaccttcttcttttattcaacaacacctacttttctttccataaagaacatttcttattatttaat

SEQ ID NO: 38942 - DNA, 306 bp, Gossypium hirsutum
  Clone ID: LIB3146-035-P1-K1-H7
agaaaatggagataggaaccgtcatgggcgccgggtttgtagcagtttagccgttacccagttgtaggttctcgctttagggaagagaagtctcattttagtctatgtaatcaatgctacagtgagggaaaagttccccctagctttaaacaggatgaatataaattcaaagagtatgggagagtagccgaagcgatgtaagataagtgcatgtactttactttgcaatcccacaaaatttccgtaactagttgggtttataggtcaattttacttcattcatagttcccattttccatttggtgt

SEQ ID NO: 38943 - DNA, 138 bp, Gossypium hirsutum
  Clone ID: LIB3146-036-P1-K1-A1
tcggacacgcatccgatgtttgaaaaagtgcttttaacacgagggatacactacgattggggatggatgtactgcaaattctgaatatagagccctcttttcgccgaatattcatcagaatggaaaataccataagag

SEQ ID NO: 38944 - DNA, 181 bp, Gossypium hirsutum
  Clone ID: LIB3146-036-P1-K1-A2
aacacgcatccgattgttcgaaacaggcgcttttaacaccgagcgatacctacgattgcaggtggatgtgctgtttataccgttcacagccctccctctcatcaaattactcatcattatgaaaaatactataatattttccctcaccatattcaacttaaccaccatatttcatcctttt

SEQ ID NO: 38945 - DNA, 257 bp, Gossypium hirsutum
  Clone ID: LIB3146-036-P1-K1-C2
cccacgcgtccggtcgtactcccctgctccgagacgaagaggaaactattcagtttcaccagatagaggacatgaagaccatccaagatccccaagaggtcctccacaaggttgtggcggtgattacaatcccggaccatattcttcaggatatgaaaatgctggtggaaatggctatggcgagaagtctgcatacgaatctgatgaagcaccacttgtctgcacggaggccatcgccacctggtagagcatcaagg

SEQ ID NO: 38946 - DNA, 132 bp, Gossypium hirsutum
  Clone ID: LIB3146-036-P1-K1-D2
acgcggacgcgtgggaaagatctttgtgatcagatgttaatgattcgtgctcttccgtaaacatgtttccatggctcctgaagttgagcacaaaactgtcacgggtcttttgagaatgattgagggtgagag

SEQ ID NO: 38947 - DNA, 178 bp, Gossypium hirsutum
  Clone ID: LIB3146-036-P1-K1-D5
cccacacgtacgaacaatgctgcattaattttgtgagaatatacacaaaaagactgggcatgtgtatttttacaacatgaccaacgcccaccaacaccacccacgatcaacaacctccggctagcaggcaccaagaagtcagccataagaccctttcgcaaagtgattctctatacca

SEQ ID NO: 38948 - DNA, 198 bp, Gossypium hirsutum
  Clone ID: LIB3146-036-P1-K1-E3
acgtcacgcgtacggaatactcatcagattcttgcatggagaggatcctcgaacgggatgagcggtatgtgttatgcatagaggcaacttgctgcaaatgaaaatgaacgaactggtagttggactttgtaacatgcaaaacttaaagtcaggatggaggtgttacaaacaaaccaatcgctttatatgggagaagat

SEQ ID NO: 38949 - DNA, 124 bp, Gossypium hirsutum
  Clone ID: LIB3146-036-P1-K1-E7
attgggttgaacatgactggctcttaagattatgataccaccaccatcaaaattgggtgcggtaagaaatgaactagtaggtctgaaagagcattagtgaagttgatacgtgtaatgaatgtgt

SEQ ID NO: 38950 - DNA, 411 bp, Gossypium hirsutum
  Clone ID: LIB3146-036-P1-K1-F2
aagccaccgtctacgaggaagcagactgaaacctcggaggaagatgaggaaatgttggagttcattaggacattgcgggagctgtatatcaaggaattggaggacgtgctgtctaggatgtaccatgacgaaaagaggtaaaggatcaaggatgtgtatgtgcaactttatgttcaacggtaagccaagcagtcttgcctagtaagaaaactgcagacaccatacatgtatacacccgatcagttgagggaaacgaacgctcatgtgaggaaaatcatgtagagaaggaatgtagtagtgcgtacgacaatagttcagaagaggacaaccatagagacaaaggatcttctagtaactgttcagacaacatacaattgactggagaagactgctcgttgataccgtcaaaat

SEQ ID NO: 38951 - DNA, 253 bp, Gossypium hirsutum
  Clone ID: LIB3146-036-P1-K1-F4
cccacgcgtccgcccacgcgtacggcttgtaaagaagtgtcgatgctgccgatagcaacggtgtgccgagttcgttgacatggtttcagcgttgatgctttaagcaaaaatataatggatatagtcccttcagctgtctcacaggttttggcttattgcccatcaataatataaacgttaagagaagaaagtcatgaataatctgtatgaaagattggagtataataagtattttgctctttagccctccact

SEQ ID NO: 38952 - DNA, 340 bp, Gossypium hirsutum
  Clone ID: LIB3146-036-P1-K1-G6
ctcacacaatgtcgcggatttccaatcaggcttgagggagatcgacagcggaaatgcatggggaggacattatgatgatactttaactgcctctcttaacagataaaaaagtgaaaaacaaattgattggactttacataggctcattggcggatgcctttacattaacaaagatcaatgtaatgctcttacaaatacacaggagttaaaaccactggcatagaatacacagaaggatgaatgttgaattacatgtaaaatgcaccgttctcatactaagcattttttgcactattattgtctatgtgaggtgatgtgacaatggacgttattgacaatg

SEQ ID NO: 38953 - DNA, 420 bp, Gossypium hirsutum
  Clone ID: LIB3146-036-P1-K1-H1
cccacgcgtccggctgtaaggactgcatggtatgattctaaaaaagtcgttgaacacatcatagatggctatacgaagccattgagaactaagggttgggataaagctcttgtagaattcactgcagcaatgcttgcaaaaggcgagtctgaaacgaagcccccattgtcgaaacgactgcacgaaatctcctgccctgttctgattgttacgggtgacaccgatcgaatagttccttcttggaatgccgagagactttcacgagccattcctcattcgaagctcgaagtaattaagaattgcggtcacttgcctcacgaggaaaaggtcgacgagttcgttagaatggtcgagaagtttctgcaacgagctttcggtggtttagtgtaaccatctctacaagtagtaacctgaaatctg

SEQ ID NO: 38954 - DNA, 377 bp, Gossypium hirsutum
  Clone ID: LIB3146-036-P1-K1-H3
cgccttactttagagcaccaacagggtacctccacgtttgccggacaacaaaggccattagctttaccatcaacctcaggaggaggaggacacagcagagaagatcaagaggatgcttcgaatcaaggaagctcaaggaagagatttagaacaaagtttacgcaggaacaaaaggagaagatgctgagtttagctgagagactagggtggcggattcagaaacatgatgaagagattgttcaacagttctgcaacgaaactggggtcaaaaggcatgttttgaaagtttggatgcataataacacgcacacttcttgtaagaaaccctagaaacagattatgagggaactttagatgtgtacattttttagggttga

SEQ ID NO: 38955 - DNA, 388 bp, Gossypium hirsutum
  Clone ID: LIB3146-036-P1-K1-H4
aaaaacgaaatcattatatctgcgggagcattgggaagcccacagctgttgatgctgagtggagtaggaccggttgctcatcttagatctcacaatatcccagtggtgttagaccaacccttggttggccaaggcatgtgtgataaccccatgaacgccgtttttgtcccgtctcctattccggttgaggtttcacttatcgaagtcgttggtatcacacattttgggagctacattgaagctgcaagtggtgaaacctttagtgcttctgttactactacttcaagaaactatggcatgttctcacctaagattggtcagctatctacggtgccacctaaacaaaggaccccagaagccattggcagagctgttgaatacttggata

SEQ ID NO: 38956 - DNA, 290 bp, Gossypium hirsutum
  Clone ID: LIB3146-037-P1-K1-A10
gatcaacaaggttttgtttgcgtgcttctttgccagataataatggtgaatttaaattggagtatacaccatggttggttgttggattgtttcaccctggaaataagttccattgcactcgacacaatgttgcatctgaaaagattgactcactttcacaattgaaagggattgcattgaatactatacggtccaaatcttttagtactattaggggctattgctcatgtgacatttttagtgctatataccctcatggagctttttgattaccttattgactccatttt

SEQ ID NO: 38957 - DNA, 412 bp, Gossypium hirsutum
  Clone ID: LIB3146-037-P1-K1-A3
cccacgcgtccgattgtttagaagcaatgacatggttcaagacggtcagttgatgtatggcaatctgtttgaagcgagcttagatgcagtggttcatgcaatggagaaagaagggtttgcagaagttgaagtggtcgtgtcggagacagggtggccaaagggcggaggggaggcagccagcgtggagaatgcattggcttacaacgagaatgtggttaggagagtagtgggaaatgtagggacaccaaggaggcctggggtgggaattgagatttacttgtttgatatgtttgatgagaatagaaaaggaggagatgagtgtgagaggcattttgggatatttggacttgatggtgtcaaggcctatgatcttagatttaattcagaaaataagttggatgtaaccataaat

SEQ ID NO: 38958 - DNA, 294 bp, Gossypium hirsutum
  Clone ID: LIB3146-037-P1-K1-A6
acgagcccctcttgataaagtttgtaccatttgatgtgggatatctaccgcatgtttggccagtggaaatggatctcaagccaaacaggtgaagactgtcaccgcttttgtactgatgaccgcagccatctctgtcgctgtggtttcatgggccaatacggcagcttgtgtcctcagtgctgcagtgtgcctcagatgaagcacggagagctcgatggcatcgtgaacgacttttgtgaacccgaaacacttggctcaaccggattgaaccttgatgtgtctatatacatggtg

SEQ ID NO: 38959 - DNA, 421 bp, Gossypium hirsutum
  Clone ID: LIB3146-037-P1-K1-A8
cccacgcgtccggacccacgcgtccgggctaattggtcttgtatgctattttacggggtattttaagggcttttaatgacctggccaagcaagaaccaaaacgtggagggataagggctacactttttgtctatgataaccattcatttcttttaatttctttctttcctttccttctttactttagaaatttgcttgtcttgtaatgtctttgattcctatttgtttatgattttcttggcagccatggaatggctggagaatatggcatttatctcaaatgtcataagcctggtaatttacttttatgcctacatgaacttcagcctaaccaaatcagcaaccacccttacaaatttcatgggtctttatttttagtagcactctttggagggttcatctctggcacctatttgtcaag

SEQ ID NO: 38960 - DNA, 411 bp, Gossypium hirsutum
  Clone ID: LIB3146-037-P1-K1-B10
gcctgggcttatggaccgacgggtcgacaagcaacaaaagttaaatcgattgcaggatgatgatttgtctaatatagggaccaaggttaaaacctgaagtgaaatgggttgaagattgtagaagattacattgatcggagaaagcccttatatttgttagcttgatgagtgctttggaatgactgttgcagttcaaaatttgtctacatataaaatatagtttggtgtttagtgagtaggaaatatagtttttgaaaccatataacatcttttatgcctatcatttacttgtgtgaatttcttctccaaaatctgtgtcatatatatcattctttaccctctttttacattgtatttttatcacactgctttagtattgcagtaaatagtgggttgatctgagtctgatgt

SEQ ID NO: 38961 - DNA, 244 bp, Gossypium hirsutum
  Clone ID: LIB3146-037-P1-K1-B4
cattcatctcctcttttcttttgtgatttttaagcaaaacccagaaatggcaacaagcaaagctgaagggaaaaggagactgaaggaaatggcggaggaggaagaagaagaagaagaagaggacgaggataatagtactactggtgacgatgacaagaagaaaaaaggcaaaagagggtccaggaccgtggtcggaggcttctgtcttcccgcctgtcaggtcgagaactgcactgccgacatg

SEQ ID NO: 38962 - DNA, 424 bp, Gossypium hirsutum
  unsure (1)..(424): unsure at all n locations
  Clone ID: LIB3146-037-P1-K1-B7
attcttactattcttaatggactttacattgttttaagcccttcctgtaaagagacttggactggtttgtctactaaagctcttaaagggatttggccttatttcaagattactgctgcttctgctgttatgctttgcttggagatatggtataaccaaggactggtgcttatatctggtcttcttcctaatgcagcaattgcactagactccatttctatttgcatgaactactggaactgggatatcaactttgttttaggctttagtgcaacagccagcgtgcgagtgcgtaatgagctaggggcagggcatcccaagctgaccaaattttcagtcatagtagtgaatgctaccagcattttcattagtacaggtttcactgccatngttatcatatgtcgatccctatttatcaaagctt

SEQ ID NO: 38963 - DNA, 349 bp, Gossypium hirsutum
  Clone ID: LIB3146-037-P1-K1-C1
aggggcggcgcgcgtacgtatgatcataccatgggcatggtgatataaaacctgttaatgagttgattactagctcgggggcggtgaagataggggatttcagtgtcagccacttatttgagttttatttaatttttgtagaatgacaatgatgagcttcgtcgttctgccgtgactcctgtggttaccgaacctgagtgttgtctagggtctaaatattacggaaaatatgcttacacgtgggcgtgaggagttacctaggactgaatggtacttttaatatattcatttctcgttgagacacttcatgatacatatgagaagatcgttaatagccctttaatcctgc

SEQ ID NO: 38964 - DNA, 218 bp, Gossypium hirsutum
  Clone ID: LIB3146-037-P1-K1-C2
cgggaatgaacggccggaccgacgcacgcgtactcacctactattttttttagatgcttttacgctggaaaccactaatgaaccaagtcacggtggtggataaaagaaaatccaagaatttgccacagcataaatagaagatcaccacatcgacagggttaaagttacttttatcgtttatctcctgctactaatccgagaaatccattcacttcaat

SEQ ID NO: 38965 - DNA, 403 bp, Gossypium hirsutum
  Clone ID: LIB3146-037-P1-K1-C3
aaaaaatggagatactatacttcacctagagtccattttgaacgcatggccttgtgttctgttccttagtgattttaatgtaatcacacatcatgatttccagaatgagagttttgtttcatttcttcttctaagtatttcattgttggcatgattcagttgaaagagcaatctaaagctaatggtgctcagaatggggcttcatactatgttcctacccaagatcttaaatcagaatagacgctcatcaacagagcaacttgttggagcagcttcttcagcatacctctcgcacgtgacgactcatggaaatctgatttcaacttgacatcattgttagtgtacatttcttaagtgattcagatgaagagtaacacgaccatttgaactgtgatttgaggtg

SEQ ID NO: 38966 - DNA, 356 bp, Gossypium hirsutum
  Clone ID: LIB3146-037-P1-K1-D1
gaaagaaaagaatcaactgagtagtttattatgttgggatttgaccaattattacaaaaatttatgcaaatgaaaagaagaatattgaaatctcaagacagacagtcctcttctgtgtagaaaaaaaactagcaatacatactatgagatatggcaggagttgttcacttaaagaaaacctgttggatatatgcattgctgacctttgattccacttttagttactcttggacaacaaatgatggatatctttccagggtttatgggagcaaccgctgccggatttatcttcacaccagaataccgacaaatatgatattcacgtttggtgttagactgtatgagctgatttgatc

SEQ ID NO: 38967 - DNA, 273 bp, Gossypium hirsutum
  Clone ID: LIB3146-037-P1-K1-D2
tgacgcctataaacagacgaagacagttgatccaaaacagttggtggaatactataagcagcgtttcatggctcagaagtgatggaactgctgacatcttaagatatatacataatatatatatgtatgtatgaaaataagcttggtgtttgttgatgagtgtttcttgtttgttttcttcagtgatatactctatgatagtatgtacttgtgccagtttgaagtatctctagcatgtaatagcatttggaattttacatgaataaatttgaa

SEQ ID NO: 38968 - DNA, 268 bp, Gossypium hirsutum
  Clone ID: LIB3146-037-P1-K1-D3
ccaatttgtatggcaacataagtatttttttgggggggggggggattttggctcatattgagtgggttggttcccaaatttaaactccaaaatgtgacgacagcttaagctccgtcccctagtcccaccttctatgccacaatcttcgtgccgacttagcttgcttccctcattgctattgcatttgagcttgttttttaaaactctgctgactaatgagacctataatatagtttataattcctctctattttctacttatgactac

SEQ ID NO: 38969 - DNA, 434 bp, Gossypium hirsutum
  unsure (1)..(434): unsure at all n locations
  Clone ID: LIB3146-037-P1-K1-D7
acgaatttccattggctgctcttctgctagtttctacaaaggtttcgtcatatgatcaagaggagaagcttgagataccagtcaaggcacctccagccccggttcagaccccaactccagcaccctcagccgaggttcttagtcctccatatgaaccaccagctccaccaccagtcaaggttcctagtcctccatatgaaccaccagtcatggctcctagtctcccatatgaaccgacagctcctacaccaccaactcagccacccactccaccatatatacctcaaaatcctacaccagcacctncagccacaactccaccgncatacaagccaccaagtcgaacatttccaccagttataacanaaaaggattgcatacctttatgtggaccaagatgcanattacgctcaaggactaagctatgcttgaga

SEQ ID NO: 38970 - DNA, 275 bp, Gossypium hirsutum
  Clone ID: LIB3146-037-P1-K1-D8
cccacgcgttcttcaactcttgcaatcccctacttccactgattactctgctgaaggtggggggaaatttggccactgtcgaattgcctaataagccactctactatcccattcttattttagtcactggaaaacttgcctgtatataagactcacattccaccaattacattgactgattaacgaaatatatttacctgccatatcacatctctgcatttactatcatggttatcacaacatcttatgctgtttacttcccttgtttgttttgg

SEQ ID NO: 38971 - DNA, 409 bp, Gossypium hirsutum
  Clone ID: LIB3146-037-P1-K1-E11
cggacgcgtgggcggacgcgaggaggccgtcatttactcctgttcgcgacgaacatagtctggaacaccacccaacagatcgaccatagtccatagcaaaaaagacgacactgttcactagtccaccgactaaaaacccagggctatgctggaaaatgggattactgtctttctcagaggtacgacatggcagacaacaaatttacacagccacttatttatgctggagattagttaaagtagggatataattccaagagattctccatactgtaattctgactttttaaggaagatgtaaatgccatagtttcctgtaaaaagctctaatctcagtctgtataagattatgactaggacccgaattagcctcatgtaatagtttataggcacttctgattgagaaatc

SEQ ID NO: 38972 - DNA, 356 bp, Gossypium hirsutum
  Clone ID: LIB3146-037-P1-K1-E2
cggacgcgtgggatctttacctattgtaggcagggtaaggtgaagactgcggtccgaattttggattgtgttcgtgcttcgggcgattggcatcccgacgtagtctcgtataccagtcttatatggggactttgtaattgggttggtatagaagaagccatctgttatcttaataagatgataaatgaagggatatgtcccaatgttgcgacatggcatgttttcgtccagtgtttgtttaacagcttaggtcatttgggaccgattcgagtcttggatgatattctaggtaacggatgagaacacgtccggctgggattcttttcaggccaaggtcgtaacaatgcaaaagatgc

SEQ ID NO: 38973 - DNA, 331 bp, Gossypium hirsutum
  Clone ID: LIB3146-037-P1-K1-F2
gctgttcaatgaatatggaacacgcccaatgtcgctgagcatatgttgaacgagaccacaggtgtcatcaacacacacaattatttggcaatgcatggagagattgctattcgaattctccgacttgcagcgaaaattatgtgctctacctcgaaccgttatatctccacaaacatttagggggaaacttgctccgcttgtactacagctcagctgactcatgctgtacaaatgttaaccttgtcaaagatgaacctggaaccactgctattgtcacctaataaggagaaccttgtatatgtggacaacttagtgaaagataagatgctta

SEQ ID NO: 38974 - DNA, 299 bp, Gossypium hirsutum
  Clone ID: LIB3146-037-P1-K1-G4
ggccgacgccacgcgtccagggcacttctctcgaactggtctaagatctatatctcatataagaatgtctcgtctttaggaggagttatttatggatctacaaataccacactaaacgatatgttatgtgaaagataatttgccgcttcaaactttaaaaggccattcaaattaaaaaaattttttatgcctcactgtatacagtgaatattatttatgctgctactaaacaaatgaagtgaacttgtaccacatggaaatatcgaaacctttcacatggcatatatttttttcacaag

SEQ ID NO: 38975 - DNA, 210 bp, Gossypium hirsutum
  Clone ID: LIB3146-037-P1-K1-H2
acccacgcgtccggctaaacattgtttgcctttcatttctttctctattcctcgttgcttcctcggcaggctcgtgggtttttgagtaatcgaagatcaaaaaggctggggctgccttttgctacgctgtttagtcgactgtctgccaagaaagagacgccaattcttatggtcggttttgacgccgccggtacgcctaccattctgtac

SEQ ID NO: 38976 - DNA, 130 bp, Gossypium hirsutum
  Clone ID: LIB3146-037-P1-K1-H9
tatgattcttctttcttgatgttttgtctaataacaagccatactttgcctacgaaaaccattgagtaggtaaattgttcttatctccacattgttctaccaaatatacttttgcctattaagattttat

SEQ ID NO: 38977 - DNA, 314 bp, Gossypium hirsutum
  Clone ID: LIB3146-038-P1-K1-B10
acgtccacgcgttcggtttatggtataagatcaaggacaagatccacggcgagggaggtgatgaagatggtcaatagggaccaatgttaaaacctgaggtgaaaagtgttgtggattgggccatattagatgatatagtggagagcggtgctagtttgttgatatatgaacatctacaggagtcctgtgtgggataccttctagaagagtcgcaacgtgttcttgtggtatacgcattttatgcgttgatatttgcaacaaattcgaacacgcaagatatggaagggtgcttacagtcgtatcttgagagatta

SEQ ID NO: 38978 - DNA, 288 bp, Gossypium hirsutum
  Clone ID: LIB3146-038-P1-K1-B11
accacgcgtacggatatttcttgattctctgggagggggtgacaggagattaccgccttacattattaaacttgtaaccagatgcattgggtctattatcactgttcgcgtgaggagaagaaaaccatgccttattgaactgaacatacgccgtcgacaatgcgtcctgatttaagaccctacttttttgatatgacacttttgggacagaaaatcatattgtggcagaaacatatttctgcgttggatgatgtataatgtgcgatatgagtactaatactacttgtc

SEQ ID NO: 38979 - DNA, 229 bp, Gossypium hirsutum
  Clone ID: LIB3146-038-P1-K1-B12
ctcaagggtgcggccacgcctgggtttaaggcttagcgtctgtagggttatagtatctcggatcgttgcatctgaggccttacacatcgaagcatatttaactcagcgcatccggatttccttgatagagagcagcgtggatgaacagtgctggcgagcagttgtcgatcatatagaagcacgatccggttgatgacgctaaatatgatcgcattggagatgcgatata

SEQ ID NO: 38980 - DNA, 394 bp, Gossypium hirsutum
  Clone ID: LIB3146-038-P1-K1-B4
ctactattctccattaattataagtgagttggatatgtggcctgtgaattggctctttaaaggtaattacgtcgatatgaaatctgttatgtatgttggatctgttatgaagtttatacttgtagtccccaatttgcagattcctggctcaaatatattattttcagagtcactgcaactcacactgatcatatggaaaataaactacctaataaatatttctctatgatgacaactttccctgttttgaaagctgaaggtgcttgcacagagtgctattttatagtatgaaaacatagtaaatgatatgtggtttagctttagcttgagtatctaacaaggagtggtgcaagttcgtggattgccttgtgctcacaattttcatgtagagtgc

SEQ ID NO: 38981 - DNA, 346 bp, Gossypium hirsutum
  Clone ID: LIB3146-038-P1-K1-B7
gtgatcacatttattcaccttgtatctaaccaccgtttgaatttttatatacgtcaacaaagttctcattatcttaggtgattacaccacctaatgcataaagattgtaccgatatgctcaatgaacatgaatggcagcttctgattcacatgttcccttgatagcttggatgtagaagaccattcgatgccacaccaattacgcatgcagcatatcatagccagcattatgacattgatatgtattgggaagtcctcaacagcttttcactgtaaaatgaaaagatatgcttgaagtgtgtgactgggtgcaccacatgacctatgttgacagtcaaatatctct

SEQ ID NO: 38982 - DNA, 402 bp, Gossypium hirsutum
  unsure (1)..(402): unsure at all n locations
  Clone ID: LIB3146-038-P1-K1-C4
cggacgcgtgggtaaatattcacgataaagtaccgacagttccggggatattcgccaatgaaaagcttcaatttcaaaagtatttggaagagacggtatcttttccatggagttacgcacatgtcggcgttgaactgacattggatcacacccatagcccgtttctgaaacccgcaagcgacctcggttgtgcacacaatctcgaggctcatttacacttgcttgacggataccatggcaagagggacattgcgcttgttaacaaggacagcaacttcttgaagaaagagtacggngtgccaccgcactggcgccaggacgagaacaaagggatggtaaaaaacaacgacggccgttgggttttgccggagcgggcgagagtggaggctgatccacatgaca

SEQ ID NO: 38983 - DNA, 224 bp, Gossypium hirsutum
  Clone ID: LIB3146-038-P1-K1-C6
gcgcggacgcgtggatagtgcatatacaaggccggcgatgactgtggtcatgatgaatgggatgttcaagtgatagctgttttaggagacatctttacagctgtcggacttaatctctcatgattgcgctatgctgacattgcaacacacccatagagaggtattgtagccgctgtgcctactacacgtgtgcacacgctatatgggcgaaacaactcatggtg

SEQ ID NO: 38984 - DNA, 326 bp, Gossypium hirsutum
  Clone ID: LIB3146-038-P1-K1-D11
caatggcggatgccgaattggttcaggcttatatgcacaacaaactcaaattaagtttcagacgatgtcacaaatccgacatgaggaacaaccgcagcatcagaattctaggaaacaaaggcggcgctggtcgcctgagctccatagacgatttgttgagggactgcaacagctgggaggctctcaagtggccactcctaagcagattagagaactgatgcaagttgatggtcttaccaatgatgaagtgagaagccattagcagaaatacagactttatatccgaaggcttccaattttttcttccgggcatgggaatgagctgt

SEQ ID NO: 38985 - DNA, 186 bp, Gossypium hirsutum
  Clone ID: LIB3146-038-P1-K1-D6
cgggaaggaacggccggaccgacgcgtgcgctaggaaattgcatgatatcttccaaggggatactaacatattcgtgacgagacatagacggctgtgcttcgataacaaaggacgtatggcaagatggataagcgtatgctttcagaggatctagctttatcatggcgagtatcgcgagcaataca

SEQ ID NO: 38986 - DNA, 435 bp, Gossypium hirsutum
  unsure (1)..(435): unsure at all n locations
  Clone ID: LIB3146-038-P1-K1-E2
cggacgcgtgggttatactttacaattttcttccgccaccttaatatattgtcaagggtattgttgagatctaggagtgagagaagatttcaacagtataatctaaaatgaatttctttggactcaattccaggaaggactaaaagcaacccaggaaagaagaagaatcttcttgggacctcttaaagacgtcaacatagtcctaacttagaggggcaaccaaaccttcgcgctgctgaatggaggaaagatacggccacaataaggtatcaaaactatcgatgctcggaatatttaaaaaggtatcatctatgccattcttcgttacattctttattattattattattaatataatgccagaattatttataatccttactcaactcttaaatngaagtataaatgcatttcagtatattcaaactcacgtgc

SEQ ID NO: 38987 - DNA, 340 bp, Gossypium hirsutum
  Clone ID: LIB3146-038-P1-K1-E7
ggaaatggaaagtgactggatatccctgaccgatgagctcaggatggatctggaatctaaccgctgccgtgccgaaaaagtagagatggaactgaaattagagaagaagtgcaccgcggagttagatgatgctcttagcagagctgttctcggtacatgctagaatggcagaacactatgctgatcttcaagaaaaatacaatgatctgggaccgaagcaccgggcgatactggaaggcatagcagagataaagaaggcagtagcataggcaggaagcaaaggtcatggtgcacgttttgccaaaggcctggaggctgagctctcagctattagagtgga

SEQ ID NO: 38988 - DNA, 215 bp, Gossypium hirsutum
  Clone ID: LIB3146-038-P1-K1-E8
tcgccatttctgcaagagtagtggacttgattaccgtcacattcttcatcaactgcggcaggggaacatgattgatcaccatcctaaaagatgacgtgagactcacactccactctcaacgtgaactggaccacccacagtaaaggcaaagaaactacatatgttcctgattgagcttgacctagattctctcgtgatgagtatagtcataggta

SEQ ID NO: 38989 - DNA, 318 bp, Gossypium hirsutum
  unsure (1)..(318): unsure at all n locations
  Clone ID: LIB3146-038-P1-K1-F10
aattnnaggtcgacccaggcgtacgcccacgcgtacgattgctaagttcattgaacagattcagaataaccttcctgcagaatatagaggaggcgtgctcttgtccatttgaagaaccttgcatctgctgagaaaattaccaatgttgatgacccaatgtaaactctacatcgaatcgagcttcaaagaccgttactgatgattttgctcctgcaaaatataaaacggtttctactaagtgcaacctaagcctgcctcaacccctacagaagctcacaggactgatgctactcctatcgcgatggccactacaaacac

SEQ ID NO: 38990 - DNA, 442 bp, Gossypium hirsutum
  Clone ID: LIB3146-038-P1-K1-F11
tgacgacattgataatcggattattactgaagttttgggttctgaaaggcatggtcaggttcgatttcaaggatcttttgttaatccaacccaatattttggatccagctcgtatcaatacatgccttcggggagtcagactcaagttgaagttcagaggttaagagaccagatagctcagatgcaagtgagcacagttgagcaaattactcaacttaaagcggaggtagtatcgagagaagctgaggttcgaagaaaatatgaagatctccagctacaacttaaagcagatgcagtagcgagggaagtagaggcaatagcgagagaagcaaaggcagcagcgagggaagcagagcagaaagcacgacgcacttcaactacaacttcagaatatgatgaatatgtttcaacagtcgcaaaatccgccatcttaaactattgg

SEQ ID NO: 38991 - DNA, 366 bp, Gossypium hirsutum
  Clone ID: LIB3146-038-P1-K1-F12
cccacgcgtccgggacttggcagcatgttcgatccgtgcgttggagagctgcgttgatggggttatacttttaggtttggttgtggtgttttggcttttatatttagctcttttttagtaccatttttactcataatatcactcagctttgtgttaataggtttgattagtttactttgtgtcaattcatatcctttagtattaaggctactgctaaatagtgaattatttacatatttagagatttgatgtgtaataatgtagttacgatcttcgtttgaggaaatactatttttctgttgattggtgcagagtgttaaccattattagttttatgattactcattgttaaataaacatttaaaa

SEQ ID NO: 38992 - DNA, 275 bp, Gossypium hirsutum
  Clone ID: LIB3146-038-P1-K1-F8
acccggaatgacaggctcgaccgacgcatgcgtaacgccaactaggaaggaagccgtataattcctgtgcatcttaaagtgaaatgctagaatgcggtttaaagtgactggcttggggagaccgggattgcagccatgcatgtacatattgagtacatgtttacagatatagaggaaacagaggctgatgaaatgctactaccgtaaaaacggataatggaaccgtcaaaatcagaagacagtatctggttatgttacaccgctggatactttca

SEQ ID NO: 38993 - DNA, 202 bp, Gossypium hirsutum
  Clone ID: LIB3146-038-P1-K1-F9
ttttctctgtcgaagaatccccaaattgaaactcaacttcctctgctttcaagaaacgggggaggcttgttcttgtccattccacaaaccttgtcacttctgttaagttgttcaaagttaaagcttcttttacactcccatcttctctatcttctaagtctgctactgctgcttctgctcctgcataatagaacatgtattc

SEQ ID NO: 38994 - DNA, 165 bp, Gossypium hirsutum
  Clone ID: LIB3146-038-P1-K1-G11
ggcatgggatgttggtaaaatggatccttatcctcatgaaaaggattggctataagggctgggctctaaagtaccattatctaaccattgttctaccaaagcactgctcgagctgctaccgctgctagagcggatctacttttactggactaaaaacaaaataaa

SEQ ID NO: 38995 - DNA, 428 bp, Gossypium hirsutum
  Clone ID: LIB3146-038-P1-K1-G9
cagaaatcctagtgctgatattgttctttccgacttccacaaagcatggggaagaagatctcgcattctttccctctaagcaatgttttgatggtggggcctgtgatggttccatcaaccttgtttcccatggccgggccgccatccaacgttccagccaactccaaccccagctgttttcgtcgaattcttgatatttggtatataaacctgagctatttgtttggttagttgaactaggctttgatctccattgctgtaaaattaaagaactttgaattacttagggtatctttcagtttatgatgtaaacaagcgcacggaatttagaacgttttgataccttctgagcaagagaataggctagagctctttctctcttgaaggtccttcttgcttcatttgcagctttgttttaacatcttcta

SEQ ID NO: 38996 - DNA, 357 bp, Gossypium hirsutum
  Clone ID: LIB3146-038-P1-K1-H12
cccagatcttattgggccacttgcctgtgtttagttcaaactctatttacagttcttactggcaatatttacatcaatgatgtcaaacctcatacatgctgctgcagtaaataaaccaaatatttaggctgccccaaatgattatgaacatattgattgattctgaacaaactgatttttgggttgccccttagaggacgctgcttaaccttatacattttgcctcacaacacttcttccacggatgaagcatactatgataggctgacctttttaaggctcctacctcatgtaaatacctctaagataatattacttcaatttttatacaagattcttgttccgtaaaaatataaa

SEQ ID NO: 38997 - DNA, 320 bp, Gossypium hirsutum
  Clone ID: LIB3146-039-Q1-K1-A6
gacaaaaaaaaatcttttatagagtgaacctaaattcaatttactgggcgggggttttacaaaacggtgaactgggaaaacacgggggggacccaaattaaaccccttttaaaacaccccccttttgccagatggggttttattgaaaagacccccacccattgccctttccaacagtttccacaccctgaatggggaaagagactcgccctttaccggtgcattatatgcgccgggtgtgctgtttacacgcaccgtgaaaactataaattgccccgccctaaagcccccccccattggtgttttgcctttttttttaa

SEQ ID NO: 38998 - DNA, 212 bp, Gossypium hirsutum
  Clone ID: LIB3146-039-Q1-K1-A7
gagttaaaattacaccggcctcaacgttactcggatttggatggaatattgatgtgttttaacacggtatgttcaattttcttaaatatttacttgcatttgggaaaatatctatttatgtatatcttgtactcaatacttattcgtacatcaggtgttattggaggtttttggcgaatatgagtaaaaaactatgtacatgatgcctgctg

SEQ ID NO: 38999 - DNA, 481 bp, Gossypium hirsutum
  unsure (1)..(481): unsure at all n locations
  Clone ID: LIB3146-039-Q1-K1-A8
cgtcgcgatnatggatgcttctcaagcatnnggtgacgatgctttgctggctncattagttgnnaacttgtctacgcgnagtgtatgcatttatgttgnnttttaacattttaacggtagataatnnngttgtgttttattcgtattttacattatanntgtgnnntaataaatnntattgtagtggaaacgagcaactaagttatgaagaatatgaagggttgttcttatcnncacttacaatgtatatagggcaattacatttgtttcaagacataatattccattctaccgtaagaagggattgtacanaaaaaaaatttttttaactctgaaaaaaagaggaattaatttttttgaaacttggtaaataaaaattcgggccagaaaaatctttttttggaaaaaaaaaaatttttcaggttctttgattgacaaaaaaaaatggggcggccgttttaaagaatcaaagttttttttt

SEQ ID NO: 39000 - DNA, 391 bp, Gossypium hirsutum
  Clone ID: LIB3146-039-Q1-K1-A9
caaatgttgacaccgatgagaatgaggtccagtcttcagatggaaagctgatgctcctgcagaattcaccgtttttcaagaatggcaatgtaggaaacctactggccctagtgaaatatgacgagggactaaagagtgaattatgcaaacatggtgagcgtgttggaaaattggaaaattgtctgaagactcttaattgctggaagacggacatcgagctctatatgtctgagttgcaagattctctggaacctgatttagtgaacgatctggactgtttgtccacgaaagaagaaataacaaagctgatcgagggaagaggtcattctgcagcttctactcttctctgcagtattgctcaaggacattggatggatgtcatgcaagatgt

SEQ ID NO: 39001 - DNA, 403 bp, Gossypium hirsutum
  Clone ID: LIB3146-039-Q1-K1-B1
aatacgctcaatgtggactggcgaatggatgcattcactgatttggacctaagtggtgcatatttgattacctagatgcagaatatacataatggcgaaaaaaatcggggttgaggggagaaacaaacaattgagttgccgttggagcatggactttcaattatgttggatataggggcctttgaagtaaagggaaacaggggaaatgggcttgaaatctacatgtttgtaaactggatagctgaacaagcattgattggcacactgattcagttgcgcgagatatccatatacttaacgtctgttcctttcatgtaaagcatttgcaagtcaaaactcgaaaacagcagaacaagccgcgggaccccgctttgcaggcttaaggagtcatgcattttttaat

SEQ ID NO: 39002 - DNA, 409 bp, Gossypium hirsutum
  unsure (1)..(409): unsure at all n locations
  Clone ID: LIB3146-039-Q1-K1-B11
ccattgcactctccctctttcttggcctcaagggtgatcccgtcccatgcgatcgttgtgctggaaattgaggtacaaaatgtgtcttttgcgaagatggtaagatgaagcaagaaacgggcttgatcgattgtcgggtgtgtaaaggtgcanngtagatttagtaaaagatcagaactcaggcttagcttcattggttcttcgtactcaacctatccttaaaaggtgacatcctagcaggtttggcactccaatcccagcattggaacactttctccttcctatacctatgatctcctttgcaccaaaaaaaccgaaggatgctttattgattgtttaattttacttgatacatgacctagaccttatttatgctaccattacagtggctgtttctcaatagactttg

SEQ ID NO: 39003 - DNA, 262 bp, Gossypium hirsutum
  Clone ID: LIB3146-039-Q1-K1-B4
aaatgggcctaaaaaatcgttgcaaaaagttctttaaaaaaagaattccttgaggagttggggggaatctcttaagggggaactagaaaatgtgaataaagagcattctaagctgaaggagaaggaagcggaaactgagtccattgctgggaatctgcatgtcaagcttcggaaaagtaaatcagagcttgaaactttcctttcggaggaatccaaaacaagaggtgcctgtgcagaaatgttatcaaccctccaacagcta

SEQ ID NO: 39004 - DNA, 350 bp, Gossypium hirsutum
  Clone ID: LIB3146-039-Q1-K1-B6
acccttccggaagaagacccgcaggaatcaacatcaaaagaacaaactttgactgaagttccattgagtcttgagaatgaagctgccattgaagagctgcaccaagctgaagaggaaaatgttaatggaaatggagaggaagaaagggaagaaccaacaaaagctgaagaggatgaaaaagaagattcgacaggggaagggggaggagaaggtgagacaagccaagaaagatccgaacttgaatacccgggaaccgacctggaaaacgagtcaaaggagagtgagagtcaagataagttattgccagattgtttactattaatgatgtgcgaaccaaagctgtcaatgga

SEQ ID NO: 39005 - DNA, 397 bp, Gossypium hirsutum
  Clone ID: LIB3146-039-Q1-K1-C2
gcggtcacacacttgaggcaccaattaatcctttgatgtgcacaaagaatggcttctcttgtttgctgcctgcaggattttggttcttttggttccattacttgcttcctgctaaaacattgacttcccttttcacattaatacttttcttttcttttctttttccttttcccccaaagcagatagtggaagtagttttcaggactataatgttgattgtttttcattagacatcttgtagtattgagtagtagagttggttccattagttccagttttcactttcccccacttttgtggaaccaaaatttccattagtgagcaaattggattgacatgatgttgttgcattggttggtttctgcatggtccattacttgtaaaacccatatgcttt

SEQ ID NO: 39006 - DNA, 377 bp, Gossypium hirsutum
  Clone ID: LIB3146-039-Q1-K1-C3
cccacgcgtccgatggaagcagtcccggaacttctttccgaatatcggacaccgaaatcttcttgcatactggtgttgagactacatgggatgcttatgatgctaatgatcccagtagcagaggaagaagtcgttcatcctcaattgattacgattctggtgatgaaaacaggaaatcatcagtcaatataaaaccaagttcgaagaataaggcagcacagagattgaaaagtgttctcctttggcctcatatgaaagggaaaaaaccgaaaagattgaagaaatcaattgaaggttgctctgaagaaactccaatcccacttagacaaagattttcaaagccttcatcatcacttcctaacaacaagagaacacta

SEQ ID NO: 39007 - DNA, 256 bp, Gossypium hirsutum
  Clone ID: LIB3146-039-Q1-K1-C6
agccttccggccaattgccgcctccaaggaccaggccaagaataatcgttgtctgtatttacaaaacaaagtgattactaagaaggctgtgctgtgctgaacttagcattagcgggaaatgctcttggcacaactaaggtagttctgttctaacgctcgcattcttgcgtgtttgaaaaaaaaattcgacagtggaagaggaagaagaaggtgagacttgccaagaaagatccgggcttgcattctaggggaccca

SEQ ID NO: 39008 - DNA, 297 bp, Gossypium hirsutum
  Clone ID: LIB3146-039-Q1-K1-C7
gtttatgattatgcttgtactatgcatatgaaatggctcgatcaggttggaagctagtcggagatccatcacactatccatcaaatttatcggtagattttgatgctctggtcgtggttataatggcatgtataggtgggcgtttgtctaatgtttagtcaataatatctgtatgtaatgttgctttgaatttgtgaaacttatgatatttgatgccttgatgattggtgtgcttttggcactttgatgtttaaaggttgatgattataagatcaaatcaatgcatgttttatggcc

SEQ ID NO: 39009 - DNA, 398 bp, Gossypium hirsutum
  Clone ID: LIB3146-039-Q1-K1-D1
aaaatttgaaattcatattctcaaatagagcacgatagaatgtaagaacaaaggaaatttatcttctgtttatttgtttgtttattatcccaagttcaagagatgtttgagtttattatctgataaggtaaggcatatttaagtcgctgaactaacatggtaacttttggattattatctgatatattggattattattctaacttcgaccaactttagtaagtcgcttgaactaacatagtagctcgaagataatgcgtggacttcaacactaagttgactgatttagcaaggtttgttgttatatgatcatagcatcgaccttcataatatggctaagctctccttagggctgttgtcaagctatctaccggctgcttttgttttgcatgtattat

SEQ ID NO: 39010 - DNA, 393 bp, Gossypium hirsutum
  Clone ID: LIB3146-039-Q1-K1-D2
aacaccaactaatatcatatccaaactgtcattacttgttctgcattttccccgcctacgaatcatctggtctcggagcttacatgcaactgctgatatatttgcttctcttaaggcaaatcaggatgaacccgatgagacaaaggcaatgagagttggtgtaccctcagaagagggtatcatagaaaatgatgttagagctgaaaactacaatacatcagctgttgagtttttgagacgactcccaggagtaacagattccaactacaggactataatggatggatgtcaaagcttggctgaacttgcacttcttcctatagagaagctagctgaactaatgggtggtcgaaaagctgcccagacattaagagatttcctcgatgctaagta

SEQ ID NO: 39011 - DNA, 295 bp, Gossypium hirsutum
  Clone ID: LIB3146-039-Q1-K1-E10
aacaaacgtgaccactatgaggattagcttatttatgagatgcacaaagtccccaaactgacaaagtgatgaggcatatgggattgctcatatgatgcagaaacattctaacaaaacgccttttacaggacaacgaatcttttaggggaagaacctgtacttgttatgaaacccaaacacgcttttgaggatgccaagacccatccaaatgagcgggatacttcaaatttgtagtacacagacggcaaggaacatccacactttactatcgtcgtgccagattaccaaaattggg

SEQ ID NO: 39012 - DNA, 283 bp, Gossypium hirsutum
  Clone ID: LIB3146-039-Q1-K1-E12
cccacacgtcctcccactcatccgctctgctattaggcctcgaaagtagatcaataggccgcgaatttttagccaatagctcggattgtcacctcctaaactaacattgtgttggcaatatttgctgaggccatctatgttgttttccgaaaccattgcacaggatattgctccctctcctgcattggctaccgaagcaagctctgtcttgccgttttccgctgtcttcttatgctcttccatgttgtactctataattcctctcttgttccattgaattcaa

SEQ ID NO: 39013 - DNA, 390 bp, Gossypium hirsutum
  unsure (1)..(390): unsure at all n locations
  Clone ID: LIB3146-039-Q1-K1-E5
ccccccttccgggacacccttggccggacccttggggttctagttcttaaccgaccnncctcgatctaaaacgggctttttcttttcatgaaaatgcttcattgaatgtggtagcttatggtcatattagccatttttcatctcaccaattctttgttcaagcactttacggataatctaaccagtatactacacccgcctaaatgatcgtttgatgaccatcaactaacaactccatcttattgcctcaagtgttcaagatttaacgttttgctactgtttacaaccacctttttcaatcaacattctttccatctctaccaaagattctagtgcctaatctttgcatttacgctaatttaagaattttatcttgcgggtcgtattata

SEQ ID NO: 39014 - DNA, 259 bp, Gossypium hirsutum
  unsure (1)..(259): unsure at all n locations
  Clone ID: LIB3146-039-Q1-K1-E6
cttccgaaaggtggtcttattataattgttagggcttttaaccacgttacaatctgctggatcatcgggcgactagcgatccgaaattcattatgaacagaccttctcccaaaacttagtcgcatcgtcagaatatgattttaggactagctcccgcntcgcgcacagtctaatgtcatcatgctcaaagaccaagctacatgaattccacatagtttattaaagctaaacagaaagagacatttatgccttttcctga

SEQ ID NO: 39015 - DNA, 393 bp, Gossypium hirsutum
  unsure (1)..(393): unsure at all n locations
  Clone ID: LIB3146-039-Q1-K1-E7
cccacgcgtccgcccacgcgtccgccacgcgtccgctgaagaggaagtcaaacctactatatctacaagaccaaggggcccatgagccatgtgtaccaaggttacaaatggttggaagacttgtgcagaagaacagaacttggaaattggtgatgtttgcatctttgagatgataaattcaaagggccatgaattgttagactgtagctatctgaaaggccctagactagaggatcaaacataggtttgccataaaaaccttgtttatctttgttgaaacgtagttaaactcaccattaataaaagggtctgctgtggaatttccttttcgtccnaaaaaaaaaaaaaaccttataataacaaatttaaattattttaaaaaaaattactttt

SEQ ID NO: 39016 - DNA, 344 bp, Gossypium hirsutum
  Clone ID: LIB3146-039-Q1-K1-E8
caaagagctagaagagttagttgatcaatcttggaggatggaaatgggtggatttctgagggaagagcagctagtgatttagtttagaatattgctcaggttattgacatttctcactttgaggtttgatagtcctctctttcttcaagttttcagactaaattcaggtattgctgtagctcaatgatggatttctttggggtacattgcatgtggatcagattatctcaagaaagaatttggatgagacttaaaaataatcataagcatttcttcagaagactagagaaaccaagtgaacaactttattatgacacccataaagataatatagatttcttcta

SEQ ID NO: 39017 - DNA, 202 bp, Gossypium hirsutum
  Clone ID: LIB3146-039-Q1-K1-F1
cttccgcggacccttgggggctgaaattgcagttgccattgtttggggggctgcccatggactgctgtccgtatgtgctcctctgcaaactggctgtacttgggcttctggattcactggtacaggaactcctatggagaatggtgaagcttcggctgcaaagatggaaagaaaaatgtatgctggtcaagaaccattcatg

SEQ ID NO: 39018 - DNA, 394 bp, Gossypium hirsutum
  Clone ID: LIB3146-039-Q1-K1-F10
cccacgcgtccgaacgaattaaaaaaaaagaaagaggaaaattcgagagaaaaagagtgaaccaccttcaaaaaaaatatttgctttctttgattgcttggtattcgcgttctctctgtgcgcgtcgattacaaggttaaaatctggctttatatccgaaaagagagaggaaaaataaatcaaaatacaacattttctttgtttgtatttgttgctgttttccttgtctgtttgcaggtgtgcgtggcgcgtggaggtgtatggtgtacggaggcgctggaggcttgtacggcgctggaggctgctgcggcgctgagcgaacggggcttgggttttgagtgcttaatgttgttgggcttgttgggcccggtaactttgggccaggtcttaggtt

SEQ ID NO: 39019 - DNA, 309 bp, Gossypium hirsutum
  Clone ID: LIB3146-039-Q1-K1-F11
cggacgcgtgggattggtgtcacttctggtgcctccacaccagataaggctgtggaagatgccctcgtcaaggtgtttgacataaaacgggaggaggccttgcaagtagcataaaagtatgtatgtatatatgtatgtaggtttacacaggtgggtcagccattggtgctcgtttggtactgatagtataatgttgtcaatgtatagtttaagtgaaggactctttaatctttaagatctgcgcgtacttgaaatcagacaatgttgagtaattatgtatcatgaaatggtttttatttttggcttttt

SEQ ID NO: 39020 - DNA, 402 bp, Gossypium hirsutum
  Clone ID: LIB3146-039-Q1-K1-F5
accaaaagtaatgatacagaaaagaaggttgttcctgtagcatttactattctaaaaagttttcaatgaagaaaatgaagggtaactatattattaactaccatcagtgcaagcttcaaacaaagtgcagctgcgagacttcattttgtaagcaactaaccccatcatttgctcaagaataggcttaccatcagttgagaaaaagccagggtaaggtaaagctgtatcgactaattgacgctgttacagcccattttgcccgggcttaaggcccaactacccaccaaacaacccattaacccaaacccatttctaccagcccaaataaacaaaaaatagagaaagaaagaaaacctaatcggtcctgactactggcggccgttctttgaccaccgacgcacg

SEQ ID NO: 39021 - DNA, 416 bp, Gossypium hirsutum
  Clone ID: LIB3146-039-Q1-K1-F6
ccaacccgtccgcagaattcttgctagaccttctacatccatgcaaacttcgggatcattggctgccccaagttccgaatccgtctatgaagagacctcgacatcaacctcattcgcatcttcaaccacgttgtctagcaacactcccgttgcaggcacattagaagataatcatgctcaaaaaccaagctacatgaattccacagagtctattaaagcttaacagaagaagacattcaagttttctcctgataatgtgcggaggagacatgtggttgatgatgatttacaatattttcataagaaactgatgacactttcttgcgaggacgacacaaagagcagtgctgattcttataatccatcattatatttctccagaaaggtgtacggaccgagacaaatgggtgggaggc

SEQ ID NO: 39022 - DNA, 406 bp, Gossypium hirsutum
  unsure (1)..(406): unsure at all n locations
  Clone ID: LIB3146-039-Q1-K1-F7
gcagaagctgctgttgctgctgctcaagcagcggctaaagttgttcgattggctggttatggacgccactctatggaagaaagagctgcaactcttatacagtcgtattacagaggctacctggtaaaacctctcaatctatgaaggcactattgtaagacggggttaagtaaaaaatcactgcatatactttcgttttcaaacgagtttgattctgtaggctcggagagctttgcgagctttgaagggattggtgagattacaggcactagtgagaggctataatgtgcggaagcaagcacaaaacacaatgcggtgcatgcaagcattggtacgggtgcaggcaagcgttcgagctcgtangttgcaactaactcaagagaagcttcaaaagagagtggatgat

SEQ ID NO: 39023 - DNA, 409 bp, Gossypium hirsutum
  Clone ID: LIB3146-039-Q1-K1-G1
cccacccgtccgggagttcaagcgacacgtggatttgataggacggctcaggcacccaaacttggtcccacttagagcttatttccaagccaaagaggaacgcttgctcgtatatgactatttccccaatggaagcctcttctctcttattcacggaacaagaacttgtggtggtggaaagcctcttcactggacatcatgtctgaaaatagccgaggacttggctactggactgctttatattcaccaaaatccaggcttaactcatggaaatctcaaatcatctaatgtgttgttaggtcctgattttgaatcttgcctcactgattacggtctcactatattccgagacccagattcagtcgaagaacctggtgctgctacatttttctacagggcacctgagtgc

SEQ ID NO: 39024 - DNA, 243 bp, Gossypium hirsutum
  Clone ID: LIB3146-039-Q1-K1-G10
cccacgcgtccgcccacgcgtccgaaaccttgcatcagtcctcaagaatgttctatcaggggcttttttaacctgatttttcattctgcataacaaagctgctcatcatttaaaatataaattctattctttctacaaccttccagcactccctttttttaacattatcatccatcattttaattgaacttcttttatctacttaagcttttattttatttcatatcattaacattaactcct

SEQ ID NO: 39025 - DNA, 146 bp, Gossypium hirsutum
  Clone ID: LIB3146-039-Q1-K1-G2
aagccaattccaaaagggtgggagaatcttggaaagggccttcccaaaaccttttttttgagaagttattaaaccaaggttggtttttttaaggccttttttaataggacctactggacctccataccatgatggccttttggttt

SEQ ID NO: 39026 - DNA, 417 bp, Gossypium hirsutum
  Clone ID: LIB3146-039-Q1-K1-G6
gaattgtattcatcgaagagattttcagtgcaaagcgatatatatagctatggagtcttcctcctggagttgattagcggacgtgaagcaatttgtagagatccatcaaacttggaaacaacattaataatgcaggccaaggattcgaaagatatcagcagttttgtcgataaaaccttgggaggtaaatcaatgcgtggggcaaaacaagtagtagatttggcattgcagtgtgtgaacataagaccaagaagaccattgatgagaagcatcattgaagagcttgaacgaatccaagagacagagattggtggtttgccgtttgaagcacgcgaggagattggagatgtaacattggggagcgagctctttaggtgacctctgctcgcccgggtataataatcattcttttattaa

SEQ ID NO: 39027 - DNA, 330 bp, Gossypium hirsutum
  Clone ID: LIB3146-039-Q1-K1-G9
cccacgcgtccgcccacgcgtccggttctctaacggagtttccatttaggatgtaatgtaagttgttgagagatgttctaaagctcgtgctggcttgcaagagcgtcatatcaggcatgtatctgtgactcagttatctttgggagctttcatctcgtgtcccatcacagccaggtatcttaggagaaagctttaaaccccatagctatttagataatttaatcagatgattgtctcgtgacaataggaggaatttgtagaatactctgttgaggtttttccaaaaagttttgaatgacttatggtcaggagctaaaagttcttcccttg

SEQ ID NO: 39028 - DNA, 343 bp, Gossypium hirsutum
  Clone ID: LIB3146-039-Q1-K1-H1
ccaacgcgtccggtatgaggagggagattgttttatcaacgtcacgcatcataatagtggatgagctgactcttgtgggaccatcaataccattgctctagatactggatgaaatgaacaaacagaactctggcactgaaaaacaccttcaagagctaagaactgcatatgcaactctagaccctgagggatttgttgaactttatggcgacaaatatatagagaatgtgagaatgtgtaaactcccaaaaagacccaaacttcaaacacgaacgaaataccacacacaatgctaaccactggtaatgctgcctcgtgacttccgagataccctatgcaaaag

SEQ ID NO: 39029 - DNA, 406 bp, Gossypium hirsutum
  Clone ID: LIB3146-039-Q1-K1-H3
gttccaaccgccaccacccccttcaaatacagcttccttcgaccctgcatggacattaccctttggacctcaacatgatcaagatgatgatcaacatcatcaagtccaagttttcaacaatgaagcagctcaaaactttgtaagtgacaagcttatgaatccacctttcgacaatccgttaatgggtcctccaacagtgccgaaactctgtgaaatccttgaagggaacatggtgtgcaacattccacaaacatcatcggtttcattagaaaacaatatcgacccactagtctccaggctatcctcatgtttccccccaatacctgctggttcaaactatgcacatgacatgcaagtgggggcaagccaaatggagtacattgataacatcatcacatcaataccc

SEQ ID NO: 39030 - DNA, 198 bp, Gossypium hirsutum
  Clone ID: LIB3146-039-Q1-K1-H6
tccatgcatcagtcacttaggtcctatcgtcaatctcctatgagcttcagccgaagctcggtagaccttaggaacgcatcttctcaaagatctcgtgctttcatctggtttcgccggcatcattgaattacccttctatatcgcctcttaatgcaagatacatcttcccatattttccaagcccaagcaacgcattac

SEQ ID NO: 39031 - DNA, 145 bp, Gossypium hirsutum
  Clone ID: LIB3146-040-Q1-K1-A10
ggtggagctcggccgtaactggctattgtaaatggacttagagacagagggctctccttctgtgagaatgtacctggtgcattatcaaaggatggaatggtcctggcttttgggaaacaatactttgtctccatggaggagatcg

SEQ ID NO: 39032 - DNA, 126 bp, Gossypium hirsutum
  Clone ID: LIB3146-040-Q1-K1-A11
gtttgttctaggcctccattgcctattttttttggacgtagagacagtcaccagtggtggggtaattttaaacctggtgcatcattaaaggataggattgacctcgtatttttcacacataacttt

SEQ ID NO: 39033 - DNA, 156 bp, Gossypium hirsutum
  Clone ID: LIB3146-040-Q1-K1-A2
gagtgatgtgaaaattttactgcgaaattttattttcggtttcgatttttttctccaaattgtattttaaggggtggatgcccgatcaaaggtgaaaaaaagagctttaggaaaggaaagcggcggtcccaaaaagaagaccggttttttttttgg

SEQ ID NO: 39034 - DNA, 407 bp, Gossypium hirsutum
  Clone ID: LIB3146-040-Q1-K1-A5
ccgaatgatcccaaaagttactcggtttttatccaccgggacgaggtgaaaaatggggcgagcattcaaagcgtgcttcaacgttacagtagagaagaagtgaagaaaatgagggagaaagtgattgaattcattcccaagataatttatgcaaagcctgagaatggtttggagagtattaaggatgcatttgatgtcgccattgatggagtgttgaagagaaataaggagcatgagcagcctggttacaagtggaaatgatggttttaatggaaattggaagctcggggtgaaaaaaattagaaatgcagagaatatacagaaatttatatttattactttttaatttttaaaggatgggataggggcatgactcccccctgacactgttaactttttgtatataa

SEQ ID NO: 39035 - DNA, 405 bp, Gossypium hirsutum
  unsure (1)..(405): unsure at all n locations
  Clone ID: LIB3146-040-Q1-K1-B1
gcgtactaccccattcttcttaagggctattcaatgaggaagacttaatcttgttatggagggcacaaggctttctagtaagaagcacaagataaacaaggcattgaagaagtaggtcacaagtactttagagatttagtgtcaaggtcccttttgcaaataatgatttggctcaatcagttgctggataactatgcttcaagatcgagggtaatcaacaaatttcaaagcacgctggctactgatcttattttgctaattgttatgatggcatcacaaggtttgtgggctcttttaaagggcaacgtttaaggagcttttgccattgacactatgaaatgatcataagatgtgctttgttgacacatttgatatggttaangatgttttcttttagagggtatc

SEQ ID NO: 39036 - DNA, 140 bp, Gossypium hirsutum
  Clone ID: LIB3146-040-Q1-K1-B10
atttgttcaaaaatgttctattaagatttgctgattaacaaatgttccactgtagttaggacaattttttttaaaataacttagttcaattccactccttcttctactggcaaaagttttcaactttattctgaacaata

SEQ ID NO: 39037 - DNA, 333 bp, Gossypium hirsutum
  Clone ID: LIB3146-040-Q1-K1-B7
gtaatgcaatttgtatttctaacatttattttcgtggcactcagcacaatggctaaggggggcttttttatcaagcatgactttcacaaaaggtgcgcttaggctgcaagaattagggtaaaatacccacatagaattccagtgattgtggagaagactaaaggaaacgacatccctaacattgacaagaagaaatacttactaccatctgacttgacagtgcgtcagtctgtctatgttatcctaaaaagaataaaatttaatgctgaaaagactatctttttattttttttacaggcaactccctccaacaggagcaattatttcaaccat

SEQ ID NO: 39038 - DNA, 261 bp, Gossypium hirsutum
  unsure (1)..(261): unsure at all n locations
  Clone ID: LIB3146-040-Q1-K1-B9
atttgttcaaaaatgtgcaataaagaagtgcttagaacaaatgttccactgtagttaggacaatttgtagagttgaacttagttcaggtccactctttcttctactggcaaaagttttcagttgtagtctgaagaatataaattttgtttaattttggtttatctccgtagttgcaatttaagttataggctttgatggcctttgaattttgcttccnaaaaaaaaaaaaaataatagaaataagatagaaaaaataaacc

SEQ ID NO: 39039 - DNA, 208 bp, Gossypium hirsutum
  Clone ID: LIB3146-040-Q1-K1-C12
atgaaatacaattcttctttcttcgtctttgctgcttttgtctgctctcctttgcagttgcgagtacggggctgttcgttggcccttggcgtgaggtgtacggggtggtgctggcgtgtgtacgggagcgtgcgttgcggggctgtgttctgtcatttggtggcacatgggaaagaaccgtatggttattgtaacgcctcatggttgg

SEQ ID NO: 39040 - DNA, 111 bp, Gossypium hirsutum
  Clone ID: LIB3146-040-Q1-K1-C5
ccttccccggaaaataaccgccggcttaatccccggggggttcggccctcccgttgggaacccacccgcggggccattgggccaattccaacttaccgaccccttccccta

SEQ ID NO: 39041 - DNA, 326 bp, Gossypium hirsutum
  Clone ID: LIB3146-040-Q1-K1-D2
ccaccaattgagactccaaccaagttctttttctctcaccacgcttcacatcctggttggaatgtatttgatactttcatcgaccaacaaaaggtctgttgctgctcacccatggcatgatcttgagattggacctggatcttcaattgtttttcaacctgttgattgaaatcctcaaatgtatcaaggttaaatttgaaccttacaagaaaactggatcttatcaagtgttatcgcttttcttttactcaatatatgtttatccttacaactacagtattcatccttccactctttttttaaacctttaaccttttgattttttt

SEQ ID NO: 39042 - DNA, 414 bp, Gossypium hirsutum
  Clone ID: LIB3146-040-Q1-K1-D3
tgcagttggaaactggagcagggacaatgatagaaacaaaatccttcttggtataggtggtggtcactacgtacctaggcatatggatattgttcagaaagatggtgtttgggtaggccatatgctgcctgggtattctctgttgatggaagatcctagagaagcaaaatcactaacaaattcagctgttgttggtggaacttggagggaaacaatcagagttgcatttgagaccaccaaattggctttccctggaggagaagttctagcacatctagatcacaagatttttaaggggtggcaaagaaatgcaattataaggttcttcacagaacagaacataaagattggcaaaccgagtgacttctgtccttgttaatagctgtctatcgcttgttctgtaactatacatta

SEQ ID NO: 39043 - DNA, 249 bp, Gossypium hirsutum
  Clone ID: LIB3146-040-Q1-K1-D4
cccacccgtccggtgaagacggggtagaaatacggaccatttatgtagcttatccaaatcgagagtacaaagaaatggctctcctcacctttaatccacttacctgtctctcttcttctccggtacgttcttgctcaacgtcgttgcccatcgttgttttaccaatattcaggttgcgggtgaatagaatcgatgaccattgttcaaaatgttcaattggcacacagtttgtcctcagcaagaaaagat

SEQ ID NO: 39044 - DNA, 376 bp, Gossypium hirsutum
  Clone ID: LIB3146-040-Q1-K1-D9
agtaagtctccaaatcctttaccattatatttcctaatccacttcctgatcactactggtggtatcttttataaaagaaaatcctcccaaaataaacattcttgcttctttcaagctacagtccccctatcattctattaacccaatcaattacttcaaaagtcattaatcttaacatttcaaacaacaaatctattattactgaagattacttattgaatggtactttgtcaactgctttttaaaaaatataattatttgccacaaataaaaaacctattacctttcttaaaatttttaaaattttgatgtattaaaatcatccaattcttttttcctcctcctttaatacctcttctttcaaatacaaaaattt

SEQ ID NO: 39045 - DNA, 320 bp, Gossypium hirsutum
  Clone ID: LIB3146-040-Q1-K1-E12
ttttatttctatttagaactctttccccctcacgtgttttaaaaaaagatgtactatttgagcttggatattcgtttcttgaaaagtgttggggaacaggtagaatttcttctcagaggacacaattgctgttttcaggtttccaagtgttacgcaaacaatgacctttttttttcttttttgaactttttcttaaattgacagatgttttatggtgactatttcttatatgaatcagaatgtttttaatttaattttatgcgagacaaaacttttccacggtgttggtacattttcttgggttcttgtgaatttttaaa

SEQ ID NO: 39046 - DNA, 225 bp, Gossypium hirsutum
  unsure (1)..(225): unsure at all n locations
  Clone ID: LIB3146-040-Q1-K1-F12
ccttaagttagctattccattgccctactttattcaacatcattcaaagcttgtttgctagantatttttataaaataaattttatacccataacccactctaagttcttcctaacagctatttctacagcactaatgctcttaaataaattgcttatataaacaatggtaaaattacatttcccagaaccttttctgtcttcaattattctttaccaagttaaa

SEQ ID NO: 39047 - DNA, 119 bp, Gossypium hirsutum
  Clone ID: LIB3146-040-Q1-K1-F2
aggtcaaaatttcttgaccacacggaattccaatgccatgggggggtttttgtcggaggaaagaacatagaactgaagccagggtttttaatggggcatgataaatatgttggggctgt

SEQ ID NO: 39048 - DNA, 256 bp, Gossypium hirsutum
  Clone ID: LIB3146-040-Q1-K1-F5
cttcggccaacttcattaaagtggggggggtcctaaaactaaatatttggaaagcaagccgatagggggagatccaaagaagccaattctgtaactctcttgagactattatattcaaaacaaggggattgaaagccttcctcaggcttatcagagttttgaggctgagttatcaaaattgccttgagaacttgtagaatggaaatgtaagggaaagaggttgtgtgttggactaccaaaggggagaaatgggggt

SEQ ID NO: 39049 - DNA, 294 bp, Gossypium hirsutum
  Clone ID: LIB3146-040-Q1-K1-F6
cccaactgcatgaagttgtggaggatctgaatactaaatatgtggaagtcaagctgataggagaggatcaaaagaagcaaattctgaaactctctggagactatgatattcaaaacaaggagattgaaagcattcgtcaggctaatcagagttttgaggctgagttatcaaaattgcatgaagaacttgaagaatggaaatgtatggaagagagtttgtgtgttgaactacaaaagggaagaaatgaggttgaactttgggagactcaagctactgcattgtttgatgagctac

SEQ ID NO: 39050 - DNA, 254 bp, Gossypium hirsutum
  Clone ID: LIB3146-040-Q1-K1-F7
cgacccacgcgtccgcccaactgcatgaatttcttgaggatcttatgactacatacgtgaaacccaagctgaggggggacgttcaaaagaagcaaatacttaaaccctctgccaactattatattcaaaaccagtaaatagaaagcatgcctgctgtctaatcataatattcgaggcttcatctatctacaaatgcacacaaataccacacataattttttcttctaaaaaaactagactgtttgttttttttt

SEQ ID NO: 39051 - DNA, 162 bp, Gossypium hirsutum
  Clone ID: LIB3146-040-Q1-K1-G10
cccacgcgtccgttagatatgacacttttctattaaagcaaaaacccaaaatcagggggggtgaatgttctaccaatttttgctcctgccctatccaaaaatatgtttgccaaaattcggtaactctgacagctccctcccatattaccttttacttcaata

SEQ ID NO: 39052 - DNA, 344 bp, Gossypium hirsutum
  Clone ID: LIB3146-040-Q1-K1-G11
cacatttctaaccttgaccgtcccgagagccgccggtacgtgcagatgttatacgctcttaaacaccccaagctggctgaatcggttcctctggcaaaggaggagtaaaacaaaggaagaggcgggttttccctggaggatttttacgagttctttataataataataattataataatcatagtgattatctttcgttgccttcatattgatcgccggacaagaaaaagcctctttagcatctgtgttcctatgtgtgctgttttatttttacgggcatttgtaggacatggagggggtactacgcccttggattccaacaaaagattcggattttgttttcc

SEQ ID NO: 39053 - DNA, 152 bp, Gossypium hirsutum
  Clone ID: LIB3146-040-Q1-K1-G3
cgccttcccggtcagggcaaaagtttgggttaaacactttgtcaccataactttttagcgttaaccgagagcgctcgtttcgcgagagaatcagaggagaaccccgaatttctggcgagaatggaccggttttttaatgcggctttcgaatt

SEQ ID NO: 39054 - DNA, 258 bp, Gossypium hirsutum
  Clone ID: LIB3146-040-Q1-K1-G5
ccaacacgtccacccactcattcaaccatttttattctacaactcttaacaggaaccggagggggcaccttttgactcataaaccgaccacacacacccatttttatccataattaaacaaaacataaaacaccccacccatactcatcatgataccaaaaatacggcatccaattcaaaaactgaactatcagctccatccattctagctactattacacatatcctcgaagaatgttttaacgactagaacccaaa

SEQ ID NO: 39055 - DNA, 316 bp, Gossypium hirsutum
  Clone ID: LIB3146-040-Q1-K1-G7
cggacgcgtgggttgggaaagagttgttcgaaaaagaacaagaggaccttctttccgacctgaaagacattccaaagaaggcttgtgatcgtcgaataaatgagtttgtgaagctgctagagctgccaagatacatgcttatatcatcgctcaccttaagaaggaaatgcctgctatgattgggaaagcaaaaactcaacagagactgatcgataatttggaaggcgaatttggaaaggttcaaagagatcatcacctaccaccaggggattttccaaatgtggaacattttaaggagattttgtctggttacaac

SEQ ID NO: 39056 - DNA, 261 bp, Gossypium hirsutum
  Clone ID: LIB3146-040-Q1-K1-G8
cccacgcgtccgcaagagatgacactccttctttaatgttaaaacccaaaatcagatcagtgaatgtcccacttctttctgtgtttgccctatcccatgatatgtttcccagaattcggttatcctgccagctacccttccttttttcttcaccttcttctcatagccatatgctattcattgatgcagctcttcttgattgtgcccttaatgataagtcccaggctgtttcagcgatttccacccctaatgtcatttttg

SEQ ID NO: 39057 - DNA, 182 bp, Gossypium hirsutum
  Clone ID: LIB3146-040-Q1-K1-G9
cccactcttccgtttgataagacactcttctattaatgctaaaacccctaatcatagggcgatatgttatacaaattaatgtctttgacccatcccataatatgtttcccaaacttctataattcctccaactcccccttcttttatcttccacttcttgacataaacacctgctattcatt

SEQ ID NO: 39058 - DNA, 225 bp, Gossypium hirsutum
  unsure (1)..(225): unsure at all n locations
  Clone ID: LIB3146-040-Q1-K1-H1
gacatatcctagctgttgttgataacaaaaccaagaatacttctaaggatcctaaaactccattgactgaacacaagaagcaaagatatcaatttttaaagtctgatggaaaaggatgattcgaaatgcgggcagactgcagtggtggagaggaaaaccgtattagtcccgaaaagtgagaccatagttcatgccaattgttacgnaatgttaaaaacattttga

SEQ ID NO: 39059 - DNA, 344 bp, Gossypium hirsutum
  Clone ID: LIB3146-040-Q1-K1-H11
cccacgcgtccgccttattatgaccaacttacagccatctacgcaaaagatcgagccacggggaatgctcaaacaaccgctgatattattgaagaaatagatgccgatgatgtagctactgcaaatactcatgaagaaagaaactattacaatggatgtgaagctgatatttctttggatgagatgaatctctaagctacacaaccgcaaccatctagaaactacgatgattccacattttcaaagaagaaaaaaatgattttctgatgcaagtgaataaaattcttctacttcattaactgatgctgccacattattgggggaaaacatatgaactattagct

SEQ ID NO: 39060 - DNA, 226 bp, Gossypium hirsutum
  Clone ID: LIB3146-040-Q1-K1-H12
tttaatgctatatatggttcacccgattgtggcatttaacactatggaagggaatatatgagaccaagctccatacctataccaaacagaaaccactgttttataaacatggacacaaaaaaaagcctgaaaaatatctttaatcaaatcttgtggaggacaatgatcaccttctcattcttaaatgaaccttcagttctttgaccgtccttaaaacaattaccaa

SEQ ID NO: 39061 - DNA, 381 bp, Gossypium hirsutum
  unsure (1)..(381): unsure at all n locations
  Clone ID: LIB3146-041-Q1-K1-A11
cccacgcgtccgcccacgcgtccgttcactaagaaaagattcatggactcagtatatataggcttattgttatgtgcatacttacaagtttttattttcttttgttcaggaatcgctacctaggatattattttgatttatcataaaaaagtatagctgaaggtaacttgtgaagcaagtgatctgtgaattctgcacatttccctcattaatacgtttctgctaaaataaggttatttaaagctaactggagtgcttttatttttcttttggagatcaatatatttagagttaagagatcacaagggattttgtgttaaggcttgagcttttagttacttggtttagggttcattntttggtatctgtgtgacatgtaaa

SEQ ID NO: 39062 - DNA, 200 bp, Gossypium hirsutum
  Clone ID: LIB3146-041-Q1-K1-A12
tgcgttcggtacataatcccaaaaacttttccagcatgtgggtataattttattttcggacgatctaggctccatagtattttgtacaaagatttctacccaggatgttatttttatatactacgaaccatactttgtaatagtttataggctcttcaaactgatgataagcctctataaacccctaattaaaacggttt

SEQ ID NO: 39063 - DNA, 187 bp, Gossypium hirsutum
  Clone ID: LIB3146-041-Q1-K1-A4
gtttattttgatttttatgttagaatttcaagggtaaaggtatgttaaacaacttttggtaagcgggtttaagccaaaatgagtaaaatggcttaatccggaaaaaatattattggtcataactatgtgttagagggagaatttgatggtgtcattaaaggggaaagttatccgcctgtcctaaaac

SEQ ID NO: 39064 - DNA, 290 bp, Gossypium hirsutum
  Clone ID: LIB3146-041-Q1-K1-A5
cggacgcgtgggttccaattaaaaaaaaattatatataaaaaaaaaaaaaaaaaataaaaaaagagagggtttaaacaaaaaaaaaataaaaaaaaattaaaaggtaaaaaatggttatttgtaataaatatggggctgcccttcgcatttagaattattcccccccttccaataaatttttgctttgataggaaatcttaccaccccctgtgatttgtaaaaaaacaaaatgtccgttttggattaaatagccaatgtaaaaagcaccacccatcggaaaaaataaaaa

SEQ ID NO: 39065 - DNA, 284 bp, Gossypium hirsutum
  Clone ID: LIB3146-041-Q1-K1-B1
actagttctagatcgcgagggccgccctttttttttttttttggtacaaacaacacttgatcatctctaaagatatacagcattgcacacattccccttggtatgggttagatcttgcgaatttgtcagattgggtttcattacactagctaaaatgactactgtccagtcacgggggctgacaaaagaaaaggatagctgagctgtaaagatccacctgaatatacctcaaaagaaagcagctttcatggggcggactttgctattatcaagcataaaaaggg

SEQ ID NO: 39066 - DNA, 394 bp, Gossypium hirsutum
  Clone ID: LIB3146-041-Q1-K1-B10
aggagtttgattttagtcagttaaatcgatcacttctgcaggatcgaaggccttctgatagggagaagcttgaggcagaattcaaacaaaaaattgatgctctagtgtcggaaattgaaagaactgctcccaatttgaaggctcttgaccaatataagactcttcaagagaaggaaagagatgtaactgaagagtttgaattagccagaaaagaggagaagcaagtagctgatgaatacaattcagttaagcagaagagatatgagttgttcatggatgctttcaaccacatttctagtaatatcgataggatttacaaacagctaacaaagagtggtacgcatccattgggtgggacagcatatttgaactttaaaaatgaggatgatccttt

SEQ ID NO: 39067 - DNA, 234 bp, Gossypium hirsutum
  Clone ID: LIB3146-041-Q1-K1-B2
aaaaggaaagggtcatgatcgttcatcattcataataatcttctcatacacacaaacgaacaaatggagaaaatagaaaaagagtgaagtggagacaaagctattagggctggtccatttgttggagcacttgcagcacctatatatcatcagtacatccttagagcagcagctatcaaagctttgggatccttacgcagcaaccccaccaactaaaaaaaatcaacccaaata

SEQ ID NO: 39068 - DNA, 422 bp, Gossypium hirsutum
  Clone ID: LIB3146-041-Q1-K1-B3
cccacgcgtccgctattaccacttgtataaccctttataccctttggtaaaacctcgtgcaaattgtacaaatttacataaattccaggacgaaaaccgaacggaggaagaaagagaatggatgggggagaagtatttgcttcacttctttgagtatgaaactgagaaggaaaaaaagaagtatacaatatggggtttaactgctggggttctgataagagctgcttcattagtttaccagcaacctcctgcttttttggaacaaaatcccaagttcaagttccctaaaatcgttgacagaaataccgtcatgcggtaaatgaaagtatgcgtagtcggttgaatcataagtgaagtgacaaaagatgtatgttcgagtttttagttgatattagtctcgagatcgatttctagacaatctt

SEQ ID NO: 39069 - DNA, 320 bp, Gossypium hirsutum
  Clone ID: LIB3146-041-Q1-K1-B8
gttttctccatgacactggaaggcagaagtttctcgattcatcaaactttcaggttttattgaagcccattgtttctcagcttgtcattgagcctccaacttccgttgaagagcaaaccgatgtaccgtctctgaaggaagtagatgacttgctggttgtttgcataggtcagatggctgttactgctggaactgacctgctgtggaagcccctgaaccacgaggtattgatgcaaacacggagtgagaagatgcgtgctcgagtgttggggttgagaatagttagggaatttctggagaaattaaaagaaagatatttg

SEQ ID NO: 39070 - DNA, 414 bp, Gossypium hirsutum
  Clone ID: LIB3146-041-Q1-K1-B9
cgcctctcttcttcccaaaattctctctagatttcttccttaacatttatccccaaatcaagtcaagcatccattcacccttcatcttcatctccttaaatacagtaaaggttgcttctctttggctctttggacttatgcaaaaggctttccctataggttggagataaagtgcaaaagggtcaggtgttttgcatcattgaagcaatgaagttgatgaatgaaatagaaatgaaaaatcattgtttcaataagctgatcaatcaggaaccatagtcgagatccttgtagaagatggcaaagcagtcatcgttgcctctgtttgtgattgaaccttgaaataagactgtcgagtagcaaaataaaaggtgggaaggataggcaagcaagcaagtttgagttggtgggattttt

SEQ ID NO: 39071 - DNA, 425 bp, Gossypium hirsutum
  Clone ID: LIB3146-041-Q1-K1-C5
gatggagaagattcatcgattaaaactctgtagtggatgggaattttttaattttcaattatgtcggtggttgtgtgttcgatgtgaagatatatgagtttgatgcttgtgagaagagcataccttatgtggtgtcggaagatgaagaatcagagtcagaatcagaatcagaagatgatgatagtaatagcgatgatgctatgaacgatgaaggagctgactctacggaggttgaggatgaggagatccatccagaagattatgttcaacatttgaatccttattttgtggtgaagaccacaaagtcttcacagaggacgaacgaactgtgtattccaactggtatagccaaagattttggagtgagtttagaagacggggagaaaattacatttgttgacccatacaaccggaaaagcattggg

SEQ ID NO: 39072 - DNA, 425 bp, Gossypium hirsutum
  Clone ID: LIB3146-041-Q1-K1-D6
cccacgcgtccgaaaaaagccacccaagggccagctcatttctttctttcttatttatttagttggattttttgcaccctattcatggttctgctcctgatattgctggacaggacaaggcaaacccgcttgcaacaattctcagtgctgcaatgcttttgaagtatggcctaggggaagcaaatgctgcaaacagaattgagaacgcagttctggatactcttaataggggtttccgaacaggcgacatatactccactggaaataaactagtcggctgcaaggagatgggagaggaagtactgaaatcagttgactcaccagttccaactgctatatgaataaaaaacagctgagtaccaaaacaggaggcctccatctgggttagccattgttttctcttcttttctgagttctcaaagctc

SEQ ID NO: 39073 - DNA, 377 bp, Gossypium hirsutum
  Clone ID: LIB3146-041-Q1-K1-D8
gtttaatccatttggctcaccctccaagcatcaatctccacggggttcttggtcaaatccttttcgatgcatgtgttccgaagaacgttgaaggctgggatctaaagtcatcagactcctcacgcaaacacccatatacttctcggcggaattcccatttcaatccaatcaaatgcattcgaagatccaggctataaacatattctgcttttccagcttgaagaaggaatgctttgaagtggggcatagagcacaatgaaactcctaaaaggataaaaaaaagaagggggcaatgtgtgatttattaaatttctgttttgtggaacaataaaaggttaattctatgttttgagctgttagacccgtgttctaacctt

SEQ ID NO: 39074 - DNA, 304 bp, Gossypium hirsutum
  Clone ID: LIB3146-041-Q1-K1-D9
ctttgacgccattaataataataataatagtaatagtaataactcagacatggcattgatattattgcagaatagtagtagagaagaagggaataagttgaacgagttcttgaattcgagttcagattgtgatattggaatatgcttatttgctaagtgaaggggaagaaaatgaagagattacgatgatgatgaagaggcttttattgcttattattatatcgtttgatgcataatgaagacatatttttgtaaaaagaaaaatagttgtgaaatgagtgaagttctctccatttcttgctcg

SEQ ID NO: 39075 - DNA, 422 bp, Gossypium hirsutum
  Clone ID: LIB3146-041-Q1-K1-E8
acctagtatgccagtatggtggagatggtactattggatttgtccagtatcttggaccttgtatggattgcttgtttcacaatttggagatataaacgaattgcttgaagatggaaacaatgagacagtgaagcagcacttgagaaattattatggtttcaggcatgattacctgggatttgttgctgctgtgattattagtttcgcagttctctttggaacaatctttgctgtggccataaagatgttaaatttccagagacgatagaatttttttgttttattcttataaaatcaatgctatttgaattttatgcatttattacaaggtccaaattctgtcattgtaataaaaggttttttcttgtatgcaactatgaaccaatgtacacctttttagatataaaaagtttatggtttga

SEQ ID NO: 39076 - DNA, 332 bp, Gossypium hirsutum
  Clone ID: LIB3146-041-Q1-K1-F12
cggagatacggccggatgcggtggagaaagtggcgatagtgagtagtggattgtcttatgcagatgaacagagggatcaacagttgagaacaattggatggcatccgtcggagattttggttccgaagaaaccagatgatttgaggttattggtgaatttatcaacgtttaagcaaagtactctcaattgggtccctgattttttgcttcgacagttcataacggtatgtttgatgttccttagagttaaaattatggtctattttgattttagtccctctactatgctaaaatttaaatttaagtcatttcattttaatttgacattattt

SEQ ID NO: 39077 - DNA, 325 bp, Gossypium hirsutum
  Clone ID: LIB3146-041-Q1-K1-F3
gctttggctaatattcaggcagctcagaggcgtcctggttcagatccagtttcacaggctaaaccacatgctttaacaggtttgagacctaacagcacagtgcaggcggacatagatgaatacgacgatttgtggggttctatagcaccagctactccacaatttgcttatagaccattgaatgtgaacacagctggagcacatgatgatgatgatccctgggcagatattgctggtgccgctacaacaaccaatgttaaagcttcatcatcatgtagaggctgaggaaatagagcaggtgctgccatattgggtgcacagagga

SEQ ID NO: 39078 - DNA, 239 bp, Gossypium hirsutum
  Clone ID: LIB3146-041-Q1-K1-F7
aaaaaaaaaaaaaaaaaaaaaaaaaatttttttaataaaaaaaaaaaaaaaaaaaaaaaagggaaaaggttaaaaatattatggattcaaaaataataatcatgggcttgcgacattataagttattttttagttgaagctaatttcatttcctctgtccaccttatttactccgttttgatggggtgaattctttgggtttcccatttcattcgcctacaagcaaaaacccttttttt

SEQ ID NO: 39079 - DNA, 200 bp, Gossypium hirsutum
  unsure (1)..(200): unsure at all n locations
  Clone ID: LIB3146-041-Q1-K1-H1
taaagcatttgatgatgatgacactgggtggtgctgatgatgtcgatatgccatctttggaggaagagggcaatgaagaaagcaagatggaagaggtcgactgaacagctaataaatacgtaaacactataaaaatctngtcattagtacatatacctacaaagctcgtcgctgagtgtcgggttctggtgggtgtctag

SEQ ID NO: 39080 - DNA, 364 bp, Gossypium hirsutum
  Clone ID: LIB3146-041-Q1-K1-H10
cccacgcgtccgcggacgcgtggggccggctatgactccggttaagtccacaccaagctttgctgtttctacacgaggatataccatgtctttgtttggtttgcttggagctgtggcactctttgtttaggtcacatcaatgttctctataaattttaaatctttagattacgctatttattttgtgtattaattttttttagtgtccaattttctctctctagtggttcattattagttttttttagatttaaattggattttcagctctttggtagcattttgacttgcatgattgaataaagagagagtttatgattcttgtttttgttcgtactctaataattagtgttaattatttctt

SEQ ID NO: 39081 - DNA, 216 bp, Gossypium hirsutum
  Clone ID: LIB3146-041-Q1-K1-H12
gtggtcctttccccccgtttccttgatgcaggatttcagctttgtgaaaaggcataactggatgatttatttcactattgcgaatttgcgatcaagatatctaatggttctgttacgatctgtcacatttaggggcagctgagggttctacgtacatcttttaaaatcaatttaaacatacatgggttttcagatcacactttttagaagactttt

SEQ ID NO: 39082 - DNA, 204 bp, Gossypium hirsutum
  Clone ID: LIB3146-041-Q1-K1-H5
gtcagacgttcggttctagaatacgcaagggccgaccttttttttatttaaactgcttccgagggccgtcatgaaatttgcgaaattcatagatagtcccaccgacagaaaatatctgaagtgtgtgtaacaagtctctttacttccaaaccctaaaattctatagcgccaggaaataacgccgcttgattattttcattcaac

SEQ ID NO: 39083 - DNA, 472 bp, Gossypium hirsutum
  unsure (1)..(472): unsure at all n locations
  Clone ID: LIB3146-042-Q1-K1-B1
cgnntccgcagaatggggagggangtcttgaacannagtgaggataccaagaaaattcaatgccgnngttctcnnacaccagttgcgactttgggnngtgaggnnattcaacnntgtggacccannagaagctatacnaattnnngtccagagnccannggtaatnncaatcccanttacatannaatcaagnnttttcggggcccaatcacangnnattttgtacatnnnttgatgtcnnacaaaccnnntagcagcttcttaaaatctaaatgcttgtctaattaccattgcnntacatttactgcctgtannaagtggtatnnngtatggtatggtattggtatgggtaatggtattgcaaagtannactaacttcttcttacttcaagaagtaacaaataaggccttctttcaacttgtaaatttaactttaagggttttttccctttttttttttataaacacaaaa

SEQ ID NO: 39084 - DNA, 385 bp, Gossypium hirsutum
  Clone ID: LIB3146-042-Q1-K1-B2
cggacgcgtgggttctaggggcattagtaagtgggaagactgtagatctcctcggtcgtaaaggcaccatgtgggttttgtacatattctacatagtgggatggcttgcaatagcatttgcaaaggttccttggttgcttgatgtaagaagattattgctgggattcagcaatggaattgctggttatttgttgccagtatatcttgctgagataacaccgaaaaaccttaggggaagatttactgctggagtacagatgatggctatcttaggcctttcaacgatgtatatagttggtcctttcatcaattggcgcatcttggctctaatcggtataattccgagtcttgtacaactccctcttctaatctacattccagagtc

SEQ ID NO: 39085 - DNA, 226 bp, Gossypium hirsutum
  Clone ID: LIB3146-042-Q1-K1-B5
ggctctaacaccttgcagatttccctacgatgaatgtaccagaacactagacgagtattagatatggatgtgacatcttgaattatttgttataaatataactaaatattgatgttgtatgtggctctgataccttgtagatctacctacgatgtatgtcttggaacactagacggagtattatatatatgtaaatggaagtcatggtgtttgacacaaatgtcca

SEQ ID NO: 39086 - DNA, 366 bp, Gossypium hirsutum
  unsure (1)..(366): unsure at all n locations
  Clone ID: LIB3146-042-Q1-K1-C4
agcttatgcaagtgatgatgacgaaaatggtatgggagattttttgaacgaaatggcagtgatgatgagccagactaaatctaataagaatggagaggagagctttgaggaattacaggaattgtttgaagaaatgttccaagtggacattgattcgttcgggtctaatggtcagccaaccacgtcctgttcttcttcatcttcgtttgcatcgtacggtgaaagttctggctccaacaaacggaattccgctgatatgagctctggtgagactatgccggagagtggttctagtttcaatgtacaatttcacggcttctgcgtgggagtggaacacangacagatatgaggcaacagagaggagc

SEQ ID NO: 39087 - DNA, 390 bp, Gossypium hirsutum
  Clone ID: LIB3146-042-Q1-K1-C6
cccacgcgtccggatgagcattaacgagatactgagggaactaaacatgaagtttgaagcagccagtggtgcaaccatggtgataacagactggaggcggttgggtctagtggaagacatagattttggatggaaaggatgtgtgaacatgataccattgccgtggaacatgtttgggtacgtggatttggtgtttttattgcctccttgcaaactggaccaatcaatgaaaggcggagctagggtgttggtttccctacctagggctgctattgccaaattcagggaagaaatggatgctctcaagcatggtgacgatgctgctggccattagttgaacttgtctaccgatgtatgcatatgttgttttaacattttaagtagataatg

SEQ ID NO: 39088 - DNA, 354 bp, Gossypium hirsutum
  Clone ID: LIB3146-042-Q1-K1-D3
cccacgcgtccggcgggttccgaaaattccagcattactgatagggtgttggatagggttttttctaatgctgggactggttttgtatctgttgttgttggtagctttgctaggaatctggttttggggttttactcaagtgttggagaagtggagggtttgagtgggaataatgggtcatctgatgtacccaaatggattaatgtgctttatgatgataagtctaaagagctaattgcttgttggcattaaagattaataagcacaagttgtgcagtctatcttgacaagacaatggacattaatacttattatgaaatttttgctgggatgaccaatcccaagccataaaaa

SEQ ID NO: 39089 - DNA, 397 bp, Gossypium hirsutum
  Clone ID: LIB3146-042-Q1-K1-D6
atttaagtctgtgaaggaaaaggagttcaacgaattgaaggatggtgaggtgaaaacattgaagtccgtggaggagctaaagtttgccaaagatgtggaggaaatgaaatcaaaactgaccgaccttgaatctaagctaggcgaggctgaagctactatatcaaaactgaccgaggagaggaggttaagcactcaagagcgaaagaccttagaagaagagctggcgttattgaggaaaaaggcaaatataaaaggagctaaagtgggataccctctgttatttgtttggatggtagcactcatctgtgtctacatcggatacttgttggcaccattgacaaagagcaaggcatccatgtcagatctttaccagcaaatgcaataatcaaatacgaga

SEQ ID NO: 39090 - DNA, 393 bp, Gossypium hirsutum
  Clone ID: LIB3146-042-Q1-K1-D8
cggacgcgtgggttttgttgctacccaggatgctgatctccgaaagaaactacagaaggtacctaatgttcctttaatatttggcctacgaaatgcccttttccttgagcaaccatctaagtctcagcgtgattttgtcaaatcttctgaagaaaaacgccttcatttgactgagaaggaatataaggcattagagaagaggacgactagtgtttcagcaaatgcggatgaagaagattcaggtgatgaagaaggtttgggtcatcacaatccagggttgcaggcacatgataccaggaattattcagggaaggaaagagatgtaaaggatagagttcgatttaaaagaaagaaagctaagggtccaaatccgctttcagttaagaagaaaaa

SEQ ID NO: 39091 - DNA, 244 bp, Gossypium hirsutum
  Clone ID: LIB3146-042-Q1-K1-E1
gtttaacccttccaaagaccagaaatctgttaagtttcagttgcctgaggatgatttagatggaagtgatgatgattttgatgatgagttcgatgatgaatttgatgatgagttcgatgatgagtttgatgatgattttgatgatgaggaatttggtcatggacatggccatgggaaagggaatcatcaaatgcaaaacaagatggtagctatggggggaaaagggccaaatggcatgattaat

SEQ ID NO: 39092 - DNA, 250 bp, Gossypium hirsutum
  unsure (1)..(250): unsure at all n locations
  Clone ID: LIB3146-042-Q1-K1-E5
cccacgcgtccgcttgaattcccgcactgccatgccatatggatgtcctgaaactgagtataactaggtggtttcatttttagtagggacttgtttattaagtggtttgcattaatgtgaaatgtatatgttttgtaagtttacattgttacgtatctttatatgtagtttgagttgttgatgctaatgcatccaataacttgttttcatctctcctacacgangncaccatagccgccgacgtctcggg

SEQ ID NO: 39093 - DNA, 329 bp, Gossypium hirsutum
  Clone ID: LIB3146-042-Q1-K1-E6
atcagaataagcccgtgctttctgaaccttctcagatggaattatcacctcctgcttctttgaatcctgctatagtttctactagtgacctagataatttggactcgcaggaaccatccgagggaccatctaagcaaaccacaccgcgttgccctgtatctgagctagaatctcaagcaaactgtaaggaggcagatcaacctagcccagtctcagttatagaagctccttttacggatgatttatcatctggttctgaatgcttcgagagtattagtgctgatctccatgagcttcggatgcaacttcgacaattaaagctagaatct

SEQ ID NO: 39094 - DNA, 348 bp, Gossypium hirsutum
  unsure (1)..(348): unsure at all n locations
  Clone ID: LIB3146-042-Q1-K1-F1
gaaaatcatttggtttttgaagagcccttaatagagcaaattggtgggctttattaaatctggtgggaacttattcttaaaggggcccaccagtacttccttcttaaaaatgtgggatttttatggatcacacgcttggtgtgtacccacccccaagaaaaagggcgcgaggggaagactccacagggtatctatcacaaaaaaaattttgtgagtgaaaaaaagcgcgtgacgagaatatttttctcacccgatatttgatgttctccaaaaaaaaaaaaaaaaaaaaaaaaaaaaaaaaaaaaaaaaaaaaaaaaaaaaaaaaaaaaanggggggggccgcctttt

SEQ ID NO: 39095 - DNA, 387 bp, Gossypium hirsutum
  Clone ID: LIB3146-042-Q1-K1-F2
cccacgcgtccgcttttttttttttcttttttttcttttttttctttttctttttcttttggtctttctttttttttttttttttctttttttctttttccaagggaaacatggaattttttttcataaaaaaccctcccctaaaaaaaaccctagataaaatcgtttgggtttatttatgaggccttaacagggcccaacatcccaatctttcacataaaacccaaaacccccattttcataggagagcttaaaacccccccccaaaacccaagacaggggtgcagaggggacccccctaaaaatttgaaaacacccaaagcccttccttttccaacctttttcccaaaaaaaaaaaccctttccggaccgggggaaacccctctt

SEQ ID NO: 39096 - DNA, 400 bp, Gossypium hirsutum
  Clone ID: LIB3146-042-Q1-K1-F4
aaaaaaaagaaccttcctccctccctttttttctctctgcagaagccttaggccgatcagagctccagcgaaccgctgccgcgaccaccgccctcgaccgctgtgcacagttgttggagctcggaaagaagccccctttttagtcaatcggagaataggtaataaatccctctctttttttgtgtgtgtttttgatatatataggtatatatatagtagtttcgaaaaaagaaaataaaaataaaatgaagaggtaccttagcacgtctcaaactttggattctctttcgaaattctttttttttttggatctttctctggtttttatttcaaaaaatcccccttttacattgaataacgatggctttttatagtcgattatgttacatttgttgctact

SEQ ID NO: 39097 - DNA, 342 bp, Gossypium hirsutum
  Clone ID: LIB3146-042-Q1-K1-F8
gccgcagcaacagcaacaacaacaacgcctgctgctgctgtttgcatcaatttataatattttcgattccttaaaagaaaaccctttttttttattgctgcctttttagccgtgatgggttgtacaggatccaagcgaaccaggggtgacgaaaatgtgaagaaaatcaggaaaccaaaaccttggaaacattccgaaccgattacgaggacacaacttaagcagatgcgtgatgaattttgggatacagctcctcactacggtggccagagagagatgtgggatgctcttcgagttgcggcagaatctgagctaacccacgctcaagcaattatcaatagt

SEQ ID NO: 39098 - DNA, 393 bp, Gossypium hirsutum
  Clone ID: LIB3146-042-Q1-K1-G1
gcaaaatagaggatcaagattcgagtttggatccaatggaaaaagcagcagattcatctcagacgcagactactggaaatgatgtgatgatggaagaaacagggaaagaagacggcgccaggactcaatccgaggctatatctagtgaaaatgaaagggaaagtgcagagaaatctgaagcaggggtcattgttttggatgattaaattaaaatgtgatataatagatgatttattgagaggctataatattccttacccaaaacttgattttcttttaataggtaccttctacacaaattctttcgtgctttaagcaaggttaaaggctaatggtggataaagaataatttggctatattttggttaaaatttttaaatggtcatttaccat

SEQ ID NO: 39099 - DNA, 401 bp, Gossypium hirsutum
  Clone ID: LIB3146-042-Q1-K1-G3
caaaactctaggtataattctaagtattcaacatcttttttttaacacaatccatggaagttccagttatcaacagaataagcgattttgaaacggccggcacaacccctctaaactacccacctttcaattccccacatcatttgctttctgggattcagaaaatctatgaaacccatagcttttttaagttgggagctttgattcttgccctaatagcttcgctatctaccattatcaataacctaagaactttattattggatttccgggaccccattctttaccattccaacctttttttttttaatcaaatttcgacccttacacttatttcttgtcggacgacgaaccaaaatatgaagaactggcgtttactttcaagacctggcgacaaggtg

SEQ ID NO: 39100 - DNA, 392 bp, Gossypium hirsutum
  Clone ID: LIB3146-042-Q1-K1-G6
gctccatattactgactgcttaaagctgagttgcctattttcaaacaccaagtttcccataacgcttaaatatttgagaattgggggatgtccaatgttggaatacatagccgaggagttcgaggaaagtgcttgtcttgaatctattaaaattacatattctggaattaaatctctaccacgaggactagacaagctcaaccatctccaggagattagtttgggttcgtgttcaaatttggtttcttttgaagaaagtgggttgcccagcaccagcttcagagatatcgaagttattgattgtggaaattttggagcccttcctaagtgcatggccggcataacctcccttcgacgattaagtgtgagcaactgttcggcagacatatcat

SEQ ID NO: 39101 - DNA, 344 bp, Gossypium hirsutum
  Clone ID: LIB3146-042-Q1-K1-G8
taagagatgacagacagttccacttggattatcctggggcgtgtactatttctacagaacagggtcttgaactgaagaagcaaataggagcactggcatacatagagtgcagctcaaagacacagcagaatgttaaagctgtatttgatgctgctatcaaggttgttcttcagcctgcaaagaaaaagaagcaaaagaagagaacaggtatatgccttgttctctaaccagaaattcccaagtagaaaagccagtgtgaagctgacaatgtgattctcttcttataattctgtgcattcttgatcttgtttattacaaatctttttcgagttgattttgagtgc

SEQ ID NO: 39102 - DNA, 173 bp, Gossypium hirsutum
  Clone ID: LIB3146-042-Q1-K1-H5
ctcctccttcctccagctcctttttccttcctcctcttcatcatcccctgcttccgtcgggtcgacccgttctggcagtggcgaccccgttttttttcaatcaatttgccttaattcaaggtaatttaagcgatctacgttaacccggggcgcaaatcaagttcggaatcaaa

SEQ ID NO: 39103 - DNA, 227 bp, Gossypium hirsutum
  Clone ID: LIB3146-042-Q1-K1-H6
tttgatcccaaatgaaaccaaaagcagcaagatggataacacagttgtggttgatggggctgatggtgtgggtggagagaaacttgaagttttgaaaagtatgttaaccagtttagttatcgaggttcgtaatactggtaaaggtgggggtctattgaatgatggggttggtgccgattatgtacagaaagagaaggttgttccacgtggattttgttcaatgatgt

SEQ ID NO: 39104 - DNA, 423 bp, Gossypium hirsutum
  Clone ID: LIB3146-043-Q1-K1-A1
cccacgcgtccgggactggcaaggtgctccagcaagcccaagttcatacactgtgaagaggattttgcgtcttgaaattcctgttgatacatatccaacagtaagccttatatgaaaaatgctagtgctttggattaaaaaatttattattttctaagatttcaattgaatgcacaaacctttttatgcttattgattacaagactctgcttttcctttgtttttagttcaattttgttggtcgacttctaggccctagaggcaattcattaaagcgggtagaagctactactggctgtcgtgtatacattagaggcaaaggatcaataaaggatccggacaaggaagagaagctgagaggtcggcctggagatgagcacctgaatgatcctctccacattttgattgaggctgatttacctg

SEQ ID NO: 39105 - DNA, 264 bp, Gossypium hirsutum
  unsure (1)..(264): unsure at all n locations
  Clone ID: LIB3146-043-Q1-K1-A2
cgagctcaacgttatgtttttgtaatagatattttacgcaaatgaattcaatcttctgagctattcgctnttaaaaaaaacagaaaaaacaaaaacaacaaaaaaccaaaaataaaaaaaacaaaaaactttttattaaaaaaaaaaaaaaaaaacaaaaaaaacaaaaagaaaacacaaaccggggcggccgctttaaagaaccaaactttacttccccttgcatgcaaagttatagcttttttataggctccccaaaaccca

SEQ ID NO: 39106 - DNA, 397 bp, Gossypium hirsutum
  Clone ID: LIB3146-043-Q1-K1-A4
tgggaatatttacctggagcgttaccgcaatgagctccgcttgtatcgccggttcttatgcggattccggattccattgaccattcttggaccgacgtatgcggtggcggttgtggattcgccatggccatttctggttgtttttcctgtctctctctttctcgttggctttcctccccttctttccctgattttaaattttatttcttataaaaatattttaaattttcgataatgtaattgcggcttttgggctggttgttagattttgtacattttgatctgtctggttgccaagaaaatgtaaaaggactgggcgttataattagattttttcgttggtttcatttttggtttgccatgaagtcaactcacttgactcaattagctatgtgag

SEQ ID NO: 39107 - DNA, 390 bp, Gossypium hirsutum
  Clone ID: LIB3146-043-Q1-K1-A9
gcatgggagaaagagagaggggttgaatttttgtatgatggtattcgtctgctttctatgcttgaagagtacactatcttacgacaagagaaagagcaagagcgtcgtaggttgcgggaccagaagaaacttcagggacagctgatagcagagcaagaagcactgtatgggtcaaaaccaagcccatcgaagccgcagagcgtaaaaaagggtcctaggtattcaactggaggtgcaagcaatagaagagtctccttgggaggagccatggttccagctcataaacctgattctcttcactctgcaaaggctactcccaaaacacgtcctagcaagaaaagtgaccatttaaatcatcgccaggacgatggcattcccgctttctcagct

SEQ ID NO: 39108 - DNA, 371 bp, Gossypium hirsutum
  Clone ID: LIB3146-043-Q1-K1-B3
cccacgcgtccgggcaactcggacgaaaacacttctgggggaccggcatggggaccaacgatggcacctgttcgaccatcagcagctccatacgacgatcccaagtaccatccagatcaatgttattttaaggtgaagcatacatgagccgttctaaggactcattgcaggaggcacgggtcatgcgcaggcgcgatccaagagttaaaatgtcgtggaaaaatggacagtaccgctacttttcggatgcgagctcatccgtcggtgctagcgccaacacagccaccgagtctactgtcggaggatcaaggcctggatgtactcagttgcgtgaggagagagatgtgggtcatggtctgacttaaggttac

SEQ ID NO: 39109 - DNA, 133 bp, Gossypium hirsutum
  unsure (1)..(133): unsure at all n locations
  Clone ID: LIB3146-043-Q1-K1-C10
gccatgccaaagaaaacttatgctgtcaatttttcatttactgacccacnagtcgatcagcggatcggagaaaatacacacctccccgatttcgtcaacataaaccgactaaatacttctacaaccagatatt

SEQ ID NO: 39110 - DNA, 421 bp, Gossypium hirsutum
  unsure (1)..(421): unsure at all n locations
  Clone ID: LIB3146-043-Q1-K1-C3
cggacgcgtgggcgattataagagaaatagcggtaagcttcctcaactggtcccagatcaagttctcaagttaaagcaacttactgtccttacacttgccgagacaaaaaagggtctagttagaggaaagctggatcagctgcgaagatattttgaggttcaatttgctgctgggagggatttgaggccaggacaacttggaagtatgatacaaacactatcaaactggttggctacgtcagataacttacttgtcacaattcaagacaagataaaatgggctgatacaatgagtgagttggacaagaaacaccgaaaggagcttgaagatagggtgatggaagtaaggaaagctgtctccgtcaagtatgactcggccattctagggtccattgagaaactcanaccacccagaggggag

SEQ ID NO: 39111 - DNA, 194 bp, Gossypium hirsutum
  Clone ID: LIB3146-043-Q1-K1-C4
gccttgcagcctctccgccagtatgatacaacccctacaatgtctttaggccagggaaaaagctacagacttacacaagaaggatgcaaggagggaaaacaatgtgcagtcgtttgaaaagtttgccaggtcaggcgcaacctatatcaagccagaccttacttgagctttgattagagagaggagaagaagag

SEQ ID NO: 39112 - DNA, 415 bp, Gossypium hirsutum
  Clone ID: LIB3146-043-Q1-K1-C5
gaagaagaaaaagggaaagataattaatatatcatcagttgttggtctggttggcaacatcgggcaagctaactacagtgctgctaaagcaggtgttattggtttgacaaagactgttgcaagggaatatgccagcagaaacattaatgtcaatgctgttgccccaggatttattgcatctgatatgacagccaagcttggggaagacctcgagaagagaatcttggaaacaattcccttaggaaggtatggtcaaccagaagaagttgcaggactggtcgaatttttggccataaaccctgcgtctaattacatcactggacaggtgttcaccattgatggaggaatggtcatgtaaaattgcattaccgtcactcgataagctgctatatcgccactagaaattcgttagttt

SEQ ID NO: 39113 - DNA, 353 bp, Gossypium hirsutum
  Clone ID: LIB3146-043-Q1-K1-D2
gagagaatgaagaagctgtaacggaaccatcatcttctccttcagtctggtaactttctttcctttccatctctgcgtttccctttttttttcctttgattgcagaggaaacctaggtaagctgtaaagggatttctattcccttccctcctcacctttaccctcacaaattctcacctcaaaacggcagccaatccaaaagctatttctgcaaagcaaagtcaaggcttcgattattcactttcatcatacgctacgcgcccttcaagttttcttaatcttcgcatctttcgccagctccactgtctcagatctccggcccaactgtttcgctcactctctcattttgcaat

SEQ ID NO: 39114 - DNA, 373 bp, Gossypium hirsutum
  Clone ID: LIB3146-043-Q1-K1-D5
caatttagttgatgcttccaagtattgctgttgcaatgcggcttatggatgttgctggtcgaaggtagattgattttcttttccgtgtatttggagtatcatatatccgagttcatgctgaagctctatcaacgtttgttctttgcttcctgtgcatgcaagagtttgctactcactactgtcccactcctgataatatctctccgtgtattagtcatcggaaccatcgccaaaatgcgtaacgtcacgtatgccgcattatcaaccattagagtcgtgctctgcttatttttctttgttatgagggtttggtcctatcccaaacatactctgcaccgagatcttcccaacgcgtgttcgtggcattcgcatt

SEQ ID NO: 39115 - DNA, 257 bp, Gossypium hirsutum
  Clone ID: LIB3146-043-Q1-K1-E12
cccacgcgtccgccaacgttctcttccaatataatcttattacctgacattcgactttaggggacagagtgatttatttccgaaccggactctctcatagcaagaaacggaggatccttctatctcacataggagcaagatgaggaacattgcaataaaactgacgggagatatggaagaatcaaacattgctattgctgaatgatcagcggatgtttctgtaaatgcgtataatatattatctgcaggtaatattt

SEQ ID NO: 39116 - DNA, 356 bp, Gossypium hirsutum
  Clone ID: LIB3146-043-Q1-K1-E7
cttcggtcaaaagttacccctcgcatgcctgtaatttcagagaaaaaacctgggaaaaaggcgggtgttaaaatgggaaaggccaaggagttttccgtgatagacttcatgactacagttgtcccgagctggaagaggtacaacctgtacgacctgcatatgcagcaggcggttaacgtccacctcgatatccctgttcatctgcttttctgcgtaggtgcctaagacacaaatgccactgtccatacatttggaactgctgcagctgcaaagaatacggctccaacagctgctattattgctgatgttcacaaaaccaaagacgagttgcttgaacaaactgccaacatacaaca

SEQ ID NO: 39117 - DNA, 280 bp, Gossypium hirsutum
  Clone ID: LIB3146-043-Q1-K1-E9
ctccaatggttaagcaaatgcaagagaaatttaataagtattgggctttgtaatgaaatgggttgttattattttttatttttttattttggtttctggtttatggacccgggctaaattgggcctctacatgtttaaagcaaaaacttctcgctttcattaaaaaaaaaaaaaaaaaaaaaaaaaaaaaaaaaaaaaaaaaaaaaaaaaaataaaaaaaaaaaaaaaaaaaaaaaaataaaaacaaaaaaaaaagatattaattgatatcaaaaaaata

SEQ ID NO: 39118 - DNA, 426 bp, Gossypium hirsutum
  Clone ID: LIB3146-043-Q1-K1-F1
tgcgatgtttgttcccattggtgccatgctgcctgtggcattcagaggaatcttataaaaccaggacccagcataaagggaccatctggggctatgcaattccattgtattggctgtggccatgcttcagaaatgtttgggtttgttaaggatgtatttttatactgtgctaagaactgggttcttgagacattgacaaaggagctagactgcgtgcgaaagattttccggggcagtgatgattcgaaggacaaggaactatacgtcaaagctgatgagctttgcaaccggctgcaaaacaaaatgatgtctgcttcagatgcttgcagcatcattatccagttcttcaactactctgatggtttgtcagactttcctacctccggtgcatgttccaaagagttaacaacaactcaagttgacctt

SEQ ID NO: 39119 - DNA, 273 bp, Gossypium hirsutum
  Clone ID: LIB3146-043-Q1-K1-F10
ttttggtttttccatttattatgttcgttataagctccggggagtgggtagcttcgatagcaatcctagacggttataattgaatctactgtttgctgtactccgccaattgggtgcaatatgcactagctactggagtatatgttggccattgggaaggcctgccggttaacccttcataataaatgaaccagcagtaatttacacaatcgagatgactgacgcagcaacggaactaagaaagcagataagctatcatttttagttaatgaa

SEQ ID NO: 39120 - DNA, 330 bp, Gossypium hirsutum
  unsure (1)..(330): unsure at all n locations
  Clone ID: LIB3146-043-Q1-K1-F4
cccacgcgnttcgcggactccgtgggcgagacgtctttgtttatatgtggtaatctcaacgacatcacgagcagtgatctaatatgatacaccttgaaacaccttgtatgaaaaaacatgaatctctactaccatgacacatgtcgacactaaaacacctatataaaatcctatgagagaactgaataagctggtacatgaagcgaagataaaagacacagatttatctaaaggctgccctgaaactataagaatatcgcatagcgttcatgatgtctctgacataaaaatgaaatggccgctttatactcgcgattgcagggacgaaat

SEQ ID NO: 39121 - DNA, 253 bp, Gossypium hirsutum
  Clone ID: LIB3146-043-Q1-K1-F5
ggcacggccaacctttggattggcgtttaacttggaaacccccttaaatttatttcaaaaagaagaccactggcgggcttttttttaaccataccttcccctttactggtgcggaagaaaaactctgccccaaactcgccatgaattcaacctcactgcgcagggagtctatgtgggcggatcaaaaaggacaccctcttaagtcacccacggttccgtatcctttaacgtgtttgggccacttccttaccgg

SEQ ID NO: 39122 - DNA, 411 bp, Gossypium hirsutum
  Clone ID: LIB3146-043-Q1-K1-G10
gcttcgcactcaatcaaggcatctacaagacgttgaaatcgcaaggggctcgagaagagggaagcggtcgaaacaatcgagtcgaagtcagatgaaaggccggctagaagaaccgtcaagcgttcggccttcgagatgtgagatccataggctgcaagtaaaacacacaaactagtgattttattcacataggagcgaaccgagagactacctttccgaagggagcgaagctcatgtcgcaattgcgactgcttcgtgcttgaatcggccgcaaacaaactgttggccatgagccacacatcatgagcagtcctaacatcggtaaaggaggacaagaaagacgggctaatggtggagagaagccaagaagtaagcaagctatcttgctgatcaaaaaccagcacagcggga

SEQ ID NO: 39123 - DNA, 166 bp, Gossypium hirsutum
  Clone ID: LIB3146-043-Q1-K1-G11
agaaataccaagcttaagcatttcatgtttatggtgattttccctttgacaacatgtctgccctggcaagaacgacttgcgacggattttcgagaagcttgacaagaatggggatggcttggttagcctggaggagcttaattggttgcttgagagaatcggagtc

SEQ ID NO: 39124 - DNA, 246 bp, Gossypium hirsutum
  Clone ID: LIB3146-043-Q1-K1-G8
gggccacatcagcctgaaagggcaagggttttttgaaacataaacccggtttctggtgttagaagttagcatttgcgatggaagggttgacactattatctagactttttatctggtgaccattttaatcgacacggccaacaagaggttagcgcttctatatgaaagggagtggtatgtaccagtgcgatagataaacatcaaattgttctgcaaattattaaacttgctagaaaaagaatggct

SEQ ID NO: 39125 - DNA, 307 bp, Gossypium hirsutum
  Clone ID: LIB3146-043-Q1-K1-G9
gatcaaataagagaaaaacaaagcgattcatttcttgtgagtgctaagctacaattctgcaacaatttttgctatactaacaatatcaagatattgtaccattttttttcattgccgcgttattagaacatatgcctagcacaacaaagaagaccatatgatgtggtgctttcttttttttttttttggtatatatctatagaacatggagaaacacattcataaatgtttttacaacgtagttatcttattggtaagcgccattacagtatactaccacctacagagttcgagtttcttagcctac

SEQ ID NO: 39126 - DNA, 389 bp, Gossypium hirsutum
  Clone ID: LIB3146-043-Q1-K1-H10
cagcaggggcctgcgtattttccagattgtttctgggaaaaaatcgagtgactcatagtttgaggttggtattattcatcatgagagactatctggacaagagttgattaggtagattaaagtgcttggttctatggagattcttgtaagacagaagatgtagctgccatggcattagtttgattttggacttagcggctggggaggatattgccttcatgttttgatctattgttcataatggctagcttcagctttgtttactgtttactgtaattaagctatgtttacttaaattacgtgcttctttttttttttttttcaactttcccaggtttccagagttactgatgctctttatgcagtgttgttgataacgagtatagctt

SEQ ID NO: 39127 - DNA, 379 bp, Gossypium hirsutum
  Clone ID: LIB3146-043-Q1-K1-H12
cccacgcgtccggccttttgcagaaacttatatttgatacatgtagaatctttagcccgcacgtgttttgaagtgtcgactctatgatcctgctgcaaattacttgccgttacggtttcctccatagcttaagactactgagcttcttgttatggcagccatgttcaaggttcacctgtgagcctaatgctgctgtgaattcatgttgtgaaattgctagttgtatcccatttttgatgctgggtttatctcaataatgaggattatgaatatggttatggttccttgttaataatttaggcttgtaggcagacaaagctggattctcttaataaatgtaattttcattgatctattatatcatatgttttggtgcttt

SEQ ID NO: 39128 - DNA, 414 bp, Gossypium hirsutum
  unsure (1)..(414): unsure at all n locations
  Clone ID: LIB3146-043-Q1-K1-H3
ggctaaatatgacaaagacactcctgaccgctggcataacattgccaaggctgtgggtggaaagtcagttgaagaagtcaagctgcactatgagatcctagtcagggatctcaaagacattgagtctggccgctacccttatccatatccaaccaactaaagcgctatgagtttactacttactattcactacctatccacaatcactatagataaccaagaagtgaaggccactttcatatgcatgaatcacattcctaaaaatgcagctgtcatgcttttttgttgatgtagttgtggatttaaagaaaacgtggttcttagaattatcatacatgcgcatatccatgacgtccttgtccttccagctccacacacccacaaccncaaagtccttaagcattgaaaactctc

SEQ ID NO: 39129 - DNA, 383 bp, Gossypium hirsutum
  Clone ID: LIB3146-043-Q1-K1-H5
gagcaaccccatttgcttacggctcatgacatgttagaccgaaccgtgcaatggatcccggtcttgtttacgacctaacagttaacgattacttgaacttcttgtgtgcccgtggctacaaccaaagccttttaagtctattttcggacaagccgtatgcatgtccgaagtcatatggtgtaatggacttaaactatccttccatttcggtttctcaactcaatggctcaatgacggttagcaggacagttaagaacgttggttcagcaaggtcaacatataaagcacgtgttagatcgccagctggagttactgtttcggttaaaccatcgacattaaagttcgagaagatcggtgaagtgaagaaatttgaattaaaattc

SEQ ID NO: 39130 - DNA, 395 bp, Gossypium hirsutum
  Clone ID: LIB3146-043-Q1-K1-H6
cggacgcgtgggctcattccccttccaaccttaccatccactacctccaccataagctccttagaattattattgtaatataactatgctagtttttaatatgtaaaactaatgtatgatctactttttcatttgcaaaactaatgtatgatctacttttttatatgtgaacctaatgtattatctaaaaaaaaaaaaaaaaaaaaaaaaaaaaaaaaaaaaaaaaaaaaaaaaaaaaaaaaaaaaaaaaaaaaaaaaaaaaaaaaaaaaaaaaaaaaaaaaaaaaaaaaaaaatgataaaaaataaaaaaaaattccattttggggggggcgttataaaaaaacaatttttttacacaagtggtacccaaaaaaatttttttttttggggtccc

SEQ ID NO: 39131 - DNA, 260 bp, Gossypium hirsutum
  Clone ID: LIB3146-043-Q1-K1-H9
aggtgaccaagcgatgcttcttattgtgtgctttatatccggaggatcactcaattgatgtggaagacttggtgcgatatgctttggcattggagttatatggcaaggttgactcagttgaagaggtgagggttcaagtcttggaagccattgattacctcaaagattcttgtctattattaaaagatacgcaatggtacgatcacctttcatggagctggtatttttagtattttaataagtagaaatgtctaaaacac

SEQ ID NO: 39132 - DNA, 355 bp, Gossypium hirsutum
  Clone ID: LIB3146-044-Q1-K1-A1
gtcacatattccagcctgtccgtttattattttgctgttcctttcgatacacaacagccaggccttggtggatagccgttgcaaaagatatgcaaatattgctatcctgaactgcttcctactgcgtgtgctttcatattcagttggtcagctgtctacatttaccctcagggtctggtattctgaggatcgtcttacccgcatccgaagatgtgtctcccacgcactaacgctgttttgctagacgagggcttgaatgcctttgcacatgaataatctgcaagataactcctgatacccgggataaactgctttgtatgcgataaataatcgatccacgaaccgatttatccat

SEQ ID NO: 39133 - DNA, 414 bp, Gossypium hirsutum
  Clone ID: LIB3146-044-Q1-K1-A2
cgcgagatgcaggcatcgaccgagtttgcagttttttgccgttttggtgcaagactgtcgggctttgggcggtgtgcacgctgagggcgcacatggggcaggctggagaaggcgtacggcgctaggggttggatgcggcgcgaggaaaggagggaaccctagggttttctaatgctgcttaatcttttgaggcctattgggccgtttagagttttgggctggtgattgttattgggcctagggttattgggctaggatttgggtaggttttgtttaattttgtaatgggcccgggtgaaattgggcttctacaacatatataataaatataattacatgttattatttattactatagaatattaattcaaattaaaagtgatataatttaattaaaaaaaaaaaaaaaaagag

SEQ ID NO: 39134 - DNA, 280 bp, Gossypium hirsutum
  Clone ID: LIB3146-044-Q1-K1-A3
cggacgcgtgggtccaatttgcttcaccattatcttacactatattctgtttaattaaatgggacatgtatatactgtttagccgtgaaaactgaatatgagtatgagtgtgatatgaatataagacagaaagggggctgcttcaccatgggggagtctttaattgtttgaggcgaaaaataagatgtaagactgaatttgtcattatgtcatttactaacatgatttttaattagattataaatatatgatgataaataaaagagttaaattttccatt

SEQ ID NO: 39135 - DNA, 412 bp, Gossypium hirsutum
  Clone ID: LIB3146-044-Q1-K1-A4
cccacgcgtccgcccacgcgtccgcccacgcgtccgttgagatccaaatcttgtctattctgctaggttttctggaccggtaggtgaaccaatcaggccatgagttcacctggcagattggtctgtttagttagattaaataaataattaaaaaattcataaaagtaaatgtatattaaaaatttgtggcttatataacgatagaatgtctctcaataaggcatttcttttatatatttaaccagctttctgcaggtaaatttttccttcatcttgcagggacgtgtcttgtgagtacatgaattcatctaaagacattacaaaagaaattcttttatcatgttctcggtagcatcacctattaagaaaacatttcattagcatgtctctcaataaagcatcttttttggta

SEQ ID NO: 39136 - DNA, 375 bp, Gossypium hirsutum
  unsure (1)..(375): unsure at all n locations
  Clone ID: LIB3146-044-Q1-K1-A6
cccacgcgtacgtagacgcgagggtgctgcttgctacacatcatgatcagcagaagcgaccccagctgaattgctacaacacctccaaggcttctctccgtctcaagcctaacttgcttactcttcttcctctgcaaattatttaccaagaagcctatgacgcaatgcctctgactctgtgtggtgaaatcattaattaattcctggtatgcataaaggtagtagcagtagaagtgaattaaagatttgaatcagaaatagatggcggctgatgatgagtgaatagcaactcgattgattgacttccctgtgcgaatgacagctagcattcgggtngaatcacctatattactatctcatgctcatttatttaaa

SEQ ID NO: 39137 - DNA, 283 bp, Gossypium hirsutum
  Clone ID: LIB3146-044-Q1-K1-A8
cccacgcgtccgcggacgcgtgggtgtgcgtggaaaatgagagtactcggtaggtggatgggtcatataaactcgggatctaatggtgtgctaatgggggagggggtgtaggaaacttggtgtgtggcaaagccaggaacaagtgatgagctactacagctgaacataaactttgcctgtaacctggtcgattgcaacgccactcattccggcggcgtttgctattatcccgcaacactcattaaccatgcatcgtacgccatgaatctttattaccagatca

SEQ ID NO: 39138 - DNA, 403 bp, Gossypium hirsutum
  Clone ID: LIB3146-044-Q1-K1-B1
cccacgcgtccgcccacgcgtccgcccacgcgtccgtccacgcgtccgaaaatattgaaatcaaccttctaaagtttctttttttttctctggtgcatatgaaaataaaatgttttttttgtattcaaaatccccccttgaatccccccatttttaaggctcttatagcctaatattacaatatatctactctttttgtcctatttctctgctttgtgtgttcgtttctcttttgcaggtgatggaacgggagtaggttgtggcagcaggctaggaggctactggtacggtgcacatgggcagcggcacgtgtggggagggctgaagtgacctagtacggcgcctaaggttctccctccctccattgctggaaaatattttgtgggctcgggctgttagggct

SEQ ID NO: 39139 - DNA, 372 bp, Gossypium hirsutum
  Clone ID: LIB3146-044-Q1-K1-C4
gcggcagctgctgctatattaaattattattaaataaagggaaggggtattgaacgaacggggtcgggtttgtttgataattatgcatacctaatagacacagatgccgatttgtttgatggaagtatggaagatccatattcattgcgatttgggcctctggctccaacagagagtgaaacgtcttttatggaccgtctcaggcaacaactcaaacatgaactcaaacagggttacatggataacattgttgacataaggtaagagattttgcgcaagagactcgcattaatattttctgcagacacaacttagaccataacagcttggtatcagtcacattgcaagtggccataccccactgaggaatat

SEQ ID NO: 39140 - DNA, 300 bp, Gossypium hirsutum
  Clone ID: LIB3146-044-Q1-K1-C6
actcaacgtatttttttgctgagaggactctaaacggcgcggtcggtggcaactatattctactcactgatatttccatggttacagacgaatattcgaacaaagagctggggctggatatcgactaatgaatcacacactctgtgcgtagggtcgataataacacggcattcaactatctgcttcatgcaatcatgtgtaatatacatgactcatgttgacacctaagggaatgtagctgttgtgtatttgtacatccactaatgaaaacttttatgctttggtcgacatagtcttata

SEQ ID NO: 39141 - DNA, 232 bp, Gossypium hirsutum
  Clone ID: LIB3146-044-Q1-K1-D10
gccacgcgtacggccacgcgtgcgcccactcgtgcgaaaaactcatatgcttggcgcgccgaagaaggcaaagcacaggcaaaaagtccaacgtgttgccatcactcccggatcccaaaaacagccggataactgctgggcatatggaagcgcctaccacacacctgcgtatatacagccttctgtaccacgatctgcacgatcctcactacgacttggacatcactgaagc

SEQ ID NO: 39142 - DNA, 402 bp, Gossypium hirsutum
  Clone ID: LIB3146-044-Q1-K1-D12
cccacgcgtccgcagggaattccaaattcctacagactggatgcttgataatgggattatgagcaagattaagcttggatcagtgaaactggcgaagaggtacatgaaacgggtagccatggaactgcaggtgaaggcaaccttggagaaggatccttcaatggactatatgctacttcaaggagtcagatttgcattcagaatacatcagtttgcaggaggatttgattctgaaacaatgcatgcatttgaggaactccggaaccttgccaacctccttaacaagaagtagtagtagtagtaaagcagcagtatgggttgtgtgacaggatggaaggtgtgaagtttgtcagaagaagaagatgatgatgattggatggactgaaggatagctgttgctgc

SEQ ID NO: 39143 - DNA, 369 bp, Gossypium hirsutum
  Clone ID: LIB3146-044-Q1-K1-D5
cggacgcgtgggttgaggcctaggctaacttgatctactaaaaatattattgttgatgtagatgcttggcacgaccaagagaaggaatacgagcagctttactcggctgatgcctatgaagtgatccaaactcacctagcttttattctgggaaatcgattgactgattcagaataacgttgcacagattggtaaacttagggtcggtcaggtctatgctgcattggtgatgtatggatatattctaaagcggttcgacgagcgatttcaactagagaagaccatgagaatccttccagatggttcatatcgggagggtagtcgtatcgataacgctgtcatagaagacatatgacctgcaggggatta

SEQ ID NO: 39144 - DNA, 162 bp, Gossypium hirsutum
  Clone ID: LIB3146-044-Q1-K1-E1
cgaatcgtcgacccactcgcacgcgtcgaaagctttgttgttatgccagttttatcatctattgtgcattcttataaagaaacttttgcttttcacgcttttgctggtataattttataaaggttcttgatgatttttttataagttttaaaatttttaaaa

SEQ ID NO: 39145 - DNA, 394 bp, Gossypium hirsutum
  Clone ID: LIB3146-044-Q1-K1-E10
aaaaaaaaaagagagaggaaagagtttaggggctctgggcatggacgattttcggtgatcggaccgccgttcttttgtcgctggtgaccaccgtatacggcggtcggaagtgtaaaatcgtccccttttaacccttttgctccccttaacctaggtccgtagttgtagcccccaaaaacctcacgaatgctgctggaagtcgaaagaaacctctcggttctaatctctccgatcacctcctcaaaaacggtaaaagttcatatttttttatgtatttatcaacgaataacagtggtaaaagagaaaagaaacatagaaatcacctttctcttgttcgattgcttctcaatattggtttgtgtttgtattgttttgttcttttttgaatattcgg

SEQ ID NO: 39146 - DNA, 404 bp, Gossypium hirsutum
  Clone ID: LIB3146-044-Q1-K1-E6
cccacgcgtccggacgacaacaacaacaaagttcgtagttttagtccatcgacgccccctccgacttcggttaattaccgaaatgctaaacgtagaaaagggattccccagcgagctccaatggcaggactaatcatacaatattaaagctccatagccttaaagtttagacatatacacaatgtgatggccacaatgccccaccacaactctttccctaaaaaagatccggcattgtctcattcccctcccattctcaagtgttttgtaaatagaagcaagcaaaaaacatacaagtgggagaacaaagtggaaaaataagccccacgcataggattagaattgtctaaagatcgaattcgagatcgatgtgaattgaagacttaaatataaatcttttatca

SEQ ID NO: 39147 - DNA, 405 bp, Gossypium hirsutum
  Clone ID: LIB3146-044-Q1-K1-E9
cccacgcgtccgaagagctgaaactcagttgacaagagaaaacttcaatgacattcaatgtaacatggggacactagaacttgaacctgaaaggaatgaagaaagtgttggaggatggattctaaacgagtctcaatacgatgggcttggactttcagctggaatcgattcttccaaagttgatgcatatggtgtgacaagattaggtcctattaaactgagtcctggggtgaagcacatcctgaaacccagccaaaaggtcgatcaggataactcgaggttgatccattcgactatcccttttgcatctgtgaccgagtgtggcaaaatgttggagactcttaagaaatcaacgaagatttacgggttttaggagtaagtaatatcctcttgcaggtaattttt

SEQ ID NO: 39148 - DNA, 304 bp, Gossypium hirsutum
  Clone ID: LIB3146-044-Q1-K1-F11
cccacgcgtccgaagctatgggtcaatgactgattggagcaagaggctgcggtctagaaattgaacggcttttgcaactactggtgtatgtggctcattggtgcttacatcacatggccgaacttatgcctaacctggactacgtggaatcgatgctttgatgacatattgttatacatgtgccaactgttacacctaagactgtggactgtgttctatccttaaatgactatgataacagccctgctatgaataagctatcatcatgatcaaagaattcgactcctacggtgatggtttcata

SEQ ID NO: 39149 - DNA, 391 bp, Gossypium hirsutum
  Clone ID: LIB3146-044-Q1-K1-F12
cccacgcgtccgcccacgcgtccggttcatttcttcaaatattctcaaatccattgctttctattcatttatagtcataaaaaaaaaaaaaaaaaaaaaaaaaaaaaaaaaaaaaaaaaaaaaaaaaaaaaaaaaaggggtatttgaccatgagggaattccatttggtcatacgtctatttcttcaaaaaaaaatgtcatggaaaaaggttaaaattttcgccatactttatttccttaatacaaaagcaaccgccctcctacaccggataccatagggcagggacttcaatatttgaaggcatccatcaaagctatgtccattaaggtgataaaggtacctggtgtaaaagctgatgatgtgattgggacactggctgcaaggagtgtt

SEQ ID NO: 39150 - DNA, 416 bp, Gossypium hirsutum
  Clone ID: LIB3146-044-Q1-K1-F7
cccacgcgtccgcccacgcgtccgcttttgctaattttagatgtcaacattttgcttgatgtctataggctgccagagatgcaagatacgataaggaaggtgtgatgaagtttttccatatgttgatcaggagaagatatttttcggatgacttaccaacgccaaatacatggtccgcatctcctgttcagacaacctctcagcgtttagatgaaaattccagtgatgatgaacagctgtacaagcgtacaagtttaagtggtgacccttacaagtacaacatccttcctcctctaccagcacagcgcaatctgactccaccacccacactttaccctcaacagcctgtttccgtgacagagaattacagcctgccaagattctcctttacaggctcccaagaaatcagcggcagc

SEQ ID NO: 39151 - DNA, 242 bp, Gossypium hirsutum
  Clone ID: LIB3146-044-Q1-K1-G1
accacgcgtccgtccacgcgtgcgaaaggatgtgcgttaggatcacgtacagggcaagccactggatcggctgttaacactcctgatcgacaaccaattgggaccggagataaaactgctggcctagacctattgggacttcgaagatggaactggcggagatgtactatctgtcttagatgatgaaacaccacgaaatctgaaattgttgttgaatttgaagatactacgtatccgatgtc

SEQ ID NO: 39152 - DNA, 421 bp, Gossypium hirsutum
  Clone ID: LIB3146-044-Q1-K1-G2
cggacgcgtggggaacagttcaaacccttatttttctagctcttggaggcgaaattttgagggaggttttatcttggatatgggagtgcattttattgctggcttgaggatgatagttggttgtgaggtgacctcagtttcggccataacctctcatatagatagaactttacctccgccagacattatttcttctaattttaagctggagaatggatgctctggagtctttgtgatggttgtatcctctagttcacctaagataatttggcgagttgttgggtcaaaaggaaccgtacaagttgagcgtggaaaagtagatggaaagcatggttacttggtttcactatacagtgcagatgggcaatgcaaaagcactttccatccattctgtggagtgcacgaagaattaaaaattttt

SEQ ID NO: 39153 - DNA, 376 bp, Gossypium hirsutum
  Clone ID: LIB3146-044-Q1-K1-H1
cccacgcgtccgcaattactaatattaaatttgctctcaaaattaaaactataatgataaaatgttgagaacttttatttttataatacaatattgggggagatacgaagggaaggggataacagaaggaggagaaacaaagaacaccaacctggctgttttattttataccttaatgatttgctttcttaaaaaaaaaataaaaaagtaaaaacaaaaagaaataccacaaaaaataaataaaaaaaacacattaaaatcgatacacaagagccttgccggtttgctaccactatttacgaaaaacatggcctacggtcatgattctgctcgcgaggctgagatcattgaggcgtctacactaaccatcgcccac

SEQ ID NO: 39154 - DNA, 409 bp, Gossypium hirsutum
  Clone ID: LIB3146-044-Q1-K1-H12
ccggcttcgtggagaagttgaactaaagcatgtagacttctcttacccttcacgtcctgacgtcccaattttccgggaccttaatctccgcgcccgagccggaaaaacccttgcccttgttggtccaagtggatgtggtaaaagctcggttattgcacttatacaaagattttacgagccctcatccggacgtgttatgatagatggaaaagacataaggaaataccacctcaaatcgctgagaaaacacatttcaatcgttccacaagagccttgcctctttgctaccactatttacgaaaacatcgcctacggacatgaatctgcaagcgaggctgagatcattgaggcagctacactagccaacgcccacaagttcatatcctcaatgcctgatggttacaaaacg

SEQ ID NO: 39155 - DNA, 415 bp, Gossypium hirsutum
  Clone ID: LIB3146-044-Q1-K1-H4
cccacgcgtccgaaaaaagaaaaacaaaaaacaacctttcatgggttccaggaagggcaacgacaacgatggtgctagccctgggaaaatatttattggaggcttagctaaagacacaactctgggttagctgagctttttttttacgtgttttttttgttgatgaatgttcctcaaattactgacttttttttctgggttcttgttggtggggatttatttttcagagacgtttactaagtattttgaaaagtatggggaaataacagattacgttataatgaaagatcgacatacgggtcggccccgtggttttgggttcattacctttgcggatccttctgttgttgacactgttatgcaagaggatcatgttattaatggcaaacaagtaagcaaaagtttcactttccat

SEQ ID NO: 39156 - DNA, 326 bp, Gossypium hirsutum
  Clone ID: LIB3146-044-Q1-K1-H6
ggctgaggtcctgctttccctttgcaacgcccttgaaggaaattgaaggttttaatcgacaggaataagggcgattgccgaagtaaataggcaattacacttggcatggttttgagcaattctttgaatctcgtttaagtttatattggtgtttgttgtattgttttttaagcggatatagctacaatgatgactgtttttttttaaacgaaactttaataataatataaaaatatgagtttgaaaaaaattaaaaataaaaaaaaaaaaaataaagaaaataaaaaaataaaaaaaagacaacaagaaaaacagtttaataaaaa

SEQ ID NO: 39157 - DNA, 225 bp, Gossypium hirsutum
  Clone ID: LIB3146-044-Q1-K1-H8
caaagttcgaaggatttattagcctatctgttctggaaaggagatctgcaagtagatattatttcttccaatttattaatgtttttcttgggagcataataaccggaactgcgtttcagcaacttaatcattttatccaccaatctactagtcagataccaaagacaattggggtctcaattccaatgaaggcaacattcttcattacttatataatggttgatg

SEQ ID NO: 39158 - DNA, 404 bp, Gossypium hirsutum
  unsure (1)..(404): unsure at all n locations
  Clone ID: LIB3146-046-Q1-K1-A1
gtgattctttaagcaagggtgcatttgtccccaatgacatcagtattgctggttctggccatgcaagttttattcttcttactgggcctaatatgggtggaaaatcaattcttcttcgccaagtttgcttggctgtgattttggctcaggtaggagctgatgtccctgcagaacaatttgaactatctcctgttgaccgaatctttgttcggatgggttccaaagatcatattatggctggacagagtacatttttaacagagctttcagaaactgcattaatgctgtcctctgcaactcaacattcacttgtggcgttagatngaactggacgtggaacatcaacttctgatggacaagccattgcggaatcggttctagaacattttgtacacaaggtgcag

SEQ ID NO: 39159 - DNA, 424 bp, Gossypium hirsutum
  Clone ID: LIB3146-046-Q1-K1-A12
ccgccgtcatcggtagtgtttctctgcttcgggagcggggggagcttcaatggggatcaagtgaaagagattgctttcgcgctagagcagagtgggcaccggttcttgtggtcattgcgccaacccccacacccatccaagggtccgagggcaagcccaaccgactacgatgatgcatcggaggttctgccagaagggtttttagatcgaacgcatggcataggtaagatcattggttgggcaccgcaagtggcgattttgggccacccagcgactggagggttcgtatcgcactgtgggtggaactcgacgctggagagtatatggttcggagttcccatagcggcgtggccagtttacgcagaacaacaactgaatgcgtttgaattggtgagggagttgggattagcagtggaaattaaaa

SEQ ID NO: 39160 - DNA, 408 bp, Gossypium hirsutum
  Clone ID: LIB3146-046-Q1-K1-A2
gcggctaggtttatctggttttgaagcagatgaaaccttatatagcaatcaaggggtcatctctgaactggttggtactcgatctattacttttgccataaaccttggaacttgtagggaccatatccagaggcttgcatgtggaataaagaatctatctgaagcgtccttgttgtcatttgaaaaaataaaaggccaaatagaggaccattgtggttcagcaccatttactgatattactatgtgtcttaatcctagagaagccttctttgcaagaaaaaggaaagtgtcaattggagagagccttgggaaaatttgtggggaactcatatgtccatatccgccaggtatacctgtgatgatcccaggtgagaccattacaaagaaagctctggagtatttggtgct

SEQ ID NO: 39161 - DNA, 296 bp, Gossypium hirsutum
  unsure (1)..(296): unsure at all n locations
  Clone ID: LIB3146-046-Q1-K1-A8
cagactcttntgttattttacccgttacttgtacacactcgcactctcacccgaggaggagcttttactgaatttaccaccccatctcgactacattcacaaacaacccaactcgtacactactcctttatgatctacacgatcctttttccatattattccctgtcataaacagatattgaaagatcatcctaaaaataacatctttcatctctctccttatatatataaattatagaaatactgtcagatctatatcttgttaactggcttacaaactacctttagctgcaaat

SEQ ID NO: 39162 - DNA, 412 bp, Gossypium hirsutum
  Clone ID: LIB3146-046-Q1-K1-A9
cccacgcgtccggaaattagtgaagtgggttattgcaagtaacattattgacaagaaagactttgaagctgctgataatcttgagaaaggcaaagttcatggggctgctgatttcattttatataagctaaaagaggtgagaaagatcaagcaagaggatatttcatgcgctatgaaggatgcaggtatcggaattggacaaaatggttggcggtatttatttgtttatactggttaatttgacggaattttaggcctggaagtagaagataacccccttgaacatacagaacattggacccttttaagagaaaaaaaaaacctaattaattacaaatgttaaggatcttattaatagggaattaaatgagaagagaagagaaaaaacatataatttcattgaaattgaaac

SEQ ID NO: 39163 - DNA, 410 bp, Gossypium hirsutum
  Clone ID: LIB3146-046-Q1-K1-B10
ggcaatagttcgtttgcgatttcctttgggttgaaggagaaaagtaaaaggggtatttttgatgtagaatttgatacctccaaagatggaaagtatggtgatttgaatgaaaaccatgtggggattgatgtgggtagtcttgtttcagttaaagtgagaaatttatcatctgtcaatttggtattaaacaatggggaaaagttgcattcttggattgattatgaggcaacttcaaagagactagagattaggttgagtgaatctagtagtaccaggcctaatgaaccattgctttcacactcaatcgacttggccaccctgtggaaggatgaggaagtgtttgtgggcttaagctcttcaaatgggaactcttctcagacatgctttattcacttgtggagctttaagct

SEQ ID NO: 39164 - DNA, 409 bp, Gossypium hirsutum
  unsure (1)..(409): unsure at all n locations
  Clone ID: LIB3146-046-Q1-K1-B5
gccttanaattaattgctgacagtttgttttgaagagctaagtctgccacaaccggtgtgatgcttaatacaaaacttacagcaatcgagtatgatcaaggaataggacaagaagagaaagaagattcattactgcaagacaagactatttaccagaggctaataggcagattgctatatttaacacacacaaggccggatataacatatgctgttcattgcttgagtcaattcatgcaatatcctaaggtctcacatctgaatgctgcactaagggtggtcagatatattaaaaatagtccggggcagggaattttattaagttcttcaagctcttgtcaacttattgctttttgtgactcggattgggcctcatgtcctatgtcccgaaagtcagtcacaggttttt

SEQ ID NO: 39165 - DNA, 403 bp, Gossypium hirsutum
  Clone ID: LIB3146-046-Q1-K1-C4
ggaagatttctcaccgacttcaatcatttcaactgatgctggacaagaggagggttcaaaaaggaagagagggtatgatgctgatgacatatctaggggtgctgcaaaggctcacaagtttttaaaggagtttgctgagctgccattggagaccatggacctgaaacaggctctgcaacaagtaaccaagctaaaggatgacttacaaaaagatgtaaacaactctgagtggcttcagcaattcttctagatttggttaaattaaagttgcttgtgttggaatactgaattggtaatggaagcagctgctgaactggttttgtcttcattttttacgtgggctgtggggggcatgaagccatattctaggccgctttgtaatttatttcatttcctcattctt

SEQ ID NO: 39166 - DNA, 400 bp, Gossypium hirsutum
  Clone ID: LIB3146-046-Q1-K1-C7
cgataacaatcgaagctctgctaatgcctcatctaataccatttgggtcccatcaaatgctcgaggtgctcatagacttccacctggacttgctaatgctgtatcaaactcatacttacacttattgtgacgcaagccgaatgacgactcgaccaacgcttcaaagtatcctgccacatttactgtcggctatactgaacgatagaatattgatgcggctattgaaacgggaattttaccatgcttctctcccatcacgattgtcattcaactgaatgggctgcgttttagtggtcaaagcaggcatcacatgtgagtgttcatatgcatactcaatggcggtctgcctagaggttttcgcacactgatatgctcgctgcatttgactacatattcatct

SEQ ID NO: 39167 - DNA, 410 bp, Gossypium hirsutum
  Clone ID: LIB3146-046-Q1-K1-C9
gtggctgcaagcggtaatgaagttgttaaacaatcattaatggacttacgagtcgatgagctgattctacaagttttgagtggacaaactcagggaagcattcaaagtttgtatgatgctatacgtgttttgttaacctccgatgataatcgggttgttgcttccgaagtttatggttatgcacgaagatttgcgaaaattggaattgcaaaagctcttgtggaaactcttcatggggggattagttcacctagtcttgtttccgctagcatagcactaaaagccgttgctgtcaatgatgaaatatgtaagtccattgccgatgctggtggtatcgatgtgcttcttaagtgtgttgatgatagtggtgaacaacgcaacaaaactgtagctagaactttgtgttcatt

SEQ ID NO: 39168 - DNA, 429 bp, Gossypium hirsutum
  Clone ID: LIB3146-046-Q1-K1-D12
ggcgccgctcttgcttgcaccggtcctcccaatatcgaccccaaggtggcaatgctgattgctagggaagttgcaattgcttgccgcctcggtgtagaggtagcaattgttgttggaggtcgcaatttcttttgcggagacacgtgggttgcagctaccggtttagatagaagtactgcatatcaaattggcatgatggcatccgtgatgaattctatactactgcaatcgttgttggagaagatgggtgttcaggcctgcgtgcaaacggcattttctgtgcaagaggcagaaccgtacagccgggtaagggccatacgtcatcttgaaaaaggtagagttgtaatatttggtggcattggtgctggcactggaaacccactcttttctactgatacagctgcagcgcttcgagcttcaaaaattcat

SEQ ID NO: 39169 - DNA, 409 bp, Gossypium hirsutum
  Clone ID: LIB3146-046-Q1-K1-D2
caacaattcagatatataatgtccgtgtggatgaagtgaagagtaaactcataggtcactccaaaagaataactggccttgccttctctcatgcactgaatgtgcttgtctcatccggggcagattctcagctttgtgtatggaacactgatggatgggaaaagctgaagactaaattcttgcagattcctgttgggataacaccaactgcacaatcagagacacgcgtacaattccatcaagaccagatacgtcttcttgttgtacatgagactcagcttgccttatacgaaacaacgaagttggaatgttttaagcagtgggtccctcgtgaatctttcgcgccaataactcatgcaacattttcatgtgatagccaactggtatatgccagctttttggatgcaac

SEQ ID NO: 39170 - DNA, 281 bp, Gossypium hirsutum
  Clone ID: LIB3146-046-Q1-K1-E11
gaaagtatatacccagttgcccaagcttgtttcaaaatttcaagaggcgttcaacaaggtggggccggtgatggaatccatgatgctctgcgattacgttctgccaatgataccctgtcaaaaaatactggatttacccacatcgagtgaccacttgcttgcttggtgtaccaaagactcacttttgcgatgcgctagaaaaccatgtactatctctatatatccacaaatatttcttcgaggaacaaccttttaagcacttgcactgcacacaagagcac

SEQ ID NO: 39171 - DNA, 280 bp, Gossypium hirsutum
  Clone ID: LIB3146-046-Q1-K1-E12
gaatgtatataccaaatttacgtagcatctttcaaatctttcaagggcgcgcaacaaggtggggccgatgatgcaacccatgatgcactccgataacgttctgccaatgataccctgtctaaaaatgctggctgaacccacatcgagtgaccgcttgcttgcttgatgtgccaagagctagcttattctatacgctaaagacccatctacaatccctttatatccacagatttttcttcgaggtaacaccttgaaagcactggcactccacacaagagca

SEQ ID NO: 39172 - DNA, 324 bp, Gossypium hirsutum
  Clone ID: LIB3146-046-Q1-K1-E4
cccacgcgtccgcccactcgtccgacatatccctggtgccctcgctgcaattcttttgttccatcttccctgcctatgaagaagcctaggattgacctcaatgcatcattttaatccttttttctctttctcctgtgaacattgattggagattttaaaaaaaaaatgttgtacaactcttcagccctgcaaatattcttgattcatgtaaattgaaaaagaaaaaaaaaaacaataggttcagaattcaaataaaaaaaaaaaaaaaaaaaataaaaaagaattaaaaaaaaaaataagaaacataataaatttatatggtta

SEQ ID NO: 39173 - DNA, 404 bp, Gossypium hirsutum
  Clone ID: LIB3146-046-Q1-K1-E6
agcatttgaagtaacacatgggaaagatctatggagctacaccgaggcgaaccccgagtgtagagaactccttaacaactccatgggttgcaaagctagactgacagtgcaagcgacaatcgaaggatgtcccgaagtgttcgacggagtcgaaagcctggtcgatgtcggcggtggtaacgggactgctttgagccttttcgtcaaggcattcccatggattcgaggcatcaactttgatctccctcatgtcgtcgccgttgcagaaaaatccgatggcattgaaaacgtaagaggagacatgttcatgtctatcccaaaagccgacgcagcgtttctcatgtgggtattgcatgattgggacgacgaggaatgcattaaaatcctaaaaaaatgtcgagaag

SEQ ID NO: 39174 - DNA, 244 bp, Gossypium hirsutum
  Clone ID: LIB3146-046-Q1-K1-E8
gaaaacccggcacaacgcgagcggccgacctatctttctctcattaagcccttttttttttaccatcatattttgaacaaagacagattctcctctaacttagagaaccccacccaacaaccatatggcatagaaaatgtccctgtaagacacctcacaaccctatgttaacatcttatcaccacctgaaaaacaatgaacggatctaataattgtcactacctatgcaatagcacaatatata

SEQ ID NO: 39175 - DNA, 396 bp, Gossypium hirsutum
  Clone ID: LIB3146-046-Q1-K1-F1
cccacgcgtccgactacatcaccttgatgttgtttagccaattttccccaatgtgagcggggggcaagcccttcagcgccttattttgcctacaaatttggattccgcagggatcatgcagcagtccatctgctatgacaaaaccaagagttggaccatttcggtttcatggggttttgcagttcaagtttttagagggatcttttcaccacgggagatagaaatgccttcgagaacattcttgaattggtacaaaagagcagattacacagcatatgcattcaacactctccctgttagccgaaatccatgccaaaaaccttttgtgttctacatgtcaagtgtgagaatggattctgaactgaacaaaactgtgagtgaatacgagcgacacca

SEQ ID NO: 39176 - DNA, 406 bp, Gossypium hirsutum
  Clone ID: LIB3146-046-Q1-K1-F2
gttcaccatcggctctcccctagtgaccgattcttggtactatcatctgatggactttaccagtatttcagcaatgaagaggttgttgcccatgtcacatggttcatggaaaatgttcctgaaggtgatcctgcacaataccttgttgcagagcttctgttccgtgctgcaaaaaagaatggaatggattttcatgaattgctcgacatacctcatggagatcggcgtaaatatcatgatgatgtttctgttatggttgtttctttggagggaagaatttggaggtcttctggatgattttttttcttcttttctatccctttttattttggatcaccgtttgactacttttttcaagcaagggttgaaatcaatgatgcattacagaaatgaatgagaatcctag

SEQ ID NO: 39177 - DNA, 398 bp, Gossypium hirsutum
  Clone ID: LIB3146-046-Q1-K1-F5
aatttattgcttagcattaaacttttggtgagtttgctttgccttcctctaagtttcctttgcttctcttgatttcatcgaatgttgattttaaaggatggtttgctcgtgatccatctgttctacaccgtgttggacatgttttacttaaagtaaaagcagtggaacctaaaagggaaaggcgccttgtgtttgctgacgatctattccagctttcaaaggttaccaagcagaagacagtttatgttgttagcaaagcaatagaaaagctttctggttgtaagttgtatggccttcaatttttatttatatcagttgcatgttttttgggtttctaaatataaaaaaataaaaaacttaaaaagggtccgtcatttttaaaaaatacaatcttactt

SEQ ID NO: 39178 - DNA, 406 bp, Gossypium hirsutum
  unsure (1)..(406): unsure at all n locations
  Clone ID: LIB3146-046-Q1-K1-F9
cccacgcgtccggaaaaaaggaaaatggtgatgagggtgatggtgcaccttccaaggcaggaattttcggaaacatgcaaaatctctatgagacggtgaagaaagcacaaatggttgtccaggttgaggctgtgaaggtgcaaaaagaactagctgcagcagaatttgatggctattgtgaaggggagctgataaaggcaacattatctggaaaccagcagcctatacgcattgagattactgaggctgcaatggaacttggtgcagaaaagctatcatttttagttaatgaagcatacaaggatgcacatcaaaagagtgtccaggccatgaaagaaaggatgagcgatcttgcgcaaagcttangaatgccacaaggtctcggtgagggattaaagcaacaatg

SEQ ID NO: 39179 - DNA, 250 bp, Gossypium hirsutum
  Clone ID: LIB3146-046-Q1-K1-G10
cttataaaccaggtgctcttggctttgcaccagaactcattctcccatataagaaatgtgaatatgaaaacaggcttgttggtactgttgtttgccgcaaatattagttaggtgcatgatgaacttgttttcttacatttgctggtaatttgaaggttggataaacagcgatatggtcttttatgtgatcagtaaactaccagctatagccaccaactttaatggggttattacatttacattttggaat

SEQ ID NO: 39180 - DNA, 270 bp, Gossypium hirsutum
  Clone ID: LIB3146-046-Q1-K1-G11
cttatgaaccaggagcttttagctccgctttttaactttttctcccatataagaaatgcgagtatgataacacccttatttggtactgttgttatgccgcaaatattacttaagttcatgatgaacttgatttcttacatgtactggtaatttgaatgttggataaacaaacatatggacgttcatgcgatcagtacactaccagctatagccactaactctaattgggttcctacatttacatgtcggaatacacactactgcttttag

SEQ ID NO: 39181 - DNA, 397 bp, Gossypium hirsutum
  Clone ID: LIB3146-046-Q1-K1-G2
ttctcttctagtgatcttcttttgttcgttacagaaagtatgattttacacttaccttgtacaactctttatcaaacaccattactatccaatcctagaaatcttcaacaattagctaaaacccaaaccagtttttcaccagccaacaagttgtccattgcaagaaagcttgtaacaagaggatgcagcaatagccaaggtggtgaaggagagaagaagacagaaagtagaagtttcctatctctagaagaggctggtttggttgaaatatctggtttaagctctcatgaaaagttcctatgtcgattaacgatatcatcattgaatctacttagagtgatatcagaacaggaaggatgttcaattgaagagatgaatgctggaagggtatgtgatt

SEQ ID NO: 39182 - DNA, 397 bp, Gossypium hirsutum
  Clone ID: LIB3146-046-Q1-K1-G5
cccacgcgtccgcagcctgaccccttatgtattacgtttaaaggagaaagccatggagacttgcatatagatttcacctattatgtaaatacggatcttgtgattgcatttcactgtgattgccaagtatcctataggtataaatacaagtttcttcgagcaacaacttctaatctacccagcagtgttattaaagataacagaggaagtaaactgaccattgggagaggagggatgttgaaagttcaacacttggtttcagttgctagatcagctacttcacatcctcatattgattctgctgagcatcaacaacctagtctaattgcttatatcgagttctttgtgaaatctgaagtagatgaattaaagttgatttctaagacttctgggtttt

SEQ ID NO: 39183 - DNA, 235 bp, Gossypium hirsutum
  Clone ID: LIB3146-046-Q1-K1-G8
ccgtcgcctggcttcttctaaagtttcttttctgacaaagccaccctacctactgctgggggctgtatttccggaacagaaacgaccccctcggatgaacccaatgagatagctacattcacacccaaacaacaccgactgaacccccaaaaacatggataaaatgactttatcagccgctttccaaaaaccaacttagagagcacttttagtttgcatgaacaacaactagcta

SEQ ID NO: 39184 - DNA, 375 bp, Gossypium hirsutum
  Clone ID: LIB3146-046-Q1-K1-H11
gggatgccttccagtcttttccagccacattttatgcatttgaaactgattctgtcgttgggaggacagtaaaagaatctgtccatgatgaatccattttttcagctggggaaatcatatctgataatagataccaatatttatcttcagaaaatcacaatagtgtaaataactctaatgcggagcattcaaaggctgcaacacaaatattatctgattgctcagatgacagaagatacacggaaaagatttagtgcaatcttgcagccgaagataagaaagaaatgtcctcctagatttatgatcacgtgctacaaagggcactaactgacactttacataccatacatactgccagatctattgaactaacac

SEQ ID NO: 39185 - DNA, 218 bp, Gossypium hirsutum
  unsure (1)..(218): unsure at all n locations
  Clone ID: LIB3146-046-Q1-K1-H12
ggaattccttaaattcttttacaacgacgctgtatgcctgtgcaacaaangctggggatgcgagggctttgtatatatctggcccttaccatgtctgctataggcatttgaatatctttcccaactattggacacagtttgtatgtataataagctgacacggcatgatatgcctcctatgcttatcactgataggctacatcatgcaaattatattt

SEQ ID NO: 39186 - DNA, 391 bp, Gossypium hirsutum
  Clone ID: LIB3146-046-Q1-K1-H6
ccgtaacggcgccatttgcctcgatttttttaaggaccaatggagccctgccctagaggagatacaaagtattgctttcaatcatctaactttcgacggacccaaacactgatgatgccttattgcccgagattgcccacatgtacaagaccatcagggctcacaacgattcatctgctcggagctgcacccaaaaatatgctctgggtttgtgagggcttttgcatctgcttgtaggactgcatagtatcaaactaatatcatcaatcttacaggtgaaaatccatgtagaaggatataggaacagactctcaagcttatacaggacctatcgctcctttaaacacatttggtgactgtactgtctgtatgaaaagcaacttacaaactt

SEQ ID NO: 39187 - DNA, 129 bp, Gossypium hirsutum
  unsure (1)..(129): unsure at all n locations
  Clone ID: LIB3146-047-Q1-K1-A4
ccccaaagnccacaacttctgtggccaagatttaacttaatattttcttgaatcaaaaaaacctcctatttattatattacaaatgtttcacccccctttcaatgttctaacaaaaaaaggaaacctaa

SEQ ID NO: 39188 - DNA, 243 bp, Gossypium hirsutum
  Clone ID: LIB3146-047-Q1-K1-A5
gccattacagagctagcttcatctcttgatattcatgaagggttgcaagcagttaagacaaatactcttattccgacaccaccagctttacaggaggaatatgatgagaaccgtttgggggttgaagggagtgagatgcgtgaagacactgaagaacttaatgctttgctttactctgatgaagaggaagatgattttggtgttggtgatgatgattgtgacgatgatgaaataatgagcaca

SEQ ID NO: 39189 - DNA, 405 bp, Gossypium hirsutum
  unsure (1)..(405): unsure at all n locations
  Clone ID: LIB3146-047-Q1-K1-B11
cccacgcgtccgaaagatttcaacaagaagttacagggtacagtcacagagttgaaacaggagcttggtggaatccatctggttatgtcaagcccctacgataagctcatggaaatgattcggaatccaagtcactttggatttgaagatgcagaaacagcatgctgtgggactggattcttcgagatgagttacctgtgtgataacatgaacccatttacatgttcagatgccaataagtatgtattctgggatgcctntcacccgacagagaaaacaaatgccattttggctgattatgtggtcaaaactaccctagccgagttccaataattactaaaaagtaaaagaagcagcactgcttcatttgtgtagaactagtattagtagacattatatttacta

SEQ ID NO: 39190 - DNA, 420 bp, Gossypium hirsutum
  Clone ID: LIB3146-047-Q1-K1-B12
cccacgcgtccgcccacgcgtccgaaacggtcatgatcattgcttgcaacacctgagtagcatcacaaggtaaattcaataagagtgagtgcctcctcaaattaaaagaatattggttgagggtaaatgtgtttatgattgtaaatgcagcccgctccagtttttcaccagtggaggtggttcgaaggcatggaaaggtgattttgattatttagacggtgggggagatgatgaaatcaaattttattacgacggccaaggattcatgtctgttgagcttactcccactaatgctaagattgccttctatgatgtttccggcaatgttctgcatagcttcaattccaaccaactctactacacttacagtactgaaatgtaggaaataatagaataatgatggatgaaatgaatcaatcg

SEQ ID NO: 39191 - DNA, 416 bp, Gossypium hirsutum
  Clone ID: LIB3146-047-Q1-K1-B5
ggctactgttgttgaaatcaacccaccactcaccgtatcaggtacagtggaattttactgagaacgctgtatatgaccctttctacattagctcatgagagttgctcatgaattgggctggaatcggatcaaattgggtatacaagaaaaggaaatagaattgcctactccgagtttccatttcatgagattttgcggatacacaataaaggggaatgggcctagtgcagtgccacattttttgttcaaatgaatttgggctctaaataaattaatgtcaatacacgagaatggttattgtcaataccaggaaattcatggtccaaattggcataagaaaaaaatggtgcgaatgggggttacatctaatttgggtatggtattctcacaaatatatatatttataaattttaata

SEQ ID NO: 39192 - DNA, 262 bp, Gossypium hirsutum
  Clone ID: LIB3146-047-Q1-K1-B6
cccacgcgtccgtttctttgttctcattcttttcatttttctctcgaagtccaataccctcattttttttcccttgatttttgctctccttgatcctgttccatctgccaaaaggttatctgaaatgaattttaactttagaagcttaaatgaggattctgcaacttcccaaatggaaatccttagatgtccatttttgagaaacattaatgagccgactaacttttcattctcgtcgaccttgccctttcccttgccgtac

SEQ ID NO: 39193 - DNA, 383 bp, Gossypium hirsutum
  unsure (1)..(383): unsure at all n locations
  Clone ID: LIB3146-047-Q1-K1-B9
gcgtagcaggagctcggtttaaattattgtttttgaattctattgagtttaagtaccattttcaattggactgtttttggaatttttagggactgttatttgttttggattttaaaaaaaaaaaaaaaaaaaaaaaaaaaaaaaaaaaaaaaaaaaaaaaaaaaaaaaaaaaaaagaaagatatttaagactaaaacgggtgaataacggnggattcaaatagaatgaccaagtttaagttccatgttaatctcttttatatgcataagttggtgaaatatttttcctttaaaaaatgtaggatgtacataaattgtgtataaatgctattatgctaaaaaatataatggccaaaaatgatactatttaacatatatggttat

SEQ ID NO: 39194 - DNA, 250 bp, Gossypium hirsutum
  Clone ID: LIB3146-047-Q1-K1-C1
aggaagttttgcaagcaaatagagtcagacgtatgcaaactttctggggcactacggctacctcagaaaaggaagatccgggaagcggctttcgatgttgcaagatcaggtacccgatcgttcgacatgttggcttttctaatgcgccacttctattcacctctgtggccgtgcctagacaacggagcgtctgccaaaatggtggcgttacccacataaatcgccttgatagatataggggtatgatcat

SEQ ID NO: 39195 - DNA, 344 bp, Gossypium hirsutum
  Clone ID: LIB3146-047-Q1-K1-C5
ccaaccgttcgaccataaactcgatgaagtacttatatatctgcccatgcacttgaatcaggtgtgatcagttacaaagccaactactgcaacatgcagaagttcagtaccatcacgcggagcctcaccgactgtggcagataaaccatggactccttcttagatgccagggttctgacttgatgctccaccaaatttaacaacaacactacctgatagaccacatactgccaccagaagcaggccacgagcaccaagtgctacaactttttatgatgaaccaagtgccatcggtagaacgaaacaacagacattctctacatcgagaggacgtgctcgtaatg

SEQ ID NO: 39196 - DNA, 279 bp, Gossypium hirsutum
  Clone ID: LIB3146-047-Q1-K1-C8
cccacgcgtccgatgaccctgggcttgtatctattattgtatcattttagggtggggagggtgatgtatagtatgttccattacaatcgtttatgagttcgattttaagtgttagatctgatgagagggatttgaaagttttattgtgttatgtaaaatgtattaaaaaaaagatatatttgtattttgataaatatttttttaaaaattatatctatgattccgatttattttacatgtttagctcttaacattatttttttatattggtttttattt

SEQ ID NO: 39197 - DNA, 421 bp, Gossypium hirsutum
  Clone ID: LIB3146-047-Q1-K1-C9
cccacgcgtccgcccacgcgtccggcaatagagcaccaaaatcccctgaacaaagaaagaaaattgctgaagccattgctgccaaatgggctgatcctgattaccgcgagagagtttgctctggcttggcaaaatatcatggcattccgtctggggctgaaagaaaaccaaagaggaagccagcggctggtacacagtccaagcagagccctccaaagaggaaagctagtgatacaaactattcttctggaagtgagactataagcccaattgagcggttaaggatacgaagaagaaataaaccactttataaggatcctatggcaagctccaagctcgagatgttgaagaacttaagagcacaaagagcagcagaagaaaataaagaataaccaagcagcttgatatatgattgaattac

SEQ ID NO: 39198 - DNA, 383 bp, Gossypium hirsutum
  unsure (1)..(383): unsure at all n locations
  Clone ID: LIB3146-047-Q1-K1-D1
ggaaatttcagggtgctatgcaaatagttgctatggccgaaattgtgatatacataaacattgatgactcctctgagaattactggctccggttgctggttcgagaatgggctcaattctgcatatttttgtacattgggtggacttttaggtcacaagaattggcaccacgcttttcggttatgccgactttaaaatctaaagtggatttaatggtccctccgatctatcgtatagtaagttaatttgctatttgaaaacagatttttgctttgtgtaatagactcttctagagatagcatttagtttccatgtcgacggagtaatttgaaaccttaattngcattcaactaattatttaaatngacttttacatcagttga

SEQ ID NO: 39199 - DNA, 299 bp, Gossypium hirsutum
  Clone ID: LIB3146-047-Q1-K1-D10
gcccagagccacgcgtcctcgcaatcgcaagtatattgcacggttttttatgtaccgtggcgacgatgaacccggggatgtcaatacttctgttgccaccatcaaaaccaacataactagtcaattcgacgactgttgcccaactggattcaagtgtggaatcaactaccatccaccgactgacatatctggaggtgatcttgctcaggtccaaacagccgaatgcatgatgtccaactaaaccagcgttgctgaagtgtactgccgcatagaccacaatttagatctcatgtatgcca

SEQ ID NO: 39200 - DNA, 305 bp, Gossypium hirsutum
  Clone ID: LIB3146-047-Q1-K1-D2
tggagattcattaggtggaaggtcgtgccggcggctccacaaacgattcctagtaaagtggcatgacaatagaggagatggaaattgagaagttcagagtaaaggttatcggggccagtggttgtgggcgaaagccacctaatgttcgataaatttggtgaggaataaggaataagtctagacatataataaataaattgttgtttataaaataaaactaaaaaaaagagagaaaagttttaatctagtttaagtcttgtttgtggttttttttaatatcattttaataaaaaaatttaggttag

SEQ ID NO: 39201 - DNA, 416 bp, Gossypium hirsutum
  Clone ID: LIB3146-047-Q1-K1-E1
gatgcatcatcagctttactatccacagcagcaacagttctcaagcagcagtagtccaggagagtcacctggaactagcagaggaaatggtctatggagtagaacaggtggatcaccaacactcgcggctgcatcttcacttggacttttcactggttcaggttctaccaattcatcagaagcctcttctccagttgactggagcagtggtagctcaatggctcagttggattataccaatattgattggagcttggatcgcacatctccgagacctggtgggatatggctaggaccaacatctccaatgaagagcagtcacctttattatcctaatacaaatggactgagtgttaaaccaggaatgagattgacgcctaatgtgagtggtgtagcgattgcgggtttacaggatg

SEQ ID NO: 39202 - DNA, 217 bp, Gossypium hirsutum
  Clone ID: LIB3146-047-Q1-K1-E10
agcaaattcaacatgatctccagattgcgttgaacgagcccactgatgccgcttggggtggggcaaccacgaacgtcattgttgatcccaatatcaaagatatcatcactgcctaccagacacacaggcagacggccactactcattatgatgagcatgattaccgcagacagacataccttccatctagcaagaggagctactaaacgttcatagg

SEQ ID NO: 39203 - DNA, 212 bp, Gossypium hirsutum
  Clone ID: LIB3146-047-Q1-K1-E12
cggactcttattctctactctcacacattttatgtatgcaaggctgggaattatccaggagggggtttattattgaccgtttatgctaccccatttatcaaatgtaattagctataccataattctcatgcctatatgatatttacatattaccctcaaggaaatattataagatcaaaactattggtgtctcatttagttgggttctgtaa

SEQ ID NO: 39204 - DNA, 411 bp, Gossypium hirsutum
  Clone ID: LIB3146-047-Q1-K1-E4
cccacgcgtccgtgagattagtcggtctttgcatggtaaactagatgattctagtgagctggtgagcaatgtgtatttattggataattatgatgcaaaaatctgggacactaggtattcgacaacttcaacgaagggcatcgatctccagccaacgggcaacattattgaagagatttttggacaagataacacctgagataagtgcagatgctcttgaaaagtccagaatcttctcagtaaagaaggctatgattttggttatttaattatttatttttcttttatttcccccttgtaaattcatttactaaatgcaatttggtttaaccaggttaaaaaagtgatctttaatgagatcctttttgctttttgtatatttgattaaaaaatccttttaatttttatttt

SEQ ID NO: 39205 - DNA, 419 bp, Gossypium hirsutum
  Clone ID: LIB3146-047-Q1-K1-F11
cccacgcgtccgctacacatgacgtcgtttctcataatttttgtgagcttccagttggtacagtttgtgtagctgacactcagtttaaagggagaggtcggtccaagaatgcgtgggagtctccaaggggatgccttatgttttcatttacattacaaatggaagatggaaaaactgtgcctctggtacaatatgttgtgtctcttgctgtgacggaggctatacaggatgtttgtgatcgaaatggcttcccctttattaatgttacgatcaagtggccgaatgatctgtacttgaatggccttaaagttggaggcattctctgcacatcaacatataaatcaaagaagttcaatgttagttgtggtataagttttaatgttggtaatgagaaaccaacaacatgtttgaatacagta

SEQ ID NO: 39206 - DNA, 221 bp, Gossypium hirsutum
  unsure (1)..(221): unsure at all n locations
  Clone ID: LIB3146-047-Q1-K1-F9
taaattcatacataagcaacttgaagttatgttctacacntagattattgntcaggcgggggcactatcactttatctccagaaccatccntcaccaaaactttaaactttcttcctttcaaccaatctctttttattctaaaatcccaacctaaaatccttttcatcatcgcatcatcctattaaactcttataacacactaatttcccatttaattcct

SEQ ID NO: 39207 - DNA, 356 bp, Gossypium hirsutum
  unsure (1)..(356): unsure at all n locations
  Clone ID: LIB3146-047-Q1-K1-G2
cggggcggcccaagccgtccgccaacccttccggaaaaatctgccaaacttggttttggggacccccggggagtctattcaaaggttcatagacattcaaagggggcttttccacagccagatcgaccagcttcaaaccgttgttgttccacaatgcaaactcaccggcgtcaatcctttcccccaaaaaatggcagctgggcttttgtcctaaaaatggggaacgaccaagagattgctaacccctaagctgtaagtatatgcagctgtttttccattaagatgnattacaagaaagatcccggagatagtgctcaatttgtgttactgtcacacaggtgcgtgatttttttaat

SEQ ID NO: 39208 - DNA, 201 bp, Gossypium hirsutum
  Clone ID: LIB3146-047-Q1-K1-G9
ctaaggccactggaacaatggactgcagggccccacgctatatctgaaaggattggtgaattcggatcattcactatttgtgacattagctaagaaatcattacggactcttgctgcgggcataagaaagacatagatcaaagaaaactaagtgacgattacatatatcgtacatatcagcattgcgtaatgtgaaccgta

SEQ ID NO: 39209 - DNA, 304 bp, Gossypium hirsutum
  Clone ID: LIB3146-048-Q1-K1-A10
agccttcggccaagccgtccgcccacgcgtccggaaaaataaaacccttgctttactagactttatcccatggggcaccactaacctccatattggggggtatgcccaccatggcggtttaccatggtccaacttgggatctgtctccttggggccggggcccctaagacccccagaccgtcgggacaccctgcatgttgctgtcaagcttcggtgctgtgattcttgattggcttcgagctaggtatgattggttatgtggataaaatgaaggctgacttaatattggttatttatttttttg

SEQ ID NO: 39210 - DNA, 409 bp, Gossypium hirsutum
  Clone ID: LIB3146-048-Q1-K1-A2
ggccgacccacgccacgcgtccaggcgtcgcatgggttcaaccgacatccactttattggttggatcccagcgaagctgagaggcatcccatgccacaagtgactgccagttcgaaaaagaaaggcttcaagaggtaaggtcattcaaattgatcttagcatcgttagaggtttctaggtgactgaatcgatgttttcttcttttatgcgcttcgatggatactatagtccaactgatttttctgaaatttttttgaaccatgaaacaattaattgaagagtaaccttcttatgcattaattactcttccttcttgacaattatactatattacatcggtgctataggattttgatttagatttccttgattatattgtggtcggatcgttgtttataaattaatataa

SEQ ID NO: 39211 - DNA, 398 bp, Gossypium hirsutum
  Clone ID: LIB3146-048-Q1-K1-A4
cccacgcgtcccaacaaactgtccaatttttgatcaaagcaacatcgaaagggcctgggggggtatatccaagatattatacatccccaaatacagcactcgactcaaagaacacgccacacacgaatcaccaaactaatctacgagcaaacccatggtgacatcaataccttcttgtagaacgtaataaacaactgcataacctacaccaaacattctacgaaccatactcatactgctactaatacaaatcctgcactgaagatgcaacgcaagacacagaattgaacagctgattcgaataccaagtgatcataaactaacgcatacaatttcggaaatgctctaggactcatactatcattcatgttctttcactagcattctgactcttaatc

SEQ ID NO: 39212 - DNA, 315 bp, Gossypium hirsutum
  Clone ID: LIB3146-048-Q1-K1-A5
cgtcccgttcacgatatctgtcactgatacaaattaatattatattcagcttctgctataaacttaaaatcgtatttctttccataataaacgattatacatgttttcaaactaaagtatacagataaattacacatatagaaaatttactgtaactgtcacactataatatacgtctttttaaaattaaacttatgatcacatacattttcagttaaattacaacataatttgtgatccatacaatattctaaccaatcacatcactaatatcgtactatacaatgaacaaagtcatttcctttgtttataact

SEQ ID NO: 39213 - DNA, 333 bp, Gossypium hirsutum
  Clone ID: LIB3146-048-Q1-K1-A7
acacgggcttgcccgtcacaataatagaggattatgcataaattgacattcgggtcgggttaggctattacattggagtggtaaagggaagccatgggtgagactagatactaaccgaccatgaactttagatgctttatgggctccttatgatttgctacaaacaccctttgctttagaatcttaaaaaattatgattagtatatgtttttttcaacaataattttctttttatgggctgaaattttttctttcaatgttgccatggaacttaataaagaaaaaaaatggacttgagtggaaaatttaaagaaaaatttttttgggaaaaat

SEQ ID NO: 39214 - DNA, 230 bp, Gossypium hirsutum
  Clone ID: LIB3146-048-Q1-K1-B12
cccacgcttccgcacacttttctttaaactttcttttccctccaaaactctcaaaaaaggtgtgggcttatttgtatcatcaccacaaaaaacatatctaaatctatggtaaaccataccaaacaatactaaccatacagcttgaaacctacactgtaaccaccctttgataaagaatatctaatcacgattactcaatccgagcacctctcgacactgataaaaatgga

SEQ ID NO: 39215 - DNA, 403 bp, Gossypium hirsutum
  Clone ID: LIB3146-048-Q1-K1-B2
cccacgcgtccgcggatgatcaaatgttgtcgatagaactgcaaagagaaaagcaggtaacaagtcaagacaaagctggttggagtttgacaatggtaatggcatgttgttctagcgtgctgtcgcatgtcagtgtcggatttgtcaaagccacattataagtcatatttaactgtgttagtgttaggtagatcaacagtttgatggtttgataggataggtagcttgaacattcttaaagaacaagtatcatattgataaattcgttaatcttcaggggctacttataaaaattgtcaactattttataacaaatatgggcttgaagggtttctattaagtttttcttcggcgaggtattttactcgtgtatatggacatataattccaatatatattacat

SEQ ID NO: 39216 - DNA, 277 bp, Gossypium hirsutum
  unsure (1)..(277): unsure at all n locations
  Clone ID: LIB3146-048-Q1-K1-B6
ccgtccgcccacgcccgtccgnngcctatctgatagggtggcacttgggatggggtaaagccnncatctgataagcaacatcanctgtcacanctgccatgccagaagncgtttcaggcnagagaaggangatgggancttaaacaannaacagaaattttatgggancttaacacnatctgaaaaaagatgtattgggggtccttataaccatgaataagagtggaaaattttagagtgaaaaacaaagaaagcaaaatagaaaataaggaaggtc

SEQ ID NO: 39217 - DNA, 493 bp, Gossypium hirsutum
  unsure (1)..(493): unsure at all n locations
  Clone ID: LIB3146-048-Q1-K1-B7
ggaataacccgggctcgaccccacgcccgtccgnnctttgcttttttttccctttcctttnncttttctcataaatnncggttcccttttcccccatccctaaagagagatccgtataaatttcaactttgaannatttcttctcttttnnttttccctaattttaaatttttcccaaacccanntttctccccttaccccgattccctttttatttnnntcccccaatttcctcaaatncggcagcccctctgcatttctccgtcggtagcccaactgctgtatnctctgtcgacatcnntgctgtcgtccttggttttggattaatgagaaaagtgagcctggtggtgaagtcgccggtgaaggttgggaagaaaagcgtggcggaagagaaagttatagcggctttaaagagtcacagcaaagctgagaggaggaggagagaaaggattaatgctcacctggacaccctccgtactctcttgccatatag

SEQ ID NO: 39218 - DNA, 309 bp, Gossypium hirsutum
  unsure (1)..(309): unsure at all n locations
  Clone ID: LIB3146-048-Q1-K1-B8
ggcaagaaacggtgatggaaaggggtatggttgtgggtggggatatggttccccaggtggaggaaaaggtggcagatatggttcttctgcttctacgtctcaaaaggaccatccacggctaggagactgagtcccattggtcttagaaattaaggtgcccactcagtttttcaaatcttcgttctgggagggaagagaagcaagccagcaaaagcatgtgaaaattgattgctgcggtgtctaaactccccatccaacaacaactntaagcatccacgaaattttgtcaattttcaatggaaataagtc

SEQ ID NO: 39219 - DNA, 286 bp, Gossypium hirsutum
  Clone ID: LIB3146-048-Q1-K1-C11
tttttatttgacaccgcaaaagaatcttcgcttttttaatcaaatttcaaccccatcaagttgcctgggaatactgacttccacaatgttaagactgctattaatagcctaaatgaaaacatccctattgtgctagtacaagaaagtggactttcactagcaacagaaaggctaatctctataatatgttgttttaaacctttattcaggagttgctcagacaaacttgaaaagcttatgtcatacatatattgaactcccaaatacttttaacaatggaaaaatt

SEQ ID NO: 39220 - DNA, 404 bp, Gossypium hirsutum
  Clone ID: LIB3146-048-Q1-K1-C4
ccggaaactccccgatgaattggaagatcaaagttcatgccttaaggacttgtaagttgtcatgtttctcctttctaagctttttcactgcctgcatttttacactgactgacacagcttataccgtaataacaactccgataatctaaaatgataggcattaggattcagaaatccagcacccaacaaccagtcaacacactggttaagataatattcaaggtaaaataaataaataaatcagcagtgactgactggtaatgctaaagttgtatgtaaaaatgggtagactttggtactgttcttgtttactatcaagtgaaactctactgtatgactatgtatggattttcatcataataacaaagatgtatgaagaaaaataaactagtttgctgatacct

SEQ ID NO: 39221 - DNA, 408 bp, Gossypium hirsutum
  Clone ID: LIB3146-048-Q1-K1-C5
atctcatctcatcttatgttgtgttctactactctttctacctcgaattatatgtatatctatttctctctcacctaatctctatcgtttattggctcagatcagcagcagcagttggcaaaacaaagcatattgctttgctttgcctctttggcttatattacacagtttaattacccatgttgcccgataactcttgttcctcacttccttctttggagccatttacatgcatagacaatggtaataacaacaataagaggaaaagaagacccgcaggaacacctgatccagatgcagaagtggtttctctctcgcctaaaacattattagaatcggatcgctacgtttgtgagatctgcaaccaagggttccaaagagaccaaaacctacagatgcacaggcggc

SEQ ID NO: 39222 - DNA, 251 bp, Gossypium hirsutum
  Clone ID: LIB3146-048-Q1-K1-C9
acccactccatcatgcaaagttttttatccaaacctttaaaatctccgtggtgcggccttccttaacaatgtcttccattatggctttctctgcttctcccactgctcacctgccttacatcattaactccttagccgatctccgtcgacacagccgccgctcgctatcatgcgctgcccatttcttctactcctcctcctttcgacccgattacttctcccccgctcccaccctgaggatcatagactct

SEQ ID NO: 39223 - DNA, 349 bp, Gossypium hirsutum
  Clone ID: LIB3146-048-Q1-K1-D10
cgtccgacttttcattaaaaatattcattaaacggctatttatttacacaaattgagatagagaccgctgtattgatattaatgcaagaccgcatcttcttacaccgacaactgaaatcacatgcccagatatgcacacgaaagcttccatgtccaagacttttgagacttttgacaagcataatgcaagtccacttccatttaaacctattgctgccaaaattatccctctatcaaagaaacctgattttacctactacgactgtttatatcaccatctataacacgctgacctacttatgacaaaatagtctacaaattaattagctcaatatgcatgggctacaca

SEQ ID NO: 39224 - DNA, 410 bp, Gossypium hirsutum
  Clone ID: LIB3146-048-Q1-K1-D6
attttattcttttttaaaaaaacgtataaaaaaatgagcacaaatttaataccattcatccttcacccatatttacatatttctaaaatgtttgggctctcatcgattaccgttcaaccccttccaacaccacgattgaaggatgacgcctttggatccccttccaacttcgatctcaacaaagtgaacagagatcaaaggctgaattacaaggtaagacttgccttccctttttctttgttttaaaatgtagatgatgagaataatgagaagaaaatagataaaaatgacaggaaaactaaaaaaaagctaaagaaaatcaccttttcagagactgtttttgaattttttttattcaatatgcgtattgcgtatctattctgtgtgcgtaaaaatatatggatgaaatc

SEQ ID NO: 39225 - DNA, 283 bp, Gossypium hirsutum
  Clone ID: LIB3146-048-Q1-K1-D7
caaacatggaaaatgatgtatcatcatcatacttgcaatgcagggttgattttgaagcatcatctaccatccttgaaaatgagtgctttaagaaatatgggaagagtgggaaatctttttattactcgcaagtggcgagtaaggtgaggtggctatctacaacaagctctgcagctgagataacaaatcaaatcggtactggtatcacgtctcctttggagaatatcacaaggaaggaagaaccctctcctcgaacagtgtcagctatgttacatgatgagag

SEQ ID NO: 39226 - DNA, 398 bp, Gossypium hirsutum
  unsure (1)..(398): unsure at all n locations
  Clone ID: LIB3146-048-Q1-K1-E8
gccacgcgttcggccacgcgttcgcccacgcgttcgccacgcgtncgcccacgcgtccgcgcacgacgtacgcccacgcgtcgccccacgcgtccgagagccagagccagacgaaaacactggctgagatcagtcaggcggacgaaatctctccaaatatgacactatacatcaacaatgtcaacgagaagatcaaaatcgaccactggaagaagtcattgcgcgctgtgtcttcacaactcggcaagatgctagatgtgttagcattcaagactctgagacacaaaggtcgagcttgggttattgtcgatgatgttagctgcggtgccaatgcttattaggcaaatgccaggctttaccttgtatgacaaggaactgagaatgcaatgtgcggagac

SEQ ID NO: 39227 - DNA, 406 bp, Gossypium hirsutum
  Clone ID: LIB3146-048-Q1-K1-F5
aaatattgtcttggttgtttttcgatttttaatttaatcaatcttcactgatatcctcggatcttaaattgctttgagtgtgggctcaaagaatcaaattagtgcgcataatgaaaattttacttaactttcagtagggaagttgattctctttataaactgacaactatgagtattcttgcaaaaaatataatttattcttaaaataaattgccattattttttggcagaattttggtgctcaaaagatatgtgttagtaggttaactcatagttattatttatagagaatcggttttcgagttctgtttgaataaagtcttaattaaataataatattttaatagaaaatacaatgttccaattgaactagagcataagaagcgaccacattcctaattaatat

SEQ ID NO: 39228 - DNA, 189 bp, Gossypium hirsutum
  unsure (1)..(189): unsure at all n locations
  Clone ID: LIB3146-048-Q1-K1-G1
cgcactcttctatcttcttaaccaatttattctatcacccacngacagacaacctccccgcctttttatacataatcaaaacccacccccacaaccaacattaaccaaaacaccaaacaatatcaaccctaacttacctccaacccaccaacttcatcaaattctcaaacactacattcttactaaaaa

SEQ ID NO: 39229 - DNA, 257 bp, Gossypium hirsutum
  unsure (1)..(257): unsure at all n locations
  Clone ID: LIB3146-048-Q1-K1-G2
cgacccacgcgtccaaatcatacactttctcttacatcatttattacctcatccaacccaccaccgtactctgatgtttttatattaaccaatacccccactacctatcgtttttaaccattaaaatatcactaataatagctattacttacattgcaactacatacccccttaccatatgttcaatacaactattcaaatcttttatcaacaattaaaacaccaccctccatcaantatactaccacaccatcaac

SEQ ID NO: 39230 - DNA, 378 bp, Gossypium hirsutum
  Clone ID: LIB3146-048-Q1-K1-G4
cctgagattacatacccaactctatttttttttacactgacaagaaaaggctgggtggtgggccatttttaaaaagccttctcttctcatactctgctgatatttcctaattattatcatcattattattacgagtgaatcattataatatgtgggcttccacggagattattttagtgccaggcttaaatttactctttataaagaaatttctgaacttaaaatcttttacataaagcctaacatatataccattttttttcctattaaagtttcacgatattcccacctttcctctatgttgggtgtaatttgtttcgattttaaatgtctttagactctggttattacttatctattaattgtgtttggtgtttt

SEQ ID NO: 39231 - DNA, 387 bp, Gossypium hirsutum
  Clone ID: LIB3146-048-Q1-K1-G5
ggaactctcacttcacaaaaccaacaatcagttcgcaaacgtctggcttctgctacatctgagttgagtgaggatttaccagttcccggggagaccagcacggatgtggttgtacctgctcttaagaaatcaaagggtccagattctggacaagaggctgctgaaggtcaagctgctgcactctcagaaaatgttggttgtccacaagtaacagacgaagcttatgataatgttggtgatgaaactcaaggttcaaatgaggagcttgttgatgttgagaaggaagaggctgacacaatggaggaaaatcttgaaaagtcaaaagaaccccaagtagatggcacgaatgaggttggattgcaggaaaataagaacgatgagatcttg

SEQ ID NO: 39232 - DNA, 418 bp, Gossypium hirsutum
  Clone ID: LIB3146-048-Q1-K1-G7
gtttgtgggattgggagcttcgatataatgaaaccatgagacagttgaagggcgagaacgcggcgttgcgccgtgtgtttgccgaagaaaatcgaaaggaaaaggctgaaaactataagctgaggtgtgaacttagacggcgaaccaaggaactcaaagattataaatctcagaatgataacaatatggaacgaagaagctttttgaatgaaattgaagcgccgaaagagaatgtgccttgtcgagatcttattgaactcgagaaaactacgagcgatcagattgctgctctaaaggaacaattggaggaaacatcagaggcattgaaagatatggaaagccgatacagttgtcttacggtgaaacaattcttaactaatcaagaagtgcaagatgctcgaaaagaatcgataaatgg

SEQ ID NO: 39233 - DNA, 417 bp, Gossypium hirsutum
  Clone ID: LIB3146-048-Q1-K1-G8
cgaaaatgaaaaaagatgtcgtcgtcggtgggaaagatgttaaggaggttgataatgattgcttcttagtggttgttaagattttcgaccatcagggacctctttctacaagctttccaattgagaatcggaaaaaccttgtggcgctgagggcactgaagagtcatctagatagaacaaagagtcttccttttgtgaagagaatatcggattttcatttgctgttgtttctggccaagtctcaaggccttggttccgacgtccctgcactcgcagagtgtgttaacacacagacagcggtgccagaaggttatcaactgctaattgagtccatggccaatgcagcttgatgttctttacatgtgtatttatgattttacagttacatttacctcataatttaccatgctcattagc

SEQ ID NO: 39234 - DNA, 342 bp, Gossypium hirsutum
  Clone ID: LIB3146-048-Q1-K1-H1
tctcggtcaatattttaaaggaaccttaattctattctttgtgaatagatactttcaatcgatgttctttgtgaaaaaaaaaaaaaaaaaaaaaaaaaaaaaaaaaaaaaaaaaaaaaaaaaaaaaaaaaaaaaaaaaaaaaaaaaaaaatggacttccaaaaaagagctaccggcacactccacaacatgaatcgaaagactgccttatatatggccaacctaaacaaccttcatgagccgcttaattaaaacgagaaggctgctaaaatcagagttggaccgaacaaaaaacccatgtatatcagaatgagtcccaccatgtgatataccattaaacaaa

SEQ ID NO: 39235 - DNA, 199 bp, Gossypium hirsutum
  Clone ID: LIB3146-048-Q1-K1-H5
taatcacacatactcttttcctcaaaattctcttatatgccataattgtaaacgcgtaagactctagagatcattcttcaatacctctgtaatattattataggccactatcatactagtgaattcactccgtcgacctatgcacatccaaaacctgaaaatcatcattactgttaaaaaaaatacatcttaaatcaca

SEQ ID NO: 39236 - DNA, 314 bp, Gossypium hirsutum
  Clone ID: LIB3146-048-Q1-K1-H8
cccactcatccggccccccctttctatggtttttttttccccaaaagcccacattaaacagaaggagccaaaccatttacacacaagaatgataatcaaatagtctcaacttccattataataaaaaaaaaaagacaagatccttgccggtctaaatataccaatctaagctcaccctacctccgagcatacacgtccactctagttatacctaaaggtaacctaatttccggatgcatacaactatgtgactaaaaactcccttgcatgtctctacttaatagcttagaaccacatactcttttcaccagcta

SEQ ID NO: 39237 - DNA, 442 bp, Gossypium hirsutum
  Clone ID: LIB3146-048-Q1-K1-H9
gaataaccgggcccgccccacgcgtccgcccacgcgtccggaacaaaggagcctacatttatttatactttatctaagtcaccttgaagggggtctgatgtttcacctgaagctgcatttttggaattcaaggggcttgtaaaatctctaaatgatatacaacttattgcagctttatgtccccttaaaatttttattttgacatggtcaagcaatcttagagtatatttgtcatcttcttctctagttctaaatatggagtggcctgtggaatttgacctaaaaaatctttccactccttcacgtttcttgtgatgttcttttgtggttgaagagctttgtgcttcatcagctttctccttgttatcttctttaatctcaatgcaaacagcattttgtagaggactttgatttgccccaatttgatgcatggaattactct

SEQ ID NO: 39238 - DNA, 349 bp, Gossypium hirsutum
  Clone ID: LIB3146-049-Q1-K1-A12
cccacgcgtccgtgcaagttggaggatggtggggcggtgttgcagacatcggtggtggatgggacaagggtcaggggcggccagcagctgattaggctagggttttggtttttttttgttttagggtttgaattgggctgctattgggttttggatttagtgggttttgggctcatctgtttagtaggttttgggctttggttagtttgggtctggggttatttaggtaggttatttgttttgggcccaaaattggacttgtacaccgtttttttcaaaaaaaaaaaaaacggttacgacaaaaagcaccttaaaaatttaagtgacgaaattataaaaatttcatttt

SEQ ID NO: 39239 - DNA, 248 bp, Gossypium hirsutum
  Clone ID: LIB3146-049-Q1-K1-A7
tcggccctggaggagcttgataagagaataggcttttctaaaacatcagcttgaactctaaagctatgtatgagatgatctgacagtgtgtgtattcatgccatattttatgtgtggtatccaaatgtacccacaagataatcatcagtcaatgacgagattaattatttccatttagatcattgtattcaaaccaaggcaaacaatgtagctagtaatggaagcacgatcatttatatcgttggccc

SEQ ID NO: 39240 - DNA, 416 bp, Gossypium hirsutum
  Clone ID: LIB3146-049-Q1-K1-A8
gctgtagattacagtgagcctatttttgattggcttagaaactctccagatgatgctatgaaaaaatgggaaagcatcataactggtgagttgcaacaaaagcaaagatcagttttaggcagtgtgacaccttcaagattgcctcacttcaaagccgcggacatgcacaagactcggttttgtgactttaggtttcaacttggtgccagatatctctattgtcatcagggtgactgcaagcacacaatcgtgattagggacatgaggtcgattcatccagatgatgtacaaaaccgagcagcttatccaataatgatctttcaactaaaaccccgagttcagaaatgcagtgtttgtaaaattacgagagcctcgaaagtgaccttagatgataagtgggcaagggagaacccttg

SEQ ID NO: 39241 - DNA, 397 bp, Gossypium hirsutum
  Clone ID: LIB3146-049-Q1-K1-B12
cccacgcgtccggctaaacatcacaatatcacatatgcagacctataccagcttgcaggagttgttgctgttgaagtcactggaggtcccactattgactttgtaccaggaagaaaggattcagacatttgtccgaaggaagggcgacttccaaatgctacaaaaggtgctcctcatctgaaggacatctttcatcgtatgggtctatctggcaaggatattgtggcattatctggcggtcacaccctgggaagggctcatccagagagatcaggttttgatggcccttggaccaatgaaccactgaagtttgataactcttacttcgtggagctgctaaaaggggaatcagaagggctattgaagcttccaacagacatagctttgatggatgacc

SEQ ID NO: 39242 - DNA, 376 bp, Gossypium hirsutum
  Clone ID: LIB3146-049-Q1-K1-B2
gctttgcaacactcgttgaagcgaaggattaaaaaaattcgacaaagacttatggctctgaaatttgaaatttctgaacctcctgctgctcctgaaaatactggtattggatataggactgcagtgggaactgctagagcgaaaattgggaggtggcttcaggaacttcagaaacttcgacaagcaagaaaagaaggagcctcaagtatagggttaattactgcagaaatgatcaaggtataccaatttttagaccaccattcaaagatattatgatcttaacatctactacggttgtgatttatcaacatgggatgtcttctttaaggatattatgagttttaatggaatttatatgaaccctttagtggtagca

SEQ ID NO: 39243 - DNA, 244 bp, Gossypium hirsutum
  Clone ID: LIB3146-049-Q1-K1-B5
tcgcccacgcgtccgaagagttccggaattgtatattagtcaaagattcatagatcaaaagaggaaggagaaaagtatattcgtatggcagggactgaatatgagcggcaatttgtgaggctcatcaagtatatgcgggagtgtatctacagaagccaccatgtgtaaaaggtttgaggatggcctctataaaaaaaatccgagtgtttgtgggcattttagagctttttgaatttgtagccct

SEQ ID NO: 39244 - DNA, 408 bp, Gossypium hirsutum
  Clone ID: LIB3146-049-Q1-K1-B8
gcgaaatccgccgctggtgacaaccttttcttcttcctctttctttaccccgattgttcttttttattctttccctgcgctttgtgggaaaaagaaaaaagcaaagcaaaaaagaatcgaggaagaatttaagacaatggcacagcaagcagtgcagaagaacacgttgtacgtgggaggactagcagaggaagtgaatgaaacaatcctccatgcagctttcatcccctttggagacataaaggacgtcaagactccattagatcaggccactcaaaagcaccgctcctttggcttcgttaccttcttggagaaagaggatgctgctgctgccatggacaacatggatggggctgagctctatggtcgagtcctcactgtcaactacgccctccctgagcggatcaa

SEQ ID NO: 39245 - DNA, 390 bp, Gossypium hirsutum
  Clone ID: LIB3146-049-Q1-K1-C1
cccacgcgtccgcccacgcgtgcgattggtgtgttaacaaggcaatgagaccttggtctgtcaaaagcaatttttgcaggcatcgatagtgatatgttaaaggctggaaaagttgtgttctcggtggccgattagaaaggtaatgaattggcatcttccgtggcgattgctggctttaatagggagaaaatgtttaaagcttggtggtgtgtttttgtattgttgctctgatgacgtagtattgttggtagacggtttaattttgtctgctgttttttctgattctctgctgctgatcttttttgtctttgacaacagttcagttcgactgtagcaaaaaaaagtaatatgtgaatttgtaaaaaaaaaggcttctaatataataattat

SEQ ID NO: 39246 - DNA, 409 bp, Gossypium hirsutum
  Clone ID: LIB3146-049-Q1-K1-C11
cccacgcgtccggccgtcactgttcttaatctccgtgtcaagtcatcaacatcccactctgcagtgcccattgctttttctgctggggacgagtttagccgtagccctactaccgatgccaactctgggaaacttgtcatgttttctggtgaacctgactttagcacaggagcacatgctatgctcaacaaggactgtgagctcgggcgtggtgggttcggagcagtgtaccgaacagttttgcaagatggacgcgcggtggcaatcaagaagctcgctgtctcaagtcttgtgaagtcacaagaagaatttgaaagggaagtcaagaaactagggaaaatacggcactataatcttgtggcgctcgagggctattactggactccatcgttgcaacttctcatttctg

SEQ ID NO: 39247 - DNA, 243 bp, Gossypium hirsutum
  Clone ID: LIB3146-049-Q1-K1-C7
agagattagatgaattgcctacgagaagagtgtggccagcaagaaagtctattgcattaggagaacccgtggaaggacccctaattgacttcaattctgagtccaaggtcgatagagttcacttgcatgaagataaaaacgacgatgaagatgaagaatatggtttccaggctcttcgaagagctgtgacggaatattggggcacaatgaaggaatattataaagccgcttttgatgctttcg

SEQ ID NO: 39248 - DNA, 130 bp, Gossypium hirsutum
  Clone ID: LIB3146-049-Q1-K1-D1
caacattaatgttaataatgttgggaatataatggaggaaggtttcactaatcttcttcttaatgattccatcgaccggagtttatcggatagcggcaaagaatctgacgaaaacatcggaggcagcggg

SEQ ID NO: 39249 - DNA, 427 bp, Gossypium hirsutum
  Clone ID: LIB3146-049-Q1-K1-D2
cccacgcgtccgcccacgcgtccgcccacgcgtccgcccacgcgtccgagatcccaccatagctttggaaacctcaggtcaacgtgtgtgcatgaacaacaggagctagaaactgttgattcttcctctgatatatctgatgagaagtctgaagaagaggatggcgctttcctaaaagaaccaatggaggaacaagacaacaataaggcaaggtcaaccccaaactacattcgaatagttagtaagtagatggttggtatatacatatctatatgggtgacaaagaggctgaggagacatataaacaatttaaaagtctctcctgttggagttggtcttatgggctacatgggaaacaagggatctgtttttgttagcatgacactttttcagtccaggctatgctttgtgtgttctcatttgacat

SEQ ID NO: 39250 - DNA, 400 bp, Gossypium hirsutum
  Clone ID: LIB3146-049-Q1-K1-D3
cccacgcgtccgcagatttcggatctccatgagttctggcattttggaactgaaagaggaagtagccaataggctgaagctagaggtgggtgcttgcgacataaagtatttggatgacgataatgaatgggttttgatagcatgtgatgccgaccttgaggaatgtatagatgtttcaagatcatcaggcaacaatatcattagattgtgtattcatgacaccatggccaatctagagagttcttgtgagagcacaggagagttataattaggttgtagatatatttgttagtgcaattctcactcatagaattatagaagagtgaaagtgcagattttggtttcaagagctttctcaattgtaagaaacttctttttatgataggaggcttaattgtaa

SEQ ID NO: 39251 - DNA, 304 bp, Gossypium hirsutum
  unsure (1)..(304): unsure at all n locations
  Clone ID: LIB3146-049-Q1-K1-D8
ccagcgtncggtttcttttttttctagataggacaaaaggaaaaaaaaaaaacccacgacccatcaagtgttcaataatggtgattgctgtggattcatctgcaacgaaaatggcagctactataacaatgggttttggaagctcgtatgaagcgtggagtaaccgtataaggaaccggtgactgaggcggtggcgacaggtgtgatattggcgggttcggctcaatctctatttttcttttttggccccataatgttgggaaaaagcaaccagtaggttggggttttaattaatttacttttt

SEQ ID NO: 39252 - DNA, 418 bp, Gossypium hirsutum
  Clone ID: LIB3146-049-Q1-K1-E3
ggccacaagaatcctccaacttctgcatctcaccatggtattcaacccttaattagcccgccaccaccatctcgagtgatggcgcctccaagcattggtacccccgcattttaccgtcaactcgttccacaatacggactaccttactcggcttacgggtatccgggttacacacacaacagttatccattgaactattacaatgtatatggagggcaacatttggcatcccaatacacaactggagtctacttaacttacttcccactctatccccagtatcccaaataccgagcattggcaccctctccagttgctgccgcaccagcaagagcggaagaagttaaagctatagtaggagctgcttcctctgcacaaagttcagcactgtaattatgccaatggaacgtaaacagac

SEQ ID NO: 39253 - DNA, 269 bp, Gossypium hirsutum
  Clone ID: LIB3146-049-Q1-K1-E4
cccacgcgtccgaaaaaaaataaaaaaaaaaatatataaaaaaaaaaaaaaaaaaataaaaaaaaagggaattgttagagtaaaaaaagtgggggggcggtggatctatgcgttgtatgcgcaaattatgtgacattgtattgattatttttttgatctgtttgatggtactttgttttaccactctcttgttaagtgtgttaggtttgaaatgtatgcgggttaacttgtggtaattccgtttttggcttttgagttttttttgattt

SEQ ID NO: 39254 - DNA, 415 bp, Gossypium hirsutum
  Clone ID: LIB3146-049-Q1-K1-E7
cccacgcgtccgactcaacacacttgatcagaagtcctcctctgccaagttctgttacttctcacatgcacaaagatgtttatcaagcttttccatactcagatccaatgcaatgtactattaacttcaagcaatcagatgatccagtaatgagctttgaccaggaagatctaaatattccttggagcgaacttgttttaaaagagagaattggagcaggttcttttggaactgttcatcgggctgaatttcgtggttgcgaagttgctgtcaaaattctcatggagcaagagtttcatatagaacgcttcagggaatttttacgggaggtttccatcatgaaattgttactgcaccctaacattggtctgtttatgggtgctgttactcaaccaccatagttgtccattgttac

SEQ ID NO: 39255 - DNA, 332 bp, Gossypium hirsutum
  Clone ID: LIB3146-049-Q1-K1-F10
cggctttatagccgatttgttacaacatttatttgctatcttttcttcgtgcaggtgattggagcaagttgaggagtaggtggctgacaagggcggtggaacaggcatggtgcgatgggacagggggcagaggcggctcctagggtttctgttctctgtttaggttatgggctataattgggcttaaggttttttagtttgggcccaaaattgggctgtacaaaccctacttagtaaaccgaaagaagaaccaaaaaggatccaagtgacaacgattaaattgagcaattagaggccgaagttgaagaaagaggcaaaaggggaagggaccc

SEQ ID NO: 39256 - DNA, 362 bp, Gossypium hirsutum
  unsure (1)..(362): unsure at all n locations
  Clone ID: LIB3146-049-Q1-K1-F2
gaacaagcggagcttgtgaaacatttgggaacttatgtttggcgcataaccaagactttgaaccaaagaacatcgagctttggggattcacacatgcatcaaagcactttcaaaactgaaagcaagtgaaacgagacttaaaagcttatttattttcatctgaaatgttaaaaaacgtatggtttaggaggtattgaagctgccattctttattctttaacttgtaccatccatgatttaatgaccttgccctgcattttgcggcttaaattgtattatagcaaattgcttgtaagttaaaaaattatgtgctttctttaaaaaaaaaaaaannaaaaaaaaaaaattttaaatatttatta

SEQ ID NO: 39257 - DNA, 216 bp, Gossypium hirsutum
  unsure (1)..(216): unsure at all n locations
  Clone ID: LIB3146-049-Q1-K1-F5
cccacgcgnccggnnnnncaaagcataaaaacctaannncnaacagagcagcngcaacgatcaggacccanggcggcaccgaacggggcaagggcannaaacgaagccccaacacaaannccnaccgngaagggaaacacagaaggcgaggccccnaaaacgacgagaagaagcccaacggaacccgaaaacgggccccagagcagggagcccacc

SEQ ID NO: 39258 - DNA, 407 bp, Gossypium hirsutum
  Clone ID: LIB3146-049-Q1-K1-F8
cccacgcgtccggtagcagcggccactgctgcccctactactgctcatggaatcgaagtagccgtggagtttaaaccggtagaacatccaattgaacctttggacaacgaccagccgattcaatgcccattgcctgagccttcaattctaaatgacggaagaatatggaaggagcgtgtatcagctagcgtacggaggagagccgacttgccggttatgcaagatggaggcacccttcaatctcaatccgaatccgaagctactgtcggaaccaaacctcggccgacctcaaatcgtatgatcttaccgtctctaagtgctccggaacataatttactaaagctccttgaagagtgtactgcatctatgatctaaaagcatgctgctacaatgctacttcaacttta

SEQ ID NO: 39259 - DNA, 338 bp, Gossypium hirsutum
  Clone ID: LIB3146-049-Q1-K1-F9
cccacgcgtccgcccacgcgtccggtgggtgagttcataaaccctaaataactgctacagttgatcaagattttgttcatgattactgattttcactaggctttttcccaagctatctgtggttaaataaattctttctagggaaaatgctaaccactgcctgtgtattaaatgaaaaaaagaatggtaactcgtaaaattattattgattaaataatccgtaatgtctataggcaaaaatgttggctcaaaaaaaaaaaaaataaaaaaaaaaaaatataaattaaaaaaaaaaaaatatatttttaattttaataaaaaatatttaattttatttt

SEQ ID NO: 39260 - DNA, 366 bp, Gossypium hirsutum
  Clone ID: LIB3146-049-Q1-K1-G12
gggaaagtcagtcagaacttgaagaagaggctgttgaatgcatcagagaattcaacagcctcatcgtctagggaaagtcagtcagaacttgaagaagagcagtttcttttaatcgggttcttgatattgaaaaaggaagcattagaaaagcaggagtgagtctaaacctttgcatcaacagccagacaggttcctgatatctaatgtaccatactatcacagatatcgcttttaaatatgtatatgggtcaaaatcaaaattatggagcccctaagattgtttttggtaccacaaaatgagaaaccatttgttggctccccacttacctgttcataccatggtgatacaacttcttcgggaattgt

SEQ ID NO: 39261 - DNA, 408 bp, Gossypium hirsutum
  Clone ID: LIB3146-049-Q1-K1-G2
accggcacagatatgaggtaaacccagatgtcatcggggttcttgaagaagctgggctaaaatttgttgggaaggatgaaactgggaaaaggatggaggttctggagcttccaagtcatccattttatgttggcgtgcagtttcatccagaatttaaatcacggccggggaagccttcggctctatttttaggtcttatattagctgcaaggggaaaattagaagcatatcttacaaggcatcaaaatggaagttgatttactagttatattgatacatccaaatcaattttacaaggaggaaattggtagattggtggtcttgtggtataggtatacccaaagagggttcctcaagtgaatcttattgcaatagaattcgagttaaggcacatattatggtccgagc

SEQ ID NO: 39262 - DNA, 369 bp, Gossypium hirsutum
  unsure (1)..(369): unsure at all n locations
  Clone ID: LIB3146-049-Q1-K1-G8
acgggacgcgtgggatcaaattgntctattccattatctaccaagcatggaccaggcgggttacgttcatttgtatttgagcgtgaagacaacaatagcagcacaaccttgatagcagaaagttcttccgatgtgatccaaaaggagaaccgaccaaagaaaaatgctccatcagccaagtttagcaattcacagatcaaatcaagttcacaaccaagaaaagatgagatggaaacaagttctggagctcaattattggaaatattaaggcgttcctcctcagcgcaaacaagtgagtgcactggtaagagatgtattgtaggccaaactgaatccatatttgttgcattcaagcttggaaaagaaatc

SEQ ID NO: 39263 - DNA, 161 bp, Gossypium hirsutum
  Clone ID: LIB3146-049-Q1-K1-G9
cttttctttatgttcattaagactggtggaaaaacatagggaatgagctgtgttaggaggattgtctactctggtgttatagatttaattgcaatgatgtgctgatatgtagatcattgaaggattcttcttttgcttttaacatagtaatgtttaattcc

SEQ ID NO: 39264 - DNA, 420 bp, Gossypium hirsutum
  Clone ID: LIB3146-049-Q1-K1-H1
ggaaaagtgaagatagaggtctaaaggacaggctgcttcgaagatttgggagtcatattagcagcttgaagttggaattctctaagaagaagaagaaagggaaactaccaagagaagcacgacaaacattgctcgggtggtggaatgttcactacaaatggccataccctacggaggcagataagctagcattggcggaatcaacggggctagaccagaaacaaatcaataactggtttataaatcaaagaaagcggcactggaaaccatcggagagcatgcaattcgcggttatggataatctgtcgggacaattcttttcagaggactgaggtggggggcaactaccgactggcttgctttctcataaatgtatatcccacatcattaattaattatatggtcttgtttgcatatgac

SEQ ID NO: 39265 - DNA, 398 bp, Gossypium hirsutum
  Clone ID: LIB3146-049-Q1-K1-H10
gtttaagttaagactaaaacatgatgttgtttgttccttgtgacagggatctagaaaagattggtgttggaaggggatgggttcgcagatttggtcgaggacgtggacatgaacatgaacatgaacgagatggaccaattggtaagaaattaactgcagaagatcttgatgctgatttggacaagtaccatttagaagctacaagaattaaatgatgatattttgcttgttccattactcttggtttttgaggggaaaaacacagaagaggttatttcaattgttgggttactctagtttttgaggggaaaaaagaagaggtatatggttggaaaatggtcactgacattaagaaggttcaaagtgcagattctctcgtggtttttattttcctcgat

SEQ ID NO: 39266 - DNA, 240 bp, Gossypium hirsutum
  Clone ID: LIB3146-049-Q1-K1-H11
cttttagtaggataaaagggcatttccattcgaatctttaccaacaatacctgaaacgggccgatggtagagttttttttatatgcgccgacaaagcttatgcttgagaaactccctctgtggcccaaagcgcgcaatatcaaaatgcgtcatcgactaacgtagagctgttcacaccgtctaaacattcccgaaggacatgagtcaataaaagaactctctgaccacataaaggaccac

SEQ ID NO: 39267 - DNA, 165 bp, Gossypium hirsutum
  Clone ID: LIB3146-049-Q1-K1-H6
cccacgcgtccgacacttttgcattactattcgacccggccagacaccccagcggagggtaaactcaaagatggggggctcaaacacaccaaaaaatccaacaccattccatagcataagaaataaccaaacaaatttactctacattactacacaaatactact

SEQ ID NO: 39268 - DNA, 236 bp, Gossypium hirsutum
  unsure (1)..(236): unsure at all n locations
  Clone ID: LIB3146-049-Q1-K1-H7
cggacgcgtgggcttggaataaaaaataaaatttaaaaaaaaaaaaaaaaaaaaaaaaaggaaggggaaaaaaaaaaaaaggggtggggaaaaaaaaaaagggggggccgctaaaaaggacccaagcaaacnaacccgngcaggcaacatctcaccttctgctatattgttcccaaaatacaagacaagggccgtcgaataacaacatcatttctgggaaaccccgggcggaaccc

SEQ ID NO: 39269 - DNA, 287 bp, Gossypium hirsutum
  Clone ID: LIB3146-050-Q1-K1-A4
cccacgcgtccgcccacgcgtccgtcagatcttgccattgaagaaggtcaattagatcaattttacaagcatctgcccaagatatttgatcggttttcaagtgctgatggctttttattcctcgaagatgatactgttcttaattactggaatctcttacaggcagacaagactaagctatggataacggataaggtatccatgtcttggagtactgcatcaaccaaaggaagttctgattggtactcgaagcaagcggagctggtaaggaaggtagttagtacaat

SEQ ID NO: 39270 - DNA, 283 bp, Gossypium hirsutum
  Clone ID: LIB3146-050-Q1-K1-A8
cccacgcgtccgggacaaggaggtgcaggcggtggtggtggaagcggcagcactagtgttaccagtggaggtgttggaagtggtactaccggtgcaaatggaaaatttagtcatagtggcaaatttagtgtttttcataatagtgaaactaaatcatctcgtaagagtgaacacaaagctacttttgaaggaaattttggaggaaaaggaaatgttgatggaagtggcaggtctgtaaatggtgctcatagtagcacaaaaactagtgctggcaaagctagtg

SEQ ID NO: 39271 - DNA, 323 bp, Gossypium hirsutum
  Clone ID: LIB3146-050-Q1-K1-C12
gcagtgggtaatgtggaagttattgcatatacaaaccagctgctggcttctgtttctaagttacagttgaggcataagttaaaaaaccgagcaccacaatctgcaatgcatcgtccggaggctgtcattgtttcatacaccgttgatgggcttctgtttctaagttacagttgaggcataagttaaaaaaccgagcaccacaatctgcaatgcatcgtccggaggctgtcattgttccagacaccgttgatggctgattccaacttgtaagagtttacctttttttttttttgggcttgtatctacttttttgactatgaaaa

SEQ ID NO: 39272 - DNA, 281 bp, Gossypium hirsutum
  Clone ID: LIB3146-050-Q1-K1-C3
cccacgcgtgcggtttgcttaaaaagataaaagggctcattagggatattacaaatgagataccatatggcaccagaagttacactctacataaccgcacacatagattgagacggtcgatggcaacaatctcagaagaagatcatccaagagtacataaactggatctccgccgtagatgccaacacgcccttctgctgccggctggtggaagaccgcacaactatatacggaccaaactggcaccaacatgtcccatactgagcatttaggggctgaga

SEQ ID NO: 39273 - DNA, 270 bp, Gossypium hirsutum
  unsure (1)..(270): unsure at all n locations
  Clone ID: LIB3146-050-Q1-K1-D1
gaaaaanaaagnacannggnanancngaagcnagccccggaacganaaggagggcacacgcngnncanccncnnacngccgnacaacnngagnggncgcnnnggacncgngangnngaggaagaacaaannccccnnngcagggaacncggaannggganngnngcananagnccccnnggncanggnnncnnngccggnaaagcaaaggagganaccncnaanaggncncnggaangagacccaaggggacaaggagaaaacnnggagc

SEQ ID NO: 39274 - DNA, 269 bp, Gossypium hirsutum
  Clone ID: LIB3146-050-Q1-K1-E1
atttttccgcataaacccaaatcggggggctttttcaagatacctataaaataacccctgatgatccaaaatgccagcaattacagccaatgatgactccgactatttatccaagctagtattgatccgatattccggggtctgggaaatccaacttgttgtctctattcacaaaaaacgagttgaatctgaattcaaaatccacaatctgagtagaatttgctacccgaagtatacgggtagatgataaggcctttaaggcccagatt

SEQ ID NO: 39275 - DNA, 312 bp, Gossypium hirsutum
  Clone ID: LIB3146-050-Q1-K1-E10
aggctgggcaaatccctcacaatctccggtcgcttcgaaagtggtgttccttcttgtcggtgccggtccgttctcttcagttttaacctatacttttctgcatctcccaggtttgtcccgagtggggcaagaaacgactcgaaccaaatagaaagagttaatggattgcccagaaagtcgggacatggagaacataaaatcgtaacattgacactgcatatacacttagaaggattttcgagcaacatcgacaagacaagcagaccgtgaccaaggtcacgacattggaagctaaagtcgcaacattcaaca

SEQ ID NO: 39276 - DNA, 283 bp, Gossypium hirsutum
  Clone ID: LIB3146-050-Q1-K1-F1
gggagaagtaggaacttcgcatttgtcacaatggcttctggtgaggaagctcaggctgctatcgataaactcgattttcttgtaagtttctctttttcttcattttaaatttatttactcttttgcttggtctgtttgaataaagggtattttgtttcctatctttttttacacactttgattgttagattggactaaatgattgttatttttaatgatattcaattatgtcctgtgaattagctagcctctgtttttcttttaattgagagagatacatttg

SEQ ID NO: 39277 - DNA, 302 bp, Gossypium hirsutum
  unsure (1)..(302): unsure at all n locations
  Clone ID: LIB3146-050-Q1-K1-F11
gattctttgggctgtcttggaagaaatgaggtttgattcaacttggattggatggatcatggagtgtgagcagtgtttcttacacttcgctaatcaaatggtaaaccaagtagaagaatcagtccctctagaggtttgagataaaggcacctcttgtctncctatctttttcttttgttgtcgatgttttatctaggttaatatctaaagaagtggagtctaggtcggcccatgggatcagtcttagcaagtcgtgtccaattgtttcacaccttttatttgcagatgattcactactattc

SEQ ID NO: 39278 - DNA, 287 bp, Gossypium hirsutum
  Clone ID: LIB3146-050-Q1-K1-F4
gtgcttcatgtgttatgttttcttgctcttaaaacaagggagcttttggaagtgaaaggtgctaaaaacaaaccataatcatacaaaaagagttgattctaggatccacacggcctgtgcctttccacaccggctggacactcacccatgttccaacctatgtcagttttgcaccttacttttaaaacaggcagaaaaacacactttttagactttttgagcattctaaagcctataaatactaattagaagaagaaataagggggccaccagagaatatcgaagaa

SEQ ID NO: 39279 - DNA, 284 bp, Gossypium hirsutum
  Clone ID: LIB3146-050-Q1-K1-F5
ggaacgtaaaagtacttgatttggaatatgattcatttaattaaatctttaagatgggctgcaggttgctttgtttatcgaaaagtataactcccaactggggctactgatggagttttagcatgttcagctacaaactttcctcacttttttggtcggtttcggtcatcgttgtcatcactcttaaaccttcttgttgattaggttacagttggtttcactttctgataattttcactcaaatcatgtcatgttttttagcgttgcaatatgtttgtcactgt

SEQ ID NO: 39280 - DNA, 280 bp, Gossypium hirsutum
  Clone ID: LIB3146-050-Q1-K1-F7
tgtatatatagtgcttgcctgcgattaggaaagctacatgtagccctgagaatgagcgacaaacggcggtggaagaagcttgtgagtgtcttgttccagtaaaaatttagcaacttcagttgctttttgttttcctcttttacccatatgttcttcaattgcattcttcaggcttttctgatgtctgttaccttcttctcccctttccccttccccttccccttcccttttcccttccgcttgggttgcaaatcattttggtcaaggacttcttccggtt

SEQ ID NO: 39281 - DNA, 283 bp, Gossypium hirsutum
  Clone ID: LIB3146-050-Q1-K1-G4
cttatgcaattgcttgttctcacgagagggggcagatgttcatggttcctgcgattgaagtgtataaagggcacatagtcgacatctatcaccgccctgaggactcatgccttaatcactgcaagaaataggctgcaaccaaagggcgctccaatataagaacaacacagcggttcttgatacaccatatgcactatagtctggaccaccgcattgactatatccaataagatcagtgggaggaggctactccctcaagcatcagaatgtgcaaacatccaaa

SEQ ID NO: 39282 - DNA, 285 bp, Gossypium hirsutum
  Clone ID: LIB3146-050-Q1-K1-G6
cccacgcgttcgaatggtcacctccttacattaacccagcgagttcagaagattgaaatttcaggttcgagatgaattagagcatcttatggatgatgatggtgacatggctgagatgtacctcacagagaaaaaactaaggtcagagggcaacaccccccatgaaataaatcctctaactaatttttctggtgggaccagacaagtttcaaaatctgctcctgtttcaccaatagcatcgaccagtggagctccaagattgcaaagggcatttagcagtatcgt

SEQ ID NO: 39283 - DNA, 255 bp, Gossypium hirsutum
  Clone ID: LIB3146-050-Q1-K1-G8
aaggctacgacttttttcttgggaatttgcgtggtcgaggctctagggggcatgtggataaaaatatcccctcacggaagtcactcaatatatgctttcactatcaatatgctttaattcattttctcagacattaaaaccggaaattaaaacacactattttgactcagatattgctggttcacagcaaatgagctcgggacaaaagatgttcacggctttgaagctatagattaacttttagaaattaggaaa

SEQ ID NO: 39284 - DNA, 299 bp, Gossypium hirsutum
  Clone ID: LIB3146-050-Q1-K1-G9
attcaagatggaagagtacttgatgtttccttctccaaagccttctacaaattaattttggggcaggaccttagtttgtatgatatccaatctttcgatcctgagcttggtaggacgctactggagtttcaggctattattgttaatcagaaaaggcatcagaaatccatttgtgttgaaaacacagcattgaaacaggatttgtgctttcgaaataccaggattgaggacctttttctggactttacccttcctgggtatcctgattatgttctttcttttgagtgtaatctcaaaat

SEQ ID NO: 39285 - DNA, 288 bp, Gossypium hirsutum
  Clone ID: LIB3146-050-Q1-K1-H3
aaaagagttgaaatgggaggggttgcttggactgaagaagaagattatttgctcaagaaatgtatagagcggtatggagaagggaagtggcatcgaatacctgttttggctggtaaatttattttatcttctttttttttttttttctaagtttacatattttgtttaagcttttagtggaaattaaaggattagttttgaatagaagatcatctaaagcgtgaatattatttagatatgcctatgaagagagacagaaagtaaagaaatgccttagctttctatctt

SEQ ID NO: 39286 - DNA, 158 bp, Gossypium hirsutum
  Clone ID: LIB3146-050-Q1-K1-H8
tcccactcgtcctctttttaaatgccccgataaataggagggaacttcaaaatttttataacccaaatcgccatcccttaactatcttactatattctcaaaatctatatactactatcatatatttaatacattaactaatacccacttcctataat

SEQ ID NO: 39287 - DNA, 304 bp, Gossypium hirsutum
  unsure (1)..(304): unsure at all n locations
  Clone ID: LIB3146-050-Q1-K1-H9
ggataccgatatttgttgtcggagagtcaggtcctgataattaagtccagatatgcgttgaacacagataattggagagtcggagtaatgcccgataacatgtttattttacaagtgaattgctggcctcgtgtccaatgtttggggaaaaaaactattctaaccatttgataggctgtagaatatccagtataatattctgcatattgtacagatgacgctgacaaaagatattattntagcaatttacatatgagaaaaataattcctatttttcataaaaaatatttggataactttcaat

SEQ ID NO: 39288 - DNA, 403 bp, Gossypium hirsutum
  Clone ID: LIB3146-051-Q1-K1-A1
tatgggagagttgatggcagagatatttacattggaagcaaaaaaatttcagtgagagcggacggaacagttccaactctagaaggcaatatgatgaaagggaagaccattgggtttgtatattctggagcaacccctgctggaatcttcagtctttcagatgcttgtcgaactggtgttccagaggcagtcgatgagcttaagtcaatgaggataaaagcggctatgcttacaggagacaatcaagctgtagccatacatgtacaagaacagctggggaaccgtctagacgtagttcatgcagaacttctccctgaagataaggcaagaataatcaaagaatttaagaaagaaggggcaacggcaatgattggagatggtgtcaatgatgcccctgcacttg

SEQ ID NO: 39289 - DNA, 413 bp, Gossypium hirsutum
  Clone ID: LIB3146-051-Q1-K1-A12
gttattttgcaggtgatgggacgatgggatgaggttaggtggtggcagtaggtacaaaggctgagacatatggctaggttttttttttctgattttgtttgggctagggttagtttggtttaggttgaaattgggttgggcaatttgggcattctacatatattatccatttaatttcaataatatgttaaaaaatatttgggtaaattacaccattagtcactattatggtaagttttcgttttgatcacttaactaaaaaagttacaatttggtcactaaactattcaaatatttttatttgagtcgctgaactatttaattttttttaagtcactaagttgttatttaaaaaaaagtttcattagtgaactccaagtgacaattcgacaattagtatggtggatcagcac

SEQ ID NO: 39290 - DNA, 398 bp, Gossypium hirsutum
  Clone ID: LIB3146-051-Q1-K1-A5
cgcgcttaaaaaggccgccaaagtgttggaagatcgcagagagaaaaacgccgttgccagcatcttgatcttatccgacggtcaggataaacaatgtgaaatgaattccaccaatcagaacctcccagttgtttcaaccacgcgcctggcacaatcagagatccccgtgcactccatcggtttcggcacatgcagtcaggctccaaacgacgacgctttctgtaaaatcgtgaatgggcttgtaagcgtggtggttcaggatgtcagactccaactgggattcgtatccgggtcagcgccagcagagatttcgtcggtctattcattgacaacccgaccgtcttacgtcgggtcgaattcggtacggatcggggacttgcactcgggcgaggagaaag

SEQ ID NO: 39291 - DNA, 419 bp, Gossypium hirsutum
  Clone ID: LIB3146-051-Q1-K1-B10
ggtaaagtccaagacttggatctcttgagtgcaaggtattgtctttctcctgaaactgggaccactgttgatttgcttcaactttcaacacacctccaaagagtggagcaacagaggaactccatgcaagtaaagcaggaaaatgaggatctgttttatttcctttccacttaattggtacaagagggagaaaggctttcagggagagttgcaaaagtgctgcattaaactcttttttttataacctcattggtgcattttcacaatacgctgttaggagactcgataccattggtagtacatctcgttttccggtcagtacataacagagcgaattctggaactgtacattggtgcaatttcagtaggatttgttccttttctagaactcttgttctctggtgatattatgtagttaa

SEQ ID NO: 39292 - DNA, 372 bp, Gossypium hirsutum
  Clone ID: LIB3146-051-Q1-K1-B2
cccacgcgtccgcccacgcgtccgcaatttcttccaaatcaaaaggtgcatctttggttgcaatttggaatcctgaatggaatttatggtttcgcacttttatgctgcatttctttaattatacataatcctagaaaataggggaaaaggttgaatttgcgttctatggataaatctttcccctgaaatatgccaacctaattttatcatatcaggtaatttctcttaaatctgaactctgatattagaatgcttgcattatttacgttaatacttgatgtgagagggagatgagtacaaatacatacaagtgtcgatcgaagtgataagtagtaatcgcgtcgcttagcatgcttatatttcttctctttt

SEQ ID NO: 39293 - DNA, 262 bp, Gossypium hirsutum
  unsure (1)..(262): unsure at all n locations
  Clone ID: LIB3146-051-Q1-K1-B5
cgcgtccggtctaaatcgcgatcnacccttcttagtttttttttcttaaaagaaaaacaangtgagtgctgcgtttataaaacaaccagtcctcccccgcagaaacaatactttaagcatttatactaaagctaaccacaaaacaactaccaccgacaacaaacagattacaaaacgccctcccgataataagaatcaatgctattcctcccatccatgcaaccaacatcttctaatacaatgttaccaaaacacaaattaa

SEQ ID NO: 39294 - DNA, 354 bp, Gossypium hirsutum
  Clone ID: LIB3146-051-Q1-K1-C2
cccacgcgtccgcttgaggaagaacataccaaacattgagaaagctgttaggaagatggagtcacataccatgtgagagcatcatccgtagacggacactgaaatgccggatttcaaatatgtaattttgaaacttaacctcagcatctatggtggctatgcacacacttgccacttccccttcccctttcaaaagactatatcactgtttcgatactgtaatgcttttgaatcccgttttggaatactgtggcagatctagcctgtcggaattcatgtgaattgtgtaatcgatgctgatacttatctagaatgtatgtgatatgctttggcaagaaagtttatattcataat

SEQ ID NO: 39295 - DNA, 283 bp, Gossypium hirsutum
  Clone ID: LIB3146-051-Q1-K1-C3
cccacgcgtccgcccacgcgtccggtcactttgttcatactttccttttttctttttcaggttgaggaaatttatattcttttgttccactttcccttaaacagtgtgacctattttatagtatctatttttaattaataaattgttgagcttaagctccaacttctaggagaaaaaaaaaaaaatgaactattgccgaacaaaagtaatataacgcaatgaaaaaattaaccgctctacagaaaggccatcataacaatgaccatggataaaaacaaaaatc

SEQ ID NO: 39296 - DNA, 277 bp, Gossypium hirsutum
  Clone ID: LIB3146-051-Q1-K1-C7
gccaaacctacactcacccattcatattcctaatgatactaatgacccaccaacagcgagggagcccaaatcaagcttgcggatcgtcaacaggatcaccactctatctacattctcggtcatacaacgtttcaaaaattaacttaccgcatgtatatactgcttaagatcaaaaaacgactacttgagtacaatatatacagttgatacccatacgaatatagcatatatcattatagtcgaactagattcacatatcatgcttaaaaacataaaa

SEQ ID NO: 39297 - DNA, 345 bp, Gossypium hirsutum
  unsure (1)..(345): unsure at all n locations
  Clone ID: LIB3146-051-Q1-K1-D11
ggccgaccgaggcgtccgaggatgttagcacaaattttatctaanttttttttataaacccacaaaaccccaccagggttgctttcctaaaaacaccaccccgcctaagctacaaagcaaaacgtatccatatcacccataggatttgctgcatcacaaaaacaagctatgtgtattctaaccattttgactatactatatcatattattgatattcaagttacattacataactcattttgagataatgaagttgaattacgcttttgtattgccaaagagaaaacaaaatctgaactttattatgtcaccaacaaaaaagaagtttatcaaaaaaacaaacaa

SEQ ID NO: 39298 - DNA, 381 bp, Gossypium hirsutum
  unsure (1)..(381): unsure at all n locations
  Clone ID: LIB3146-051-Q1-K1-D2
cccacgcgtccgcccacgcgtccggcattcccgatgaatttcccaaggggttatggagcagaaaagaaggtgagagcttggatggaggagtttcagaagcttccgtacatatctccgtatgaagattctcggcatattgatcctaatagtgagcttatggagaaaagggctgttggtgtattgcatgagtttttgagcttgacaattcataagaagaccaagaggaactacttgagaagcttgcgagaggagctgaacatcccgcataagtttactcgattgtttactagatatcctgggattttctacctctcgttgaagtgcanaacgacgactgtggctctcaaggaaggatacagacgggaaaactagtgaatcaca

SEQ ID NO: 39299 - DNA, 356 bp, Gossypium hirsutum
  Clone ID: LIB3146-051-Q1-K1-D6
ggcaagtttacataatatttttacttgaatgattttcacattgctttttagctgtgggatttgttgaattcaggaataaagaaacattcccagtgaagattccagcctggaaacactgcaactgcataagatccagatgtgtgaaactttattgtgagtgctttgcagcagggatttactgcgataattgtgcatgccagaactgtttgaacaatccagattatgacgatactgttcttgatactcgacaacaaattgaattgcgtgaccctcttgcatttgcttcacctgttgttttcccatccaatgattctcctaatgttactggtcatggaaacttgatgaacgctggatca

SEQ ID NO: 39300 - DNA, 337 bp, Gossypium hirsutum
  unsure (1)..(337): unsure at all n locations
  Clone ID: LIB3146-051-Q1-K1-D9
gtctacaaacatttctattgctgggtttaatggatgaaaactgtgcattagatcaacatggttgaccttgtaaatcctctgattgaagctatacttctttccatgatgagtatcctctttttaagctattgctacacaaatggcaagtcaaatgaagtcatggttcatttnaaaaaaaaaaaaaaaatgattaaaaaaaataaaaataaaaaaaaaatttttttttgggccgccccctaaaaaaaaacccaaactttatctcccggggggggcggcctgtaaaggtttcttatattgaaaccccatattgtgattttcttgggccgcttttttttaa

SEQ ID NO: 39301 - DNA, 253 bp, Gossypium hirsutum
  unsure (1)..(253): unsure at all n locations
  Clone ID: LIB3146-051-Q1-K1-E12
cccaaccattanaaaaattatacacagacttattttttcaaatctgccaccaacaactgagggggtttctttattgtgtacccaatttccacaatacaaacatttcctttgatccaatatgaaccttttataataaacaaattgctactcatcaatatactaacaagactctatgttatctacaccaattactataatatacaaccattaaaagcaccttcaccaaaaactctcctcatataattctttttct

SEQ ID NO: 39302 - DNA, 350 bp, Gossypium hirsutum
  Clone ID: LIB3146-051-Q1-K1-E6
gctgtgtctcaggtgaaaagaagttggttgaagaaggttcagcaagaatggagtattctagagaaaaaccttcctggttagcactttatcttactcttcataatgatttaaagtgttaactctgccttcattttgttggttaccattgtttaaattttgaaggcagttgctattttctcatgagactatgtttggcctgtgcagaaaccatctatgtccgtgtatgcgaggaaaggatcaatttactacgagcagcccttgttggtgctcctggcacaccctaccatgacgggttgttcttttttgacatttctcttccttctgactacccatatgaaccaccattggtg

SEQ ID NO: 39303 - DNA, 369 bp, Gossypium hirsutum
  unsure (1)..(369): unsure at all n locations
  Clone ID: LIB3146-051-Q1-K1-F11
gacccacgcgtcctcttacccatttaaatacctattatcacgcttcttttttcaaatattctcccatcatctgagtgggttttttataatattacccagcccatacaacatangaaaaagcatatgacccaccttacatccattaaacactctttatgaatactacacaccaacaaactaactcttttcaatactctctacataaaaatcccacaaaaataatccttttttaattccaacacaaaacacaaatcataatttaaatcatttttaatggataaaaataaaaaaatctagctacctaactatatcttcttgaataccaacttgataaaacatcccttactcattcaaattttaactaccaac

SEQ ID NO: 39304 - DNA, 229 bp, Gossypium hirsutum
  Clone ID: LIB3146-051-Q1-K1-F2
cctatttttacttagaataatttgcaaattttttatcatccccgacatccggacccggggcaggattttttaaacggaggcttacaacacactccgttacacgttcttaaaattaacccctgacttgccaacaaccagtgggtttgcgttgttccacacgtgctacaacttgtcttcaaaaaccactgttatggtccccacggttgcgttttattttaacagcggactg

SEQ ID NO: 39305 - DNA, 386 bp, Gossypium hirsutum
  unsure (1)..(386): unsure at all n locations
  Clone ID: LIB3146-051-Q1-K1-F4
cccacgcgtccggggagaatggtcgcaatctagctcgcttaagagagtcaaaatttgtgggtatttcgatgcgaaaggaatggcgaattcnaatcaccactcaacatcattgtacggttcaggtgcgatgaacatgcaacgaaacccagaagaggaggaggaggacgttcccggcggaggcggcggaggaggtgaagagtcggtggataaccctcagattggataccaagaaagcggcggcggggttgttacggttatgaataatggcatggaagaagcttctcacgccaatctttatggtcaaggatccgatttaaccgccgttcagggtaattcaagtgctgatcagctcaccctctcgtttcaaggggaagtttacgtctttg

SEQ ID NO: 39306 - DNA, 223 bp, Gossypium hirsutum
  Clone ID: LIB3146-051-Q1-K1-F9
gttatatgtatatttggcttgggttattcagatttaatccaattctttttgttcgtcgcacttagtaagcattagttgttaagttgaagaattttttggttaaatgttagaaagggcttactgctttgaacactgtttgcaaaagtgactttgcaaaagtgatctgctttgaacattagttgtatgatggcaatatctaatcaaccataattcttctctaggc

SEQ ID NO: 39307 - DNA, 332 bp, Gossypium hirsutum
  Clone ID: LIB3146-051-Q1-K1-G1
gcgggaatgcatatctctttggaagatatacgagagacagatccatgcttgtatagcagctgcaagaagattctggagatggatgctgagtttattgattcagatgctttgggattgacatttgtcagagaagttgaggagttaggatccaggagacttgttgagctggttgctggtgggaaaaacattgttgtaaatagcaagaataggcaggaatatgttaatcttcttattcgggatcgatttgtaacgtccatttctgaacaggtagaccatttttcccaaggttttggccatattctttctaactcaaggctgcagaagttcttttt

SEQ ID NO: 39308 - DNA, 165 bp, Gossypium hirsutum
  unsure (1)..(165): unsure at all n locations
  Clone ID: LIB3146-051-Q1-K1-G5
agttggcgtaccagcatcttcatangtgagtaaatatctaatttatataagtagtcaaccatgaaatttttataaatatctattcaaatttaatataaaattgtttggatgagttttatatcactctttgtaaacactcatttaaattcgtcttaatttatgatg

SEQ ID NO: 39309 - DNA, 362 bp, Gossypium hirsutum
  unsure (1)..(362): unsure at all n locations
  Clone ID: LIB3146-051-Q1-K1-G8
gaaaaaccctanaatccttttctagattgtaattattcccaaatatggaaataaagtgcagtcttattaataaaagttttaatccccaccacnagtgctgggttgggtttaactggtgatattgatcatcaagacgacgttgctccaaaaagacctggatgagctaataattttgttctggtaaaagtcccgacatggattaatggttcagaagacaaccaatatgtnggtgttggtgctccttttggacctactttggagtcaaaagaaaaacatgcaatccataccaggcttgcacttacaaaccctcctttttgttgcatcaaacccaaaaatcaggtttttaaattcaaatctttttt

SEQ ID NO: 39310 - DNA, 135 bp, Gossypium hirsutum
  Clone ID: LIB3146-051-Q1-K1-H1
gtggatttctgaacaagataaaagaacttttcctttccaaattttggccccaatacttggaggcggcccgatttgggttttattattttcccccggaaaggttgtcttggtgaacctccacttgcgttaccaaaa

SEQ ID NO: 39311 - DNA, 256 bp, Gossypium hirsutum
  unsure (1)..(256): unsure at all n locations
  Clone ID: LIB3146-051-Q1-K1-H6
ccggntcggaataccggggcggaccacagccttccgacacagtnttggaacactaaggccatatatttataacgcggcacacaaacaaaagcgcggactctttatacactgtagccccaaaggggataatcaacggggagaagattcccaaccagggtgggcaggggttttggccaaatattaaaactaaatgaggaaccttcacctttgtaattgctagaagccggcgggtcctaacgggttatggggttaaaat

SEQ ID NO: 39312 - DNA, 301 bp, Gossypium hirsutum
  Clone ID: LIB3146-051-Q1-K1-H7
cccacgcgtccgaacataaactcagcttgaagcctatacatgatagcgataaccaccaagtggatggattaattagaccagagtcatctggacctacaacagtggcttgcatacctgtcaaactagtatttagtaggttacttgagaagatcaataggccaccttcaaaagcagctagtaaagtgattttctccactagtgatgcagtaagaggtccgtcatagattacattgtacattgatacgatgagacattaaatattgttagcaaaataagcaattgctaatttcctctttttgac

SEQ ID NO: 39313 - DNA, 115 bp, Gossypium hirsutum
  Clone ID: LIB3146-052-Q1-K1-A1
cggacgcgtggggcagagtccagctgtggcagcagcgaccaagggtggcgcgaggtggtgacaccacaagcacaggggagttgtggggcgcaggataataataaggcggtggttg

SEQ ID NO: 39314 - DNA, 277 bp, Gossypium hirsutum
  unsure (1)..(277): unsure at all n locations
  Clone ID: LIB3146-052-Q1-K1-A5
gcaggtttccggnaaccggaacttcccgggnntcgacccacgccgnntccggagatgaatgggaggtatgtgccatcggagagacgtacccaacttacgagaaggtcttaacgttgtgcgatgcatccacaaggncgatgtgcattgtttgtcacccggcaaaggctttttgtgtgccgtnntattgtggtttttgcggtcttgtaccagggacttaaagcaagattggtccctgtttgtatttgggtgtggccgacactcctttgggagggggcca

SEQ ID NO: 39315 - DNA, 296 bp, Gossypium hirsutum
  Clone ID: LIB3146-052-Q1-K1-A7
gttcagagcacacagttgttgttactgtgaatatacaccaaggcttataaagaaattagaggatatcagggtcaaaagagttgcagctggcttgttgcattcagcatgcattgatggaactgggtctttgtttgtgtttggggataaagtggtaggtaatcttggatttggggaggccaagaatgcaaccatgccatccatgatcaatacattgccatattcagaagaagttgcatgtggtggctaccacacttgtgttgtaacaatcaggtgaccgggattctgtttaacaattt

SEQ ID NO: 39316 - DNA, 293 bp, Gossypium hirsutum
  Clone ID: LIB3146-052-Q1-K1-B2
gaataagatgttggttttagccgagaaagtgggttggaggagcaataaacaaaactgctgtacttcctcctcgtattggttatagatcctgcaacccacaagaagaggaggaaatacagaactttttgtgctgagtatggagtgaaaaggcaggtatgcaaggtttgaatgcttattaacagaacgtgaataagccgccaccggaattagagttgttaattctcatggttgctaaacgagtataatgacatgtgaaacatgtatatacaagacgcagcctggattaatgagac

SEQ ID NO: 39317 - DNA, 295 bp, Gossypium hirsutum
  Clone ID: LIB3146-052-Q1-K1-B5
gtttcttttaataaacaataaaaaaggcataaaataaaaggaaagaacagaataagatgatttgtgaatgggaaagaaaaaccgaaaatcacctttcaagtttttatatttctctcgaattttttgtattcgaatccgtgtgttctttttttacaacgtttgtattggctttatatcgcccgaattacagaaaatcaaaaagaaaataaaaaatctcctcccccgaatccccctttttccttattttccccatttttgctgttgttttctgccttttctgctttgttgcgtttgt

SEQ ID NO: 39318 - DNA, 165 bp, Gossypium hirsutum
  Clone ID: LIB3146-052-Q1-K1-C6
ccacctcgctcggtcgactcattagacgcggtaatcagcaaccagcaaccttaaacagcaaagctcccaatgctacttttcaccacaagattaaccaagcctcgggacgtcaagctttaaatcacctaaggcgtgtctaactgcccttttgtattagattcaatt

SEQ ID NO: 39319 - DNA, 244 bp, Gossypium hirsutum
  Clone ID: LIB3146-052-Q1-K1-C7
cgtcggccgattcccggtcacccacctcggccctgatgtcatgtgcttgggagagaaacggtttgcaaacttttaagcggggtatgctggaagtacaagaggtacatttaatttagctttgtgcaaacgagctaaggactgcactcaaattttacccgtgtctaccgagcatttatctaaatgcagtaaggatcagtggggtctccacagaatccaatttcttccaatttacagctcaagggaa

SEQ ID NO: 39320 - DNA, 201 bp, Gossypium hirsutum
  Clone ID: LIB3146-052-Q1-K1-C8
gtgaggctgtggtcattcggcatttatactaaccgaaggatacagtgatgagaggggtcaattaagcaaattggtggtactttgcctaagcccaagaagacatccttgaacattgcatgctataggatgaagttattctttacccttgttgcatattcctcagtcaaccattcgatgaaattcttgactgctcattcagat

SEQ ID NO: 39321 - DNA, 290 bp, Gossypium hirsutum
  Clone ID: LIB3146-052-Q1-K1-D6
ggacactttgcacgacaatgcaccactggtgcagcatctagcttatgctacaagtgtggagaaggagaacactctattcatgaatgcagttctgctatggttggtaaaagaaatcgtgagtcatctactccaaatctaagatctcgtttagaaaataaagatctcttgggatacaagtctgtacctcatgataatggcaagagccgctgcaaaaggagaaaaaatccagtttgaagaaaaaggcttcaatacaccacgaaaagaaaagaaaagaggtggttggattgcag

SEQ ID NO: 39322 - DNA, 382 bp, Gossypium hirsutum
  Clone ID: LIB3146-052-Q1-K1-D7
gcaggttaccgggaccggaacttcccgggtgcgacaccactgccgtccgcagtatattcggatgctttatattcaacgaactattacgtaattgcatggtataaacacaatcatgacgctgtactttggtgcagaactgaatgatatgtataccctatcgttcgtttcgtgaggtgtcgcgatacgcaatattgtatctttacacacatttaatatcttttaaaatgtttttgtttttgtgtgtaaaaagttacaaggtcaatcgttatacaccatatcgcggatatattgtatgttcggacatagtggttagagcaaggagggacacatgactactattcttggatttttattttttatttttgatcaaaatactactatt

SEQ ID NO: 39323 - DNA, 290 bp, Gossypium hirsutum
  Clone ID: LIB3146-052-Q1-K1-D8
ggctgctgcccggtcctttttaatttttccttgttatttaatggttatattgatgtaaaaaagaaaaaccaaaaaaaggaaagggatcaaaattgttgcaattgtcgttcatgtagaatatataattatagatttttatatatagattttgacgaaatatgtaggaaatgtgaagaaaaaaaaaagggggacaaaattatgaaagggagagagaaaaggttgtagatctatcgagatgaggtgtaataatttggtggggtctgcttaagaaaaggggcaggtcttgaccg

SEQ ID NO: 39324 - DNA, 206 bp, Gossypium hirsutum
  unsure (1)..(206): unsure at all n locations
  Clone ID: LIB3146-052-Q1-K1-E2
ntacgacctcacgttngtccgcccactgctgtccgatttggtgttcttcattttacttatattttaccctgtggggattttttacattttgctatgttaacgctcggtcgaacgtgagtatgtggtgaattcgtgttcgctaattatcgatgtatttgaaaatttgacaacgaatttgttgtctttaaatgttattgatgtgtttg

SEQ ID NO: 39325 - DNA, 290 bp, Gossypium hirsutum
  Clone ID: LIB3146-052-Q1-K1-E6
gttcgaggctgtggtccattcggagcatattcatcaactaaaccgcaaaggataacagttgattcggaggaagtggagttcgaatatgaaggcaaatctggtttggttacttttgcactaaaagtcccagaggaagagcagtacctctggaacattgtcattgagctataaggagattcgaaagttttattcccttttcagcccttgtttgtcgatgatttcctacagttcgaaccatttccgaatgagaatttccctatgagctgacttcatttcaagaatgaaatgtg

SEQ ID NO: 39326 - DNA, 268 bp, Gossypium hirsutum
  Clone ID: LIB3146-052-Q1-K1-F1
cggacgcgtgggcgtactcgtggggtttttgtcatttcagatgttttagctagttgcaattgttgaagggaatgggagatcctaatattttgggtttgaagtagtaaaaggacatcggttttcattcattttcttcccttttctctattatattatgtaataggccaactttaatcaatttttattatattccattaattatgtggaaaaattctctttttttttttaattattattaccgaaaatgagtatcaattcattttcttca

SEQ ID NO: 39327 - DNA, 291 bp, Gossypium hirsutum
  Clone ID: LIB3146-052-Q1-K1-G2
ctttttaatctctattaattcgtaatgtagtgtcttatgtggtcaaaatatataaatttaaattgataattctctaaatatggaaacctgataagaaattgggagtaaaatatacgtggaatctatggtgtagtttgttatgggtgacagattaaaatgcatgtttctagtttccaagtaatatcatcttgccatttttatgttagggtgtgaggtaagtgtgcttttagttttacttaagcatcagcataagatagatgcatctggaggtgctatgacatagtttgtagc

SEQ ID NO: 39328 - DNA, 242 bp, Gossypium hirsutum
  Clone ID: LIB3146-052-Q1-K1-H1
gaaaaggttatggtgggatgaaccgacaatgaaagagctgggggtgcacaatatccaccatctggtgtgggtgagggccaactacttggtgcttgactattgagccgacattgttatgatgcgtgccatgcctgaggagtgagacatcaccaccactagtgacggccggctacgatggatcggtggggtacattgtaaaatatgtggatggggtgatgataaggaagaaaagtcatcatata

SEQ ID NO: 39329 - DNA, 294 bp, Gossypium hirsutum
  unsure (1)..(294): unsure at all n locations
  Clone ID: LIB3146-053-Q1-K1-A1
cccacgcgtncnnngactcttgggcggactctttttttcgaatacgangatgtnccactgacggggtaaattctcagcataaactaancaaaaaccattctatccccaacaacaagtaaaggaagatgcataaagacaccattgtggaattgcttttaataggcaaagcaagctccttttttttgtcgaagcttttcaattactgctacagaangnggcttcttcccactcagggttttcagaatattatcctatactataccttattttggctatcatcaatccattgttaat

SEQ ID NO: 39330 - DNA, 389 bp, Gossypium hirsutum
  Clone ID: LIB3146-053-Q1-K1-A2
gacccacgcgtgcgtacaaaaaatttttgccgctcagcgatggctaattctgctcgtcttctcgttttaccggggttcattgcactgtcactttcatgcatgaatgttgctcaaggggcggggacggctcgccgtctcttgcaggcaacaacgacgaccccaccaatatttccaaatttgcctccctttcgtggcttccagtttcctccttacagcggacctttcccggaatataggttgccgccatttccaggtatttcaaacgtccctccttcagcacctggctttcctggctcttcagcacctggctttcctggctcttcagcatctggctttcctggttccttcccttcgttccctgctccaccaacattgcccaacactacccc

SEQ ID NO: 39331 - DNA, 308 bp, Gossypium hirsutum
  Clone ID: LIB3146-053-Q1-K1-A4
ccaaccactcttccgccaactcttccatccactttttctttttcctgcgccgttcgcaaaagctgcaaactttactaaactgttgcataaaattggccccaatctatgtgatcaggtcgccatccgcaccaataataaacaagacaatgttttcaatccattgttcgagaagcgtccaaaacagatttctattcgaagctctttaccttcatacaaggatttgcatccacttatgaagcacacaaacgtcttctccattcaaaggaaatacacgatccttaaacatatattgcatgtcccaccttcat

SEQ ID NO: 39332 - DNA, 239 bp, Gossypium hirsutum
  Clone ID: LIB3146-053-Q1-K1-A9
acaggcttacttacacgctttcgctgtttggactgacactaagcaaccctataattgtggggctattcctgaaaggaacacattaaatttttgcataattaaaaccattggtgacaataggaaaaaaagaaaagtcgtgcttatgtcaactaaaattgcagttcttgagctgcaatgtccaatcaatgtaaacactatgagggcggacctaaactgaagaaacattttttacttattta

SEQ ID NO: 39333 - DNA, 368 bp, Gossypium hirsutum
  unsure (1)..(368): unsure at all n locations
  Clone ID: LIB3146-053-Q1-K1-B2
ccggtaagaattgcccggtcggcccattccggggaaggtccttccattgatggttgcaagggtgactgtgcttacctgtcagtggcttatgggcgacatgcaagggtaattctgtggatcttcctgatggaacctcttacaatagcggtgtttatgttgagagatgcaagtacttagaggaaagtaagtgcgtanggatttgtatcaatacttgtaagcttccaacacagagtttcttcaaggactacatgggggtccctctgctgatggagcctaacttcagcgattatagctgtcagttcaaatttggggttagcccaccattgccggaggatgataacaccctaaaagagtcctgcctggatgta

SEQ ID NO: 39334 - DNA, 361 bp, Gossypium hirsutum
  Clone ID: LIB3146-053-Q1-K1-B6
cccacgcgtccgcccacgcgtccggggtttcggcgcagcaacctttatcccctagggccgtgtaatcatcaattcacccttaaaattggtgagtgacgtaaaaccttcttttgtttcattcaaatccacccttaaaaacccttttccactcgcttttttacccccacttttaccgaaaaaaccaaatcttattgattccttcaccaaaggaaaattctcggttctctttcttttttttttcaaaaatgttcttaaagaaaacaaggtgcatgcgcagaaaaaatattgaagacgaaaactattcaaatcaccttttgattttttgctgggtctttgtattgaaaatgtgtagtatgcgcgc

SEQ ID NO: 39335 - DNA, 271 bp, Gossypium hirsutum
  Clone ID: LIB3146-053-Q1-K1-B8
gtttccccaacttgaaagaagttcaaatttcttttgctacgaaacttggtgaaaaggggagcttgtggacaagctgatttccaatcagtagattttgcattgaactcgtggcctgaaacgcctgagacgatgccgttgtcgttcttggtcaacaaattttgtggggattacatttatgaactgcaataacatataatggcatcacaagcttatcatcttctcttaagggagttaggtactgaatgcttgtaagcacaaaaaccatgggaga

SEQ ID NO: 39336 - DNA, 340 bp, Gossypium hirsutum
  unsure (1)..(340): unsure at all n locations
  Clone ID: LIB3146-053-Q1-K1-D1
cccacgcgtccgcccacgcgtccgcccacgcgttcgcccacgcgttcgnccacgcgttcggaagaaatgtgagagtaatgaattttatggtttggtagctgttctttttttttttttgtaaataaaaaatatttgtgtttgatatttctgttagagcatttggttatgagtgtgggttttccgatacttgcctctgaaatcagatgccatagcctgttcacaccgtatactttttctccgataaccattttaagcttgtatatgtttacgttttgcttcattggacatggtatatgaattttgagctagtatggtaaatgaaggtggtggttgatttcac

SEQ ID NO: 39337 - DNA, 200 bp, Gossypium hirsutum
  Clone ID: LIB3146-053-Q1-K1-D10
taattgaatacctattcaataactaaacttcattgcacaagcctgctcagcacattacaactccttatctgcaaaaaccaattccttactcaacttaaattaaaccctgctcataatgcttaacacagatatgctgatcacatactaaactcaccattactgcgcttaaaacagatctacacccatgatgtcaaatcata

SEQ ID NO: 39338 - DNA, 438 bp, Gossypium hirsutum
  unsure (1)..(438): unsure at all n locations
  Clone ID: LIB3146-053-Q1-K1-D5
ggccggaannccgggccgacgacgcgtccgtcagagagctggattctttgccgcgggagtgttgtctttcggagactgttgccttgggggtggggaagcctccatttgaaccgtgggttcaggttaactttgatgttgggatctatggtcatctacatgctgcaagcgcaggagttgttgttatatatttagaggggttgttgcttggatcagtctgtttctggagtgagtatgtactggatgtggtggttgcggaggctttggcttgtgtgcatgctattcggtttgccagggatctggggcttcggcgagtggagtttgaaggggactcagcagtggtcatttccaagctcaaatctggcgtgattgatagatcaaacattagtgggtatatctgggatgctcgacagttgttattaggctttaagcatttcaaat

SEQ ID NO: 39339 - DNA, 405 bp, Gossypium hirsutum
  Clone ID: LIB3146-053-Q1-K1-D6
ggattatgcacctaaccatgctgcatattatcctttcggagttgatgtattcttatccgggcgaaaaatagatcacatggctagatttatcgaactccctgttattagtcattccgagaaactaccatctatccttgtcgtaaatgttcagattcccttgtatcctgctgcactttttcagagtgaaactgatggagaagggatgagttttgttctttactttaagctttctgacagttactcaaaggagcttccgctccactctcaagaaaacttcaggaggttaattgatgatgaagctgaaaaggttaagggattccctgtggatacaattgtgccatttcgtgaacggttgaaaatattaggtcgtattgcaaatgtggaagatcttcacatgggtgcggc

SEQ ID NO: 39340 - DNA, 414 bp, Gossypium hirsutum
  unsure (1)..(414): unsure at all n locations
  Clone ID: LIB3146-053-Q1-K1-E12
ggaaaacccgggccggccgcacgcgtccggggaaacagtggcgggattccggagaatgttcattgtgctgagtgtggacctccgggcgcnatgtatttcatgtatcgctgctctcttgagtgagctagacaaagccaaaaaattacttttgggagggaccaagtaaaagactagaaataaaaataacaatcatcatagtttgatgtttgtttagagttatttatgattatcatatctaaagtctacgatgtagtgatgtttgtgcggcttctaataatgtttagggatcttttattagcccacaccggctatcaaagagccttagctgattttatatgattgtgtgttttgtttgtaagattacttttgccaaatatagtgttttccaagtttatggcttggatttatgttttc

SEQ ID NO: 39341 - DNA, 409 bp, Gossypium hirsutum
  Clone ID: LIB3146-053-Q1-K1-F11
gccacctgtaacactttttggtcgggcaatgcttaacctccatgatcctaattttcgcgcgtgaggaaaaatgcatatctacaacaaacaaccctctttatgttgtcaatgaaatgaagcaagtagtcataatccaaaacaccaatgaagattctgagaatagattgcaaaatgaactgatggcagaaggctctgcactgcaatgtaagaagttggtgactacggaaactttcgaggaaagattagagaacaagttagatgcagttcaaactgttatgcaaagtgaggagatgagatgggatacttaccatcagtacagatatgaaagcaaacaggctgatgagactacaatgcaatgtgagaatctgacaaggaaggaaattaacaagtgttcttactctatcggata

SEQ ID NO: 39342 - DNA, 330 bp, Gossypium hirsutum
  unsure (1)..(330): unsure at all n locations
  Clone ID: LIB3146-053-Q1-K1-F3
cgtccgcccacgcgtccgcccacgcgtccgcccacgcgtccgttcacgtgaaaaacgaatggtttcgtgacgccggtgccggagtgattgctcatgttgcanacactctgaaacaacaagaatcgtcttcctcgtttatttcctcgagcttgtaagtgcactattgctagtaatgctttgaaagtatattgtataaaataaaacgacaagatgggatgaagaaaaatgaaaatgtctcccatttccattgatttgcacattgttcatctataggcaccggtttaacttgatattttctgaatatatgcatcggatttcaatgttttgccg

SEQ ID NO: 39343 - DNA, 344 bp, Gossypium hirsutum
  unsure (1)..(344): unsure at all n locations
  Clone ID: LIB3146-053-Q1-K1-F7
cccacgcgtccgcccacgcgtccgtcttaaccttactacattacgccgtatcatggctttggctagcaattttcaggacactttcatggcttccggtttcccctccggcgaaaacgactccttcctcatctattttcctgttgggagctataatggctttcgcgtccggtcttgctaataccagcttaaagtataacagtgttggtttctaccaaatggctaagatcgcggtcactccgaccatcgttcttgcggaattcgttctcttccggaaaaccatatcattcaaaaaggtgcatcggcaaacacccttcggctctctccgattatccggncttatactc

SEQ ID NO: 39344 - DNA, 314 bp, Gossypium hirsutum
  Clone ID: LIB3146-053-Q1-K1-F8
cccacgcgtccgcaaaattggaaggatctcctctttatctgccttatttacaaccaaaagagaaagggtggaaaatgaaggaaaacataccatctacctgggttgttcatgtagggtaagtcagttgagaacctagtagtttttcttttttgtttagatttcatttactcttttctccataaggtttggaggaagatttgaaaggagagggaagaaggctttatcctttactctcttagtatttgcatcagggaatgttatatagatttcatgaatttttttttcttttttggaactcaaacatatgtgttgac

SEQ ID NO: 39345 - DNA, 208 bp, Gossypium hirsutum
  Clone ID: LIB3146-053-Q1-K1-G3
cccactcattcggactattattgtacctcgggtaatacttagtgaaatgattagtttgggggaggttttgggtgaaagtctgggatttagttgcacctatgtatacaccaacgaaattcgggactcccttctacaatccttctgaccctgcgtcttctgctgtatctgttgaaggagctggcgaacgaacccacattcattcccgttg

SEQ ID NO: 39346 - DNA, 379 bp, Gossypium hirsutum
  Clone ID: LIB3146-053-Q1-K1-G6
ccgggaaagaccgggccggccgacccactcgtacttccacccattccaaattaaatctggttgtaatcaagtaatgcttttacttgactttgctgatggattcaatgacttgttttccaataacaacaaacaattctggtatgttgctctttttattgtttcaactggtccaccttgggatgcatttggtgttggtcttttgaagtggaaaatgcaaagtgcagattaatcaatggtgcccttatccatcaactgctagacttcagtttctgcaaatgaaacttatgtcagcattgagtatgaagcttcaaccatgtttgatctgcaaaaccttgtgatatctatacctcttccagctcttcgggaggcaccaaatgtc

SEQ ID NO: 39347 - DNA, 317 bp, Gossypium hirsutum
  unsure (1)..(317): unsure at all n locations
  Clone ID: LIB3146-053-Q1-K1-H11
gaaaacccggtccgacccacgcgtccgcggacgcgtgggtttcagttgaaatgggtttgaaggagcttgcatccttaaaggttgagggagccattgtgaatgcattggcccaacaganaanagcaagttctgttagaatttcattgtctgatatcaagtcaccacgtgatacaaagtttatggaggcatttgaattgagtccagaggagtctgaggatgttctcttcaaggaggcatggcttacatatatttggagaagagccaaatcccatggcatagaggaggatacagccaaagagcgacttaaattttggatc

SEQ ID NO: 39348 - DNA, 301 bp, Gossypium hirsutum
  Clone ID: LIB3146-053-Q1-K1-H3
tgattataacgctaggcccgcctccaaaagatgaaaggaaaaaggatgaccgtttgaaatgcgagggcatacaaagctgtgacacatcaccacaacgtaattcatgaccaaccggctcttttccagaaaacaatttgtcatcgatgatttacattctaagaagcccaatttttcctacgcctatcttaacgataatctccatacgatctatgacgcgaaggaccccacttcgatctttgttttaaagttcacgactcattttggaggtggcaaaactactgaatcagggttgatttatgat

SEQ ID NO: 39349 - DNA, 389 bp, Gossypium hirsutum
  Clone ID: LIB3146-053-Q1-K1-H4
cccacgcgtccgaaagccctctttgcagagttcccacaagtaatgcagcagggttttatgtgcgtacaaggtggcatttgtttatcaagcatgggaagagcagtctcttatgaaagagcagtggcttggaaagtggtaaatgatgaagagaatgctcactgtatctgcttcatgttcataaactggtcttttgtatgaaaattctaaatatataaaaatagggtctagatagcagcttagattagaaaaatctccccctttcaactgttttcttttagtctttttaaaccttttaagtgatatgatacttgtacaatgatgttgaaccaaatggtgtaataagggcctccattttgggttaccctcattttcttttggatttggttcat

SEQ ID NO: 39350 - DNA, 217 bp, Gossypium hirsutum
  Clone ID: LIB3146-053-Q1-K1-H7
cttacccttaaatcaacccacactttacactttatcatcactcgcctttacctcaatacgcgtcttttattcctacacttatacctatcaacttacatactctaaattcaaaactcactgtcattaataaactttcatcaaatcctattacagctccttacaatactagtaaacacctatatcatcataaaatcacttgtctattctcatgacttgt

SEQ ID NO: 39351 - DNA, 228 bp, Gossypium hirsutum
  Clone ID: LIB3146-054-Q1-K1-A10
acatccatatttatatagctctatatacgtcatccaagacttaacatatatcattcacgcaggggacaggtgtaagttcttacatattgagataataacccttttgtcatatatgacgttacatgtatctgccaccacgtgcctgcagtgaggcttcagtcattgagcagaaatccgtataattttttatttggttaaatgaatatgctgctgcttgcaaccattgaa

SEQ ID NO: 39352 - DNA, 320 bp, Gossypium hirsutum
  Clone ID: LIB3146-054-Q1-K1-B10
tccttctgcagttagtgttgtttgcatggcgctgggagggagtggccttgctgtgttttggaggaaccgaccaattcccgtggatgataaggatgatttcatggaatgagtgtttttccaatctcatttttaggcaacttttctttttcttttgatttcaaggggaagccccttgttgcgtggatttaatataatatatttttactctcaggtgaattttgaacatggacatatcaacttttctttttcatttagagaatactaagtgaaagttgggaaattaattttcaattggtattttctttttgataattcagctg

SEQ ID NO: 39353 - DNA, 159 bp, Gossypium hirsutum
  unsure (1)..(159): unsure at all n locations
  Clone ID: LIB3146-054-Q1-K1-B12
ctatttttcnaaaattcaccatttaaaaggggtcaaacaaaagtcctttgcgtacacactaaataccgcctgtgaggtcgaggctcaaccgccggaaaacctgcgaacaatgcctgcacagagccaaacttaccgatgagaggtgccagggctttcttc

SEQ ID NO: 39354 - DNA, 217 bp, Gossypium hirsutum
  Clone ID: LIB3146-054-Q1-K1-B2
gtgaaagaataggaactaggaacacttgttgatttagaaaaaggaagattgtccatgtgaatagctttgctttagtgagtggttcaacgaataatcaatcagactgtaaaaaacatatgtataaatgttttgcatttaatttgaacttaattcattgctggttgggtgggcaaaaaaaaagaatgatttccataaaaggatcattgaaaaacatagg

SEQ ID NO: 39355 - DNA, 366 bp, Gossypium hirsutum
  Clone ID: LIB3146-054-Q1-K1-B3
ctctgaacttgtaaatgcgttttcttgcatgctcagcgccaacccaaggaggaaacgcggccgtaaagggtttaaacagcccttcatcatatgagctaagcttatattgaagattctgcaaaggttcctatgaagtattcagctttttgcatgtgttgaaagaaaaccgagtacgaccacagggttgctgttttggcactacctagcaagctatgttcataccttggattatatactatatagtcactatacgtaacatagctgtgttttggcagttaggtctgctgtcagcttgttatatccgctttctagtttaatacatacaaactccaattatatctatattgatatatatttccattgagc

SEQ ID NO: 39356 - DNA, 334 bp, Gossypium hirsutum
  Clone ID: LIB3146-054-Q1-K1-B8
gtttaaaatactacctgttcaacttacttttatgatgatttcacagccatatggcgggtgagtgactgccaatattcattttatcacttatatattgtgacttaaaataattgtcagacagaaaacatctttttgcttgcgctgtgtttttcttgtttgaggatccaggcaagaatgcttattccaaaatactatgacatgttatgacaaaaatagatgcacatacattgacagaactattcaaccgatccgactaaaatgaataaccatgtgattatttagcattcacaataaagatgcactaccctaatgtacatgcttaataaaactttat

SEQ ID NO: 39357 - DNA, 329 bp, Gossypium hirsutum
  Clone ID: LIB3146-054-Q1-K1-C1
gcaaaaaaaatcactcaaaactgcagtctcgaattcatctaatactttctcggcatctgatcatagggttacagaatcaactgtaaaacccctatacaattagtggaactggattaaaagttactctgttacttgccaatctccataagcggcaaaaataccggaaatattacatgcttctctaccacctgaaagggtaagaacttttcaactgatttctgtactagtcaccaaaactggcgaacagttgagctactaattgttcacgggttactaccattattccttttggtccaagggctgaagttgcacatgccgacaaggtcttt

SEQ ID NO: 39358 - DNA, 235 bp, Gossypium hirsutum
  Clone ID: LIB3146-054-Q1-K1-C12
ggtgcttggcgagcttagcctggcagcaagcgtgtccaaggcatagcctggactgtccaatcacagcacatcgcgactactgcgctgcgcgcatgccaaggctatcgaactggtggctcatggacgtacagttggctcttatgagcacgctggagctggcgctgttggaggtcgtgctggtcggtctccaaatagaaacgctagtgcatgtggaggcagatattctagggagcgg

SEQ ID NO: 39359 - DNA, 180 bp, Gossypium hirsutum
  Clone ID: LIB3146-054-Q1-K1-C2
gcaaaaaaaatccctcacaactgcattctcaaattcatctaatactttctcctcctccgaccatagggatacaaaatcaactgtaaaactcctatttaattaattaaactggattaaaagttactctttttcttggcagtctccataaacctccaaaattctgcaaattttacatgcttc

SEQ ID NO: 39360 - DNA, 364 bp, Gossypium hirsutum
  Clone ID: LIB3146-054-Q1-K1-C7
catataagtaaataataaaaattatagataatgttacttacaagtgtgttatttatactaaggatgtggatggagaggaggaggaggaggaaaaatatatgaacgacttgtgtataaattgataacatgcttgattatagttgataaacgttaaattagaaatgatataatgttttatttgtatttctataatccgaacttaatatttaattgctaaaattattatctaatatgtatggtaagtgcattgggatgattatttgaattggagtgaacattggttgaaattgaaaagtgaatttaattatttgctagaaaaaaaaaagaaaaggaaaaaaaaaaaaaaaaaggcataaaaagggcc

SEQ ID NO: 39361 - DNA, 324 bp, Gossypium hirsutum
  Clone ID: LIB3146-054-Q1-K1-D10
aaagagttgggaagtattgactcggcaggagcgaagggagaagggaggaataaggaggtgacaactccactgaggcgatcatgccagaatccaaaatcgtgcagacattgtatccccatgaaggcgagagtgaagagtataatttgaataattgtgggcattatcagaaacagcatctctgctgtttcatgttccagaaaagtaatgtaacgtatgtagaattagaaattgttctactctaatcttgtaggaaatgatcattataaggctgactaattgttggtcacttccaattttatgttaactatcagtttatcaccttta

SEQ ID NO: 39362 - DNA, 153 bp, Gossypium hirsutum
  Clone ID: LIB3146-054-Q1-K1-D3
ccgcggacgcgtgggcggacgcgtgggcacaaattcagttactttatatgtattcccactgccgctccatttgatctcttttagagatcaaacattttccaaatgcttaaaccatttttgtgtgtaaaatttggactgctacagttgggtttc

SEQ ID NO: 39363 - DNA, 385 bp, Gossypium hirsutum
  unsure (1)..(385): unsure at all n locations
  Clone ID: LIB3146-054-Q1-K1-D4
cccacgcgtccgggccggccacctctgccgtcaccgcgagccactgtcgtcggccgccgtacacggcgaccgaaaaaaggtatggcgaggatcacggagcccgtaggttgcgcgagtaacggcgtacgatacggaggtgggtagcagcgtgtgggagggggctgcttcgggtgtgcagcgctggagagatgttgctgctagggttttttcattaggtttaggtgggttttggggtattgggttattgggtgtattgggcttagagattgngttaggtttaattagttaattgttttgggttttaaatgtattgggccctgggcataaattgggcttaagacgagtaatgttaataagagttattgaaataaacaatgttatgatt

SEQ ID NO: 39364 - DNA, 231 bp, Gossypium hirsutum
  Clone ID: LIB3146-054-Q1-K1-D6
atgattaagtttctaaatgtttgcccctttcttttttgttttgttttccatcttttctccattggtggttgtgccacaataagtcataagatggtagagaaatttctaaattatgcactactctcttgtaattttgttatataaaacacaagtcctttaccgattcagtcaactattagcttttaatttatagttaaataaactctttaacatcaattgttatttctcttg

SEQ ID NO: 39365 - DNA, 278 bp, Gossypium hirsutum
  Clone ID: LIB3146-054-Q1-K1-D7
cggactcatgggttaacccacgcctcctttttcgcttgttctgaaatcccggggtggtacattcttgtttcaaacacaaaccatcctaagataatagtatacatccatatatcatacaatactattttaatattcaactctttgactcacaacttctataaacttttagacaactataagaagataatccaccgattactcaactaatccacatttaacagaattgctctgaaagagtgaaaaagaagatctccacgcgctagatgatccaagaatgc

SEQ ID NO: 39366 - DNA, 402 bp, Gossypium hirsutum
  Clone ID: LIB3146-054-Q1-K1-E1
cccacgcgtccgaaccccatattccgaggctaaacttcccatcaagagtgatgttcccgaaggatgtgtgataatacgagaacatgttccgattaccaacctcttttcttgtctttggttcaatgaagtcgatcgttttacttcccgagaccaaattagtttctcaaccgttagagacaagatcgcggcgaagacaggttggatggttaacatgttcttggattgtgaacgccgtaactttgtcgttcagcaatatcataaggaagttttagcgtatttggctcaaatggctcctccggttattaacccgccaccgccgccgacgtcgtcacggtctttcgtccgatgatccaccaaggattttcgcactcaaaacttcggatgaaaggaacaagaacatgg

SEQ ID NO: 39367 - DNA, 210 bp, Gossypium hirsutum
  Clone ID: LIB3146-054-Q1-K1-E11
ctgatgacgatgtcttcattaaacgaatagtagctatggaaggtgatactgctgaggctcatacttgaagacttttcgttacttggattggacctactgtacagatcatgactgaagctccatcaaatgaaagggcaccaattgaagtaccctagaattcctgctttgtggtgggcgacaatcgtactgatagctattattcccacgttt

SEQ ID NO: 39368 - DNA, 393 bp, Gossypium hirsutum
  Clone ID: LIB3146-054-Q1-K1-E6
cggacgcgtgggttgttctggaagtagtgaataagatgctatccttgcaacgcagccttgcatcttatatgaccgaccaagacatcgaaaagggcatcttgtatccatctatcaatagtattcgagatatcacagctaaggttggggcatcagttgtgcgagctgctgttgcagaggaagtggcggaaggatatggaaaggttgatcctgaggaactggcctacatgtcaaaagaggagacggtggaatacgtacgtcgaaacatgtggtaccctaattatagcccgctcgttcaaaagaagtagtctttattcctttttgtcacaattttgatttggagttttcgggttatttctttgtggactccgaccccaagttctgcggcagaaaaat

SEQ ID NO: 39369 - DNA, 238 bp, Gossypium hirsutum
  Clone ID: LIB3146-054-Q1-K1-E9
gatgacagggtctttgaaaggggtggagtaaaattgatagttgataacatatcctatgattttgtaaaaggagcaacagttgattacattgaggagttaattcgttcggcgttcctcgtaacaacaaacccaagtgcagttggagggtgcagttgtaaaagttcattcatggtcaaagagtagcctttgattttcagctttgccaaaccagttagtaaatcatttttctaccattttt

SEQ ID NO: 39370 - DNA, 328 bp, Gossypium hirsutum
  Clone ID: LIB3146-054-Q1-K1-F1
cccacgcgtccgcggacgcgtgggtaaacaccttgggggtccattgcttttaggtaattaggtaattttattccagtttcagaaagtatattattcatttgaattgtgaatcattcttgaaagtattatagtgcaagttccctggaaatatcttttgttgatttgactgccaatacatatatatggcaatttatggatcatgatagttgatggattttactcacaaatatatatgttgcttagactcgaatcttaattgtcctttagcttatttatttatttatttattttcattcactatgaaataataatattttgtttgagtggt

SEQ ID NO: 39371 - DNA, 308 bp, Gossypium hirsutum
  Clone ID: LIB3146-054-Q1-K1-F12
ggggactttgaaaccgctttgaggttttgtaaagaaagaatggagaaaaattgggttccgaatttttcgactatgaaagctcttgtgaaaggacttgctagcatatttaaagatgaggaagcaaaggaacttataaagaatgttaaggagaagttctccataaatgcagatgcatgggatgaaattgaaaatggattgccccaatatagaatgtaagcagggtgtcctatctaagaatctgatattaaaattaatcaggtcatttatgcttggatatgatataagtagggggctttttacctcatgca

SEQ ID NO: 39372 - DNA, 360 bp, Gossypium hirsutum
  Clone ID: LIB3146-054-Q1-K1-F3
cccacgcgtccgctcaaaatttttgtatcccttgccccaacttctattttttaacaggccctcatatgcgggcccgcgctattctcacaggcccaacccttcttcataattagaatgctgcttcaccattctcaatattaatcgaaccatttctctttcaacctatcgctactattttgacagaatctcaattacattgccaaaagaaaaactttatttggtagttagcaccaccatcccccttatcagctggtactatacctcacgggttaatccttacattccatcctggattattttgattgacaccgctggcctactatgtgagatcagaactttccaaaattatatattttttgt

SEQ ID NO: 39373 - DNA, 303 bp, Gossypium hirsutum
  Clone ID: LIB3146-054-Q1-K1-F5
agatcagttactttttgaaagatttaaaaagttacaagacttccattgataatgataaagactttatattgcaactgctcaaaataatcgactaagagaatagctaatctaaaaaaaaaccaccttaggaatcctaatcatcggggctatatattttcactccatttactgatagcctgcataactgcttgtttcaccatctgagcatttatgccttcagcattactttggttttctcctccaatggcttcaagctggaaattctcttggcaagaaaccctatcgtcgagcacgtcaaggcca

SEQ ID NO: 39374 - DNA, 394 bp, Gossypium hirsutum
  Clone ID: LIB3146-054-Q1-K1-F7
aaaattgttttgatgacactatcgatgaagtttcaacagccaatcatcctcctacacccgatgaggagtacagtggaaacgagggttcattatcagcatccgggtgcaccaatagccctctccacggtaccatttccagtgcaaccaatagctacttctttgacagaatctcagctacatggccagaggaaaaacttcttttggcagctcggaccaggagcccccggatcagtttggactatacctcaggggttaatccaaacattccagcctggggtatggtgattgtgactgctggcctacgaggtgagatcagaacttaccaaaattttggattgccggttcgaatttgatgaaccaaaaaaaagaaaatggtaggtagcatcaaagtgtt

SEQ ID NO: 39375 - DNA, 293 bp, Gossypium hirsutum
  Clone ID: LIB3146-054-Q1-K1-G10
atgttaagttggattgagcctttctgattagaatttcggaattagatcatgtaatcattttttatatttaataaatttcgagtctggaattgtgaaaaaaaaacaaacaaaagcacaaaaaaaagtaacaaaagaatacgccatgactgaaaaaatatgacagaggattatatcatgcttacaccatctttctttatatttctggtcgcctgatttatttttttatgtaatggggggggccccctttatgggtcccaattttcctccccgggccttgcagttttttatttttt

SEQ ID NO: 39376 - DNA, 319 bp, Gossypium hirsutum
  Clone ID: LIB3146-054-Q1-K1-G11
agggtatgcggttggccaaattctgtctgcatcctgcaagggacactacatcatcgtgccgactattggatgcgattgtgagccattgtgtacctgtgatagtcagcgacaaaagcgagtttccctttgaggacgaaatcgactacactaaatcctcaattgtcttctctatgaaagaggcattagaaccgggttatttggtgaatcagctgcgccaatttccaaaggatagatgggttgaaatgtggaagcggcttaagcaggtttcccatcattatgaattccagtaccctcccgaagaggaggatgcagtctatat

SEQ ID NO: 39377 - DNA, 398 bp, Gossypium hirsutum
  Clone ID: LIB3146-054-Q1-K1-G3
cccacgcgtccggacccacgcgtccgtgcttcttgagttgctgagcggaaagaaggcactcgatatgggtgatgagaaccaacctttagtggctgattgggcatggtcattggtgaagaacgagaaagctttagacgttatcgaagatggcatgccggagttggggtcgccggacgttatggagaaatacgtgttgatagcggttctttgttctcacccggaattacaatgcagaccatctatggatcaggttgtgaaaatgttggaaacagacatttcagttccttcgatccctgataggccaattcctatcgtagctcgtattgatgagattgagagatctataagaagtaatggctcaggtcagttcatcagttctggtggtcatcagatgtttg

SEQ ID NO: 39378 - DNA, 227 bp, Gossypium hirsutum
  unsure (1)..(227): unsure at all n locations
  Clone ID: LIB3146-054-Q1-K1-G4
cccacgcgtccgactttatcggttggagataatgcgaattcaattgttctctgtatatggtgcccaggcatgtaatttactctctctatcacgaaattgtaagatttgattcataatggtggtgaattggacatacatagttcaaatgaacagaagcagggatgaaaatcttgttttcttctataaagtgattgccttgnaaaaaaaaaaaaaaaacaaaaaattac

SEQ ID NO: 39379 - DNA, 341 bp, Gossypium hirsutum
  Clone ID: LIB3146-054-Q1-K1-G5
cccacgcgtccgcccacgcgtccgcggactcgtgggttcatcttcgagcaaccgagtgcttggattcacattcttgctaatctccccatctccccccttttaaataatccctgcatgtttgctttctgttttacttttaactttcagttttcttttttcttctattgttgcaagtgttttccatttttgtgttgaatactatttgtacaattaacttttccatctttttcagagagaaaaaaaaaactgaacatatgtatttttacgctgttcaaaaaataacattctggaagagccaagaaccaaaaggaaaccaaaattgaacaaaaaattataaacac

SEQ ID NO: 39380 - DNA, 230 bp, Gossypium hirsutum
  unsure (1)..(230): unsure at all n locations
  Clone ID: LIB3146-054-Q1-K1-G9
ggcatgtaatgaagggcagagggatgtgttcttcacctattagctagattttacagtaattatgtatgaaataaatgcttatacattttctttatgttacaaaaaaccaaagaaggcagagaagtctagccttcttattcgtgatgtaatttaactctcttgggggtttttatcaaanaaaaaaaaaaaaaaaaaaaaaaaaaaaaaaaaaagaaaaaaaaaaaaaagaa

SEQ ID NO: 39381 - DNA, 393 bp, Gossypium hirsutum
  Clone ID: LIB3146-054-Q1-K1-H4
cccacgcgtccgcccacgcgtccgcggacgcgtgggttggcatacattctcttggctaataaaactaatacgaaacatgttgggcaaggtttgctggacccagaagtgcgtactttaacttttggctatataggactgaacggaaagaaacctataattgtagcaagatctggagaaaatcatgatggacaagcatcggataacagtctactacctggtcttaatgatgacatggcactgaacattctggctcggagcagcagatctgactacccaaatctttcctgtttaaacaagaaatttaggtcactgatcggcagcggttatttatataaactgagacgtcagcttggcataagagaagactgggtttatctagcctgtaatatgatg

SEQ ID NO: 39382 - DNA, 392 bp, Gossypium hirsutum
  Clone ID: LIB3146-054-Q1-K1-H7
cacaagttggactttctgggtagtcaaaggtatatgattgctgagtgaggcttaagacaggcattgtcaaggctatttgatcgaccatgcttgctttagcttctaattgcctacgcacaacatcacttgtctatcgatctgtctgctgaaactataacctggcttgctactaagttgagatgggtgcttgataacttgcacggtgcgtatgaagatagttgggtaaagcctttaggactctggtgatgtatgtatgaggtaattgttgtgatgggtgcttgatgggatcttttcttttgtaaaaagaaaaagcgaggtaggctagtgggattaattctttcttcttgttctcccctttttgatcggtttgatttacatgtattcttggaaaa

SEQ ID NO: 39383 - DNA, 292 bp, Gossypium hirsutum
  Clone ID: LIB3146-054-Q1-K1-H8
cacagtttgactctatggatactcaaattttatcattgctctctgaggcttaagggaggcatttaaaaaggtatttgatcgaccatgcttgctttaacttctaaataccaacgcacagcataacattgctaacgaccagaaagctgaaactactaaccagctctgctactaaatataaatggcatgcttgataattagaacatcccatctgaatataatgggggaaagcctttacgactattgtgacgtaccaatgaagctaactgatcaaattcttgcttgatgaaacaaa

SEQ ID NO: 39384 - DNA, 326 bp, Gossypium hirsutum
  Clone ID: LIB3146-054-Q1-K1-H9
agcccaaaaccatccatatgctaacccaaatcagtttattggctaattatttagctttcaaagaggcccctgaagacttgttcaagttgcaaacaagcccctccataattggtggctttatagatttgccccaagcctaaattagcaaagttgaaaccatcaaccttgccacatgtgtggccagccaagggagggctctttggctgataattttagctatttttagcagcactctttagctataaaaaccccctttaggctgggcatctgaaacacatctcaagcattcacatctttttctctcttctctcttctctccactttct

SEQ ID NO: 39385 - DNA, 257 bp, Gossypium hirsutum
  Clone ID: LIB3146-055-Q1-K1-A4
gtggttttcatgacagatatgctggagagaagatgtgtgcgatgactatgcgtggaagcagcagtgtgggaagcgacgtgctgcgatggaggtgcgcgagcagcgcgatctgcggagcgcaaggagaaactgctagggttttccatttttgggctgatttgagtcagaaaatgggctagggttaattttattgggccatacgggttgttgggttttgtatatttatttgggtccgggcatatttgggcttgtacatt

SEQ ID NO: 39386 - DNA, 142 bp, Gossypium hirsutum
  Clone ID: LIB3146-055-Q1-K1-A8
gacccacgcgtcgcacctcgaggcagagcgagcttctgacactaagtcggtttactacttataatgaagaacacttataggcccccaggcacatgataaacgtctaccttccaagatcaacctcattgacttagagcagctg

SEQ ID NO: 39387 - DNA, 406 bp, Gossypium hirsutum
  Clone ID: LIB3146-055-Q1-K1-B11
cggacgcgtgggcaagagtgaaaagacgaatttgcttgaagatatcatgaagttgtcaatggatagggaaattttgattagattcgttgggggcataggtgacaggatcactgagttattcaggggagaagcacagctaatgggatttagtgcaggcttttgacaataaccattcagattttaaaggcagtgatgaactctttgactcactaaaagcgaacaagactagtcttcttctttcattagaagaagaagagcacaaaacaagagaagtagaagcagttagctgtgcaaatcagaatatacaggagaaactgctatcacaagaaaagttcctgtctgattcaaaacatctagcattgattattgaagatgaaatggaagcaaagcaactggaaatgaagaa

SEQ ID NO: 39388 - DNA, 260 bp, Gossypium hirsutum
  Clone ID: LIB3146-055-Q1-K1-B2
gttctagatctcaaccatcttaaatccttttttttttttttgttgggctactgggatcagagggggtaaagaatatcttaatttctgttgcacaccaaattgagatctttactatgtcaccttaccaagctaatctatacttatctgtaaaagttatccctaacaatggcattgctcagaaaaaaaaaaaggatccaaattaatatacacatgcatgcaacgccgtctcttttatatagtgaaacctaaattcaactcac

SEQ ID NO: 39389 - DNA, 372 bp, Gossypium hirsutum
  Clone ID: LIB3146-055-Q1-K1-B6
cccacgcgtccggtttcagtaacatcaatgcttgctgaagcttgaatcaccatcttcatggtattctaaatatagtttcttgacagtaaccgtggccgacaaggggatcttatctgagtgaagaacgcaattttcaaagtcgaaaatcctgaaccgtgggcagctaaggaaaacttgctccacgtgttaccacccactatcggaaacgattcaagccgggcggtctcgagacatggaaagcaaacacggacgtcggtcgggattttgtcgactaggacccctttaaacaagtttatagttttgagcttctggcacgtaaagatcgcacgaagtaaattaatggaatagttgagaggtatatcaatatgaaac

SEQ ID NO: 39390 - DNA, 364 bp, Gossypium hirsutum
  unsure (1)..(364): unsure at all n locations
  Clone ID: LIB3146-055-Q1-K1-C3
cagcgcgtaccgcgctctgacacactctcgtaagtatttgggtaatcttctagccttatgtacctgctatantgaaatccagtggttcgtgaaatatgaggaggcagtgaattgtggcacccctctaataccacttggtatatgcgtacctgcgtgcactgtatattcacaaggtcggtttagtttctcttccagattggataactgtannggagaagtctttcttttgtgcaatatgcaagtgataccatatatatagtcccatttattaatgagtgagtattgacagagctggtggtacgtattaatgttacactggaagctcgcttgtgattttcggataagtggccatttcgctcgtttc

SEQ ID NO: 39391 - DNA, 180 bp, Gossypium hirsutum
  Clone ID: LIB3146-055-Q1-K1-D12
gcgtcgacccacctctattgggccttgctaggatgcgcaggggtcaccgtctaaacccaaatgggggggacttcgcctcttaaatgccttaagacgtggtttcaacgtattacacccatttaaactggttgcctatcgtttgacctgagtaccgctgtttaagcttttttgtgatttagg

SEQ ID NO: 39392 - DNA, 425 bp, Gossypium hirsutum
  Clone ID: LIB3146-055-Q1-K1-D4
tctaaatcggtttatgtatgccaagccatatactaggagattatggtacagaaaaaaaaggaaagaggaagccaatagatcagaatcattgtgttcacacaatagataaaaattttcaatctagtagaaagcaagtttctaaatcttcatagtaacgattaaaaacaaatattgttcacaaacaagtagagaatacttatatatactcaatttacatgcatgaataagaagacatctacatgagagagagaaagcaagtgagtgcctaattaacttgaagcaccagcagaatctaactagtactgcaaccaaaatccagtggtttgatttgaaattaactaagtcattgcattaacaattcctttcttcatgtagttcactatccatccaatccccgtcccttccttttacctttccacaaatgt

SEQ ID NO: 39393 - DNA, 386 bp, Gossypium hirsutum
  Clone ID: LIB3146-055-Q1-K1-D7
cggaatatcccgggctcgagcccacgccgtcaccgcccacgccgtcacgagaaaaaatgctactctcatgatatcttaagtcgtttgacgtatcttgttagtgttgagagtctcttctgatggtttgcattctctatcgttttcatgcttaatgtgttcatgagctttcttgccaattggctgtcaaattcccccaataaatcacaagtttgtattatttgatatgccacaaattcacattgccattttgcttctttttctctcgaactctgagcttaacatattaccgattccgacataagctacgtgttgtggatgcatgatgtaaaaaaggaggagtaaatgatgcagttcacttgaaatgagaatggaatattaattattgc

SEQ ID NO: 39394 - DNA, 412 bp, Gossypium hirsutum
  Clone ID: LIB3146-055-Q1-K1-D9
ggcatggaagctcgagatgtgcaccgggaaagccaaatgactgtgcccgagaccccatctgctgaccagccctgtgatggagtaaaagttgatgttggaccaagaaaaagtattgcaagaataggcaatagaaatcctgaacaattgatgaaagttcataatggcggtagtcttttatttggtaatggagattgtggttcaagatcagcttacacagaaatctgctcattagcagcacaacattttgcacggatacgtgaagttcttgtcgagcgcagtgtgacatcaactcttaactctggatttttgaccccatgccgagacaggcttgtggtggaacttgggtggatctgtttgctgaaatgatgagaaattcatgacatgtttgttctcctgccgccattgagtactg

SEQ ID NO: 39395 - DNA, 424 bp, Gossypium hirsutum
  Clone ID: LIB3146-055-Q1-K1-E6
gttaaagaacaaattgtctctagttctacaattttggttcttctggattctcaattcatggatgacactgctaataaataaaatgaagatttttggtgatgttgctaaatgacattgtcatccgacatttgtgacatacaaataagattgaaataggatcagattttgggaccaatctcttgaccatgtgatgtgtagtaactgaatgctgcaatttcttcatctcttttcataatctcttctcagaaaaccaaagctttcccctttcaatttcccaaattttacacagtgattttcagatcacaggctcctgagtatgtctggaataaaaaggaagcgacagctaacagcagaggcagctgttttttctccgcctcaaagtactgtaagcaatgaagtttattctcaatatatagtcgcacgt

SEQ ID NO: 39396 - DNA, 336 bp, Gossypium hirsutum
  Clone ID: LIB3146-055-Q1-K1-E9
attaccatatctagaacatccttcctcgtatatgctttatctgaaatcagaacaaggtcgtccactattgggacagaaacttcctcatacttgcatgctaataacatggctgtcatgccaaccaattgaagcttctttcggatcacagtgcaacgctctaagaatctgtctatgagattgatagtaaggaacaatgtttcttccataagatcaaatttgtagtgaacctgctcaaaatgatattgttagtaatctctagacatactttgaacaacaattaagtacaaatttttcaaatcaatagtagtagcacatctttcttaaaaaaaaaaccga

SEQ ID NO: 39397 - DNA, 361 bp, Gossypium hirsutum
  Clone ID: LIB3146-055-Q1-K1-F1
gaaacaaccagaaaacccagaaactgtgacattggaagctaatgggggagtggagaaagagaatgcaaatggagcagtccctgtatctgagggagaagccaaagagacacaaggtttacaggaggtggctggcaagtgtagtgttgaggtcgaggacaaaggcaaggcagtagatgcggaggtgattgaaaatggtaaggttaaagaaggtgggcaagctgataccccacaacctacaggatctgcgcctgcaagcaactaatatgacaaccagtatcctagccaccctgtggtattctagtttattgtatttgcctgtaacctctatgatgattccatggatgacttgaacattaatgat

SEQ ID NO: 39398 - DNA, 322 bp, Gossypium hirsutum
  Clone ID: LIB3146-055-Q1-K1-F10
cggacgcgtgggtggacgataacggacgtgttaagcttgcggatttcggcgtttcggcggcgttctataagtggagttcggtttacagattaggttcttcgccattttcgcaatattggattgccccagaggtgattcattcacataaagattatagtttcaaagctgatatatggtctttcggtataactgctcttgactccaccaagaagttttcagaaacttttcaagacatggttgcttcttgtctccgtaaagatcctgcaaaccgaccctctgcagacgagcttttgaaacatcctttctttgagagttgcaatgg

SEQ ID NO: 39399 - DNA, 298 bp, Gossypium hirsutum
  Clone ID: LIB3146-055-Q1-K1-F5
cccacgcgtccgggtggaaaagctcagtaagcaacggcgacaagccggaggaagtcagctcgccccggagaggaaaactaccgttcagccaaacatggctgaagaatagaataccgaaaataccactttgaccgaactccgttcaaggtataggaaatgttaaattaagacgtctaattcaagagtgcggggcgttacagagcggggaagctattggtggctgtttgagaaccaacttggctttcatgccaaggtacatatgctaaaatcactggtcgagattaagagagagactaat

SEQ ID NO: 39400 - DNA, 400 bp, Gossypium hirsutum
  Clone ID: LIB3146-055-Q1-K1-F6
cccacccgtccggccttttcaagcgggggtgatggctgtaagaactaaaggcggcaatgaaggtgtgtttgagtcattgtaccgtgctcgtgaagtgtacagaactaagctgcaagagagcacggcagtttatcagctggcttctctgtttgttgagtgtgcaatagctgaagcacagcctttgaaaacagaaccagtaccatgcaaccccaatgatccaacggttgcatcagatgctcacgggacttctatacttgctgaaacaggtagaatgcaaatcgtactggacgcattctcggatggaagcagctttatctgtttacagtgcggtggtctcgttagtaatcatcgtaaagatgagcattatgcatactggtgctgcaatatgtaaatttgctca

SEQ ID NO: 39401 - DNA, 429 bp, Gossypium hirsutum
  Clone ID: LIB3146-055-Q1-K1-G11
aaaaccgggcggacccacgcgtccgaggggaacccgtgctgatctcacttttgttcaaggttttgggaggactaggcaaggtgaggtctttttgaaagtcaatcaactccgggataagtttgaatatgatagagagaacagaatgagagagaaagcatttgctccaataaatggacaagatacctcgagcagctacaatacaaactctaagaatcagccgtttgacactcagagatacttttctgatagtgactaacagtaagatgaaagaaagggaagtaggaagtgataacatcagaaatctttagctaactgcaaagaatcagttttactgtttgctttggtcaccgttgttaggcatgctgcttcagattccgactactaccctcaagcagccgttgcctgtcaaataaagatgcaaaggttttt

SEQ ID NO: 39402 - DNA, 416 bp, Gossypium hirsutum
  Clone ID: LIB3146-055-Q1-K1-G4
cccacgcgtccggaaagagaaggaaagttttacgccataaatgtcccactcaaagatggggttggtgacaatagcttcactagattgtttaagataattatttccaaggttgttgaaatgtatcaaccaggtgcaatagttcttcaatgtggggcagattctcttgctggggatcgcttgggctgtttcaatctctcaattgatggacatgctgaatgtgttaaaattgtgaagaaattcaacctacctttactggttaccggaggtggaggatatactaaggaaaatgttgcacgttgctggactgttgaaaccggagttcttttagatacagaacttccgaatgaaatcccagaaaatgagtatatcaaatattttgcaccagattgcttgttgaatattccaaatgggcacat

SEQ ID NO: 39403 - DNA, 373 bp, Gossypium hirsutum
  unsure (1)..(373): unsure at all n locations
  Clone ID: LIB3146-055-Q1-K1-G5
cccacgcgtccgggtttatcggcgtagtttggtatgtggtgttggaaatcgttggggacggatggatgctttagtccctaagatctctaaatgtgtttatatatgaatagaaaatgagggaatgcggttttattcatatcccggaactttgatatgttatttttatatattatagagttgatcatggtttaaaaaaaaaaaaaaaaaaaaaaaaaaaaaaaaaaaaaaaaaaaaaaaaaaaaaaaaaattaaaaaaaaaaaaaaaagaaaaaaaaaaaaaaaaagaaaaaaaaaaaaaannaaataaaaataaaaaaaaaaaataatattattaaataaattaattaaaatattaaattgggggggccctttt

SEQ ID NO: 39404 - DNA, 436 bp, Gossypium hirsutum
  Clone ID: LIB3146-055-Q1-K1-G6
accacgcgtccgcccacgcgtccgcccacgcgtccggatctacaaatgggactgttgtattcgggtgcgggggtgggcattctggggaattaggatcatcaagtgaagcactagatgggatactaggatttggacaagcaaattcttctataatttcacaactggctgcatctgggaaagtaaaaaaatcgtttgcacactgtttggataatatagagggaggtggaatctttgcgattggtgaagtggtatctccgaaagtcaaaaggacacctatggttcaaaaccaggcacattacaatattgtaatgaaggatattgaggtcggtggtgatctactgcgacttccaagtgatatttttgatagtggagatcaaaagggaacaatagtggatagtggtacaaccttagcatatcttccatcatcaatttatga

SEQ ID NO: 39405 - DNA, 526 bp, Gossypium hirsutum
  unsure (1)..(526): unsure at all n locations
  Clone ID: LIB3146-055-Q1-K1-H1
cgagcgcgtccgnnagagcgcgaaaggccanacnnggatcaannnatgaatctgcagtgtaggctttccaactnnntaaaccanngatcaagaggatcgggcgataagaatcccctganngagatagnnnacgccannccgcgcccattaaannaaaaanntggagtnntcgagagaaattgcngnngaacgcngnngaaatnnggaatnntgcagggctttangnntagagganngctgagannaatgaaaanntacgagcttaagaaagggggnntaacgagacgctttcaacgatatctnnntttcgaaccacnncaaaacaccatttacgtcaactacgnnntgaacagannaagaagaaactgggcgtcgaaaggtattctttagaactgcaaagaagaatagnnggaagcagggacccagtcctttactttaaatnnttgatgaatttcctttagtcccattgaagaaaaagctccaaacaatgannaacagcatatacttcggacttggcaattatgat

SEQ ID NO: 39406 - DNA, 290 bp, Gossypium hirsutum
  Clone ID: LIB3146-055-Q1-K1-H11
cctcccctctccaaactgggagggcttcatataaaatcttctccaaccccaacctcaatattttctccactacaactgatttaaagatcatctcaaatggaaatcctctcacctctccccactctccaacataaacccttttcaaacatacctttctcgtaccaaacacttctccaaaatttcttcttcttcatcatcaagggataaaacttcaaaatctgattccatgcgtgatgcacgtaaggaatataaagagaagattattcaaaacactgtatatctcagccgtc

SEQ ID NO: 39407 - DNA, 341 bp, Gossypium hirsutum
  Clone ID: LIB3146-055-Q1-K1-H8
ggaccctgagagtggtaaagctgctgagctgaaacgtgaagctgcaagaggagctgtgagggctgccttgtaatggcactgacagactagcagcagtgagatatacagtaaacctcgtgctacttctgcttatatgctctttgccttggaaagagtaaaaactgagcttgttatttgtctatccttgtttttgttgcacatatctttttaacttgttctcagagctacattctgtaaagtttttttttttcttattgtggagtttgattagcgaacaaaaatatgatatttcatgtatgaattgataaaatatatggatacagaattgcctcttgtgaatt

SEQ ID NO: 39408 - DNA, 284 bp, Gossypium hirsutum
  Clone ID: LIB3146-055-Q1-K1-H9
actggaacaaaatagccagcggtcaacacgattgctcgacgtgtgttgactcacctgaaggcaccttggatatttacgtttgcgttggaactatggacatgtataactttgattatgcacatgagctcgctttggccctcgtagtatcagaggctccaaatattaatgatgtgctgcaaccgaacgacttatatggagaaggtggttcgttaacaaaaagacctgtgaactacttgatgtggaggggactcattatctgaggatgtacgcctccctttatgatt

SEQ ID NO: 39409 - DNA, 409 bp, Gossypium hirsutum
  Clone ID: LIB3146-056-Q1-K1-A2
gcaacccgctgctgctgctgcgttgttcgttcaacaacagcaagcgatgggagaagcgtgggcgggtagggtcggcaattatcttcctggtcacctaaacttgttagcctcgttgtcaggtgctccgggaggatcgggtcgaagagacgaggatccgcattaaaatttggtggaccattttacccttcctgttgttgggagtatatatagattctataaatatttgtgtatggttgttgcttttttgtgtgtgcgaggatgtggaagatgattgctagttggaattcttagggttagggaattagggttttgaggcagataatttggagtatggatgatgaatggattcagattagggtttttccgtagcacttctatttgatgattagttaagggtttggagcaattg

SEQ ID NO: 39410 - DNA, 381 bp, Gossypium hirsutum
  Clone ID: LIB3146-056-Q1-K1-A4
cccacgcgtccgggcatcttcatatataataaaaaaataaattattttcgtaattaattaggttgttaaggatatttttataaaaaaaaaaccataagaatgacaacaatcatgaaaaagaaaagggcttcaggccagaatttttcagcccggtccgatccgattttattaccctaaattttttttccgtatttcctctcagacccagtccctcattcggtcattcccctttctcttccctatcagttcttatttcttaaaagagaaaaccgatagctctaagtgccgctctccacctccacggctccaccagtggcctccagcgccgctgcccgtccgtctgtctgcccgtctcgctgcagcccatcaacgttgcttttt

SEQ ID NO: 39411 - DNA, 295 bp, Gossypium hirsutum
  Clone ID: LIB3146-056-Q1-K1-A5
gttgctgtaagtgagggtaagaaagacgaagacaaagacgcgcacagacactgctgaactcgtcgacgggttgagtgtgtggagaaattgaacgcgatggtaaagaagatacgtgtcgctgcctccagcaccaaggaagccgcctgcgatgaagcagagccctaggaagataagaaagatgaggctgcttcataagcattgacctgaaagagaaagcgacactatactcgcgtaagtttattatatctaattaatatgtagtgggttaaggagaaaattatttatatattcccac

SEQ ID NO: 39412 - DNA, 300 bp, Gossypium hirsutum
  Clone ID: LIB3146-056-Q1-K1-B2
cccacgcgtccggggaggaaatcatttatactttctttctttttttttttatctgcaaaagtcatggtgggtaaactctatacattttgcagataaaaaaaaaaagaaagaaagtatacatgggaggaaatcatttatctggagaaattttcatttctgaattgaaggactgcaattattgtttatagtggtattttggcaattagttagaagatgaatggcatgttgatggtaaccaagatgagaacaaacatttgtcaacattaattatttaatattaattaaaatatatttaatatt

SEQ ID NO: 39413 - DNA, 314 bp, Gossypium hirsutum
  Clone ID: LIB3146-056-Q1-K1-B4
cccacgcgtccgggaaaacaggaaagccacactaaaggaagtcgttgggtatgttgttaggaacatcaaaacagcaaagcgcaagagaacctgaggcaaaggatgcaaataatcttcaactgtttcggaatctaaccaaatctactgggacagtatgcgtatggagctgaatattattactgggtttgtaaatttcattttcagctaccaaattaatcctgaacttgggagtttattctgttttagtttggaactatcagcggtctagatctgtggtaccttttttttatcctaattataagtgtttggttcag

SEQ ID NO: 39414 - DNA, 331 bp, Gossypium hirsutum
  Clone ID: LIB3146-056-Q1-K1-B5
acggattgggaacccataacgtgctatccgttgcagtcggtgcatgccatgccatgtgtttagtgtcgagatcacgttgttaacgatgatgtgataaaacaaattcacatacgaaactttaacaatagggtctgcaattttgttttgaaggacacaatgagttccaaggttgagtccatggcgaagtgattcccaatgagggtaggcaaacagcattaaagaagctaacattaatctccattgttacatatttaagccttctgagatttgctgcctactcgatttaataataaaataacaaaatcaacatcgagccttgaatcttggctgc

SEQ ID NO: 39415 - DNA, 331 bp, Gossypium hirsutum
  Clone ID: LIB3146-056-Q1-K1-B7
cccacgcgtccgcgagtttatttcttgagctctatatgatccacaaatcgcaacagagcaggcgacactgttgatgagtactattctgaaagatccagggcattgctggaaaacatgcacacagtcttcttttccattccccgcatcaaggacataaagcactattaatcactcgcttgtattttagatttgcaaaattcgaaatcaagcatttaaattgtggtaacggccgcgttttcgttcgtgttgcgtttatcgcagttgctgacataagggatcggttgtgaatttttttaaaatttgcacaatttaaaaaaatcacttttgaatg

SEQ ID NO: 39416 - DNA, 432 bp, Gossypium hirsutum
  Clone ID: LIB3146-056-Q1-K1-B8
gatgccttggagaacaagataaaccgaacccctttatccacctgtgaatggttcagagatttcagccccttaagggcacaccacaaccaccatgccctggcacaacaagcatactattacgtagcggtgaaattcaaggaactatattcatcgatatgcggccaaaaactgtttgtttggcaaactaaagggcgagaacgcagatcaatcgatgaagcattcaaatatatcagggaagtactgaaatgggacgaagagaaaaacgagaacatgtacgaaatccatggggacgattcgttttacagtacagaaatgagttcatctccttatataaggcaagaataattgcagatttgatttatttaaaagatttttaacttggcaaatttatcatagattttgcagcagattgaatatctgtatagtttattt

SEQ ID NO: 39417 - DNA, 258 bp, Gossypium hirsutum
  Clone ID: LIB3146-056-Q1-K1-C1
gttaaaatgaaaatgaggttttgtattgtaattggcagctttttgggagaacatatcaggttcattgtgtgggtttttggtccgtgtaaagatggttagaatcatgaagtaggtgtatggttttttattatttgtaatgcgccaaacttgattcaggtgtaaagatggtatttttgttctttctgagaaatatcttgttatttttcccgttctcaacttggttaattgtgtaaggctgttagtgaaaattttctggtt

SEQ ID NO: 39418 - DNA, 422 bp, Gossypium hirsutum
  Clone ID: LIB3146-056-Q1-K1-C2
cccacgcgtccgttctcttcgcagtttagctccgtatgtcgtacagtggctattagacgcgcatagcacccagatacttcttatggtgttcatgggtgtagtttctctcttgttagcgggtttcttcgcatatcacgctaatctttgtctcacgaacacaacaacaaatgagaccttcaagtggcaagactacataagctggcagaagaaactgatcgaagcacgagcgagtacagcggcactgaaagcgaacatcgccgggatgactactgaaggaaagcctcgagagagcaaatgtaaatccttcttcagacagtcccttctacaggatactgaagccattgtaaagaagaatgtgtatgataaagggttctttcacaatctctacgaggtcgttttcccagtttcaacaagagcatcat

SEQ ID NO: 39419 - DNA, 401 bp, Gossypium hirsutum
  Clone ID: LIB3146-056-Q1-K1-C4
aaacgatgcgttgagatcaatagtgaatgcagagaagagaggcaaagcagcaaagctacggtggaattgaagccgatctccaccgtcatatcttcctttctcactatcatgaaatatcgaggatacatcaggaactttgagcttttcgatccgcatggagttgggaagatcacagttgaaccacaaggcagggtaaatgattgccaagcacgcacttaccggcaggacatcaaagtgaaggatatcgagaagtacacaacatttaaacttccaactcggcagtggggttatgttgtgatttcaactcctgatggtattttggatcacggagaagccattagaaggaatgtgggtgggcaggttcttggttattttcattagacttcattttttatgcacac

SEQ ID NO: 39420 - DNA, 335 bp, Gossypium hirsutum
  Clone ID: LIB3146-056-Q1-K1-C5
tccgcccacgcgttcgaaaagggcttgattactgttcacattttcatacttacagcctatccaaggtgaggggctctcaccagtttcctcctttatggattattcttttgtttaaaggaaaactatagaaatgatatagaggaagtacgaaattgatgtcttaaatctgaaagctgatacaagcctagtagctctgctgaaagccggtttaaccaatgcttagagttgcatgtagtgactagagccttgggacgaaccaaagtaccattcatcacattagatttacatcttgatccaagcgaagaagtagcattcatttgggttgttcactttgg

SEQ ID NO: 39421 - DNA, 141 bp, Gossypium hirsutum
  unsure (1)..(141): unsure at all n locations
  Clone ID: LIB3146-056-Q1-K1-C8
gaattacccgggctcggacccacgccgnntccgcttgtcctttcgagtgtcncanctccaggctttgctgtagattncaatggctannctacatnnccccaaagaacacgcatgtgctgtagtnngtcaacaaaatttggg

SEQ ID NO: 39422 - DNA, 425 bp, Gossypium hirsutum
  Clone ID: LIB3146-056-Q1-K1-C9
cttgttgaaattcctgaaactgtttaaccagcagcagcagaacctgttaaagaagggggagctgatgaagaatcagagcctttagacagctaaacctttctcgatggcagaatctcgtgttattgaccattcaaagtcgtgtcaaggagctgtcccactgaacacggtattttttgcttaaaaattacgtattccatgatcagtagtttcactgcctaggagatgaaataatcacagataaaacttccgtcaaatgccggccgggcatacaggcgaaaattcgaagcagtagaaggcaattctttcatgagcattagaaaggaaaaagtggacaactatgtggcatgcatgtaaatgctttccctgtgttgtatgtgaaaatataagttgcagatacggggagcatgctatttacagcaatgtga

SEQ ID NO: 39423 - DNA, 383 bp, Gossypium hirsutum
  Clone ID: LIB3146-056-Q1-K1-D3
tgaaatataggaagtaggaaccatttatgtgggctttgatatttgggattgattctttggctcgattattaaaaggggaagctatgtaggttggcatggcatctcaaaacattaatctactacaaactacaaatggctgaagaagtttatccttttccctttttgatgcactgagtaccacttcatttggcttcagaggttttacattcttttaaacatttaataatgtctgttttcgtcttcttgaagaatagtgtgaattttagcactgactttagccttgagttgtacatgactcaagcaatggaatgacattaagaatcatactagataaaatagtacaggaatagatgatgaaacttatactatgcaacttcttgaat

SEQ ID NO: 39424 - DNA, 303 bp, Gossypium hirsutum
  Clone ID: LIB3146-056-Q1-K1-D8
ttaaaagtataagtgattttggctattggcgcctatatgtttgaaatgtattgagccatgagatttggcttgtttataatgtgaggtttgatatgtagatggccttataattggtatgtaattgtggttatgtggtaagctttagtaaagttattgatgcattagtggaagtgtccaaattgatattcatgattgatgaataatggtatttacgtgtttgtttatattggtattgagaggttaggttgtaattgagatgatgaaaaaggaatggagtattttaggtctaaaagacattgattt

SEQ ID NO: 39425 - DNA, 420 bp, Gossypium hirsutum
  Clone ID: LIB3146-056-Q1-K1-D9
cccacgcgtccgagaagatgatgaaccaagaattcaggcttggtgataatgctccggatgtgagctgggctgatcccaaaaatgccgattcttctgctgcttctcaggtgaaagcaatttatgtaaagaacttgccaaaggatgtcacacaagatcagttaaagaagctatttgaacatcatgggaagatcacgaaagtggttctacctcctgcaaaacctggacaagagagaaatagaattgcttttgttcattttgcagagagaacttgtgccatgaaagctctgaacgactcagaaaaatatgaactggatggtcaagttgtggaatgttctcttgcaaagccactaacagatcaaaagactcctgggggttcaagttctcagaattcacgttttcttcctaattatccacctcacg

SEQ ID NO: 39426 - DNA, 337 bp, Gossypium hirsutum
  Clone ID: LIB3146-056-Q1-K1-E11
cttataatcaaaatcaagaacatatacaaaatatgagcaaaatgggaaggaagcttcatggcttataaagagcagattgaaaaagagtgccaatctgatccatttcaacagttgagaaagtgacctttgcttcaagcacaaccagatgtcttttacctcttgcctcttgggcttaaactccggagtatcagtgaatgaccaagtttgatgctttttggatttaaatgattgtgatatataagcatgttttgttatactgaatactggtaatgagtgctataaatccgaaaaattttgtattttaaatttgaagaacggagtttcattttcttctttt

SEQ ID NO: 39427 - DNA, 350 bp, Gossypium hirsutum
  unsure (1)..(350): unsure at all n locations
  Clone ID: LIB3146-056-Q1-K1-E3
atgattcaaaagaaaaaattcgagaagtctatgatgctttagatgcagtgaattctgaactggcagaagaacgggagaatgtagcatctttgttaaggagagttgagtccttggatcttatcgaaggacagcggctcctgctgcagaaagagctcaagaagtgcaaggaaaatgcttgagggaagccgctaagtctcaaatacagttcaaagagcaagctntgcagatggaaaatgaatccagagagaaacttanggaagtttgtgatgctttagaaacaacgaaatctgaattaaccgaagaacaagagagaacagcttcattgatgataagtgtcgagtttttagatc

SEQ ID NO: 39428 - DNA, 279 bp, Gossypium hirsutum
  Clone ID: LIB3146-056-Q1-K1-F10
cccacgcgtccgcccacgcgtccgcggactcgtgggttacaattgaatttccaaggttgtgatatgtttctaaaaggaattttagttacatttttctttagctttaccaattgccttttctgccttgcccttacaggcattgcggttttgttgtcacggactgtcgtcataagaactttaagtttgggtttaaattgagcttcatgtgattatattttgctacatactattattttactactcaaactcgagtgaatagcgaaggaaaattactgctgt

SEQ ID NO: 39429 - DNA, 430 bp, Gossypium hirsutum
  Clone ID: LIB3146-056-Q1-K1-F11
aaaaaaaaggggggggtttcatcaaaaaaatgggttctttgttctcaaaacaatttgaaaggcgtaaaaatatcaaggctgaaaagaaaaccctttgtgatctcaatgaaaactgcggtgaatcgtatcccggaagtgattaccggccagcggataggaagaattggatggccggacttggggttgataaagtttatataaacaagattgtatggccgggaactcatgattcggcgacgaacaagatcggtattccgtttattactcgtccttttgcacagtgtcaatcgctatcggtataccaacaactcgttaaaggtactcgggttttggatattcgggtcaacgagaaccgtcgtgtgtgtcatggggttttaacgacgtacggtatcgatgttgttatcggcgatatcaagaagttcttgtcgga

SEQ ID NO: 39430 - DNA, 432 bp, Gossypium hirsutum
  Clone ID: LIB3146-056-Q1-K1-G1
accgagctgaaattatccgagatttggcatggaaggtagggctgcttcatgagcttccatgtgaaattaaggagaagttcagtgactcagaggaacagtatttcaaagatcattctaaatctttgaaaatgtacatgtcacagctgagtcttgatgtaaatgtggatatggtgcctccgaaagatccctacatcaaggtaagagtgcttgaagatttgggaagtggaataattcttagtgataaatctgccaattttgctagccactcaatgcactttctgaaacgaactgatgcagagcaatacattgcacggggcttaatggaggaattgataagctgagcctgaaacagttgtttatatgatgtttcatatcttcagcggccaatgcggttagcttaataccgaacctgtttattcactcttaagtgca

SEQ ID NO: 39431 - DNA, 385 bp, Gossypium hirsutum
  unsure (1)..(385): unsure at all n locations
  Clone ID: LIB3146-056-Q1-K1-G10
gctcagcaacaatcctcaactcatacggtgtaccatcagtttattcctcaaaaaggagtgactgaagatcgtacggtgaacagatcangtgcaaacaaatgtactgcaggatggctttgatcctttctaacccattaccactgcgtagctgcaagacattcttcattataattcttatcatatttggggaaaaatataaattaaattaggatgcatatgtaccttttctacatatatatttatatacattacagtgctatatgtctttaaaagattaatactgtctagacgtaattaataacccatggaatgaagaatccttgtaaactatatatttttggcagtaaatttgttaatattgcaacatttataatctatttttatt

SEQ ID NO: 39432 - DNA, 369 bp, Gossypium hirsutum
  unsure (1)..(369): unsure at all n locations
  Clone ID: LIB3146-056-Q1-K1-G11
attgtcttcctanatgtttcctttttcttttccttagttttgctttttggagagcactgcctattttagatttcttcaaccaaactccctgtatttcgtccataagaatgcctttcaagatctttccggaagacttgctgctggtttagcattcatgggagttcggttccctcctcgttgcttaaactattattctccatctgtgatatcttagcaacttcttaggatctttcattccttgggaactgttacatcagatcttttcttagtatggcgtccttatttccattacttttatactctgcgtataatgtttactcctataaataacaaattcatagtatgttcgtttatttttcaacattttta

SEQ ID NO: 39433 - DNA, 301 bp, Gossypium hirsutum
  unsure (1)..(301): unsure at all n locations
  Clone ID: LIB3146-056-Q1-K1-G12
acccacgcgttccaactgtatatcttcagctaaaaattttgattattatacttatctaggttcacgagacagggttgaatttgttcactgctcggaacaacananaaagtgccactgatgacgaacgctgccttattgaggcgaatggtcagtatcaccttcgcgaatttgtaaatacgttccctcattgactccttagcatgccgatcccaatactcttacctagccagattcaaacctttatttttttcaccttcaatggtccaattgacatgattgcttcacttccacatgatcagta

SEQ ID NO: 39434 - DNA, 290 bp, Gossypium hirsutum
  Clone ID: LIB3146-056-Q1-K1-G6
cggacgcgtgggtgaatgcattcattactttgagaaacgtggaagagtttggtttgagtggaacggacaaaagggtgtattaagagccaaaactgattatattgacaccaaatttgagaaacagtgaactgcaacaacatcattgtttgatttaaagaccacacagacactgcattgtgcatatttggacctagcagcagagagaagcaaaaacaagcaagctgagctggtagatgcagccagacccctgctgataacctgttaagctcaatggcgcaagaaggaacctt

SEQ ID NO: 39435 - DNA, 242 bp, Gossypium hirsutum
  Clone ID: LIB3146-056-Q1-K1-H11
aaaccctaataactgggctctgttcttatcatattcaaaaatagcttcctctgatggattgattctacaaagcaccattcgtgcccacaccgacatggtgaactccttacaatctcccatctataactcctacatgatcgacacttcctcccgcgaacaaaacatctttctttggcacttaaccaaggacgaaaagacctacgaagtccctcgactatcacttacccgtcactctcactttg

SEQ ID NO: 39436 - DNA, 417 bp, Gossypium hirsutum
  Clone ID: LIB3146-056-Q1-K1-H9
agcaaggaagctttttaccaatattcggtttaaaaggtggtgtttcgatgttgaagtaggtttcctttgcaaatggtttggtattccaatgctggagatatctgtaaactggtccgaaattccaggatccaaggtaaatccattgagtataccaaacatgctttgggagcttgccctcatgtccgtaggatacagaactcgaatctggaaaattaactcctgatgtcaggattttctctgatcaattgagcaaagatgaaaaattacacacggtgcagtactgattcgataaccttaggtttttcttatacgttctttgggaaaacacttattacaatcagatgaaaccagtttatcggagcttgttctttctggaatccgcggctggaacatgcagtattttacagttgtaatatt

SEQ ID NO: 39437 - DNA, 430 bp, Gossypium hirsutum
  Clone ID: LIB3146-057-Q1-K1-A10
cccacgcgtccgattttgttcacctcaatctatttctaaaatctgaagctttgtacaaaacgggatcgaactccaagtggttgcttcctttctggcccatttctctgtgcaatggtggtctgcaaatgccgtaaggcgacaaaactatattgtttcgtgcacaaggttcccgtttgtggggaatgcatctgcttacctgagcaccaaatatgcgttatacatacttactcagagtgggtaatagatggagactatgactggccttccaaatgttgcaaatgccaagctgtgcttgaggagggggctggctctgaaaccacacgattgggttgcttacatgtcatacatacaacttgcttggtttcacatatcaaaagctttcctctgcacactgcacccgctggatatgtgtgtccttcatgttcgatat

SEQ ID NO: 39438 - DNA, 432 bp, Gossypium hirsutum
  unsure (1)..(432): unsure at all n locations
  Clone ID: LIB3146-057-Q1-K1-A12
cccacgcgtccgttgtcaagcagctaaagcattccaaaaagttgtatgaaggctatgttccaatgaagtacaaaggctacctgaagaagatgaaaaaatccggggaatggggagatcatgtcactttacaagcagctgctgaccgattcggagccaaaatttgtctggtcacctcttttcgtgacacttgctacatcgagatcatgcccaaacaagcaagtcctactagagaaatttggctgagcttctggagtgaagtacattacaattcattgtatgcaagtggagatgttcctaccagagcaccaagaagaaagcattggcttttttaggattgatataatatgacacattcccagnttattatatctattatatgtatatntttactcacctttatgtgccattcagaaatagtttgctattacaaaa

SEQ ID NO: 39439 - DNA, 388 bp, Gossypium hirsutum
  unsure (1)..(388): unsure at all n locations
  Clone ID: LIB3146-057-Q1-K1-A6
cagcacttcagggtcttgaattcccatcgaaccctgattttgattccgaggagttctaagaagtcgacaatcgggaaattggataaattttcttgtaattatagatacaggaagcactccgacattgcttccttgtttttgtacaggtattccggctctaactgttcgttttcatgtgacatttgtacatgctgactgaaaatatagaagaaaatggttttgtatttcaaatttgcttgaattgtttgtatttgtattaatatcgtttgtttttttttttaataattacattatagattctgatcaannnaaaaaaaaatatatnaccttttttacattactaatcaatttttcctcctcaaataaataaacaaaaaaaggggggggc

SEQ ID NO: 39440 - DNA, 371 bp, Gossypium hirsutum
  Clone ID: LIB3146-057-Q1-K1-B10
cactaatttcccattgatcttgtccgcgagatagccagacaactattggaatgtggagcgttcatgcctgatatggacctgatacacacggacttgaagccagaaaacattcttctagtctctacagagaccgtcaaagttcctgataacaacggggcatagctatctccaaaggacagttactttagaagattgccaaaatcaagtgctattaatgtaatacattttggttgcactacgtatgatcgtccagatcagaattatgttgtgtcaacaaggcattatcttgctactgaggttattctcggactgggatggacatatgcttgcgatatatggatggctggatgcattatagttgaattatgcac

SEQ ID NO: 39441 - DNA, 411 bp, Gossypium hirsutum
  Clone ID: LIB3146-057-Q1-K1-B11
ctcattgttgctaatgctggtgattctcgttgtgtaatatctagaaagggtcaggcttataatctgtctaaagatcacaaaccagagcttgagttggagaaagataggattctgaaagctggtggttttattcaagtgggacgtatcaatggaagcttaaacttggccagggctattggtgatgcggagttcaaacagaataaaactctgccagctgaaaagcagattgtaacagctaatccagacataaacgctgttgagctttgcgacgatgatgagtttcttgttttagcttgcgatgggatttgggattgtatgtcgagccaacaactagtggattacgttcgagagcaattaagctccgaaactaaactctcagctatctgtgagagagtatttgacagatgtttg

SEQ ID NO: 39442 - DNA, 237 bp, Gossypium hirsutum
  Clone ID: LIB3146-057-Q1-K1-B12
cccacgcgtccgcccaccttaaagatctgcgaaaaagttgtttgaaccgctaaacccagctcctcctttatttgcagatctttaaggtggggtttggtttctcttgtctcaatgttcaattttggttggggacgttaggtggacacgtgaaaatggtttactggtgatgactaatatgattaactttatggaatttgctttccatgtatttactaaagagtgatgtttttcttattt

SEQ ID NO: 39443 - DNA, 337 bp, Gossypium hirsutum
  Clone ID: LIB3146-057-Q1-K1-C11
tttttattgatttgtacttcctttagtcaacaaagcgttcctgatgatactttgaagatgcagttattttcttattccttgtagggaagagctcgtacatggttttttgggttaaaaaaaaaaaaaaaaaaaaaaaaaaaaaaaaaaaaaaaaaaaaaaaaaaaaaaaaaaaaaaaaaaaaaaaaaaaaaaaaaaaaaaaaaaaaaaaaaaaggggcgggctattgggggggcccattttaaggaaccaggcttaggaacccaaaaatggtaacttaaaagacccctaataggaacccatataaccaattttttaaaccgtttttaattagaaaaac

SEQ ID NO: 39444 - DNA, 410 bp, Gossypium hirsutum
  Clone ID: LIB3146-057-Q1-K1-C12
tggaagagcttcttcaagtgataaaatcaacgaaaccagacaaatatacccccgaaatcgtggagaagaaagacgattacgtgcgtgttgaatatcaaagtcccatactagggtttgtggatgatgtggagttctggtttccacccggtaaggattcaatcgtggagtaccgatccgcatcaaggatcgggaactttgattttgatatcaatagaaaaagaattaaggcattgcgagtggagttggaaaagaaaggatgggcttccgtagaaacgttttaaaaggacaaaaacatcattttgtactgtactcctagattgttgtttcacaccactgttcacagattttgttataaatcatcaatgcaagatttgtgtcacttgcgtttccataattgaaagattattatc

SEQ ID NO: 39445 - DNA, 385 bp, Gossypium hirsutum
  Clone ID: LIB3146-057-Q1-K1-C4
gggacagctaaagttcttgatcctgatttcaaagttgttgaaagtgcatacccttttgtgattgggaagctcttggctgatccaaatcctgatatgagaaaaattttaagggaacttctcatctgtaataatggatccattaggtggaaccgcctagagcgcttgatagcagcaatatcagaacaggcatctgaatcgtctgaggagcctcctaagtctgaagaaaaaggttcgcatcccatgggatggaagtcattcgatatgcatgctgttgttgctgccaccgaagatctcctgctttttattctatctgagaagggtcaaatggtgcgggttttcctcctgcgtgatataattagagcagcagatatatttctacaggatg

SEQ ID NO: 39446 - DNA, 215 bp, Gossypium hirsutum
  unsure (1)..(215): unsure at all n locations
  Clone ID: LIB3146-057-Q1-K1-C5
caacatgttatgttagctgtcactcgtcttccgttgcagtgttcgttttttttttttctggagtggtttccaaagttctttcatcacagcatggtaatgtaatcgcatctcagtgttgaggatttaaatcaccattagcaatgaggttttatcgtttnacaaaaaataacaacaaaataaaaaacaagcaatttgaatcataaaaagaacctact

SEQ ID NO: 39447 - DNA, 428 bp, Gossypium hirsutum
  Clone ID: LIB3146-057-Q1-K1-D5
cttggcggttccggtactcatactggaatagcagccagagttatgtgatgaccaaaggctggagccgtttcgtcaaggagaagaagcttgatgcgggtgacatcgtgtcgtttcaacggggtgttggggagtccgggaaacaccggttgtacattgattggaggcggaggcctaatgcacccaatccaacgtcctttgcacattttcagatgcaaaatcagttcaactttcctcagtcagtccgatgggggggtggaatctactcgctgcctcaaagctatgagcctttgcatcgcttgaattacagcatatatccttataaccatcatcatcaacgacagcagcatcaacagctacagcagcagcagcatcaggcaattacttacggtaatgtggcgcagtcgcagtactatctgaggtcatcatca

SEQ ID NO: 39448 - DNA, 407 bp, Gossypium hirsutum
  Clone ID: LIB3146-057-Q1-K1-D8
caaaaacagatgacaagaaagaaaaaatatatatatatataaagagagagagagagactcagtcaggatgattaaggataagcatcaataatctttaggtattagtatttagtacattggaaaatgagtaaatttgactagtaatatgaaatctacataaaacaagttcagagtcaagggtataagaaaccgcccgagttcaaatttcacccaaaacaagagatataagatctgtatcaaattcaattctgacaagtcagacagatctaaccacactgaggcagcagtgcatggtaaaatgcataataaatggcatccaaagaaaagatagcaagatatatgagcactgccctaagttttggagttccctttatttgcaaaggttagaacatagaaggcttatgagc

SEQ ID NO: 39449 - DNA, 271 bp, Gossypium hirsutum
  Clone ID: LIB3146-057-Q1-K1-D9
gtgagcatggactggaagatgtatttttcggtccgatgctatcacgttcgatggcagtggatactaaatcgaaactgtcgccttatgtaggctgctaaaacttcatcataggtgtaagagctttgggagtgcttttatgatgattgctttacaagattaatttgaatgcctactatatcagtttccatcatttgtttttgaagatataaaggctctattccattgagtaccgagaataagattatatgcaaattctactgtttatacctca

SEQ ID NO: 39450 - DNA, 354 bp, Gossypium hirsutum
  unsure (1)..(354): unsure at all n locations
  Clone ID: LIB3146-057-Q1-K1-E1
cggacgcgtgggcggacgcgtggggtccgggagaaattgcttcaatttgagcaggaactgaaagatcggtagcaagggttcgagttctgttccatttaaactttggtttttgttgaaatttattattagactgtaactgtaactgtattctgtcatctgttgttagcgactgcattttattggaattttatgtaacgggacataagattgttgaggagtcaaatggcttcgctcatatatggtttaggtgtgccactaatgtttagatcaaaaaatagtatttgcttgcctgcaaaanaaaaaaaaaaaaaaaaaaaaaaaaaaaaaaaaaaaaaaannnnnnaaaaaanaaaa

SEQ ID NO: 39451 - DNA, 403 bp, Gossypium hirsutum
  Clone ID: LIB3146-057-Q1-K1-E5
cttggaataccatccaacagttcttgaatcacccactatttccaaaacattaaatcccacagaaatccctaatcatgtggcttgtaaccctgcatgtgcctccgccacaaatggagatgcaatatcggagtggataaccgacttagacgccaagatttcgcccctcacatcttgtactaccagtcccgaagcaaatctgaaggcttgttgatcaaaaactgcatcaaagtaaatagccaccctcgttctcctatcaccgtgtttaggacctctctcttcttttaagatgagtgtcttctcatttattcctttcaactcggaaatgtaactggagatttgtttcgagatgtctctactcgccgtatttttgcttttatatattgacctatttctatttgcctag

SEQ ID NO: 39452 - DNA, 285 bp, Gossypium hirsutum
  Clone ID: LIB3146-057-Q1-K1-E6
acatgggcaacaatgaattcgtactgggtcgtttttaatcccaaagcttaactaacggggcccctgttggctttaacaataagtccatttccttaatttctttctttgatttacattatttattgtactgcttttatttttcctgctttattcatgctcaaatttgttcgcaaaaaaaaaaaataaaaaaaaaaatataaatgcttgtttatctaaaactgcattaaaataaaaaaacaactctaaatttaatatcaccatatataagactctttttttttttat

SEQ ID NO: 39453 - DNA, 342 bp, Gossypium hirsutum
  Clone ID: LIB3146-057-Q1-K1-E7
gaaatgctgaatcttgaaggttgtaagatcagtgatgctagtttggttgcaattgcaaagaactgtcagttactcagtgatcttgatgtctccaaatgtgcaatcactgattctggaattgcagctctggctcgttctaatcagatcaaactgcagatcctttctatgtctggttgctctaaggtctctgacaaaagcatgccttcacttcgaaaactgggtcagaccctgttggggttaaacctacaacaatgcaaggcaatcagcagcagcacagttgacctactcgttgagcagctctggaggtgtgatatccttttctgaactaaattatcaacaaaa

SEQ ID NO: 39454 - DNA, 427 bp, Gossypium hirsutum
  Clone ID: LIB3146-057-Q1-K1-E8
gaaagtgcaagataggattatcttaagtactttgagacgatttgctgtgaagagtacaaataaatccaggcattgctttgagtacttagagagagatgagaccattatagctcatttggctgggggaattgatgcatttataaaggtgtctcaaggttggccactgtcaaaatctccactaaaattgttatctgtcaagagctcagatcatcattcaaggggaatttcattgagcttgatttgcaaggttgaggaaatggctaattccttggacatgaacattcggctaaatttatcaacttttgtggatactgttgagaagttgcttttagaacagatgcgcttagaacttcggtctgatgatgcctctactaattgaccatgatgcagcctgtcacttggtaagtttgaatgtcaatgtcgtata

SEQ ID NO: 39455 - DNA, 315 bp, Gossypium hirsutum
  Clone ID: LIB3146-057-Q1-K1-F11
tgaaatttttgatgatcgagtttgccttgtgaagatgttaagtagatagcagggtcgttgaacgcccctagcccttctaaagtctacaaagatatttaattgcagaaccaagttttgttacccttttaatttaaattcccttttctccttaaattcactgcattctcattactttgattttacactatgaaatgaccaaacgtgcattacaattcatctttgaaaaaaaaaaaaaaaataaaaaaaaaaatataaaaaaaaattattaaaaaaaaaaaaaaaattttttataataataataaaataataataatg

SEQ ID NO: 39456 - DNA, 277 bp, Gossypium hirsutum
  Clone ID: LIB3146-057-Q1-K1-F3
caaagagggattttgaaaattcccaaaccccaaaaaaaaggctgcaaaaaaagttttggaaaaaagcgtgaaaaccaagaggctgattcaagttaaaaccccaggggcttttaaaaaagcaaaaaaggttgtgaaaaaggcggtttcgggttcaaaactgaagcgtttgagtcaggttaaaacccctgagggattgaagaggaagacctttaagcagccaaaacaagacatggaagtcaatgttagttgacaggtgaagatggtagggtttcttttt

SEQ ID NO: 39457 - DNA, 430 bp, Gossypium hirsutum
  unsure (1)..(430): unsure at all n locations
  Clone ID: LIB3146-057-Q1-K1-F5
gtaaaacgggtcttgagatatctggttgggactatggattatggtctatttttttcaaaaggacagtttaaactagaatgttattctgatgctgactgggcagcctcagttgaagatagacgttctacaacaagatatgtagtttttctcgggtcaaatccagttgcatggtcttctaagaagcaggctgtggtgtcaaggtcatcttctgaagctgagtatcgtagtttagctaattgtgttgctgaattactatggttaaagcaactgctgaatgaaattggattgtcagtttgtcaaacaccagtcatctggtgtgataatacctccacagtttctatggttgcaaacccaactcatcactctcgtatgaaacatgttgaaattgatcatcactttattcttgaaaaggtgatggcaagaagtntac

SEQ ID NO: 39458 - DNA, 279 bp, Gossypium hirsutum
  unsure (1)..(279): unsure at all n locations
  Clone ID: LIB3146-057-Q1-K1-G10
tcgttcccnccccgnccctttcaattttattctcagtcttttaattcaatatgccctaatagtcgggacaggtgtcattctggtatagtggatatatatatatantggctgtaggggtagcatnggggttgtttcgttcgttcgttcgtatgttcaattctttgttttctttctctttgaagtgtgatttgaggtgtgtttaattaacttattagaatgtaccaatgatgaagatgaagtatcaaaggtggaaaaatgttagtagttttatttaatttc

SEQ ID NO: 39459 - DNA, 358 bp, Gossypium hirsutum
  Clone ID: LIB3146-057-Q1-K1-G2
ctttcatctgtcaaatacactaggcacgcttcttgtttcgaaccaactattggggtttgagaattacaaatgtttggaggcgttagatgcgctctacattgttggcaaagaataaattgggctttgttgatggagtttgccaaaaggaatcttatgatcccatctttcatcattaattggagcgctgtaatgccattgttctttcttggattttgaatgcagtttataaagaatttttaataagaatcttctttgtatcaaggtgcttctttagtttggcaagatattgaagaaaggcacgataaggttgatggtacttgggtttattttctccatcaagaaatttcttctcatgtgc

SEQ ID NO: 39460 - DNA, 427 bp, Gossypium hirsutum
  Clone ID: LIB3146-057-Q1-K1-G6
ggcgagtaattaggttcaagtggtaaatcctaaaattaagtggtttatgaaaatgaggtatcaagacctcatttctttaaaccgagcctgtaaatattttattaaatatttacggagtgttattaaggtcatattatagtttcgttagaaagttttatcatttaaatagttaattaattaaaaaagaagaaatcgtaacgatagcaaaagtgagttttattagttaaaaatgtgttaattgataaattattaaagttacaagagtttttgatgcagttagaccataacaatgaattatggctagttagtggatgtaggaattgaaaagaaaagaaaaactaataatttaatatatgtttattaattaaacaaaagttaaagtattaaaataaaaaaaccaaaagcatccatcatcttcgttctttta

SEQ ID NO: 39461 - DNA, 297 bp, Gossypium hirsutum
  unsure (1)..(297): unsure at all n locations
  Clone ID: LIB3146-057-Q1-K1-H11
ccggcccgacccacgcgttcnccagactcatcccaagttatggtttcttttatgccagcaaatgtgtaagttaggggcatggtgggtttctaatcaagcaacgatcaaatgtcatgagtggctggctgatagtaaaccaaggaacttcggtcatcaatccctaaaccggttccgaaaagaaatgtaacgtatggttagagaggtccaaggagtgaaatcgctgaataataataattttatcaacattttgngaaaaaaaaaaaaaaaaaaaaaaataaaaaaaaaaaaaaatattaa

SEQ ID NO: 39462 - DNA, 344 bp, Gossypium hirsutum
  Clone ID: LIB3146-057-Q1-K1-H3
cccacgcgtacgccacgcgtccgcaatggttcttatataggtgaagcatcttagactgggcgctcagctcatggtcctcacaatggaggtcctaattcagcccattcagtggcacatacagcactggccattgtacctatatcaactacttcggctgccacagctgttcctggtccaactactaacttacatattgggatggattactggggtacacctgcttcatctaatgatcctgcaatgcatgcgaaggttccttcaaccccacttgcaagaggaattgtcacccctggatcacgggacaatgtccagtctcaactatggttacaggatgaacgagagct

SEQ ID NO: 39463 - DNA, 315 bp, Gossypium hirsutum
  unsure (1)..(315): unsure at all n locations
  Clone ID: LIB3146-057-Q1-K1-H4
gcgtccgctaaaacaaaatgggtnnttgggcttaaattgtaatatttatnggtttannggttttaaaatnnttgggtcaatgtgagatttggacgtgatggaaataattnngtaatgaaatttgaaaccntgtaaaatggaacaaattagaaatgggctnnngttaattaannnaaaaaaanannaaaaaaannaaaaaannaaaaaannaaaaaannaaaaaaaaannnaaaaaaannaaaaaannaaaaaaannaaaaaaannaaaaaaannaaaaaacaaaannaaaaaaacaaaaacataaaaaataaaaa

SEQ ID NO: 39464 - DNA, 426 bp, Gossypium hirsutum
  Clone ID: LIB3146-057-Q1-K1-H8
ggcgctcagtccgagacgccggctcaaggtgccggatatctcgtcgtcatcggcggagccgaagggttagcggcgcgtgttggtagctcccgagacttggttaccagctggatggtcgatcgaagatagggttcggagctccggtgcaactgctggaactgttgataggtattattttgatccatcctctggccggaaattcagatcgaagaaagaagtgctttactatctagaaactggaatccccccttctaaaaggaagaaaggagcagaggcttctggaagtgaagaagttggtacagggaactctgggggcaacaaacagaagaagcctgataaaaagctgaaaactttgaactttgatttcattaacgtgccgcaaaaagttgattggttgttggcaaatgcctctgaagactcgtggac

SEQ ID NO: 39465 - DNA, 413 bp, Gossypium hirsutum
  Clone ID: LIB3146-057-Q1-K1-H9
atgcagcatacattcactcttcccaaaagataccaagaatttcctggggaggttattgggttgtctttctgcccttcttcatcttcccatccaacgaaatcttcatcgcttgttgtttatagtgccagggcaatgtgttcaattgactttgggaagccagtagacgaagatgatgaaagtgagttggtaaatggagctttgttgaaatttcaaggttctctcaccaatatgaaatggaaacattggttgagggagagccgtcaaagtagaaaaaataattttgatttagtagtttttcgggaccctgttttatttattgggcacctttcaaaacattccatcttgatcatagacaaaccatggatggaagtggttaaatcatttgattcggcaccacttcagagacatatttt

SEQ ID NO: 39466 - DNA, 375 bp, Gossypium hirsutum
  Clone ID: LIB3146-058-Q1-K1-A1
aaatggcccccttggtggggaactggcagcgaatggatgtcaatgaatctattcctaggaaagagcgtatcgggaaaatgttctaaagagagcagtgtgacatcttacactgttctgtttaatagacaccggttgtccagatttggtgtgtggcaaatgtatgactacatacatacataaatacatacatacatcaaggaacatccactgtaatttttatggccccaaacttatttattttgaagatgggatttaatatttcattttcagatatacaaggatactaagttgaagtgtgggtggtagtctttttcatgtcttatgtaaatactgaaaatcatcaatagaggctctgatgcatctgctctgtctcgt

SEQ ID NO: 39467 - DNA, 223 bp, Gossypium hirsutum
  Clone ID: LIB3146-058-Q1-K1-A4
gttatttccaatttagaattggtacaagtattcttgttgtattaaaaatttatatataggggaatggtttgatacactagtttcacaagcagtgttgagattttatcacgtgtggcaaaatctcattaacttcccttgtatttacactttaattctttggtttaatattattaagctttatttcaaaaaaaaaaaacaaaaaaataaaaggaaaaaaaaataa

SEQ ID NO: 39468 - DNA, 329 bp, Gossypium hirsutum
  Clone ID: LIB3146-058-Q1-K1-A5
gccatggctggccgtacgcttcttgcattatttgtcctataactctgcctaggagagggggtatctgatcagtgggctgaagaagacataacgactgtttgcacggtgggttttaatataaccagaggcggcaacagaggactgatgctagagattgactgcgtacgttcatgcatgcatacatgcattcaagactctacgcctgacagattctacaccgcaactgatacttgctgaatgaggtacaaaatcttgccatctcagacttacaaggacactaaggtctactgtacctggtatactgtcatgagcaccattggaaaccttaa

SEQ ID NO: 39469 - DNA, 195 bp, Gossypium hirsutum
  Clone ID: LIB3146-058-Q1-K1-A6
tttgttttgttttttccctaaagggccgggatacctttcatagaattaaaaaaaatcatatgccgtatattgacgcctaatttcaatacactgcccgccgacatgaaacgtctacacacaaaaaaccctggccaactccaatttaataaagtttaaggccacaagccttcttacttcatactataaagccatata

SEQ ID NO: 39470 - DNA, 411 bp, Gossypium hirsutum
  Clone ID: LIB3146-058-Q1-K1-B1
ggttactagacctcacggtaatagtggtgtcttccgttctaagttcaagtctaatcttcgggccaggtgtatttgagatagagtccgaatcttgatgtacccgagcaatatataagttgtctaaatgcccggtgttctatcgatgactcgcgtgatactatcttttctatacgactgtcaaaatgttgtgtgttcttgaggccatttttttattcattaggatgatagtggattagactttcgggacatcaaagattctccagtgattaattttcgacgatttaagagttcggtaatcaatcattcatggaattgaatatcaaagattgttctacttgagccacaaatgcaaagatagaacatgtgcagagacttctgtaatgctagaattatcaaaatgaatattcgttt

SEQ ID NO: 39471 - DNA, 337 bp, Gossypium hirsutum
  Clone ID: LIB3146-058-Q1-K1-B11
aaaaaacttcatcgactgccgctcaaacttttgccatacaacctctcttgccaccttcaagagaaacacatactaactcaatatggtgttctatcaatttgactccaacaaaaactggcaaatctctattactgatctccctgacctattaataacaattggatccaactactcatatgaataattcaagcgtatcatgaaaaacatccacctggatcaacacaggtacatcaacttttccaaattctccactttttaggcctcttattccctcaccgtttaagccagtttctatttgcaccaaaccttctattcttacaatcaaaacaacaactgt

SEQ ID NO: 39472 - DNA, 400 bp, Gossypium hirsutum
  Clone ID: LIB3146-058-Q1-K1-B3
aaattaaaacaaaagaaggcacacctgattttaatctcaaatcaaatggtgaaacaattgctggcaagggtaattttgcttacaagctctatgataaacaattccccattgatgctgctttccaaaaggattaaatgatcgatattattggtgacacaaagggtcaaggttatgaaagtgttgtcactcgttagcgtgtcacacgtctacctcattagacccatagacgtttgccttaggttccttgtattgaatcctgacatcctgccaaaatttcctttacagtaaccattgcgcgtcataatggataccaccaccgctctgagatgaacaacatcgtctacagcgttggcaaggatgatgatcagacccactctgtcataactcattatcacaggac

SEQ ID NO: 39473 - DNA, 386 bp, Gossypium hirsutum
  Clone ID: LIB3146-058-Q1-K1-B4
ggattaaatcaaaaaagggctcacctgctttttatccttatcaatgttggcacaattgctggcaagggggattttgcttacaagctctatgacaagcacatccccattgatgctgttttccataaggatgaaaagatcgatattattgctgtcacaaaaggtaaaggttatgaaagtgttgtaactcgttggggtgttacacgtcttccccattagacccataaatgattgcataaggttccttgtattgcagcctaggatcctgccaaagtctcttttacatgaaccaggacatgtcaaaatggctaccaccaccgaactgtgatgaacaagaccgtctacattcttggcaaagctgctgatgagacccactctgccataactga

SEQ ID NO: 39474 - DNA, 317 bp, Gossypium hirsutum
  unsure (1)..(317): unsure at all n locations
  Clone ID: LIB3146-058-Q1-K1-B5
tcaaatcttntttgnacaccaaaattaatatattaccaccctcacggatcacttgggcacgagtactttaaaaagcgtctcttactacatttcaacaatcaaattacctatatttaaatatccaaaaatttctgatttaactctccatttcatcaaaactttttatgcttccaaatataattaaagtgttatatatttaaaaaactatccactttaaccacttaaaaaaatcactcttttaaagtccaatattcatcatccaattaaaactataacatgacatccaagctcctactttcaccaaaccaacaatacat

SEQ ID NO: 39475 - DNA, 346 bp, Gossypium hirsutum
  Clone ID: LIB3146-058-Q1-K1-B9
gtaacgcgttgcgaaaaaccctaggattttttgattcttgggcttatccctttagatggagcaagggtgaacacacagtaggaacactacttagctctaataccgattcagcgcatgtagccattaacatagagtagacagaaagcttgttaaacagattctctgtcataagccaccgaaatgaaaaagcgatgtgcacaattcaactctgatctgctatagatttatcctagcgatccaataaactgaccgcatgtgcgaggatgctgtattaccagaagccaaggcgaagtagccacttgttctaataagcgagacaaatgatacacttggtcctcaacgatca

SEQ ID NO: 39476 - DNA, 314 bp, Gossypium hirsutum
  unsure (1)..(314): unsure at all n locations
  Clone ID: LIB3146-058-Q1-K1-C11
gcagcctcctcccacacgtccagccagctttcaccgacacaaatgctaggctacaaggggaatgaanaggaaattaatagacccaattgcatatataaggtagctttacccgataataaggtaactcacgatgattcatctagcgcgatatatcacaatggcggcgccatcataataaacacagcttccaaccctaagagtcctcatgatagaaacctcgactcataatatgaatcaaaacaaacaaacaaattctcttccgaaaaagtcaagggattaaaattttgaaacgaaaacatcgcaaaggatctttc

SEQ ID NO: 39477 - DNA, 357 bp, Gossypium hirsutum
  Clone ID: LIB3146-058-Q1-K1-C7
gacagctcttaggtcgactcccatttcggtttcaaggggtaatccatgcaagaatgaaatgtgaaagtatccagtcaaggtatctttagcttgatattgttgtcatctaactgtaccaatgtggcatcatcatcaatttaatttgcatgtgaagcatttgatatgaaaagtgacctggttgggaggcttgctgttggggcatctgcctttggcggtaggctatggggttttctgtcttttcaatattcttaattgttctaatgtttttttcttattgctcttttttagcttcagagaaatagcaatgaggaactatatttagtttaaaataagaaacacaaatttattttatgaatt

SEQ ID NO: 39478 - DNA, 203 bp, Gossypium hirsutum
  Clone ID: LIB3146-058-Q1-K1-C9
ttcagcttcaattacccttacatttcttttttttatccctatgaaattccaagtggcgaaggccaaatatatgatgtctcttgcagcactaacccaagctccggactggacacctgacctagtattggatctcacaccgtctttagccatcattatcgttattccaaatgccatataatactcaaccttatcgtatctaattt

SEQ ID NO: 39479 - DNA, 303 bp, Gossypium hirsutum
  Clone ID: LIB3146-058-Q1-K1-D10
ctgacatagattgcgtattgctatgtgtttttatgagcgaaaacaaaacagataaaaaggggctattgactgtgggctaaccttttgtcaggcttccgagttgccagtgtttgtgcgggtgtataggtagctctcaactcatcccccatccttttatttttccttctatttttgaagttcatatttgtaagatgcagttagtgtgatttgtcttttgagtttgttaatattattgtaaccatatcagatcttgtgtggcttctgttattcattaataataggtgtaagaaacaaaatacactt

SEQ ID NO: 39480 - DNA, 209 bp, Gossypium hirsutum
  Clone ID: LIB3146-058-Q1-K1-D6
atcaagttatagcattgcaatttttttatttatcaacaacatggccaattttaggggcggtgacttttaaaactagttcttcacccaagatcttaacaatttccaatctaacgcatactaagagacctatcctccaccttatgtattggcaaaaaatagattttatacataatttactccttatcataaccataagatgttctttttat

SEQ ID NO: 39481 - DNA, 357 bp, Gossypium hirsutum
  Clone ID: LIB3146-058-Q1-K1-D8
gttgtgatggacggtatccaatctgtgcgttgaaatactttatacacaatgcaagggtcgcgtgtatattgtgactccatactgtggtgatattggttgttctcacgctcgttgcgaacctgcatctccgactccaagatgtgcaataaagtgcggtagcgctaaccttgcttggcatcaggcaacacactatagcatatgtgcgcttaggatcaaattaaattctgctgatatcatgggctaggttgatcagaatggaccggttgaggtctgcttgaccgattatgaagattttggttactacaacacaggagcttacagatcataagactagcgatgttattagaagccatgcaa

SEQ ID NO: 39482 - DNA, 368 bp, Gossypium hirsutum
  Clone ID: LIB3146-058-Q1-K1-D9
cccacgcgtacgcagtccccaatccttcctttataagatggcgccaaaaccccgggcatgtgcgggtattttctcggcacttctcgccttctctttttctttgctcctcttttgtcatgcgatcataggcggccacaattaccacgacgctctccgcaagagcattctcttttttgaaggccaacgttcaagcaaacttcccccttgcctaaccttcaaatggggcccggtcttttgtttgcaagaccggtccaccggccgtggttggcttaacaggagggttcttctcacacccgagacatacctttaatttgggtttccaatagtttttataacttctttttttactttggaattttattcatttc

SEQ ID NO: 39483 - DNA, 262 bp, Gossypium hirsutum
  Clone ID: LIB3146-058-Q1-K1-E11
atgtagcctaaaataaattggacaaatctctcttctatttataccttattttcatgaagcgacttatattttgctgaccataaaccccatacaggacacacaatactttttatctgactgtttgattttttttcaaataaataataacatccagtcctattatacctgattttggtccatgggacatccaattcctaaacttgtctatacaccagctggaaaaaagcacctttgaaatacacattcccttgagtcattacta

SEQ ID NO: 39484 - DNA, 399 bp, Gossypium hirsutum
  Clone ID: LIB3146-058-Q1-K1-E12
gtgaacattaatgtggataggaagtgcatctcttgccaggaggaatatgaagcaaatgagaaaattttaaagctatattgtggacacagttttcacatccaatgtataaaacagtggcttgtgcataaaaatacttgcccggtttgtaagaccgaagcaacggctcaatgctagctgcagccaactgtggcggcgccgatggagattcaatttttactccccccctccccttttattttctgaaatgtgtgaagccttaaaggttcaacctgtgttgacttgggcagtacagggaagagaaatgttgcaacttttctcagccctcttccttgaaatcaactactgagagtttgtgattgtgttgccatatttatgaaaattttttcatgtttataattg

SEQ ID NO: 39485 - DNA, 381 bp, Gossypium hirsutum
  Clone ID: LIB3146-058-Q1-K1-E5
cccacgcgtgcgacaaagcgatgatgcattctctaacggcaaagatagttagctaggcacagcttgctcaaggatattaaaatcacctattcctactttcttgagcggaacatgctgacgatataacccacccaataattgaataaagcactggatctttactctggagctaccaagatgccaacgtgaacccttatataatccaacagaacgtagtatgaggacatcatggatgaccaagcaacattgagcaaactaaagacggctatgggtgcacagctgatcagtaagaatgatggcgagagaagcttccttgctgctaatgaactgtaaaagagaggcgtgtaggatcctagagtggcctgttagaacattgacatt

SEQ ID NO: 39486 - DNA, 407 bp, Gossypium hirsutum
  Clone ID: LIB3146-058-Q1-K1-E6
cttacgctctaaggcagctttagaaggatcaaaaactgttcaagctgatcttgcggctgctggtatccaaacaaaagaagaccataatgaacagaatgagaggctaagcaacaaacaattattcattcaaaacatagattatgcgctagacctgtttctattatacgtcttaacactatcgattttccctggattcttatacgaaaacactggtgaacataagttgggtacatggtattcacttgtgttgatagcatcttacaatgtgtgggatttgatatcaagatatcttccccttgtgaaattcttgaagatagagtcaaggaaaggccttacgattgcaatactttctcgtttcttactgatccctgccttttacttcactgccaagtatggtgatcaaggat

SEQ ID NO: 39487 - DNA, 165 bp, Gossypium hirsutum
  Clone ID: LIB3146-058-Q1-K1-E9
cccacgcgtacgaccacgcgttctaccacttttgcgacggatttcaaggacaaggggaggtcgtgtgaagaccacattggaaaatctataattgccacataggccatggaagctggtgtgagatctgcagcaaaggcaggttcttccaactcatatgaattccat

SEQ ID NO: 39488 - DNA, 281 bp, Gossypium hirsutum
  Clone ID: LIB3146-058-Q1-K1-F1
ccacgcgtccgggatacaggaggctcattgttggtttcatcacctatttcaagggcccagcagaaggctctgtagatgctgtaatgttcttacttgtgctgttgcttgtttaactttaaatattgtgaagatgcaactagtaattccttttatttgaatagacatgtgcgcgtgcgcacacacgctgtagatgctgtaacattcttactagtgttttttgctttcttaactttcaatttaaaaaaaaaaaaaaaaaaaaaaacataaaaaaaaacatcaaa

SEQ ID NO: 39489 - DNA, 234 bp, Gossypium hirsutum
  Clone ID: LIB3146-058-Q1-K1-F10
ggtacaggacgtgtgctggcacttggtgtgtggcgtacggaggtgcgcgtggcggcacggagggttctgaaccaggctttgtgcgcacggaagccgtacatggggtgttggctgcggcgcacctaaaaaacctagggtttctgaaactattttgattttgggccacttgggcattaaatttttagactgtaattggactttttattattaggggtatttatttatttatttatt

SEQ ID NO: 39490 - DNA, 351 bp, Gossypium hirsutum
  Clone ID: LIB3146-058-Q1-K1-F6
cccacgcgtccggtcaaaattaatttttatgtactcacttaattgcccatagaccacaacgggatatgtggttctggcttggaataaactgatcaaagatccatggattccgctgatcatgatccatgttaggatccataaaattattgtgaatttataaaggtgtacacagaatcactgtgacaggacatgcacaaaaaatttggtcgattgtttcagctcattcatgcagatagctccatgaaattctgcatatagtaacatttattttagatggtagaatctcgagatatagtttcttggatacattatcgtggctggtaagaaaagcataaacttgatgaatcttat

SEQ ID NO: 39491 - DNA, 266 bp, Gossypium hirsutum
  Clone ID: LIB3146-058-Q1-K1-F7
cccacgctttcgcccacacttaatttaaattctacattttagattgccctaatcggggaggggaggttttgtacagtatttccaaaaattgattttttatatgtggatggtggtgctcatgaatccaagtacacgcctcccattgacgctttagttacctgctcagacaacaatgactctcctcccgctttctaatcacacttcttccagtttttttactcttttatccactttacttctttagttgctgggcaccttctcttttc

SEQ ID NO: 39492 - DNA, 342 bp, Gossypium hirsutum
  Clone ID: LIB3146-058-Q1-K1-G1
cccaagcggccgtaagatactagctcagaggaagcatttcccttctgccaactggcttattggatagcgggaagtattcttgggcatcgaaaagattctatgagaaatgcgatacagattttattactcttggggacaaaaccccgataggttcgtcaaagataaaaaaatctgaaggaattgaaccacctggtggtaaagaatgcattggctgaaacagacaaactcttattggaaactgccaaatttttaaggggggctgatcttgtacagattgctaatagtgaataagataggttgggccaatttaacagccctgtttggatgatgcacaacattggg

SEQ ID NO: 39493 - DNA, 196 bp, Gossypium hirsutum
  Clone ID: LIB3146-058-Q1-K1-G11
ctcacgcgtcctcagacacgtgtcattactcttggagctgacaggattctcatggctgggagcccctttcaaataatcttaaccgctttcatatggtattgataaaaggcaaacaacagaaaaggtgggcaagaatggatactttattcagatgatcagacagatgacaatataggagctcctacaggattatcac

SEQ ID NO: 39494 - DNA, 406 bp, Gossypium hirsutum
  Clone ID: LIB3146-058-Q1-K1-G6
ttcaaaactcagcaacctttcatttttatttttaaaaatagaagctttaaccccggcccgtggtgtttgattcaacatgcagctgcctaaaccatcatttatttgatggctgactgtgcaccaatggcgatcgaaccttgtcaacggaggacacgcccacggagatcaagtgatgggacgatgggatggggttaggtggtggcagcagctttcacagtggcatgtgcatttgagtgtttaaggctggagtaatgactggattggagtaatagagataaagatggggtttgatcttcagaaagtgcgagccatgagactgagaatagggtttttatgttctaatgaaccttttgtttatttgtttgtgatctattattttgggaaatttttcattagttagaagaaa

SEQ ID NO: 39495 - DNA, 295 bp, Gossypium hirsutum
  Clone ID: LIB3146-058-Q1-K1-G8
gttaaaatttataatttattgtttagcttatattttaaaaattaaatgaagaccctataggtggtttttatcatgtattcactttatattttatgaattttcttataaggattttgttgagctaatgccgattttagttttacatttaatttttcacctttttaaaacttgtatttttgtcaaatactccaaaatcgatggaaaaaataatgctggttaactttgctgaaaaaaaaaaaaaaaaaaaaaaaaaaaataaaaaaaaaaacataaaatgaaccggagaaggatatgt

SEQ ID NO: 39496 - DNA, 258 bp, Gossypium hirsutum
  Clone ID: LIB3146-058-Q1-K1-G9
cccaaactaagaaccctagaaattctttttctccaaattttctgcctcctcggtgccatgggcatcctattctgacgacaactagcagtctcacgctcgtgctatcgctctcaaggccaaagcttatcacctctccaccaagttttaggcgccagaaaaagtactctttctattattgttgtctgttcgtttgctaagaaaagctgtacgaaagggaaatcaaatgctgctatgatctgatttaccacattggtcctt

SEQ ID NO: 39497 - DNA, 140 bp, Gossypium hirsutum
  Clone ID: LIB3146-058-Q1-K1-H11
gtcattaccaatgtggatgagttttggagggaatgatgccttaacacatgcaacggatgtgcagcgcactcttgaagaattatcgtcaaaaccagagttgctttatctcgataactatggtcacatagacttccttttga

SEQ ID NO: 39498 - DNA, 315 bp, Gossypium hirsutum
  Clone ID: LIB3146-058-Q1-K1-H12
cccactcctactggttgttacttatgaattttttaagactcaatgcacttccacattagggcggtgctatctttgagtcatctggtgtatacagcatgggtgggctcatcacacttactggtacttagactttgatgggagccgagaggattcaatctcttcatagctacataagccaaggcttttcacttcttcaaatagaacgtagtttaatgttacatcccatagtgattcatcttagccagaacttgaactatagggtatggaatacaggttttgttaacttccttgtttgccagcgtttttaaccatgat

SEQ ID NO: 39499 - DNA, 399 bp, Gossypium hirsutum
  Clone ID: LIB3146-058-Q1-K1-H3
cccacgcgttcgtccacgcgtacgcccacgctttcgattcttggaaccagctagagggaaagtgggcggttgttaataaaggatggtgctgagatgaggcgaataccagaatatacctgaagtctaatacttgcagcacttgcttcagtttgtcagttcaatgttctaacaaacgtaaaccgatgtgatgtggtcttgtggggggcttatatttttctatattttcccctatgtgtagaataaaaagaatcttgattgctccctgaccttcttgagataactgagccaacttttgatatgatgataatatcctctatatttgtattttgatcttcaaactcgatgacgtcatacagatcgttaaagaatgaagccgatgtccatggctaaagatttgag

SEQ ID NO: 39500 - DNA, 405 bp, Gossypium hirsutum
  Clone ID: LIB3146-058-Q1-K1-H5
cccacgcgtccgcggacgcgtgggttggttctgttctaagcttcatggtggctataataatgccagcactgtgtttcataaagattgtcgggagaaaagcttcaaggacagatattgttttgagttcaacagtagctgtaatcgccatcatctgtgctagtttggggacatattctgcattgcaagggattgcgagcaattactaataccgagagaatagcttcctgctagtttccgatatgtagattgtcatcatggggttgctcattcttcctgcatctacgactttctgctgggaaaatggatctttcagtagctagctgcctggataaatttggttccagatacattatcataaggcattacagaatattaggattaagacatgctcatgctcatgttaca

SEQ ID NO: 39501 - DNA, 222 bp, Gossypium hirsutum
  Clone ID: LIB3146-058-Q1-K1-H6
tttttcattgcaagatccatcattcattttcaccagccccatctaactgaatggggagggcggtttctgcggcctaaattgaactcatttgaaacttgctcctagagattacattttcagagacactcccaataagaactcctaatatatgagtataaataccacaccagaatgggaaggtctgcgaatgaccgccaaatctactttccaaaagcaaaagtc

SEQ ID NO: 39502 - DNA, 164 bp, Gossypium hirsutum
  Clone ID: LIB3146-058-Q1-K1-H9
aattaaagggccgacccacaccgtcctaatttctttcttcctcgcatacttcaaaatatttatatccaaaccacaatttgggcgaagaggtatctttacaccaactttgacctcctttcatcctgtttactcactccgaataacaaatctatcggaaccactcc

SEQ ID NO: 39503 - DNA, 366 bp, Gossypium hirsutum
  unsure (1)..(366): unsure at all n locations
  Clone ID: LIB3146-059-Q1-K1-A1
catagatggaaccaacatgggcttggaggggacaattacagaggattgtgtagagacttacatcctggtccgactagtttgttgcattggagtgggaaagggaagccatgggcgagactagatgctaacagaccttgtcccttggatgctttttgggctccttacgatttgctgcaaacatcctctgctttggagtcttaaaaatattggtgtatatcataccaataaatctttctttttgttgttgctattttttgtctatatgtgtatatgggaaaaatatgatctcagagtcagctttctgaagaagagaaattatcaagatgatcttccctttctccaaaaaaaaaaaaaaaaaaaaaaana

SEQ ID NO: 39504 - DNA, 284 bp, Gossypium hirsutum
  Clone ID: LIB3146-059-Q1-K1-A11
cccacgcgtccgatttcatagaaaaatcataacctacacacaaaattttcgtgttaaaatattttaaattgaattaataattttcttgaaaaggcaattttttttattacctttttatggggctggaatgactaactcgattgttaatagggcttaaagcttaaatgaaattagttaactaagatggcaaagcccttacatccgtctggttaacctttgctataattataagtttaataataaatccaattttaaataatccaaatttaaataatgatgtggaa

SEQ ID NO: 39505 - DNA, 127 bp, Gossypium hirsutum
  Clone ID: LIB3146-059-Q1-K1-A2
catgatttatctgttaatgtatgtaggttccttttgtgtactttcgtgtaggaaaagacagaagtgtagaacttgataacatcattcgtaaaacaagcatcacccgccttgtttatggcatggatgt

SEQ ID NO: 39506 - DNA, 161 bp, Gossypium hirsutum
  Clone ID: LIB3146-059-Q1-K1-A5
gcggccaaacctattatcagtgacccaggtacgtgcatcaaccttggccgagaggcttccatccggatattcttcaattggcaggggccgcaagtacaccggcggctacagcatagctaaggaggggggggaacacctcctcatcaaaaaaaaaaacaaaa

SEQ ID NO: 39507 - DNA, 131 bp, Gossypium hirsutum
  Clone ID: LIB3146-059-Q1-K1-B3
ggaggtcgaggaactccagggtatgcagcaccggaactttggatgccatttccaataaccgagaagtgtgatgtttatagctttgggatgctattatttgagatcataggccggcgaaaggaaccttaacg

SEQ ID NO: 39508 - DNA, 326 bp, Gossypium hirsutum
  Clone ID: LIB3146-059-Q1-K1-B8
tcgacccacgcgtgcgcccacgcgtccggcagctcctttgagtataatgaggtcggtcattcacaccaaaagtgtggagttcatgccattcactttatcatttttcctcacctgcagcgccatcttgtggttggtttacgggctacttcttaaggacttttatatatctctcccaaacattgtgggagttgttctaggaacaatccaaatgctactatatgtagtctacaaaaagttcaataacaactttgccaaagaccatgaaaggaagcaaccgtcgccgactgtgaacggaaagaacatgaatcatatcaaagcttcaaata

SEQ ID NO: 39509 - DNA, 244 bp, Gossypium hirsutum
  Clone ID: LIB3146-059-Q1-K1-B9
cgctcttgctagaaaaaaaataaccgagattcgggaagtgaaatcagaaccaagaacagacctgacagtaggatagaaattgggagggaatgatcgcatctagttggggagaaaaggacagaggggtttcataacgcttttgattccttgagtgctctttcagctttaatacacctttatttgtattaggctttagcctagcttcatttgactatgcttttggcttaattttcttgttaaacat

SEQ ID NO: 39510 - DNA, 244 bp, Gossypium hirsutum
  Clone ID: LIB3146-059-Q1-K1-C7
cccacgcgtccgagttgcaaagctttctcagttggaactaccgtttaaagaaattactagaaactataggaagcaactgcaaggtagacccgaagtttactgcagtgtatttgttgacagatcatcaacacaacagaacgggagaaccaggcaggatcatgttggtattgtcgcattttacaatacaaaattcattcctgccataaaatatttgcttgaagaacttgatctttccagaacgact

SEQ ID NO: 39511 - DNA, 422 bp, Gossypium hirsutum
  Clone ID: LIB3146-059-Q1-K1-C8
cacgcccgtccgatataatattggaggaatcaatctcatatattacaatgtatgcgcagatcgtactttactgcgtggcgagtccaatattcaatccactgcatatatatggaccaccccattaatcaggaggctctatgattagaaacagaggtatatgtgggatgccatcaatggatgacccaagtaacatactctagctcatgattgccactacgaggggaccagtgcagatgattgtgcagatgataatctgcaaaaaaggacgctgaccatacacggataatcgatggacaaaccctagaatgggggaaatgaacttctcttttaaaactgtctgtaacatgcggaaatgcaacacacctaagcctggacactaagcttgcaaacaagataaaaattcaaaacaaaaaatgccccca

SEQ ID NO: 39512 - DNA, 389 bp, Gossypium hirsutum
  Clone ID: LIB3146-059-Q1-K1-C9
cgactcttgagtatcaactcatatttacatttatggcaatcgtctttacactgggggtcggtttaatctatttatatatatgcaacacaccattattctagagggtctatgattagaaacaatgttatatatgtgatgccatcaatgattgacccatataacatactcattgctcatgattgccatctacaatatgactcaatgcagatgatgttttcagattaataatttgaaaagaaggtcgtctgacctacacatgataatgtattgacataccactaaatggtggaatatgaacttctcttttaaaactgtctgtaacatgcagaaatgcaacacacctaaacctggaccttaagctgcaaaacaagattaaaattcaaaacaaa

SEQ ID NO: 39513 - DNA, 143 bp, Gossypium hirsutum
  Clone ID: LIB3146-059-Q1-K1-D1
cggacgcgtgggttcaaatgtagtgtatgcagtgggaactttatgttttaggttaggagagatagtatacttttgtttcttatccatgttgggtactaaaagttgtaaatgctttccagaggaaaattgctacattgtaattc

SEQ ID NO: 39514 - DNA, 328 bp, Gossypium hirsutum
  Clone ID: LIB3146-059-Q1-K1-D12
ggccggcctgtgtgtttttttttttttttgtggttctcaatgtggacttgctgctgggacagcgtataatacaaattggagaggcctgggaaatctttaactgttaaacttgtcctgctaaaaaatgttatccttagcagtatgaagaacattgatttgctggtttagtgcttcgcacccctttggaaggctaggaaggggcctctactgaatctaatgcttatcttacaattcgaattggtatttacagtaactgacaattactagtattagacatttaaagaacattgaaaagcttgcactcctagactacgcttttcttcaagct

SEQ ID NO: 39515 - DNA, 246 bp, Gossypium hirsutum
  Clone ID: LIB3146-059-Q1-K1-D4
gtgaaattagccttgaaattcaaggccaagacggatggaccaaagttgagggtttttgtgggacccgtccagtcggttccttcctttcaaaccgaattcgttaacttccgccaggaagggggggagtccccaaaccagtttccgcctttgggttttgggaaggagccattgaattccaaggcctaaggcggttttctttccccccaatgcagggtttgtcacttttaaaaaccttcctaaacgggt

SEQ ID NO: 39516 - DNA, 322 bp, Gossypium hirsutum
  Clone ID: LIB3146-059-Q1-K1-D6
gtcttgccgacgctgaaggtgcaagggtttgtggtgtttctcggatcatggctgttgatgtgaacggaaaacaattcgaagaagctaacaggtttgggattacagaattagggaatccaaaagactactatcagccatttaaagaggtgattgtggagatgaccgccgtaggagtgaatcgcaatgtggagtgtacagggagcgtccacccatgatttgcgttttagaatcctcccatgatgattggggtgtatggtgctgttggatgtgccaaaaaaagacaatgcattcaaaactcatccaatgaatctactaagtgaga

SEQ ID NO: 39517 - DNA, 330 bp, Gossypium hirsutum
  Clone ID: LIB3146-059-Q1-K1-D8
gtgttctcaaaagctagaaatgaaatttccatatttgacagctaggttataatttaaatgattagaaatgaacattaagatgccaatatgactttgtcgttgaatagccttaggctgttcagcttaaacactgtacataaatggtcatggaattattgttgtctttactgtgtgcaaaattttcttttctaattaaattttttggtaaatatgcatagcaggagatatcacgggtgatctagtgccctgatgatgacggtggattttgctctttctttacacatacaaagtagtaccagtttggactgtaaggtaataatgttaacatga

SEQ ID NO: 39518 - DNA, 336 bp, Gossypium hirsutum
  Clone ID: LIB3146-059-Q1-K1-D9
cccacgcgtccgcggacgcgtggggaagagactcttttcgcatggaagaataggttgcgaagctggggctatgaaccggtcttttgcagtgttgagaccaaaaacggacttgattctcttgcattttacttgagggatctaacaactgtaattgttggtcctagtggggttgggaaatcaagccttatcaatgttcttcgaagtgatcaccgcgctactgattcccttgaaggagataatttgtttgatcccatttcaggcagcaagtggtttgaagatcagagggttggggaggtctcgacaagaagtggcagagggaaacacactacgcgacat

SEQ ID NO: 39519 - DNA, 230 bp, Gossypium hirsutum
  Clone ID: LIB3146-059-Q1-K1-E10
cttctttgctttctttgtatttgcagcttctgtaggggaaaaaaaagatgaagagggttgctttgttgcctggtgtggggcactgcggggctgtttcggtgaaagtccatgcggagcaggcatgaatccacgagcttcccctgctgcgcatcacgtgtcctccctcatcaccgttgtgcacagctgaagccagaaccatccttgggatacataaactatctttaacagtt

SEQ ID NO: 39520 - DNA, 136 bp, Gossypium hirsutum
  Clone ID: LIB3146-059-Q1-K1-E12
ccctcccaaatacattctctttgatattgttattcttagaaggatacaatacacccgaggggttactataacagattctgaagtcccacatataaaacctgctaccactgccaacaggcttcactctcaacacttg

SEQ ID NO: 39521 - DNA, 202 bp, Gossypium hirsutum
  Clone ID: LIB3146-059-Q1-K1-E4
gctgacatcaatattcgaaggctctgtttcggttttaataataccccgacctccgatttcttgggggtccttggggcttatttgaaggaaaaataatggggttttatatttgaacctgcttgccggttattcctgggttttttcttttttcaatgggtgggttttgggcctgcctttttgtttaaggactatttttttgggg

SEQ ID NO: 39522 - DNA, 127 bp, Gossypium hirsutum
  Clone ID: LIB3146-059-Q1-K1-E5
cgaatcccggtcgccacgcgtcgccaccgtcgattgttaaatgccttacacatggtcttcttccatcatcgccgtaaggagtgaagtctccctttcaccctgaatccgggactggcgtgtttcatga

SEQ ID NO: 39523 - DNA, 120 bp, Gossypium hirsutum
  Clone ID: LIB3146-059-Q1-K1-F3
gccaaagctaaaatatatgcataattaaatgaataatgcagtgcaccaaaattggcaacaggaaatagtctacgaaaggaactttgtgaaagagataattaaagaggttcacctttatgc

SEQ ID NO: 39524 - DNA, 377 bp, Gossypium hirsutum
  Clone ID: LIB3146-059-Q1-K1-F7
cccacgcgtccgcccacgcgtccgaacaaggtaagggctgttagggctggtattgtgccaccattgatgagactgttgaaggatgctggaggtgggatggtggatgaagcattggcgattcttgccattcttgcaagccatcatgaagggagggcggcaatcggtcaggctgacccgattcctgttttactagaagtcatacggactggttctccacgtaaccgggagaatgccgccgccatactctggtcactttgcaccagtgacttagaacaattaaaaatagccaaggatttcggtgcagaggaggcattaaaggacctgtctgatactggcaccgacagggcaaaaaagaaaagctgggagtatcttggaac

SEQ ID NO: 39525 - DNA, 278 bp, Gossypium hirsutum
  Clone ID: LIB3146-059-Q1-K1-G12
cccacgcgtccgaaggatacgttttggtgttgggagatcatcataacagaagttccgatcgccatgattgtggcccgcttcccatagattacaatatggcgagatcagtatgccggtatagactttcattcaaagtgtgagataccatacattatacacatgtcgagaaagatgctgtggccctttcttgacatctgagataacttaaaaaagactcggatcttactaggctcatatcgagcatattcgaatacccatcagaccggaataggccatat

SEQ ID NO: 39526 - DNA, 159 bp, Gossypium hirsutum
  Clone ID: LIB3146-059-Q1-K1-G4
acccttccgcgaccccttggccgaccccttggatcctggacaaattggaaacggatatgccccaatcctcgactggcacaccttacacattggtgttaagtttgctgaacttttgaccaaaaatgacaggcgatcttgtgaggagctttagaaggaacc

SEQ ID NO: 39527 - DNA, 137 bp, Gossypium hirsutum
  Clone ID: LIB3146-059-Q1-K1-G5
cccacgcgtgcgcccacgcgtgcgatcctgtttaatttgggcacggatatgcctgaggcgggggctgctacacctcacacgttggtgcggatattgctgaactgttggccaaaattgacagacggtctggtactgat

SEQ ID NO: 39528 - DNA, 378 bp, Gossypium hirsutum
  Clone ID: LIB3146-059-Q1-K1-G7
atggacggaggcttgtatgagcggtaccctcagtatagaaggtacttaaaagaggccgtagccgagcttcttggaccggaaacatcccaaaacattgtgatagagcactccaaggacggatcagggattggggctgctctcttggccgctacaaactccaagtatggtcgaaatctttaggtaaatcaacctcatagtttccgaaaggaaaattattgcttttgtattttatcgaaaaaaaaaaaaactggggagtaattgcaattttgttagaatagagtgtaaaactatatgcaagtcagattttaaatccagattgtaataatttgtattgtgtattagtaaagccaataaagatggaatcaatgaatttattct

SEQ ID NO: 39529 - DNA, 204 bp, Gossypium hirsutum
  Clone ID: LIB3146-059-Q1-K1-G8
cccacgcgtcggtccacgcgtccgctcactctttcgtaggagcactgggaggagggggcaggggaacttgttggccggaatcataccaaacattgtgcttgaccactccgggtccgctcagggataggcgttgctttcatggccgattcacaccccaagtttggtcaaaatagatagggaaatgagcctaatgcttatcgaaag

SEQ ID NO: 39530 - DNA, 196 bp, Gossypium hirsutum
  Clone ID: LIB3146-059-Q1-K1-G9
gcccacgcgtcggtccgaggaaagaaaaaggtagcaaacagtctcaagccactttggaaatacagaatacttatctggagcttctttcagcaatcatctcttagaattttcgccgtaacatagacccacgcatctgctgaagagatgagctatagaagcataccctggccgctgttgttaggagaacaagagcttt

SEQ ID NO: 39531 - DNA, 405 bp, Gossypium hirsutum
  unsure (1)..(405): unsure at all n locations
  Clone ID: LIB3146-059-Q1-K1-H10
agcttgaatccgatgagaaggagaaaattgaagcagccgtgaaggaggcccttgagtggcttgatgacaaccagaatgctgagaaggaagactacgaggagaagctcaaggaggttgaggctgtctgcaaccccattatcacggctgtttaccaaagatctggcggagccccaggggctggaggatcaaccgaagaggaggattcgcatgatgaactttaaaaatctcttagcaatatcgagggttggtgatgaacaagcaagagtgaggatgaggagagcgtanggtagttaagacgaggatttttgaaaattttcttcatgggataatggcccccctgcccccctttctttgctggttttttttggtttttttccccttaatttaatttaattttgggggaaa

SEQ ID NO: 39532 - DNA, 181 bp, Gossypium hirsutum
  unsure (1)..(181): unsure at all n locations
  Clone ID: LIB3146-059-Q1-K1-H2
cccacgcgtccggtatctgtatttggtgggttaaggagtgcacattttgtaaggttgatcaatatatttgtaagtggtggcaaggaatttgagatgcctagaaaatattcatcatcaatatcaaaatatttttagcgtctctnanaaaaaaaaaaaaaaaaaaaaaaaaaaaaaaataaaa

SEQ ID NO: 39533 - DNA, 207 bp, Gossypium hirsutum
  Clone ID: LIB3146-059-Q1-K1-H5
gaccaatagaggtctgacttctgaggaagatgaagaatctatatttgtggatcaatcaaagcgtggaaaatatttgggatttatatggtgaaacatatagacaatcccaccattgatgatgtattacaacctggaaataatctcgtagcagcccgggtattgtatgtacggaaagcttcctgcacgtttagtgctaaagtacctggg

SEQ ID NO: 39534 - DNA, 348 bp, Gossypium hirsutum
  Clone ID: LIB3146-059-Q1-K1-H7
gctaaacagtatgcatacattccgctcaagaaccagaagcagaagattctcatttcaggaacgtagctctgatctgcctcaagcgcatttgtggtattctactcatgaggttgtcaatgctttaaagctcttccttgcggctggaaatgatttagctgggagcctcacatatagatacgacttggtcgacttaacacgtcaagtgttgtcaaagctagcaaaccaagtctatttggatgcaataaatgctttccgaaggaaggatgtcaaagctttgaatattcacagccagaagttcattcaactaataaaggatattgatgtactactagcttctgatgacaattt

SEQ ID NO: 39535 - DNA, 346 bp, Gossypium hirsutum
  Clone ID: LIB3146-059-Q1-K1-H8
caaaaagatcttccagtcaccatttatgaaagtgaaaaatttagtaagaatacagaacaaagcaggcgagagacattcaatgtactgtttggtggctagtaagcaaatggttggcatatttctcacaatttggatgagaattgaattgagagatcatgttaaaaacattcattgttttttccttgttcattgtttactgaaatattctttcagtaaacattcattgtttactgaaagaatattacactcttttgcttataatttctgacatgataatttttcccttttgtacaaagatgaatgatgaaaataactttatcaatggcacatctttgcattcgtcctg

SEQ ID NO: 39536 - DNA, 166 bp, Gossypium hirsutum
  Clone ID: LIB3146-059-Q1-K1-H9
gtttttcattctcatgtggtgtggtacgtgactagcaaaaaaaaagaaaatggaagaggaaagtcaaaaactttgtaatttacatcttctcctgctggtagagagggttggcagtatacaaagatgaaatccagaccagctaatgaatctttgccttttttcttat

SEQ ID NO: 39537 - DNA, 347 bp, Gossypium hirsutum
  Clone ID: LIB3146-060-Q1-K1-A1
ctcacgcgaacattatatataagatcaaatgtatgcagattggcatgcttagtgaaaacacgcgttagactaagcctgaaactactactggagctactcgcggactagctagcatactcgatgctattagcagagactctatgtttaactataagcggatttattgtcggttgtaaagacttgtgtgaagacttggtttaaacgactattagaatgactatggaagagtgaatgtaacacacactaaaatacacactaagagtgctgagcgacgtgttgtgctttatgttttaaaaaaaaaaaaaaaaaaaaaaaaaaaaaaaaaaaaaaaaaaggggcggccgttc

SEQ ID NO: 39538 - DNA, 298 bp, Gossypium hirsutum
  Clone ID: LIB3146-060-Q1-K1-A10
cacaacctttagttggagttacaatttgttgaaatcattggctttttactaaattgtacttgagaataagtgagtttccttccctccccccaagtattttagtgacgttataagttaataagatacacttcgaactttatgctagagaaaaaaaaaaaaaaaaaaaaaaaaaaaaaaaaaaaaaaaaaaaaaaaaaaaaaaaaaaaaaaaaaaaaaaaaaaaaaaaaaggggggcaaaaagaaagaatacatattatttaggcggagacactaacacagaggcgactgtttgtagcaa

SEQ ID NO: 39539 - DNA, 383 bp, Gossypium hirsutum
  Clone ID: LIB3146-060-Q1-K1-A12
cggacgcgtgggttaagcttatttttgattttttgaacaccctgggggccaagggtaatgtggcaaatgcaaaccgtggtataaaatatcacaggttcaagatgttgtttggacatctatggcaccgattcagtgatgcaagggctctcccagctgaccacgatgctacgttgtatgttctagcagacgggtgatttaaactgaatcctgggatacgaccaatctactgctgcacagcgaacgttacgactgtattaatcgctgaagctggaagtttcgaatccgactgtggtactgactccatactggggagccattagtgaggaaatcagataaatgatgaatatttaacaccagatatcgactacattgaataagaacct

SEQ ID NO: 39540 - DNA, 353 bp, Gossypium hirsutum
  Clone ID: LIB3146-060-Q1-K1-A5
ggatgataatttggataacagcaccacaccttattaatcaatgtgcatgcatggcatttaggcctatattgttgccacaatttgaggttagaagttgtattttattactaacgataatgtttatgctatgtttgtattataatgttaatggtgaatgatatttgaatgttcttattttctagactcacattaagctagttagttcaccccatagttttaaccatttcagttaatgctcaaggctaggatcagacatgatatgcagacatatggccgacttttgacttataaattattttgcttacattttttttaaattcatttagtttttggacaataaagttatttagtct

SEQ ID NO: 39541 - DNA, 232 bp, Gossypium hirsutum
  Clone ID: LIB3146-060-Q1-K1-B1
gtttctcttcttgtaatattgttataatctttgttttcagtagtcaagtttggaccacagtaaaaaagccaacatagaagtaaaaaaaacagaaggatcatactgtcaaaatatgttgtaaaaactgtaattttctgcccgcatgcataatcccatttttgtacagcttcaatgtataagcagggaaaaacacccagaggcagaaatgttaaatgcaagtcagccattagtg

SEQ ID NO: 39542 - DNA, 413 bp, Gossypium hirsutum
  Clone ID: LIB3146-060-Q1-K1-B2
cccacgcgtccgggttgaactgttgatggtaaacccagaaggtgaaaagcaagaaagtgatttgggtggacatagatatgaagcgatagttgatgctgaggaagatggagatgaagacgaagatgaagacattgataatgatggacccggagaagacaatgaagaaggagacccttctgatggtgaagatcatgggaacaattccaatgaccaaaatggcaactccaacaaggaaattggtggtggagaggctgatggagcaggggaagaagagaacggagaggaagaagaaggtgaaaatgtggatgatgagccggaagacgaggatgaggacgatggtgatggtgacgacaatgaaggcaatgatgatgaggaagaaaaagaaactgtagaagatgaagagcctgaaaatg

SEQ ID NO: 39543 - DNA, 178 bp, Gossypium hirsutum
  Clone ID: LIB3146-060-Q1-K1-B7
ccacgcgtccgtcagcatcgttttatttatatataaatgcacaactaaccgggattggtatcttgtatgggttatatatgcatgatcccgctgttttgtcaacataaggttatatactttctgacagtacagatattttgttatttacagcaatatatttaacagctagaggaattta

SEQ ID NO: 39544 - DNA, 342 bp, Gossypium hirsutum
  Clone ID: LIB3146-060-Q1-K1-B9
cccacgcgtccgatgatacccctgaattaagtgaagaaactcaacgaataatagccacaattgttacacaagttgagcacaacaattatcatgaagaggaagaacaagtgttaagcagtgtattggtacaccatgaaacttatttcactatgcaaccgtgtatggattcaaattatacatgtcaaatgtgggtggacgaagtattaaatgggcatgatgatcgatgcatgaatagttttaggatgccaaaatatatatttcacagctagttgcatgatttgcttacaaattatggcataaagcatgactaggtttttgcgagggacaagctagcataataac

SEQ ID NO: 39545 - DNA, 417 bp, Gossypium hirsutum
  Clone ID: LIB3146-060-Q1-K1-C1
cgagaaaatatgatgcagatgggaaccttagggtaccatatcagatagtgacgacgacgatgaattcacctcctggtttcactttatctccttcatctcctactgagttctcatcacacaagagaggtaaaggaaggtccccagggaactggcagcttcttgcttctctaggtgagttgtttgctcacacggccggcggagacttcacggcacatgtggtcaaagttaataccggggaggatgtagcaggaaaagttgtgtcattatcacaaaagggtcctcgtgggatttgtattctatcagcaaatggagctgtttctaatgttacccttcgacaacctggttcctctggtgggattttatcattcgaggggcgttttgagatattgtctctaaccggttcatttacattcactg

SEQ ID NO: 39546 - DNA, 411 bp, Gossypium hirsutum
  Clone ID: LIB3146-060-Q1-K1-C11
ggtttctgccacgactggtgttgctaacaaccccgagattttcgacataatcggtcattttgccgacccaaagccaggtgcaacattgcctaaaacacccattgtttgcaaaccacaagatagtgccattgaacttgctctcaagattgccaaaatcaatcctcaaagaacattgttctttgacgatagtgtccgtaacatccaagccggaaaacatgtcggtctacacactgtgttggttggtacttcccaaagaccaaaaggtgctgattacgcattggaaagcattcataatatcaagcaggcattaccggagctatgggaaactgatgtcaaatccgatgttagttacgccggccaagttgccgttgagacatcggtgacagcttagatcctatgtttatgtttaga

SEQ ID NO: 39547 - DNA, 412 bp, Gossypium hirsutum
  Clone ID: LIB3146-060-Q1-K1-C2
cccacgcgtccgcccacgcgtccggtgaaagggagaggaaggaacaagaaagcaagaagaaccaaaaggtcgaatttgtacctggtggaaatcaacctggagcggttcttcctgctccaaaagttagcatgcctactgcagttgcggctgggagtggtttgccttcaggtccaactgcagtggataacaacattgtgcgggatggtagacaaaacaagaaatcaaaatgggataaggtggatagtgatagaaggaatcctcttcctgctggagcacagcattctttatctgctgctggagcacatacagttatattatcagctgctaatgctggaaccgggtacacagcttttgcacagcagaaacggcgagaaacagaagagaaaaaatccagtgaaaagaggttggatag

SEQ ID NO: 39548 - DNA, 408 bp, Gossypium hirsutum
  Clone ID: LIB3146-060-Q1-K1-D8
attgatcaagagagttcttgacaactttgtcccagacgagttttgccctgatccggttccagatgttgtgcttgaagccctggaggctgaggatcctgccgaagccagggaagggtttgtcacaagctttccctatgttgcatctcctccaatttattcaccgccttctgcaacatcagttgctagcatcattggtgaagttggtagccaatctcagctgagaagaagtcggtcatcggtcctcagaaaatcatacacaagcgacgatgagcttgatgaattgaattcacccttggcttcaatcttcaatgatggcttccgatcctcacctgttcaatcgaaacctatctggatatcgaaggggaacaactaccaaaatgctattagatatgaactcctaagagatgt

SEQ ID NO: 39549 - DNA, 320 bp, Gossypium hirsutum
  Clone ID: LIB3146-060-Q1-K1-D9
gatatatcttggaaagaaaacgctcgatgttttattgcctattcactgctgatgtgtgtggatacattgcaggaacggattgcgacccaatgcttaggaggcgcagcaggaggccacgacggctagccactagacctgtacgtggcagtgtatgcacactgatgtgagaaaagggcgataggggggcctgctgaacagggagaccatagacttatactctgcatatagtgacatgtgggtccggacgctatgggcccatggcttatgacaacatgtggatgctcttgtgatgtggatggtggatcatgcgtggagggggc

SEQ ID NO: 39550 - DNA, 406 bp, Gossypium hirsutum
  Clone ID: LIB3146-060-Q1-K1-E12
tggagatcaaatattgtaccgaaaagttccttcaggattccggcttaccccacatcacgatccggctatgcggtttcatgcaagtaaatgtcatctataactcaatctttgcagatatgtatacgtacatatgtgtgtgtatatgtgtatgatgtatatatgtatgtgtgtgtgtgtgtaaagttccttcaggatttcggcttaccccacatcacaatccggtatgcggtttcatgcaagtaaatgtcatctataactcaatctttgcagaaatgtatacgtacatatggatgtgtgtgcaatgtatgtatgtctgtgtgtgagtgcgcgtgcgtatgtatgtattaattaaaagcatagaaacatgatttcttggaagaaccagtttgtcagtatgatggaatta

SEQ ID NO: 39551 - DNA, 348 bp, Gossypium hirsutum
  Clone ID: LIB3146-060-Q1-K1-E5
ttaaggaacgacccacgcgtgcggaataaaatttgactgagaggactttcaatttttttttataagcagttaaacttgacttggggtatggatttattaaaaattaggatcttagatcgttcttgcttaagatcctaattttgaaacacattaaaagtcactgttggataaatattcctgttccccttttaaggtaagataagaaaaccatttgcaatccaaaagatagaatatgattgctcataactttgaattaaaaataaatgtgtaccaaaccaagttcaaagcattaaatctgtcctattttttatcttctttaacctaacaaaaaaaactttttaaaatttt

SEQ ID NO: 39552 - DNA, 419 bp, Gossypium hirsutum
  Clone ID: LIB3146-060-Q1-K1-F1
gagattttgtagctgctgccactgatctgcggcccaactgcggtgttaatcgcttgctgattgacaagctctcagttaaaactcctacaggtgaagcaaagttgaaagtcatgaaggaaatagctaaggatcacaacatagaatgggatacaagtgaatcagaaaaggagctgctcaagcctcctgaagagcttattgaggggccacgtaaattcgttagtgcaaccagcgtacctgtgaaacctgctacaaatcattgtcccgaaccaaaagagtctatgaccagaggagaagagggccataatcgttttaaagacacggttgcagctgctgaagcagcagaagaatctgcaaaaaaagcaattgctgctgcacaagctgctgcatatttggccaaccgagagagtaatctatttagt

SEQ ID NO: 39553 - DNA, 432 bp, Gossypium hirsutum
  Clone ID: LIB3146-060-Q1-K1-F3
cgcccacgccgtccggtaagatttaaggctccaaaagtttttttggtaaaaatttcctattaaattgggcttgggaaagcattaagttctaaagaacttttaggtcaatattttgtaataggttgataggccctttttgaccggggaattaacccgacccgttcgccaccccaaataaaaaagttttattccggggttggggccaaaggaattttagggatttggggggattaattttccaaaaagagagatttcttagccataattgagaacatggcccaacctatcacacaccaaaggagaaagtgggcggcttttcatacttaaaaaggggatccaaaaatgtgtctcctattctcttttgacacaaatatacctgtgcaaaggggtctgtgcacataaaagtgctctgtgacgacacagctctcctct

SEQ ID NO: 39554 - DNA, 380 bp, Gossypium hirsutum
  Clone ID: LIB3146-060-Q1-K1-F8
ggaaaaaccgggccgacccacgcgaacgaaatggattatgatcagtacttgcaaacaagttttatgaagaaagacactggtgtggaaatggcgtggattctatagcatgactatcaaagactggaaaaacttgcagaacaagatggataattttgcaaatggatctcatccgaattatgagaaacagccggtcttctgtaacaagatataaaagggtgtgacgtacaagtaagactctgcactataaaagatattattttcattcagtgataccttactttatgtgctactgatgtgactttactgcacgcaaaagtaccggaggagaaaccatataaagatccaaattggcttacgagaactttatgaataaacacact

SEQ ID NO: 39555 - DNA, 300 bp, Gossypium hirsutum
  Clone ID: LIB3146-060-Q1-K1-G10
cccacgcgtccggaaagttatagttactaacaaattgtctagtgaaagtaaatataggatgccactttccattaataaaacatcatccatctttgaggattccttaaaaaaaaaaaaaaaaaaaaaaaaaaaaaaaaaaaaaaaaaaaaaaaaaaaaaaaaaaaaaaaaaaaaaaaaaaaaaaaaaaaaaaaaaaaaaaaaataaaaaaaaaaaaaaaaagaagaaataaaaaataaaaaaaaggatttaaacccaaaaaaaaaaaaaatcttcgccctttataataccccggcttgcct

SEQ ID NO: 39556 - DNA, 399 bp, Gossypium hirsutum
  Clone ID: LIB3146-060-Q1-K1-G11
gcaaaggaagctgttggggaatatggcggttttgcagcactggtggaggcgattgaagatggctccgtgaaggggaaggagttcgcggtgttgacactgttgcagttgtgcgctgataacattagaaaccgtggtttgcttgttagagaaggtgggatacctcctcttgtggcgctttctcagactgggagtgtaagggctaagcataaggtaattttagccgatttggattgccctatgtttgaattaagaacttgaaatagctgtctatagaagtaactttattttgattgattcccataggataaggttgaatgcttgataatcactagatagttgaagcttaaaactgtgtttctaataccaatgcaggttatagtttattgaattgcttgattg

SEQ ID NO: 39557 - DNA, 309 bp, Gossypium hirsutum
  Clone ID: LIB3146-060-Q1-K1-G2
gggcgacccacgcgtacggaaaataggtactctcgtttgaatcacagattccatttttgtatgatcaccattgccccctgtggggtggaactattgaaaaaaaatatcggtggagaacgatcatgtgtggttgtacccaagattttcacatagttcacatatctcgctaggggtaaaaatcgaatcctctataccactgagaaatatgggatgcacgatgctgatgatatctacttccaaagatggactgtcaatattgtgggccctaacaaatattggccacggaggatacatatatcacgggaaact

SEQ ID NO: 39558 - DNA, 389 bp, Gossypium hirsutum
  Clone ID: LIB3146-060-Q1-K1-G3
catgtatcatctgattccgcgagccccataaaacccatagagcacaacaaaacaatcgagtctgctcctttgttcctttatcaaagacccaggacattttcaaaacacatgatggctatcttcctcctcagattcgcaacgagggcatctggagtttgcagttactcttttatacttcagattagccagggatgggatatagttccaggaaatcctccatatgaggattaaaatcttttgtggtagttgtaaattccataggttcttgtaaaattctttagtttcggtctgtactaaataactattaagctccaaactagcttcttgtaataagttgtatgcgctccgaactgaagactcacctgatttgtcacctttccacacctgca

SEQ ID NO: 39559 - DNA, 407 bp, Gossypium hirsutum
  Clone ID: LIB3146-060-Q1-K1-G4
gtctgattccattatcacaaagaatatccttttctcgtgttcttaaagttcattgaagtgttttatttttaaattctaagatagcagctttatgaaatgtataaaatgtcgcatagttgcatcatggatgaaatattagagaaagaaagctacattttttcaaagatcaaattattaaagctggtctactatcctcaatacaccctgttgtggagtcaaatgtggaattggaggaattagaggtgcatactaacattcaattattgaaagaaaaattgctcctttgagtggactcattttacacctcttcttttcatttacgtcacatttaatctcttattttatttccctctcttagcagctcctagcttaaccggcagtctctaggaagctattgtcgtcagatc

SEQ ID NO: 39560 - DNA, 426 bp, Gossypium hirsutum
  Clone ID: LIB3146-060-Q1-K1-H10
gccctttcacatacccgtgcctttgacaagctagcgtcgctcacattcgaaaacagataagtttctgccccaactatttcaccttccgaatctctggcaataactactgtaacagcgagttgtaaatcatgctgaaaagccgcatcaaaattaagctttaaaactccaacatcggggggtttctagaccactctatccatagatctaagagaaggactagaaatctcttgattcaggctcaaatcacgactataaccttgaataaaccctaacaattccatcaaggatggtttaaccccttcatgaacaagtttatttcttctaaaccagagactccatatagagattaccagttattgcttctgctgatcactcgcaatagaaaattcttgaataaaacgatgcttataatttgacaactcactg

SEQ ID NO: 39561 - DNA, 326 bp, Gossypium hirsutum
  Clone ID: LIB3146-060-Q1-K1-H12
ggaaaacttacaatatccatcatcattagtttaagggtaactagattgctgtaggttctttggagtttaaacccaatacccactttgtactgcatattcgcccgagccttggcatttccaaactaacaaatccttcgaattacacccatgaagaggaatagaaaagataccagttgctgtggataaaattctatttaaatggcatattgatacccatttagtcttgaaatgggtagaatctaacgataagaatatataaatggtaccttttatatagcactgggagaggggattaatgcattttcagacattgggggaggcttttt

SEQ ID NO: 39562 - DNA, 334 bp, Gossypium hirsutum
  Clone ID: LIB3146-060-Q1-K1-H2
cccacgcgtccgggaagacgcagctagttacgcaagctccgaacttttcgaattggataatctttcagctataggtattgaaaggtatcggcaagagttgcctgtgtatgagactacccacctcgatactaatcgagccattgcaaatggtttgattgtgtgattacccctaaatgcatgcatacagcaacaaaactattagtactagttaactagctagttttattaattaaattagttaaatggtttggggggtttacatctagaagtaatacaaatttctgttttggtagagccgtactgaagttaatttaccctcttttttgttggtttt

SEQ ID NO: 39563 - DNA, 295 bp, Gossypium hirsutum
  Clone ID: LIB3146-060-Q1-K1-H4
gaggcactcaaagatagcaccaggattagataccttgacggccacttaaagtgccttctaaaagcaattcaggagggtgttaacatgaagggtcactacatgtgggcgtttttggatgacttcgaatggacttctggatatactcttaggttcgggttcacatacactgattacaagaacaacttgagaagataccttaaatattcagcttattggttcaagaagtttttccttaattaacaacaacaatgtcacaatggattgcaacacaacagaataatagtattacttcatt

SEQ ID NO: 39564 - DNA, 406 bp, Gossypium hirsutum
  Clone ID: LIB3146-060-Q1-K1-H8
cccacgcgtccggctggataaacggaggagttctgacaggaatcaatcagtttctcccgagattataagttgcaagcttggcagcacttgcacaggttgttctacatcagatctagatgaaatgaatagatttgctgaagtcaatacatcatcgaattccagtggtatcagctcctgctcacatgaggatattgggaatgaatctacagcaggtagtagtgaagggagcaatgtaggtgatgataacccatcgtcttctcagagtgattcaagtgacgatctaaaatcttctgtggaggatgaccatgctgatcagaacaaagtgttccaagatggattgctgaaagatttagaggttttggattgaagttccataaatttcgttaatgaaaattatgttttttct

SEQ ID NO: 39565 - DNA, 408 bp, Gossypium hirsutum
  Clone ID: LIB3146-061-Q1-K1-A10
gtaatgcacaaaatattaaggataacaaaggaagtgaggaaagaactacaatcaatcatgtggaagtatgttgggattgttcgatcaacttcaagactacaagaagccgagcaaaaaatcggtaagttggaagccaaatgggaaacatacttatttgagcacgggtggcagcaaacaatggttgccctcgaggcttgtgaaatgagaaacctcttttgttgcgcaaagctagtggtgagcagtgccctcgctaggaacgagagtcgtggacttcactacatgaccgattttcctcatttggaggaaagcaagaggctacctacagtgatattcccgagttcccatacaaccggcacatggagttcacgacaactacaccagcagcctatagttaagtccatggtctga

SEQ ID NO: 39566 - DNA, 298 bp, Gossypium hirsutum
  Clone ID: LIB3146-061-Q1-K1-A4
aaaaaaaaaaaaaaaaaagcaaacaattttttttattaaaaaaaaaagggcgattgcttttgactctttgtctgttatgcttgtgaaattttcatctgggcgtttttaatttgcttgattttaccaagtttatgtaatgatgattttgattatgatttgggtatatctaatttcatagcatttattacttggagtagtgtttaatacaaaaaattcttttttgatgaactttatattcgatatgacctcatgcttgactacattgaagaactaggacctcagttgatccatgtcggtc

SEQ ID NO: 39567 - DNA, 385 bp, Gossypium hirsutum
  unsure (1)..(385): unsure at all n locations
  Clone ID: LIB3146-061-Q1-K1-A8
taccggtatattaccgggtccgacccacgcccgtccgcaataatacgaaggatggcggaaggcggatccaatggtcatggttcggttaggccaatcctattagttggaagggataaggaaacttttttcaaaanngtgtaatttaaaatttgcttagaaattgancctcttccactccannatttataatttctaagaaggtatgtatttatttaatttggtaaaatctttatttctaggagattatantttggtatgtattccatgagctaattacaaggtaattacaatttcaaataagtatgtatatttaatttgttaaatctgtttttaacttattttttaatggatcattaatgaatcatgtttttaatctagatcgcga

SEQ ID NO: 39568 - DNA, 405 bp, Gossypium hirsutum
  Clone ID: LIB3146-061-Q1-K1-B2
gaaaaggctcatttttgtgtaactccagccatcgaagacgaccgatggccatggcgcgcttccaacggctctatggccagaccttagggcgtgtttcagagaaaaaatgggaaagaatttttttaaaaaaacacagtagaaatgtttttttttttgaaaattttaacttatatagggccttggtacaacgtcattttggcttgactttagaaaccccaaaacgacgtcgttttgaagctgaaccctattacttgactcgaatcgcacaagatccgcgtgtttttatatgggggatttatttatttacttagtccttcccatttttaaattacttttcaatccaaatcttgctttttttttcttttttaaatttataccatgggatttttgattttttttggtttg

SEQ ID NO: 39569 - DNA, 403 bp, Gossypium hirsutum
  Clone ID: LIB3146-061-Q1-K1-B3
cccacgcgtccgcccacgcgtccgcccacgcgtccgggtgacgaatataaggagattggctgagatggtagagaactgcgatgatgagtttctgaaattggacttggaatatgaacaggttttctctctctctctcttcatgcatgtagtttccgacacatgctcttgttgcagtacacgactagacatacattgatgtttgtggtttgatgcagacagtagtgcttcgaacaaagacagcaaaagcaactactccggacattcttgcaacccactgtataccatcagcaatgtcagctgatctcaaagcattgagaccatggacttaattaattgattttttgtaccttttatatatagcttttcctgtttctttttttttttttggggcatgattatattt

SEQ ID NO: 39570 - DNA, 372 bp, Gossypium hirsutum
  unsure (1)..(372): unsure at all n locations
  Clone ID: LIB3146-061-Q1-K1-B9
cttccgaaaccactaactttttcttctacgttctcgagaacatccgggaactttttgagacctagggtttcatttcccgtcattaaggcaagtcttgatgttggaagcgacgcgattaggcctggaggtacggtcgagactgataagttaccctctgacgtcagaaaacgagcaatggaggccgttgactcgtttggcgggagggttactgttggagatgtttcgagtaaaagctgggcttaacttgaatcaagctaaaaaggctcttcaagcacttgcttccgatactaacggtttcttggaggtactttgaatttttataacttccataaatntgatctgtgttagggttctcgttgagtggaattacta

SEQ ID NO: 39571 - DNA, 400 bp, Gossypium hirsutum
  Clone ID: LIB3146-061-Q1-K1-C12
cccacgcgtccgcccacgcgtccgcccactcgtccgacggaaggtactatttgattcagtcagtgaatgcatggacttgagatgcagacggtatgttggtggaggatacaaaacgtggacgaaagggatgacaatcctgagacgaaatgagtggctagctgaagaagtgtacaaggagatatgtgggtggagaggcatgggagattgcatggtggatgagcttgtggacaaagacatgagaagccaacatggaaagtggctggatttcgaagtagatgcgttcgcactaggagcagacatcgagggtcaaatactgaatgtcttggttgatgagatgattagtgagttcttgccattttaaaagctttgtcagtaatgtacggtggttgagtttatgcac

SEQ ID NO: 39572 - DNA, 361 bp, Gossypium hirsutum
  Clone ID: LIB3146-061-Q1-K1-C2
ggtaaattcctttttatttattttaatagtttttgcatgaaataaataaataaataaataaaggtatatcacctttaagaaactgcttggacttctttctttcttctgtatatgcgtgtgtatattattgtctttgtaaaaatccggctcctttacattgttttgatttgggccttttatagccactggaaatttgaaagtaaatgttacaaaatctgattttattccttgccatattagttcctattctgtgcccttttccttccttttgcatgtttacggtgtgaatcacagcgatgatgagggaactgatagcggctcgatacgaggtctgtggatgcttacggcgctgaaaggtgca

SEQ ID NO: 39573 - DNA, 236 bp, Gossypium hirsutum
  Clone ID: LIB3146-061-Q1-K1-C3
gcagttggtagctagaattatacatctatgtaatggaagagttaagaccaatgctatgtagggtttttgtttcgcttcaagtattgagtaggatgaatgaatgcgttttaacttttgacaagttttgctttgatttagagtggaaagtttctagcacttcattatataaaatatattaatatataatttaaaataataaatttaattatttattacactatctataattttataaa

SEQ ID NO: 39574 - DNA, 214 bp, Gossypium hirsutum
  Clone ID: LIB3146-061-Q1-K1-D4
ccacccgtccgcaaagggaggtaatgccttaacccctaagagctctttatccgtatcccttttataacgtcgccgggaccccagcatggtgccacccggtaccgccttggtccgcgaccttcaccataaactcgaacccggggccctatttttcatacttgacccctttcatagacaactatgttggggtccaaatgaatccgcctgccaaaac

SEQ ID NO: 39575 - DNA, 248 bp, Gossypium hirsutum
  unsure (1)..(248): unsure at all n locations
  Clone ID: LIB3146-061-Q1-K1-E1
taattggggcgacgacacgactcgtccggtttgtncaaacaattgttttgatgatagtatttgtacatctgtatatgtatccattggtagcatagcaataaactgggattaaaaaaaaattgtaagacaaccactattgttctatattttttgccttgcctggtgaatatgtggaaatacaggaaattaaccaggttcacttgttctgttcctatttatggcagagcttcaaaaataataatgcaatt

SEQ ID NO: 39576 - DNA, 230 bp, Gossypium hirsutum
  Clone ID: LIB3146-061-Q1-K1-E11
cggacgcgtgggtgaatggattcatatttttatttgtcgagttaacaaaaaatcaactgggggagcggtgattcatgctggtttacaatctcataaacctaactcatgaacccggagtttgtcatgctttcatcgcccgtagcatcataatgaactcgggtgtttttgtttactgaacacaatgctccattatttgacatatatgggggaaatttgatgaattctttatt

SEQ ID NO: 39577 - DNA, 407 bp, Gossypium hirsutum
  Clone ID: LIB3146-061-Q1-K1-E5
cccacgcgtccgaaagaagttgaacaggatgaaatcattgaagggtaagaaacgtcaacggtttaaagaaaggtttataagtgggaaccataagtacaatgaagctgctaggagtataattaagcctaagattggttatggtttagctagtgagctaaggagagctggggtttatgttaaaaccgtggaggataagccccaagcagcggattgggcattgaaaagacaaatgcaacattcaatgagtagagggattgattggttgtttttagtttctgatgataaggattttgtggagatgttgaggagagcaagggaagcagatttagggactgtggttgtaggtgattgggataggggtttaggtagacatgctgatctatgggtgtcttgggttgaggtagaaa

SEQ ID NO: 39578 - DNA, 231 bp, Gossypium hirsutum
  Clone ID: LIB3146-061-Q1-K1-E6
gatcatagcttccgttctagttctactcaccgagatacacagttgtcaagctgttcggttttcaggggcaattcgagcaccaaatcacgtctcatgagactgccaaaaccgacccctcttcccctttctcatgtgtattaaaagttagacctgaaaatgttatttccatgtatgtttatatatatacataggaatggagttgttaactgggtgtgtaattgcagaagaact

SEQ ID NO: 39579 - DNA, 313 bp, Gossypium hirsutum
  unsure (1)..(313): unsure at all n locations
  Clone ID: LIB3146-061-Q1-K1-E7
cccactcgttcgtccacgcgttcggccacgcgttcgtccacgcgtccgatctctttttatggtggggatggcaatgcaaatttgagttttttacataatgttttgttaacgtactctttctataactttgatcttggttactgtcaggtgattactccagatattctttacttctcttttttttggttgtcattaataagttgattgcattcacaatatgctacggtttttatgttggntattttatttgatttaatgaaaaatctttgtgttattaaatgcaacaagaatagggggttaaaatgggatattt

SEQ ID NO: 39580 - DNA, 138 bp, Gossypium hirsutum
  Clone ID: LIB3146-061-Q1-K1-F1
tcggccaagccttccgccaacccttccggttggattgtttttccggagggaaccattcttttttggccttgacacccatgatcatttggttaaaatggccaaggccctaggtcctggtgagtttaaatgccttatctc

SEQ ID NO: 39581 - DNA, 337 bp, Gossypium hirsutum
  Clone ID: LIB3146-061-Q1-K1-F12
ctcaaactttctaacgaggctacttttttattcgatgctaaactgggacaacgacgggagtgcatgtactgccacttcaagatttaccggatgtatgcttaatcaaaaaccctagactgcatgcatgcctgcatgactgcatgtatatatatgatgtgtatgattgcatgcaataaaccctttaagtctgtctccttagtctggcaacctgccctgaaaactaatataaaatgcttgttctttatatcaaactgtttcatctattacataaaaattacacataacacttaaatgttccataccttggtcctatatctatttccataaaatgctaaat

SEQ ID NO: 39582 - DNA, 281 bp, Gossypium hirsutum
  unsure (1)..(281): unsure at all n locations
  Clone ID: LIB3146-061-Q1-K1-F2
cccacgcgtccgcccacgcgtccgcaaaaacccagtgattctcggaatagatgatcaatggtttcagccctcccctcacaccgaggacaatttgtattgattgctagattcctactcagcatattagtttttgtaggcagatagttccatgaaagtttccagattgtaaactttatttttgctggtagatttagtagccagatttttttttgtaaaaattgctataaatggtcagtaaagcataagctctagtaattctatcaaaaacttattttnnnnaa

SEQ ID NO: 39583 - DNA, 393 bp, Gossypium hirsutum
  Clone ID: LIB3146-061-Q1-K1-F6
cccacgcgtccggttctcggtactcggggtccacgaaggatgcattgtatgatgcactctatccgtgcttcggctcttgacgccagtggtgttgtccctggccagcccgagcttctccgtcatccattagaggactcattcagaagcatttccttctctaaatctcttgaccactctgttgagttcagcagctctcggttttccgaaattggcacatcttatgatgatgaggacgggaaaatgaaacccttgatcctcaaaaacaagcccccaagatggcacgagcagttacagtgttggtgcttgaatttccgaggtcgagtaacagttgcttcggttaagaacttccaattgattgctgccacacaagcagctgctggtgcacccacccca

SEQ ID NO: 39584 - DNA, 250 bp, Gossypium hirsutum
  Clone ID: LIB3146-061-Q1-K1-G10
atgtaatctacaactcacctatctctctgaggatgaaatcatatcaatcattaatcacgccgctgctaaacgattcactttgttcgacacggttgatgtttactgcgcgcataccaatgaactttcggttggctaggccttgaaacaattaccaagagaaataattcatctatccaccaagttcagcattgcaaggatggcacctactggtatgatcgtgaaaggtagaactgagtatgtccagtcgtgc

SEQ ID NO: 39585 - DNA, 178 bp, Gossypium hirsutum
  Clone ID: LIB3146-061-Q1-K1-G12
aaattatctaaataactgaatccactttttttatgactgcctgctccacattatacgggggggtactttaccataaatgagcatcaacacctcagagctatcaaactcacctcgaaggatacccattggagactctggccctgtaccagcccacaccacgaacaatgcttacaagatc

SEQ ID NO: 39586 - DNA, 405 bp, Gossypium hirsutum
  Clone ID: LIB3146-061-Q1-K1-G2
ttcccgttccgccccacccttccgaaaaaaaaaaaaaaaaaaaaaaaaaaaaaatttttttaaaaaacaataaaaaaaataaaaaaggggggaatttttaaaagcattatttttatctactctttagtggacctacatgtccaattcttttgccgtggcgtgccccctttaaagggggcgccccctctaggggtcccaatttttcttccccttgcttacaactacttttttttttttttggccccccaactttaattccccttcccgttttttacaaccgccggtttgggaaaacccttggctttcccaactttattttcttgtacaaatatcccctttttgcaggtgggcttaatagcaaaaatggcccccccgtttcccccttcccaaacgtttccccccctt

SEQ ID NO: 39587 - DNA, 258 bp, Gossypium hirsutum
  unsure (1)..(258): unsure at all n locations
  Clone ID: LIB3146-061-Q1-K1-G4
ttggttatggaaggagtcctaaattcttaatcagctggaattctagtttacatggcattagtagatctcattgctgcagattttttaagtaagaggatgagctgcaattttagccttcaagtagtatcttacttcatgctncttctaggagctggtttaatggcttcccttgccatctgggcctaaaaaactcactanctgtgggtttgctagttctttaatttgggcatttatttttgggaattcaatcacaaacca

SEQ ID NO: 39588 - DNA, 234 bp, Gossypium hirsutum
  Clone ID: LIB3146-061-Q1-K1-G6
cgttgcttgcttgccatggatgcatcacatttttatcttctatcgcgtttagaataaattgcagtgatgttatgtttcacaatgttgttatgagtaaataatccgttgtattattgtctgttttcggcctaatgacaaattaagttcttttaaaaaaatctacattgcttttatatcacactgatgtatactacatagaattataaaatctacactgcctctgtattcttctaa

SEQ ID NO: 39589 - DNA, 369 bp, Gossypium hirsutum
  Clone ID: LIB3146-061-Q1-K1-G7
cccacgcgtccgcctcagtctaggttcttcttccatcgtccttctagagcagatcgatggtgattcgacactactgttatcaggtgcgagtcctctcccttttctaaggcgtcttgtgcaagtttatgggtataaacatttcctgatatatcaataaactgaaaatcaatttcttgaaagcgagattttttatttgaatatctctaataattgccccaataattgatttatctggttttgttgtttggcatttcttgatgactgttcgtgaattccccatgattgtcactgagagtatacccattgagattcctagcttaatggcctgtaatcctgcatatgcttctgctgcaaacggggatgaaacgt

SEQ ID NO: 39590 - DNA, 311 bp, Gossypium hirsutum
  Clone ID: LIB3146-061-Q1-K1-H10
caagtgtcgatttttaatacggggtattgagtctgggaaagaagcataatgtgattttatggtttgggagcatttttgcttttcttttatgggtaaatgcctgaggttttagggttgtcatttgtagcagttttggtgtcaaatgcgttttcggtttcagtttgcagaaaatattttgctcgattgtgattattacagagttgtggaccgaaattttgaatggttaaaaaaaaatctaaaaagaagaactttataataaaataaatggctgagtcttttataacaaaaagtttttttcacgagagtgtggt

SEQ ID NO: 39591 - DNA, 232 bp, Gossypium hirsutum
  Clone ID: LIB3146-061-Q1-K1-H11
cccacgcctacaccgatttcaccgcatcgatcacccttttttttttttttttgccgagcgggctgtttaccatctgtcactgtctccaaccccctactgcattgtcatttaatgttgttcatgcattgcatctacggatccacttggcctgtataggtcaagatattctaaatattgcgctcataatcacggtccttcaaattgttctcctaccaaatcataaggttggaac

SEQ ID NO: 39592 - DNA, 272 bp, Gossypium hirsutum
  Clone ID: LIB3146-061-Q1-K1-H5
ggccgagcaagatcgctttcctttttctaactcattaaccaagtacaatcacagttagatagaattacatgtttgtgtattcattcctaagaggctaaatctattttttttaaaaactgttaagaaattctagaattacatgccttaattacaaacagtgttaaaaatctcaggaagttagcttgaatgagttatttgcagcttgcatttgtgcccagcagatcctttctcaatgaattatcaacctctgttgaaaccgtatcagagttttt

SEQ ID NO: 39593 - DNA, 384 bp, Gossypium hirsutum
  Clone ID: LIB3146-061-Q1-K1-H6
ccggatcgacccgtgcgtggacgcctgggggaaagatggaatttagatctctcaaaggaaacatgtcgctgatctttggaaagtgtttaacatgtttagttgcaaggttgttggtactccaatgaatgtgaatgcttgaagatggtactgacaaggctgatggtagatattttcgaagcttagttggagggttgatctacttgactcagacacgtccaaatatagttttctcagttggaggcatttcaagattcatgcacagcccccacgagcgtcagcttggagcagctaagagaatctcgcgttatattgctgaaactacaacttttgggctgtgcagctatttcttggagctataaaaaacgaccaactgttgcaatgtca

SEQ ID NO: 39594 - DNA, 108 bp, Gossypium hirsutum
  Clone ID: LIB3165-028-P1-K1-E3
tccgaactttgaatgcattttgtgccatttagggtttaactgagctttttgttctggctggattttaattttgaaggaaagttgtttaggttatttgtcttcctttcc

SEQ ID NO: 39595 - DNA, 170 bp, Gossypium hirsutum
  Clone ID: LIB3165-028-P1-K1-E5
tttttcccaaaaaaaccacaaattgttgcccgctgaatcttcggttaaggctgggggatcgacctccactaccttgccgattcaactttaaaaaatcctaaatttgtttgaattttctggcgatactatggatgaatctttcttcgatctaatggaattcttgaagaaac

SEQ ID NO: 39596 - DNA, 400 bp, Gossypium hirsutum
  Clone ID: LIB3165-028-P1-K1-E7
cgcgtccgcccacgcgtccggcaaaagcttattaatgatatgctcgcttctcagccaagcggcggtctctcccgcttattattatagaagctctccttccatttacaaacccaaaccatcgaatcgcttctcttggggttttctggctccaattcccagccctgctatccgagtgttttgttcgaagcccggtgaggtgggaggattaatggcttcttccgttcaaaatcagggttctatttcctacctaacccaacgagaggctgctgaggttgatgaaactctcatgggccctcttggttttagtgttgattcagctcatggaattggctggtttaagcgttgccacatcgattgctgaggattattaacccagtgaggataactgtattcttgcttt

SEQ ID NO: 39597 - DNA, 386 bp, Gossypium hirsutum
  Clone ID: LIB3165-028-P1-K1-F10
cacgaaggtagttttcgtaattaatcggagaatttcagtgaatatcgagctccgcagggataaactcatggcaactgcaactatggctaccgcagctggtgcagctgctcttctgtactatacattgaatcgtaaattgcagacagataggtctggtaacgatgacaatgaaaatggaagtgatttgtccaataatccttcttcagggcttgatcgcgtttcgcataggttagttcaagctcctgcaacgtgggtagagacgatttctactttgtctgaaactcttaggtttacatactctgagactctagggaagtggcccattggagatttggcatttgggatcaacttcttattgaagaggcagggacatttacatgttgcga

SEQ ID NO: 39598 - DNA, 361 bp, Gossypium hirsutum
  Clone ID: LIB3165-028-P1-K1-F3
gccgacacgatatccctctcggtgaaaaccctaaccaccaaaacgtcatcgtttcactcgtctattaccaccgtccctatcaaaccaaccattatctccgccgtggcgtcattttcgctggcgtcctcctcctcctctccgccaccatactcttcttctacccatccgatccgattctcaaactcgctcgaattcgactcaaccacgtcggagtcatctcgtcgcccaaactcaccatcgacctttcgttttcgttgactatctcggtccgtaacagggatttcttttcattggattatgaaaagcttgtcgtttcggttgggtatagggggaaggagcttggggtggtgaattcggaagg

SEQ ID NO: 39599 - DNA, 399 bp, Gossypium hirsutum
  Clone ID: LIB3165-028-P1-K1-G1
cgtccgaaggatgaaggttatgacggggcttctgcggacctctggtcgtgtggcgtgatgctctttgtgttgcttgcaggttacttgccttttgatgattccaatattatgaatctctataaaaagatttcagcagctgaattcacttgccccccttggctatcttttagtgcgatgaaattgataactcaaatcttggatccgaacccaattacccgcattaccattcccgaaattttgcaagacgaatggtttaagaaagattacaaacctcccatgtttgaggagaaagacgatacgaacttagatgacgtagaagctgtatttagggattctgaagagcaccatgttacggaaaagcgagaagagcaaccaacgcctatgaatgcattcgagtta

SEQ ID NO: 39600 - DNA, 392 bp, Gossypium hirsutum
  Clone ID: LIB3165-028-P1-K1-H12
cccacgcgtccgctcttctctcatttctcatcaatattcaagcttctgctttgggctcctttgccgtcaaaaaaaataaacaaaaatgtttggcaaagactttttcaccgaatatggcgaagcaagtcaatatgaaataaaggaagtagtaggcacaggaagttatggtgtggttgcctctgcaattgatactcacactggagagaaggtagctattaagaagatagccaatatctttgagcacacatctgaagccacacgtattcttagagagatcaaacttctacggctgctgcgtcaccctgacatagttcagataaaacacataatgcttcctccatgtcaaagagaattcaaagacatatttgttgtttttgagttgatggaatctg

SEQ ID NO: 39601 - DNA, 388 bp, Gossypium hirsutum
  Clone ID: LIB3165-028-P1-K1-H3
cgcgtccgcccacgcgtccgtttggtcgtctgtagtaagaacgcctaaagattgatgctttgaagcgtgagcttcccctttgcatgcaacttctcactaatgctgtggaggcttcgaggcagcaactacatgcatgccgagcaaatcaaggatcaaggcctgttcttgaagaattcatacccctaaaaaattcaagctcagagaattcagacaaatcgcaaaacatatctgataaagcaaactggatgacgagtgcacagctatggagccaagcgggaaacgaaacgaaaccaccacaatcctcagttgcgtcccctaaagaagctgatattggtttcaatgttagtcccaagttggggttagataccaagcagagaaatggaggagc

SEQ ID NO: 39602 - DNA, 367 bp, Gossypium hirsutum
  Clone ID: LIB3165-028-P1-K1-H7
ccacgcgtccggggatgctaaaaggtttaactttaagcattaaaatccacttcttttaggcgaagtgcagctttgtgtgtgtctatccaacgaaagcaagaagatgggtaaaggagggaaatctcacgaagaaaccaaaagtggagaagatgaaaacatggctgcttggcttgtgggtctcaacaccctcaagattcaaccattcaagctccctccactgggaccccatgatgccagagttaggatgaaggctgttggtatctgtggaagtgatgttcactacctaaagacaatgaggtgtgctgattttggggtgaaagaaccaatggtgattgggcttgagtgtgctggaatcataaaggaggtt

SEQ ID NO: 39603 - DNA, 396 bp, Gossypium hirsutum
  Clone ID: LIB3165-028-P1-K1-H8
ccacgcgtccgggaagagagacggttcaccaactgtacggcacaagagtagccatactggctggggacttcatgtttgctcagtcatcatggtaccttgcaaatcttgaaaaccttgaagtcattaagctcattagccaggttattaaggattttgcaagtggtgagattaagcaggcatcgagtttgtttgactgtgatgtcaaacttgaggactatttgctaaagagttattacaaaacagcttcattgattgcagctagtaccaagggagccgccattttcagtggagctgatcgtagtgtaacagagcaaatgtatgaatatggaaagaatcttggcctatcattccaagttgttgatgacatattggattttacacaatcagcagagcagc

SEQ ID NO: 39604 - DNA, 242 bp, Gossypium hirsutum
  unsure (1)..(242): unsure at all n locations
  Clone ID: LIB3165-030-P1-K1-A3
gttatctttaatttccctttatccttcatttatctccctagaacaatccattggggcaggttctgactttggcctctctccacctnacctctctaaatctctgcctcatcaccgatcatgcctattttaatctccctactcatgtctttagccatgactgaccattcacgttctacttatcgcttacgtcaagatgggttagggcgatcacactcttcaaaagaccctagattatgctttcg

SEQ ID NO: 39605 - DNA, 111 bp, Gossypium hirsutum
  Clone ID: LIB3165-030-P1-K1-B12
cccactcgtgctttccgaattatatccaatcgtcttagatatatcaccgggatgtggggcttatactgtgtgtagcaaaacttgcctcaacaaatagggccaccaaataaa

SEQ ID NO: 39606 - DNA, 358 bp, Gossypium hirsutum
  Clone ID: LIB3165-030-P1-K1-C5
cggaccgggcgggccgacgcgtccggccggccacccgttcaacaaatgtttactctatcgagacagtgtctaccccaggagagtgcgtttaggtaacgggtttccaacaaacggctccaaaaattcagactgccgagacaacctccctggagaaggcaagcgctgacactgccgatgatgtcaaatccaacatccatgacaagtgtggtatctcgactgaccaagaaggcgtgtaggaagtgactaacaaccggagggttgccgaacactgaatgactacaacatccagaatgagtataccctgcacctaggacgtgggctaaagggaggcatgcagatcttagcaacaacgctgact

SEQ ID NO: 39607 - DNA, 356 bp, Gossypium hirsutum
  Clone ID: LIB3165-030-P1-K1-D10
cccacgcatccgtccacgctttcgtcctctcgttctcccacacgtccgggcgtggttgctcatcattctcgggtaagacactcaagatctaccattacacccctcaaatccagcgaactggccgcgtttccatgatgaaaaccaccaagcctctttgttgttgtagcccatggcacggtcctaaccgcgttctgtacttgcaaccactttgcggtgagccaccatcttacttgaccggtgagttacctggtgactatagttagcacactgcttgactctgagctggtcccaagacctttgctaggaaccgtgagctctaaatcatgcactgcatatgggccatgttgggagctttt

SEQ ID NO: 39608 - DNA, 323 bp, Gossypium hirsutum
  Clone ID: LIB3165-030-P1-K1-D6
cccactcatccgcaaaaccaatctctattttttcttgactgtataaaccccaagaagattgggttatgtaggtaacttccaacacaacactcttataatacatattacctagcttgtttccatagagaaaccacccaaaaaaggaactcttttttgaagaacgacagccctgaccgtgtgatatcttcttccgcacacccaagtttgacatcaattcactcgaaccgtatgattcatgtacactgtgggacaaacacatctagttcctctaaatagctcctacgagcgaagttgaaaccgggtgctattcactttttaagcaa

SEQ ID NO: 39609 - DNA, 339 bp, Gossypium hirsutum
  Clone ID: LIB3165-030-P1-K1-D8
ctctactaagtaatcttttttatatattctacactaaacacattaaacggggggtttttattcttaggtgtaatagcaacaaaaaacccatacaattttgattccatttctattacctgatctaaataatgcaaaagttaaccttgaaccgtaactaccatacaaattctttcctactgatggaacttacaataacacatatcattccaagtttgatcttttagattacatcaatgacaaccaaaacataaaaaattactctattaggaacatattctagatcgagaacaaggatgtaccagtgttgtcgaaaaaatttcttaccatttatatcaattc

SEQ ID NO: 39610 - DNA, 187 bp, Gossypium hirsutum
  unsure (1)..(187): unsure at all n locations
  Clone ID: LIB3165-030-P1-K1-E3
atactatataactcaaacataaattttctttctgcaaaacaaacaaacnactggacgttatcttatcaacatggatcgccaccataaaccattcctactcgtcacatgccttcatctaacaaccacttaccaccctcaaatctgactatcaacaacaattcactaataaacccaacaacaaacatca

SEQ ID NO: 39611 - DNA, 247 bp, Gossypium hirsutum
  unsure (1)..(247): unsure at all n locations
  Clone ID: LIB3165-030-P1-K1-E5
gaaaggaacggccggggcgacgccacgcgtccacgctttccatcaaataacacacttttgtttctaactaaagacgncattataggacggcgaaaagaaaagacatggctgctaaaactgctgcagactaagatccttctaccaagcccacctttgtacctggtagaacctttctcgtctttcgtgaccggagcagctctaagaatgtccccgtttacatcagcgatctttacagtccagagcagag

SEQ ID NO: 39612 - DNA, 357 bp, Gossypium hirsutum
  Clone ID: LIB3165-030-P1-K1-E8
ccgggatccattgttcataggtactttgagttggagaagtcgcctgtattcagctggttgcttaatttcggagggtttaaggaacggttgcttgctgatgatttgtttttgactaaggttggcatcgagtgcggcgttgggattttcaccaagagcgcagcagagttggaaaagcgcagagaaaagttcaggaaagaactggattttgtttttgctgatgtggtgatggcactagttgcagatttcatgctagtgtggcttccggctccaacggtttcgctccgaccacctatagcactcagtgccggacctatttctaagttcttttacaactgtcccgacaatgctttccaggtg

SEQ ID NO: 39613 - DNA, 361 bp, Gossypium hirsutum
  Clone ID: LIB3165-030-P1-K1-F1
acaccacccaaaacagaaagaaatttattctcggagaaactcatcgttttaatgcagcagtccacgttccaccttggcccagctttgatgatgatcaaattgctgaggttcactctcctctcaactacaatgcaccctgcaaccacttcaacaacaacagtaacccgttttacttgcaggaagcgttaggaatgctacgacgttacttgccatcaaacgaactggatatcgagtcagactctgagctttcgttccacccggattctccggttgatgcttgctcttgtgatcatttccggatgtttgagttcaaagtacggagatgtggacgtggccgtgcgcatgactggactgactgtcc

SEQ ID NO: 39614 - DNA, 329 bp, Gossypium hirsutum
  Clone ID: LIB3165-030-P1-K1-F11
cccacgcgtccgctcactagttgtttgatatgcgctgacgcaaccaacgaaggtgagctgcaacatctatgaccaatgtgccactcatgtcctgacagagcgtgtgtaaagccttccgtttgtatccacgccaaggctaggtttacccggtctatgcaaactgaccacaatgactggggtctagagtgggtggatgctaccaagctcgctaagataactcttgctacataagatgatcgtagctagaacagaagcgctggaggagcatcaaagcggataaccgacgcgttaatccaaagcatgacatacctggcagtgaaaggaacagg

SEQ ID NO: 39615 - DNA, 347 bp, Gossypium hirsutum
  Clone ID: LIB3165-030-P1-K1-F8
cccacacatactatccacattttctgttagagacaaaaaaaaactaccgaggaggttttttaacaaaatggctttcctacacaaaccatggctagctgagaacctatttaagacatctatcaagcttattcgccatgtcatgactttcacacaacatgccgtcatagctattttcaaaaaaatataaccttacgcaacgaaccaatgttcggtatgcattgcttaggcaattcactatccaacaaataacagttccataataatttaccaaccctcttctttttctttcgggcgagtgtaatctccattttcccttattattatttatttgttttcaactttttttt

SEQ ID NO: 39616 - DNA, 204 bp, Gossypium hirsutum
  Clone ID: LIB3165-030-P1-K1-G10
cataaacattaattccaaatttattttactaaaccgaacaaaatcaaatagaaagagttcttgtaatgagtgcactaaaccacccaaaattccatatttcgagcctgacaagttaactttacactctatttataacgatcagacacctatttttatgaccacataccttcacattgaatatcaataacttgactgaacaaaact

SEQ ID NO: 39617 - DNA, 319 bp, Gossypium hirsutum
  Clone ID: LIB3165-030-P1-K1-G11
cccactcgtccgttcacacttaattttattcagcggatatcaatcacctgaagagattactcatactcacatcagcacaccatgcaacagtcctcatcctcatccaacccatatactgtaaaaacctatatattatagacgtacacctataatctagcacatctatagatgaacttatttgtatctcatgagatatatatagcactagcattgcattcatggcatataagaactagctgttttaatccattgacaacaagtttccttttctattgatataaaacgtgatacgacgatacatgttatatactccaagctt

SEQ ID NO: 39618 - DNA, 331 bp, Gossypium hirsutum
  Clone ID: LIB3165-030-P1-K1-G2
tccacacatacgttatttatagctttatttatgaacaaagtggagatcttatgggacggaatttgaggatgcaaattcacttaaaacacaaaaggaaaacatcattcaattaatacacaaaggggggattcactttgatagggcccaatatagatttttttgtatcattacaggataatatttcatttggtacgctataaagttatgatcatcgaaatatggacatacacggggccctatacttaaatatttgttagtcaaattatgcctttacaaatttttatcgaccaggagcagtttcttttgataatcgattagatgatcaatgttt

SEQ ID NO: 39619 - DNA, 359 bp, Gossypium hirsutum
  Clone ID: LIB3165-030-P1-K1-H2
caaagaaaggccttaccacaagctttttttagacaaaggcggctgccactgcgagctgggatttgcctaagctttctacgttaacttactccttgaaatcttccatacccatttacaaatccaggctttccttcttcacaacccctcaaaagcccaccccttaccgctccttggacgtttcctgctctctttctcatgcaagctgtaaccccagatccgtcgacacatacggtaccccaaaaaatgctacttcccatgatttcatttccaggtatgctgatgatgagccccggcaaggcgctgatattctggtggaagccctggatcgtgaaggggtcaaggatgtgtttgcctaccca

SEQ ID NO: 39620 - DNA, 267 bp, Gossypium hirsutum
  Clone ID: LIB3165-030-P1-K1-H3
catagacaggccttaccacaagctttttatatacaagggcaggcgccactgcgagactggggttttgcccagcgtttttccttaacttacacctttaaaacttccatacccatatacaaaaaggggctttttttcttcacaaacccgtaaaaagccacccctgacccctccatggacaattcctgctctttttttcaagcgggctgttagcccagatcctccgccacatccggggcccccaaaaatggtccttcccaagatttcatt

SEQ ID NO: 39621 - DNA, 364 bp, Gossypium hirsutum
  Clone ID: LIB3165-031-P1-K1-A12
cctgaagtaaaccctattggtgcacgagctgtgaggctttaccttcgtgaagttggtgatttgcagtcaaaggcaagacggattagttatgagaagaagaagcgtaagcgaccaccaactcaacagatcccgactctaccaatgccgccgccaccaccaccaggtgcaagtttaactataaaaagaagcgtaagcgaccaccagcttaacagatcccgactctaccattgccgccaccaccaccaccaggtgcaagttaaactatatatatgcatcaccaaaacaaaacaaaacaaaaccccatatgcaagctagcatttcactctatttaatactacatatatgggataattttctgtacttt

SEQ ID NO: 39622 - DNA, 329 bp, Gossypium hirsutum
  Clone ID: LIB3165-031-P1-K1-A4
catttatactataattacagtctggactctcgacacacacaaaggagaagctccataggttctctgcaattaattcatggaggtcgtcaaggaatctgaaccaaacactaccaccatgagaaaagctctgctagtaataaactgcatcatcctttctataggtaactgtgcaggtccacttatgatgcgcctttacttcatccatggtgggaaacgagtctggttctcgagctggctcgagacgggtggttggcccatcatccttttcccaatcgcttgtgctcacttttaccgttccaggacccaacccagttcagaaaacaagcttt

SEQ ID NO: 39623 - DNA, 211 bp, Gossypium hirsutum
  Clone ID: LIB3165-031-P1-K1-C5
cgctccctggtaggcacatttaccaaacataaaaatggcagcagtgacacatggcatctatgaatgctacatagctactaatggcgcacaagcaaccaagctttcttttcagcaactccaaggctacattaaaccgcacctaacctacctttactcgtggcggcattgtgggtttttaactagtatgtgaccgctagtgacacaatgtgaa

SEQ ID NO: 39624 - DNA, 388 bp, Gossypium hirsutum
  Clone ID: LIB3165-031-P1-K1-C6
cccacgcgtccgatttttcgtccttttcaaccatggtggattctcaagaatacagtctgtctcttccttatctggtgcataaccatcctctttctccgagccatccttagcaactcacgagggaaaaaaccccatcttccacccaccccacgtgcccttccagttattggacacatgcacctccttggccccatacctcaccaagctcttaacaaactttcagaccgctttggacctttggtctacttctacatcggatcaaagccttgtctgcttgtgtcttcccaagaaaccgctaaagaagtatttaaaaaccatgaaactactttcttaaaccgcccaaaaatggccaatcttgattaccttacatatggtactgctgatatgg

SEQ ID NO: 39625 - DNA, 206 bp, Gossypium hirsutum
  Clone ID: LIB3165-031-P1-K1-C9
gttgtacctggcatattaatagagcagaatagcaatggcctcgcatgctatggaccatgcaccggaccgtctccgcacaggccaacggggccctaccggcctaaatctgcttgtttcagcaccaggaaggccaacacctacttttgagcaacgggagaggcaagcatgcaggggcgcttggaagaagaagtcggactttatcctgc

SEQ ID NO: 39626 - DNA, 378 bp, Gossypium hirsutum
  Clone ID: LIB3165-031-P1-K1-E9
ctgacggctgttttatatagacattttccaaatcttttccactagaaatggaagagcttgaaagccccttttaagggtattgcaaatgatgttaaaggaagagcaggttgctataaacaagattggattactggtcttcgttcaggactggggatattagccccaactacctatatcttctttgcttctgctctccccgttatcgcctttggcgagcaactgagccgagatacagatgggagcctaagcacggttgaaacgttggcatcgactgccctttgcggtattctacactcgatattcggtggccaaccacttttgattcttggagttgcagagccaactgttatcatgtatacatattttgataactttgca

SEQ ID NO: 39627 - DNA, 357 bp, Gossypium hirsutum
  Clone ID: LIB3165-031-P1-K1-F3
cccacgcgtccgcccacgcgtccgcccacgcgtccgggcttcttcatctcttgtgccggttttcttcatcacgattccattccttttttttccgtttctcctcctttctatcttctcttcttcctctccttattcctcttcttctaaccctagttgctgtcaccatgagtcgccaccatcaatggcctttccgacaaattcgaccatcaaaacacttctcttttcctcgtcttctcaaattttgccttgtattttcaagaaaatctctttaaagccaaaaaaaaatcaatgcttgatccttgagttttctaaactatactcttcgcttgttgatgaaaggcaaaggaggcttctaat

SEQ ID NO: 39628 - DNA, 264 bp, Gossypium hirsutum
  unsure (1)..(264): unsure at all n locations
  Clone ID: LIB3165-031-P1-K1-F4
ggaccggnaacggaccgggtcgggtccgacccacgcgtcgcgatgcaaattcagataacaatttacacagtctgtgcttcttcactcctatgtcttagccagggcatagacatcatctgcactcggttaaagggtcacactccctctataacatgtcagttatggggagaggagccatcctcttgcacggcgaagaactgactgagcgtgccaaatcatatgcatgcgagcttttcaagactggttaaggtaatggctgtcctg

SEQ ID NO: 39629 - DNA, 223 bp, Gossypium hirsutum
  unsure (1)..(223): unsure at all n locations
  Clone ID: LIB3165-031-P1-K1-H11
caccaaacacanaaatcgttcgtttatatataaaagatccccaataccacaaacatctttttccaccttacatttaaatcactatattctacattatagctaacttctttttcattctacattttcatttattggcttttctacttacatctttctcacttttttaaatctatttacaattttactgactctctctctccattatatattcacaaattttctc

SEQ ID NO: 39630 - DNA, 386 bp, Gossypium hirsutum
  Clone ID: LIB3165-032-P1-K1-A6
cccacgcgtccgtatctatttaccaacatataaaagaaagtggtattagtcctgatgtggttacttatagtacactcatgaaagcttttattcgagccaagaagtttgataaggttcctgaaatatacaaggaaatggaatcttatggatgcactcctgatagaaaagctaggcaaatgctgcaaactgccttgatggtacttgaacggagacattgagtcttagactgatgttgctaatacctggtgacctgatattatcttcactttgctgtggcttttgctaagctgactaaatttgtaaagtgcatagatttgcttttaagaattgaagaccttgttaatatttcttctactggcattattgcatggattggatttgcaaaa

SEQ ID NO: 39631 - DNA, 268 bp, Gossypium hirsutum
  Clone ID: LIB3165-032-P1-K1-A9
ccacctcggaggatcaatagagttaagggcaggccgaggggagagacggttaattattatgggcaaagaagagattagggacttctgactatcataacctacagcttcaacacacaccatcacacatagattgagcatcgagggtgtttcctaactccttggcttccacgtacctcagtcaatcgacttacgaaccgtcagccagtcacactttttgcccctatatatatacgggtattaccaaactctctgcgtgctacgttgatac

SEQ ID NO: 39632 - DNA, 388 bp, Gossypium hirsutum
  Clone ID: LIB3165-032-P1-K1-B2
ggagtcaccaacaacctggctactgtgagaaaattacttgatcattataggcacccagcattacttcttgttgatggagtttcctctatttgtgcccttgattttcgtatggatgagtggggagtagacgtcgcactaaccggttctcagaaggcactttctcttcccacaggactgggtattgtttgtgcaagccccaaagctttggaggcattcaaaagtgcaaaatcagttagagttttcttcgactggaatgactacctcaagttctacaaactgggaacattttggccatacaccccttcaatccagctattgtatgggctaaaagccgctcttgatcttatattcgaggaaagactcggcaatgtgattgcaaggcataccc

SEQ ID NO: 39633 - DNA, 374 bp, Gossypium hirsutum
  Clone ID: LIB3165-032-P1-K1-B3
gggttaggccttttggctttttcagagatagaaacgatccttcaacttttaggctcagctgctattgtgcagcttgtaagcaagaaattcctgtatgcagagaaccgaaagcaaacacttaaacaagttgatgaattcttaaacacgaaggtggctcctacggaacttgtcgatgatgtaaagcaaattggagcagcccttttaccaacaactaccactagcaaggctcttcctgcacctacggaggcaaaacctgaacccaaagtcgaagcagtggcagaagcccctcctcaaacaaattcagttcccgaaacagtacccaaggcagttggaatcactggattttcaagaccactttcaccctatgcttttta

SEQ ID NO: 39634 - DNA, 164 bp, Gossypium hirsutum
  Clone ID: LIB3165-032-P1-K1-B7
gaccggccggaacccggcgacccacgcgtcaagatctgtgatctgatcagatcgataaaaataaacatgtttgggagagcaccaaaagcatattcatactatagattgggagttcgaaccttcagatgatctaaagaaagctataaagcgtttaaatatccgat

SEQ ID NO: 39635 - DNA, 297 bp, Gossypium hirsutum
  Clone ID: LIB3165-032-P1-K1-C1
cccacgcgtccgcccacgcgtccgctcgtctcatgaactcaagaatctgatgctgtaaatcataacttttttctctataaaaaaatgctcataaatcaaatatttcatatttgacggttccgccattgtaaagttggatgcttattttaactctttgcaatgtataaatcaaatatgaattgctcatttaaaaaaaaaaaaaaaaaaaaaaaaaaaaaaaaaaaaaaaaaaaaaaaaaaaaaaaaaaaaaaaaaaaaaaaaaaaaaaaaaaataaaaaaaaaaaaaaaaaataaaaa

SEQ ID NO: 39636 - DNA, 392 bp, Gossypium hirsutum
  Clone ID: LIB3165-032-P1-K1-C4
aaaaaacctttaaagctttaaaacttttccatttctccttagataccagaacattgggccatttttaaaacaaaaccataaatcgccttttaaaatcctcccaggtggacctcgacggtgccaaaatatgcttccatctccgccatggcttcaaacggtccctagggatccgtctgcctttgggtcggaggagcatacaccgatcagatcgacgccaaatgatagatattgcggtggtgcgggtgtgttgacgtggaggcacgatggagcagcgcacgatgcggagaggcgcgagacgtgcggtgcttagaggctcggtgaaagggcctgctagggtttcaaaacctgctgaaactatttgaagtttatgggccaattgggccgtaagtttt

SEQ ID NO: 39637 - DNA, 435 bp, Gossypium hirsutum
  Clone ID: LIB3165-032-P1-K1-C6
gcgtcgcgcccacgcgtctcgtgagaatctaagatgatgtggttgtagagagggaacatcacgagtacgaggtgtgttcagtagctggggtgtggaaggcctaactcattgtgtatatttaatccactcaaagtactagctattgttagctgagtgaattggaaaggaagaaacaagtgacctggtttgttagtgaccaaagttgcaaggtgatttaatgggtgcaggtctggagattttcagcttttaccttacacaaggcttgctatggtattggaaaaggtggatgatctgaataagacttgtatttagcaaaacaagaagtgacgggacagtggacagaaatggaatgcaactcttatagattgtgtatggagtgaccttgctggtggaaccaactacatgtggatcaattgtcaacttcagctatggatt

SEQ ID NO: 39638 - DNA, 408 bp, Gossypium hirsutum
  Clone ID: LIB3165-032-P1-K1-E3
ggcggaccacacccgtccgcggacccgtgggtgcgatcaaggaatttttggcatcaaagataagaaaggccaagcgtgcactccatatggctggcaagggtcaatgtccggcagtagttgacgaattattgttcgccaatcactccattctgaacgaacgtgacaaaaaggggaatacggcattgcacatcgctacgaggaaatctcgcgcgcagattgtgagcttgctgctaacttatagatctaccgatgtcaacgccataaataatcaacacgaaaccgcgatggatttggctgataaactccagtacggtgaatccgcgttcgaaattaaagaagctctaacggaggccggtgctaaacatgctaggtccgttggtcaagtagatgaagcaatggaacttaaga

SEQ ID NO: 39639 - DNA, 177 bp, Gossypium hirsutum
  Clone ID: LIB3165-032-P1-K1-F1
ctcaaaaaataatttctccacgctttttttcttcaacttctactccctctatagtggggtctacctgtatactcgcgactcccattaattttactcccactgttttcatcttaaacatcacctttcccaccattgctgatgatatcttcctgctcttatacattttctaagtggtat

SEQ ID NO: 39640 - DNA, 247 bp, Gossypium hirsutum
  Clone ID: LIB3165-032-P1-K1-F4
gtttgaactcacttaaagggacagtattgtggcgctggctaggttaatggatgcgttgatttccatttgggcaggaatttcttcaaaaggcaaacggaaaggctcttttcaccaccattaagttgaagggagctcttcatgcaccatgtatggtcatgagcgacgtttgtacaatgccatgcacacgtgaatacgcgcattgcattcattcctggcttcgtactggtaagatgaggcctactacagt

SEQ ID NO: 39641 - DNA, 339 bp, Gossypium hirsutum
  Clone ID: LIB3165-032-P1-K1-F5
cttaaacctcttccaacagtcccctactatacatatggagacgttatgggacccgtcgacgtcacccagatgggtaccgaaaaagaatgtattactcggagccgccattgacaaaccagttatggaccacaaacccatggcacaaccgttccccagatgccccacttgtaaccgcgcatggcgaggcttacgtatctgttgcctttggtcggatggcaaaaccggttgtcggacttgctcggaagatgttcacgactacggccgcaactgctgctattaacgtaccgacacgcacattcccatgcaacagattgcgcactaatccaccaatcccaggtt

SEQ ID NO: 39642 - DNA, 376 bp, Gossypium hirsutum
  Clone ID: LIB3165-032-P1-K1-F7
ggaattccaaagctgaacatatgtgttaaaggcttcaattcaaagcaattgaggcggaattttcaggtttagattgaggaaaactaaaagaaccaaaaggaaattaacggatcagtagtaaatcgattgatctggctgcaaatttcaattctaaaactgaaaaattaggggttcttttttctcttcggatttctatgatttcgtttttgattccatgttataaaagaaaatgaacgatcaggctcagatgatgaatcagccaccggatatgttgatgcacacggttcaggcccatgtgccaggtcaacaacacatgattaatcaatttgatcagttgatgtcatctgatgcatactcttaggtgaataattaattg

SEQ ID NO: 39643 - DNA, 389 bp, Gossypium hirsutum
  Clone ID: LIB3165-032-P1-K1-G11
ctttctcggcccattttcctgttaccagtaaaactgaagctaaaagggttgattgattgattctcttaaacttcaattcaatccaccaacatatatagataaactccataattattccatcaaaaggatcgaacatcaagagcattaatatgttggataaaactgctactgtttctgcacttccattctcctctgatcttctcagtctcactcctcttgataatggcaaaagaaaaagaaagccacccggtaccccagatccagaagcagaagtggtttctttatctccgcaaacattgcttgaatcggacaggtatgtatgtgagatctgcaaccaagggtttcaacgagaccagaaccttcaaatgcataagagaaggcacaaagtg

SEQ ID NO: 39644 - DNA, 248 bp, Gossypium hirsutum
  Clone ID: LIB3165-032-P1-K1-G12
gtggatgctgacggcaacgttagattgttctgagacgtcatcggggccctgggggggagctatatcttctgtttaacagcctccccaccctgtaaacggctcatgctgcggtagggtccactggccggaagagcaccgcacgtgctgtggtgatcgatgcgccacccccagcccttgaaatttctgaggaccgagtgccttccgagcccgggcgtactcataaccgcatcacgtctacaaggtgaaca

SEQ ID NO: 39645 - DNA, 346 bp, Gossypium hirsutum
  Clone ID: LIB3165-032-P1-K1-G3
gtgaaacaaatcttagtagttcgaaacaccctatatagctctaactatcaaacggggactgctatcaaagatggaccctgtcttatgttccatgcactatctctcactttcaaccaatctgctgatatccacactatctacactccttttgtcccgcatcaatcctactgactgcatatgctttaattcatagcagttaatgcaccgaaaggaatccaagtcgatgctcgccaatatggtcataacttgactgatttgctccaaacttattgacactattgtttctcctgctgtggctgactttgtgacagcttcgattctatgtgactagacgagaatctactca

SEQ ID NO: 39646 - DNA, 246 bp, Gossypium hirsutum
  Clone ID: LIB3165-032-P1-K1-G4
ggaaaacccggtggaccacccgtccgctttaaataggtaggacggcaccatttttcctatatctccctttataaccaaccggggatttactaaatatggtgcctaccattactgctcaaggtaatacactcccatgcaaacaacctgcttctatccattcttaagcactcctttcgccttctatccatcctacttattgccctcaccacaattcttatcatatttgcaatcctacggcatcccaaa

SEQ ID NO: 39647 - DNA, 228 bp, Gossypium hirsutum
  Clone ID: LIB3165-032-P1-K1-H11
gttaaccaaacactccacaaaatttttgaaaaaaaaaaaaaatgaggaagtgtgaactatgtggaaggctctcagcactgaataatcaagcaaatttattgggactgtgatttcaaggtatggccaatttctgactagcataatcgaaccctctttgcatgtttgcaaacctactcttgctcgattggcgaatctggtcgggtttgttggattatgcgtgaaacgaca

SEQ ID NO: 39648 - DNA, 250 bp, Gossypium hirsutum
  Clone ID: LIB3165-032-P1-K1-H5
aaaaaaaaactaaaatgggtgggtttttttgttaataatgcttacccccaatcatcaaaacagaattttacatcaactgtaactaaggaatttcattttagtttcagccaccttttttctcaaatccccaaatatgaacaacattgatgtaattattgatatattacttacgctaccatttaaatatcttttatgattcaaatttttctgcataatgtgtaatactctcattttcaaccccattttcaag

SEQ ID NO: 39649 - DNA, 390 bp, Gossypium hirsutum
  Clone ID: LIB3165-032-P1-K1-H9
accaccaccatcatcaagctaacatgtctagcattagtcccagttcccggaatggtaatccgtcgaagcccgttagcgtccgccgggtttccaacaatatgcctggtttaggacatgaagaagaagatgtcatgttgttgcatgacaagtcttatagttgcagtaacgggggtgttctacaagggtcagctttggttcctagagggcattgcagtgatggaaatgacaaggattcgggacgtgaaaggcttaaaagacaccgagaagaggttgcaggacgagttttggtaccagataaatggggtaaagaagagttgcttaaagactggatggattattcatcgtttgattcattgttagctcccactggacttgcttcagctcgtaaag

SEQ ID NO: 39650 - DNA, 308 bp, Gossypium hirsutum
  Clone ID: LIB3165-033-P1-K1-A3
gatggtttctacatcgttcctgcatttattgacaagcttgttgttcacatcagcaggagctttatgaccctccctaacattaaggatccattaatactgggtatttagagaggcaaaggtcaaggaaaatctttccaccgtgagcttgtgttagccaagaaggggattaaccccatcatgatgagtgccagggaactggaaagtgcaaacgccggtgaaccagacaagttgttcaggacaaggctccttgaagacacccacatcctcaaaaatgacaaactgagcgccatgttcaataatgatcttga

SEQ ID NO: 39651 - DNA, 327 bp, Gossypium hirsutum
  Clone ID: LIB3165-033-P1-K1-A4
ggggcccacacccttccgcccacccttcgcgaggatgtggaatttttatggtttccttttttcttatcaccagggaaagaaataagggatgtggaagctggaaagaccgttggactcgctgcatacgaagctttcatctatgctagcacgacacggttctatgcgtaacgttttctacaatcaacgatcttgcaagtcatctcaaagccgctggtgtcttttttcctgccagcacctatggaatggcaggcaaccgcttggtgccaccacaggggattatttctggtgctgttgagataaagggagcgggtatcgtatcaatagtta

SEQ ID NO: 39652 - DNA, 264 bp, Gossypium hirsutum
  Clone ID: LIB3165-033-P1-K1-B12
ggaactgggacagacgcatgcaactatagtctgcggaagatagacacatcagtggcggggatccttggagttgcatattccaacagatcagtggccagtgactttattggatctaacatttacagattcttgtccacttatgctgggtcccgttatacaatattggatcatgcgtatgatgcacttgtggttgatgctggtcgcgcgtggatggaagcacccgatggtcactgagagcgtgtattatatactgatcgcataact

SEQ ID NO: 39653 - DNA, 323 bp, Gossypium hirsutum
  Clone ID: LIB3165-033-P1-K1-B7
cccacgcgtccgatatgctacactactaccagtactgccatgtgctttcttttcttttgtttctcctccttttaagccttgattgaacattcaactactctacactttgaaacatgggggaagctccagaaatacaactgcaggtcccgtctgaggatgagaaattaaatgaagattcagttgagcagcaaacaaatggaaaccagtcaacaacaatcacgcaacaaagaacctacaaatggtggctactaatgacaatctatacattttttcttctttctggtcagtcagtggctacacttctgggaagattgtactatgac

SEQ ID NO: 39654 - DNA, 378 bp, Gossypium hirsutum
  Clone ID: LIB3165-033-P1-K1-D10
ctttagctctccttctctctctctttttgttctctcgcttaagcctgtggaagatggtggcgttagaaaggagcctagaagcagccatgaatgcgaggataatagggagtgggagtgagacgatggtgctagcacatgggtttggaggagaccaatctgtgtgggacaaagtcctcccttgcttgacaaagcattaccaggttgtcctttttgactggactttttcaggggctgtaaaagatcccaacctcttcgatcctttgaaatactcttcttatgatgcctttgctgatgacttgattgctcttttggatgagcttcacttggaatcctccctcgtctttgtcggtcactccatgtctggtatgatcggatgca

SEQ ID NO: 39655 - DNA, 386 bp, Gossypium hirsutum
  Clone ID: LIB3165-033-P1-K1-D5
ttttccttccccatttctggctgctaaaaaaccctcaagaaaagtttagatatgggaggaaatggaaagcacagatggatattttcattttaccaacgttctaattcatcatcttctccaaagcaatccaaaaacctacctccacatgaattcctttgtccaatttctgggtctttgatgttcgaccctgttgtaatcccttcaggtcaatccttcgatcgaatctccatccaagtctgccgtgaccttggctttacccctactcttcaggacggctctacccctgacttttccaccatcatccctaacctcgccatcaaaaccaccatcctcgcttggtgtcgtgaccaccatgctcaggaccctgccccacctgattattcctt

SEQ ID NO: 39656 - DNA, 253 bp, Gossypium hirsutum
  Clone ID: LIB3165-033-P1-K1-G5
gaaaaatgaatgattgtgtagctgttctctttgtaaatgatatctttatgactggtcataccggagatgcatcatacgacggtgattcaaaacaattcaatccatcatctgcaggttgacctatacggaacgaactagactgcttcgttggacctgctataagatctaacagggacttctgctgccattgatggtggtttaaaagtgtctttcaagatggtcgtcattgtagcacgtgatgataactgtgtcg

SEQ ID NO: 39657 - DNA, 291 bp, Gossypium hirsutum
  Clone ID: LIB3165-033-P1-K1-H12
ataaaacgcacgctaaattctattttgtttcaactaaggccagatcttactccaggctattttcagagcgatttgcagtgaagaatgactggaacaccgcctgtggcacgacagttcaatggtaagctcaaggttctgaaccagcacctgaatcgccagcacgagcttctgcacaagcttgacgcgaaacttggcacggaaccaagcctatctccatggctagttcaactggttgcatagcaacttacactgtggacataactgcagacattgcagatgaaaatacagatg

SEQ ID NO: 39658 - DNA, 389 bp, Gossypium hirsutum
  Clone ID: LIB3165-033-P1-K1-H2
gcacatgcttgatcatggttacctacagtaaaggcatcaacacctgatcgaagagagctcgaggcaatctataatgtcgaagcaatgatgcccaatccacaagatccagagcggttcattgtctgtctggcgactgtagttaatcggccgccttgagagagattagaactccttcgaatcagagacacagcagagaggataaggaggggtataatataccggcgagcagaatcaccacggtgtggagtacaatatgtaagttgtaattatctatcaatacatttggcacaatattctaccttattaatttaaattccattcaatattctttggggccgcataataaaagatggtgtgtggagcccttcttttttgttgtaaaatcacta

SEQ ID NO: 39659 - DNA, 161 bp, Gossypium hirsutum
  Clone ID: LIB3165-034-P1-K1-C6
accacacctccatttctatgtgaactaaacttgcacatggcttactccattctaatagacaggagaagcctaaaccgaaacacataacaaaacgagcttaagaagggaatcaatggaaaatttctgtacaaaaacgctaaggatgacgtcaactaaaatga

SEQ ID NO: 39660 - DNA, 224 bp, Gossypium hirsutum
  Clone ID: LIB3165-034-P1-K1-D10
gctcatccattcaaaggcctatgtttttgctcaactcggaaagcacactgtcgggggatagtcagatgatgccaagcaaggaatgtaggctaagggatatgtctattatcatgcacgtatcttcaacacgtcaatgaattatctccactgaaaatttaattgaaagagcagaacactgatctttcattaagaaggattcaagcaccgaaaatacgtggcgccta

SEQ ID NO: 39661 - DNA, 272 bp, Gossypium hirsutum
  Clone ID: LIB3165-034-P1-K1-D3
accacgcatccgtacggagctatgtgttcatattcagatactccttcttttcattcttcttcttgatgacactgtgtctatgcagcgacaaggaggatactgactcgaaattatgcaccaccaaagggggattatagagggtgtgcacttgatcgtgccaaaggaaacaaaccaaactggattgttgtatggaacgatggcgcctgagagtttcatgaatgggagcgtgctggaagacggtatgtaacgggaagggttggggctactatttg

SEQ ID NO: 39662 - DNA, 350 bp, Gossypium hirsutum
  unsure (1)..(350): unsure at all n locations
  Clone ID: LIB3165-034-P1-K1-H6
cacgcgtaccgctcgttttgtataacgtgtagcatnatagtacctagtaacgcagacaataggcagtgtgcctgcctccatggatcgtcatcggcaacccaatttgcgcaccgtgaacctgcgtccgtcctccggcaccaggcgccacccatggtggcgccgccttcacacggcactcaagatctggcctctgtctttcccacgtcacttatggaaggcccaacaaccgacccatcacttctctttgcaaggcgaatgtgtgggagggagtgcnnaatgcattgcacggtgtggccctcnnctcttgggaaagaaaagaagttcgagacanctctcatacctcgcccgat

SEQ ID NO: 39663 - DNA, 318 bp, Gossypium hirsutum
  Clone ID: LIB3165-034-P1-K2-C6
accaaacctccatttccatgtgaacgaaagttgctcatggcttactccattctaataaacagcaggaatggctataccgacagcacagaacagaacgagcttatgtagggaatcaatggaaattctcagtgcagaatccctaaggatgacgtcaactataatgagcacgcgaacatagccaagccgcacagcccatgatgcatctttccatgcaaaagctctgcaaaggcttgacaatgttaaaaccagggtacagctcagacctaccttgagcactcgatcgcagcgccattgctggagctatcttctcaaccttaa

SEQ ID NO: 39664 - DNA, 275 bp, Gossypium hirsutum
  Clone ID: LIB3165-034-P1-K2-D10
cctcatccactcaaattccatctctcgtcacttatctcagaaagcacactatccaagtatagtcggaggctgccaagcaggggatggtgactatctcatacctccactatcatacacccatccacaacacttcaataaattatcaccacttaaaatctaattgaatgaccagctcacaattcttttattaagaaggatttctgcaccgtaaattacttctgcctaccctagtactccaatctaccctactcgaccatgcgaaagcttactatttt

SEQ ID NO: 39665 - DNA, 133 bp, Gossypium hirsutum
  Clone ID: LIB3165-034-P1-K2-D2
tctttcccttttcccactgcttttcctctcctaacaaacagggctcttcgcatgaattcaccccctctctttctcaacccatgcctatcccctaacttactggcactcctttaccctacatctcagctcaact

SEQ ID NO: 39666 - DNA, 237 bp, Gossypium hirsutum
  Clone ID: LIB3165-034-P1-K2-D3
accacgcatccgtacggagcttgtgtccatattcagatactccttcgtcacattcttcttcttgaggacactgtgtctatgcagagacacgaaggatactagactcaaattatccaccaccaaagggggattatgagagggtgcgcacaaggtcgttccaaaggcaacaaaccaaactgtattcttccatggtacgatggctcctgagaggttcatacaaaagatcgtgcatgatta

SEQ ID NO: 39667 - DNA, 183 bp, Gossypium hirsutum
  Clone ID: LIB3165-034-P1-K2-H10
gccactcgtccaattcgattacacacaatcttctttccatcctatcattcaacgatacagacttggacagctcggatgccgcgtgctgaatcctgcctactggcactacacacattatcataaccagcctgcctggccattctaagatcgcatatctatctgcagaccttgtgctaaaatata

SEQ ID NO: 39668 - DNA, 303 bp, Gossypium hirsutum
  Clone ID: LIB3165-034-P1-K3-C6
accaaacctccatttctatgtcaacgaaacttgcacatgtcttactccattctaataaacagcggagggcctaaacccaaacacataacagagcgagcttaagtagggaatcaatgtcaaatctcagtgcagaatccctaagcatgaccgcaactattatgagcacgcaaacatagccaaccgcactagcatgatgcattctctccatgcaaaacctctgcacacgcttgacaatgttaaaaccaaggtacagctcaaacctacctagatcactcgatgtcaggtgcattgctggagctatct

SEQ ID NO: 39669 - DNA, 169 bp, Gossypium hirsutum
  Clone ID: LIB3165-034-P1-K3-D3
accacgcgtccgtacggtgcttgtgtccatattcacattcttcttcttttcattcttcttcttgatgacagtgtgtttatgcagtgtcacggaggatactggctccaaattatgcaccaccaaagtgggattatggagggagtgcacttgatcgttccaaaggaaacaa

SEQ ID NO: 39670 - DNA, 379 bp, Gossypium hirsutum
  Clone ID: LIB3165-034-P1-K3-H10
gccactcgtccgagttgtttacacacaaggtgccgtccatcgcatcagtcaacgatgcagacttgtacagctcggatgccgcctcctgatgccggcctactggcactactcacgttatgataaccggcctgcctggccattcgaagagcgcagagcactctgcagaccgagtgctgaactagatcgcactgtacgaggaacggccatgtcacccgcacagcgagtcacatgtggacaatgaagcggactctggctggaccgaaacttcatcgagaggaccgtaaaaatgcacgcctagcttgataatcactggctgcatacaacaaaattgagagctcgcgcgttcgctttgcataagctgaactcattgaacacagta

SEQ ID NO: 39671 - DNA, 279 bp, Gossypium hirsutum
  unsure (1)..(279): unsure at all n locations
  Clone ID: LIB3165-034-P1-K4-A2
ccggtnaagaannnncgcggcgacccattaatccgatcgaccgcttataataaactttattcacccacacagcccctttaccaaaccggcgacttttactcaaccggacggtcacttataataaatcntctcgtcaggtaatccagaggtaactctttttctttatccctcacttttataccaacaaataccttttctatcaaccattttatatcccatccacaatgcctccagaacaagattgctggtttcttaacccatttcattaaacttatccaa

SEQ ID NO: 39672 - DNA, 369 bp, Gossypium hirsutum
  unsure (1)..(369): unsure at all n locations
  Clone ID: LIB3165-034-P1-K4-C6
accaaacgtccgtttctatgtgaacgaaagttgcacatggcttactccatcctaataaacagcacaaagcctaaaccgacagcacataacagagcgagcttaggaagggaatcagtggaaaagctcagtgcaaaaacgctaaggatgacgtcaactaatngtgagctacgcgaacaaagggcaagccgcaaagccgaagagctatcttttcatgcaaacggtctgcaaaggcttgaaactgttaaaaccaaggaacagctcaaacgtaccttatacaatcgctcgtagcgtcatggctggagctatcttctcaaccttaaaaaaatgtgacgaccgcttacctgcacaacacattgctgctattaatca

SEQ ID NO: 39673 - DNA, 349 bp, Gossypium hirsutum
  Clone ID: LIB3165-034-P1-K5-C6
acacacctccatttctatgtcaactttacttgcacatgccttactccatcctaagagacagcacaagcctagtaccgagagagataacaaaacgagcttaagaagggaatcaatgtaaaatctcagtaccaaatccctaagcatgacctcaactttaatgagcacgccaacatagccaaccgcactgccctagtgccttcttttcatgctaaacctctgcaaacgcctgaaactgttaaaaccaaggtacagctcaaacctaccttattcactcgctcgtagcgccatttccggagctatcttctcaaccctaagttaatctgacgaccgcttagctgcccaacacatt

SEQ ID NO: 39674 - DNA, 378 bp, Gossypium hirsutum
  Clone ID: LIB3165-034-P1-K5-H10
gccactcgtccgatttgattacacacaatcttccgtccatggcatcattcaacgatgcagacttttacagcgcggatgccacattctgaagtctgcctaatggaactactcacgttatgataaaaagcctgcctggccattctaagatcgcatatctatctgcagaccttgttttgaaatatattgcattgtatgatgaacgagctggttaaccacatagcgctttacatgtggactaagaatctgactctggctggactgaaacttcaagagaggactttaataatgcacgcgtagctgctaatactgactgtatacaacactaattgagagctcgttcgtgtgcttgatataagctgaactcattgaacacagaaa

SEQ ID NO: 39675 - DNA, 583 bp, Gossypium hirsutum
  unsure (1)..(583): unsure at all n locations
  Clone ID: LIB3165-034-P1-K6-A11
ggaatnncccgggtgcgaccccacgccgnntccgtttanngctatagcataccccactacttagtatctccactannctagcaatgnnngcttcctgcaatganntctcattggcgtagccatgtgcgcaccctcgcctctnnccggcacccaggctaaccccatggtcnnngctccttttcaacgcggccctncnnaagtcnntgcctnctngnnctttcctnncagtcacccangnngaaggcnncaacccaacgacccattatccttctcnnntcgcaagggcaatgnnngcggcanngagtgcannnatgctatgccagngnntgtggccccctcctaccctcggaaacgannagaagnnttcgaggacctnnctctcnnatacctccnnnccgatcttaccacnnccgtgcccagttggcttaagcggaagggtggattactcnnttcttcgctttcaaannatgggttcccttcggcttggganaattcgannattagaagggagggggattccgtggccaccccgtaanatacccctcgagcnctacnctcacgtaccctacganntggacgctac

SEQ ID NO: 39676 - DNA, 248 bp, Gossypium hirsutum
  Clone ID: LIB3165-034-P1-K6-C6
accgcacgtacatttctatgtgaactatagttgcacatggcttactccattctaataaacggcggaagtctagtccgaagcacataacaaaacgagcttctgaagggcatcaatgtgaaatttctgtgcaagaacgctgaggatgagctcaacttaaatgagtacgcgaacaaagtcagccccactaccgaagtggcatctattcatgctaaagctctgcataggcttgaaaatgttaaaaccaaggt

SEQ ID NO: 39677 - DNA, 277 bp, Gossypium hirsutum
  Clone ID: LIB3165-034-P1-K6-H10
gccacgcgaccgaggcgattacacacaaggtgccgaccatcgtatcagttaacggtgcagactttaacagcgcggatgctacattctgaagtcggcctaatggaactacacacgtgatgataaacagcctgcctgttcattttaagagtgcagggctatctgcagactgtgggttgaaatatattgcattgtatgaggaatgagcttgtcaatcacatagcgcgttacatggggactatgaagctgactctggtttgactgtaattgcaagagagga

SEQ ID NO: 39678 - DNA, 372 bp, Gossypium hirsutum
  Clone ID: LIB3165-036-P1-K1-A10
ccaatctctaccatggcagctcattatatcaatctccgggttatttgcctttatgttagtctatcattcatctttacaaagcaggtacaagccgacaactatatcattcacatggaccactctgccatgcccaaagctttcgccggccgccaaagctggtacttggctacactttcatctttatctgctaacttgagagctaacaccaattcaaccatccccaccgctgaacttctctatagttacaaccatgttattcaaggtttcagtgcgagtctcactctggctcagcttgaggccttgaaaaactctcgggggtatgtttcttctattagagacaaaactgtgaagctcgatactacttattctttc

SEQ ID NO: 39679 - DNA, 380 bp, Gossypium hirsutum
  Clone ID: LIB3165-036-P1-K1-A8
cccacgcttccggatttctcacctttcttctgaaactggggattataatccttgcgagctgtccacttggctcgagagcatgctctattaacttaaccctccctccacttttgatccttttggcgctgctaggacggctgcagcggcagttggatgattcgttccttgtccccgctgagtcctcaactttgacgacgttggatttcgacaacatcaatcggaaacatcagaaatctggtccacaaatctttgaggaagctttctgctccgattacgatcctaaagccactcctggtaaggctatttattctcaaaaaacccaacccccaacccacgattccttattttcttccacacccaccaacgtttaatcttaaaaa

SEQ ID NO: 39680 - DNA, 323 bp, Gossypium hirsutum
  unsure (1)..(323): unsure at all n locations
  Clone ID: LIB3165-036-P1-K1-A9
ctgattgttggtggcaaacccaagtattagatggtacttgagggaacatggatggccatcatctaccatatttgagacncctcctgagagtgatgaggaacgagctaagttaattgacactcttcaggattggaagactcaaaggtacaaagaaataatcaaatctggaactgtggaacctagacctggagttttaagattgatggatgaggccaaggcagctgggaaaatgctagctgtttgctctgcagcaactaaaagttcagttgtactctgtcttgagaaccttattggaatggagcgatttaaggggcttgattgct

SEQ ID NO: 39681 - DNA, 394 bp, Gossypium hirsutum
  Clone ID: LIB3165-036-P1-K1-B3
cggaccactcctaaaatcaggtcaattatttattgatcaagctgattctataggggtaagatcggctaagccttattttgcgactcctggagcaactgtccatgggcattatggagaaaccctttacgaaggagataccttaggtacatctatatatgcaaaatcgagatctggtgatataacgcagggtcttacaaaagtggaacaagtgttagaagagcgttcgattgattcaatatcggtgaacctagaaaagagaattgagggttggaacgaatgtataacaagaattcttggaataccttggggattcgcgatgggagctgagctaactatagtgcaaagtcttctctctttggttaataagatccaaaaggtttatcgatctcagggg

SEQ ID NO: 39682 - DNA, 250 bp, Gossypium hirsutum
  Clone ID: LIB3165-036-P1-K1-C2
gcgaccacgcgtccgagcacaccccagatgttgccttcaattttccattgctttggttcctttattaacgaagattggtttattgtgccaaaagatgaatatatatatctagtaatctactactctgagaattgctggaacgagcagcttgcttcggactttccttcaaactttttatcgttcttcatgcttgaaccttttttttctaagaaggcaggaatttcatgcaaatgggaggattaattttggc

SEQ ID NO: 39683 - DNA, 199 bp, Gossypium hirsutum
  unsure (1)..(199): unsure at all n locations
  Clone ID: LIB3165-036-P1-K1-C4
gcgacccacacanccgcaaaaggtgcgccctcttcattaactatctcgatgctggtgtttttcttatgnggggaactacccaatggggccgtttcaaccatattgtgaaccctaccancacgaacacatcccatgaccccaccaacgttcagctccccggtatttacaacaccaaacagatccatattttccccattat

SEQ ID NO: 39684 - DNA, 403 bp, Gossypium hirsutum
  Clone ID: LIB3165-036-P1-K1-C6
gggcgaccacgcgtccgcccacgcgtccgcaaaaacatgtcttgaacgacaaaacctgtttctcttacactggtcctactgcttctgagttgctatcctctccatttcttcggtggagtctggccgaccgcctttcgcctgcgacccgagaaacgggttgacgaggagtttacggttttgccggacgaatttacctatccacgtgagggttagggacttgttagggaggttgacgctgccggagaagataaggttattggttaacaatgcgatagatgtgcccaggcttgggattcgagggtacgagtggtggtccgaggcgcttcatggggtgtccaatgtgggtcccgggactaagttcggtggttcgttccccggtgccaccaagcttcctcaagttatc

SEQ ID NO: 39685 - DNA, 136 bp, Gossypium hirsutum
  unsure (1)..(136): unsure at all n locations
  Clone ID: LIB3165-036-P1-K1-C8
tactcacttaacattcccatntcttttctccanctcccgagggaaatatgccggtcagaatcataacatttatccccccccaanaagctactcacccctattctcttaaagctgctttggctgagttcatttcaac

SEQ ID NO: 39686 - DNA, 237 bp, Gossypium hirsutum
  Clone ID: LIB3165-036-P1-K1-D1
tattggttcaaccatcccttcttaattcccaacacccagttccaacttaaggaccgggttcaacttccccttaatcggctttggtttcttttgcgctgtgaccgctctggtttttgggtttacttacaagaactggaagggggtggctatttgttggggagagaggggggttggattctcaattatttaggattggatttggggggggggattttattatggaggttttggtttttt

SEQ ID NO: 39687 - DNA, 373 bp, Gossypium hirsutum
  unsure (1)..(373): unsure at all n locations
  Clone ID: LIB3165-036-P1-K1-E10
nnnnaatttngnnaaagcaacgntttcccggactnccggaancttcactcgatgtatctaagttacaagataatagggatgtaggacacgctattctagagagctattcaaggattctagagagcttggccttcaatgtcatgtcaagaatcgaggatgtccttcatgctgattcccttgctcaaacatcatcaccacaaaaatccgagacatcccctagctcatctgatgaagatgcattgagggtgagcagttcagacacaccaacactatcagattttatgggttggggtattgcttcaaggagaagaagctcaactgatctagaaatctactttaagggtgacaatgacaaaaaactggccaagccacc

SEQ ID NO: 39688 - DNA, 378 bp, Gossypium hirsutum
  Clone ID: LIB3165-036-P1-K1-E11
cccacgcttccggccaccggttttttcacccgttccggcggcacttccaactcgaactcacttccgaacccaagactgcaacccacatcgagggggccgaaaatgaacgccaacactaactcttccactcctactccaactcaaacccgaaatcaaccagctaccgcagcacccactcctttcaacacgaaagacaacagggaagaccacacatacgaccaggccaacgaggcagccaagaaaccgctcaaggaacaaggcaatgagaaaggagcatcgacgagtgcagcagcgccagaggcagagcaagtgacaactgatgcgaaaaccgatgcgtctgccgaccagtcggaacaccgcttgatacacggcaagact

SEQ ID NO: 39689 - DNA, 291 bp, Gossypium hirsutum
  Clone ID: LIB3165-036-P1-K1-E6
cctacatttgaagacagagaggttttatgacaaccgcgagcggaagggtccggtccggataacacactcacagcttttgtcaacacaaccggtatcttacatgggtggagaaccgacgacattcacgaccctggacgtggggcatccgagagccggaagtgttatccccaaccttatctttaacaggaaacaaagggaattgttgattcaccaccacgggatgtacaccttccagaagttttatggtgttaggaacccaaccctagtggtcggaaaggccacgcccctaaa

SEQ ID NO: 39690 - DNA, 383 bp, Gossypium hirsutum
  Clone ID: LIB3165-036-P1-K1-E8
gagaaaattctctaacacgcaaattttccaaagtacaggggtgttatttgcgggggtaatatccacaaaggaagtcatattccaaaatggcataagaatgatacctacatttctgctgcaacttctggtgccagcttttgtggttcaaaaacggaaattggtatatatgggatagcacatcacaatgcaacggcaaatctatctgaaaagcgtatcgcaaggaaccccgtgaatgcaggaccaaacaggaacaatgccaagctcactcatgctgcaaccacctctgctcctgaagtgtcggaaaaagttgaagccgacagatttagaccaattgcacaaagaacttaacaaagcatcgccactctaaatcatggatcaagatc

SEQ ID NO: 39691 - DNA, 376 bp, Gossypium hirsutum
  Clone ID: LIB3165-036-P1-K1-F11
ctggtgcacagctgactgtggttggattacagggcacaggtatgttacttatggacccatgcttaatggagctacagttcttctgtatgagggggccccaagttaccctgatcctggacgatgttgggacattgttgacaaatacaaggtgaccattttctacactgcccctaccttggtgcgctctctcatgcgtgatggtgatgagtatgttacacgctactcaaggaagtcccttcgtgtccttggaagtgttggcgagcctattaatccaagtgcttggaggtggttttttaatgtagttggagggtcaaggtgcccaatttctgacacttggtggcaaacagaaacaggtggctttatgattactcctcta

SEQ ID NO: 39692 - DNA, 384 bp, Gossypium hirsutum
  Clone ID: LIB3165-036-P1-K1-F8
ataacttgttgcttacagcaaaccttatgtctgtaaagcgttgcagattttggggtggcgagggaagaatccgtgacagagatgatgactgctgagaccgggacttatcgttggatggcccctgagttgtatagcacagtgacattgcgtcgaggggaaaaaaagcattacaataacaaggttgatgtttacagctttggaattgtcttatgggaattattgaccaatcgcatgccatttgagggcatgtcgaatttgcaagcagcttatgctgctgcttttaagcaagaacgaccgagccttccgaaggatatatcccctgatctagctttcatcatacaatcgtgttgggttgaggaccctaacatgaggccaagctttagt

SEQ ID NO: 39693 - DNA, 371 bp, Gossypium hirsutum
  unsure (1)..(371): unsure at all n locations
  Clone ID: LIB3165-036-P1-K1-H9
anataccagaaaancaaaaagaagaagaaaagaganccggaggangncncnnacggncccaacnaancncncaaaancaannnngaagccaaagcnggagacccaagnganccccaaggcnncanccagancannganngnangccccnccagcaanccccccnccnccgacaaancggcnncaacaccccaggccnncncagcggcncncgcncnnncnnccaacccccnnncggcnccacccccngcngnngcggacanngcggggcncaccccnngcaaagagnccaagcaanncgccaagcgcgagaagcagcagancaagaagcnggaanccccgnngaagcccaacgccccccgaagcgcaccgg

SEQ ID NO: 39694 - DNA, 241 bp, Gossypium hirsutum
  unsure (1)..(241): unsure at all n locations
  Clone ID: LIB3165-037-P1-K1-A12
atatgtnntgcagannagttttcaaagtagccctgggcctgggtattccggcccacccaatacatgnnattggatcnncggaaaccaacannaagacttgcgaaggagtggtnntctttgatccgannattgttagaaaagagaaaccggtgnnncaatcccaaggctcagnnggatgtcaacttacaaacatcgcccacgttttgggaccttgtcctctatgcttaccctagcttgtgag

SEQ ID NO: 39695 - DNA, 422 bp, Gossypium hirsutum
  unsure (1)..(422): unsure at all n locations
  Clone ID: LIB3165-037-P1-K1-A6
gccgacccacgcgtgccgcccacgccgtccgcccacgccgtccgttttatttgcttcctatntttcatggggctgcctgcagctcggggtgtcaatcctnnacttcaatcccttctctttctacccannatctccacctacannagagcttcnnactccggtacccgctgcggcgccaacgcgacccaaccgcggaccnnntctcgttaaagggccgtatncttaagggcaccgannagccatctcaggccatctcaatctctcaaaccgccgcccagcggaacctcttcatncgacggggcgacggtcaaccccaaactcccttcccttctcccggcctcaatcaaatccgacnnctcctcgccgccctgcgcgaacctcctacnggcaaggatcaattggcgccctcgccgtccacgtac

SEQ ID NO: 39696 - DNA, 492 bp, Gossypium hirsutum
  unsure (1)..(492): unsure at all n locations
  Clone ID: LIB3165-037-P1-K1-B9
ccgtccgnngaggaatgcgatccaccttattatcttttggctannaggataaattanngagaagtcaantggggtggcggnnataatgaatcgnnggtgatagcccattgagaggtgannagttcgaaccccagctttctggcatggtttnncttcagaaaggctcagcgatnngaagtagttggctgatatttcgaagctannggattgggctgcatggaccctnntccttccagnntagagaatgggggagggtccatgccaaatacctanncattacgaggannatggtcaaaagggtatgagcccccacatttcgattatttttcaatgacannaggctaatcaaagagccctgggcggtcanccgtataagccattggtaccctgatgtatttgtctggattgttgagaagtgggtggggaaaacttgtgtttcccaaatgcaagagggaaaacctttctcagccaaaaggatgatagctggtcaga

SEQ ID NO: 39697 - DNA, 254 bp, Gossypium hirsutum
  Clone ID: LIB3165-037-P1-K1-C10
gttttaaagacacaaaatcccagatgggtttcggctgcaaagcactgtagtcggttgttttcacagatgtgggagcccaaccacaagaagcaagtgcaacgcagcagcaatattataacaaagagagtgggttaacaaacccaacgcaaaccagacaaacagaaccttaaggactcttggaaacctgacggccgaacgccaaacaaagatggagatagtcttccaacatattggatgagacagaaaataatgat

SEQ ID NO: 39698 - DNA, 403 bp, Gossypium hirsutum
  Clone ID: LIB3165-037-P1-K1-C11
cccacgcgtccgaatttgcttttattcttgcgacggcaacaccttcgaatgtcggtggattcgcgacggggcatataaatattccagatatggtgaagacggggataccgcttaagactgctggcattgtgattttatccttgttaatgcctacgcttggtgtttatgtttttggactaaacggaggagttcaatagctgcaaggggaagtatgatatatatatacatgtatgtatatagtgtcgtttgatagcaaaaaatggtaaaatttatcgagacaagatgtacagccatacaggtctatcacaagttgtgcaaaagcatgagaagaatgaagcttcatttattggttgcaacaaagtgatcagaagagttgtggggagaattcttgaatctactttat

SEQ ID NO: 39699 - DNA, 404 bp, Gossypium hirsutum
  unsure (1)..(404): unsure at all n locations
  Clone ID: LIB3165-037-P1-K1-D11
cgtcccgagcccccttaaagncctatctttttttttcttctanctactactaaacttagagggtggaaatggtcctccataccatcaaaccccatcactggaggtctcctcttctgccgctaatacaagaaagataacaccacccactccttcaacttctcgtttctctttgccctttacttttaagtctcagttcaacgccttggtagtcggtgggaggccattgcttggtgggtttaaccactcttctgttcctcgtgccgttgccactcccaattcagttctcagcgaacaagccttcgagggtctttcgcttcaccaagaagacgacgacgtttatgactccgaaggtgaggttgggagtgggttcgagtctgagtctaccctcgacgatgaactcgacc

SEQ ID NO: 39700 - DNA, 393 bp, Gossypium hirsutum
  Clone ID: LIB3165-037-P1-K1-D7
ttttcagacatgactcccttctcttttttaccttgtgccagcagtaccacgtcgcctgatgcattccttcttcgttatcctcatctacgtcttctgaaatgccgtcactacgaacctcaacttcccaagatagagaatcttatgttgaggcctttccaagttccaactaggccttatctccctatcttgagcttgagaaaccctaggcgcacgcacccttgtgctaatatatcttctttcgctgaggcggaaggtgggaaagagcaaaacgatgaagcaatccatcttggaactcggcaagaagatgctaaacccaatgaagagtacctgcctggaatggctcaagcctttaatatatcttccagaactgcttctgctattgctatattcata

SEQ ID NO: 39701 - DNA, 142 bp, Gossypium hirsutum
  Clone ID: LIB3165-037-P1-K1-F7
cgagacgctatgtcacatccaactttttttttcatgcagataagagcgcgagggcgatggttctatgcctgtgcgaagcactagcagatgcacccgtagctactgccgttgacactgaagctgctacggaagcaactggtgc

SEQ ID NO: 39702 - DNA, 330 bp, Gossypium hirsutum
  Clone ID: LIB3165-037-P1-K1-G12
cccacacttactctgaaacttattctctccttagaccaaatgaaacattagacagttttttacaacatactttactccatctaaacttacttccataatttaccaaacactctccttaaaccgtcttttaaccgtgtctatgcccaagaccatctcttgtcaatgtctcaaactcactgccttgctaaatatgtttcaactgcaccaccatcactaccactcctccacggatgcacccccaactgctatcaaccgttcttaccaaatgctaaaattgaactgcgccgactcgccactaccatttatacctgtctactataagcacccaac

SEQ ID NO: 39703 - DNA, 411 bp, Gossypium hirsutum
  unsure (1)..(411): unsure at all n locations
  Clone ID: LIB3165-037-P1-K1-H7
ggaannncccgcggtcgacgccacgccgnntccgcaggcttnnntctgaattaccttgtgtcatttattgnnttgtcaagcggctcgatgacttgcgatgtgggtcggcagatatgtagcaaannagttacgttgctttgcacttttctctgaagggggtggtgtgtctctcttttcttgaagaatggttacgacttttaccaaggacagagtgaaaagaaatgtaacctcgaatttgcannaagaagcttggcttctcttagcatgagtactctttgtcacatgactgccattttgggacgtgcgacatcnngagcacatgtctgtcaacagagggttgtcacaagaattctctgtaagccatcagtttgctgcgtttccttttacaagaagggaaccctagactacctt

SEQ ID NO: 39704 - DNA, 220 bp, Gossypium hirsutum
  Clone ID: LIB3165-038-Q1-K1-A9
aataaatcccatagaatgtgatactactctattgctttagaaaacacataacattctggcggggttactcttaactgattactgaatcttccacttatttgatcggatgcgtaagaaattatgtatggatgaactctgaacaactgattaatagctataccctattcggtatgtatagttgataagtgcgaccacagctgatgataatgatacatcctgc

SEQ ID NO: 39705 - DNA, 409 bp, Gossypium hirsutum
  Clone ID: LIB3165-038-Q1-K1-E10
cccacgcgtccgcccacgcgtccgcccacgcgtccgctttggttgcaggatcatatagatgagaaagatttgatggcgtcaacagctaggcttatggagaaaccaagccatgaacagcaacaacagcagcaagtcctcaagtgtcctcgttgtgattcttccaacaccaagttctgctactacaacaactacagcttgtcgcagccaagacacttttgcaaggcttgtaagcgttattggactcgaggtggaactttaaggaacgttccggtgggtggtggatgtaggaagaacaagcgtgtgaagaggccggcggcttcagctaccggtggtgcttctccaacatctggtgcaaatattgctaacactccatctcaacctcagatggatgtgtctttcaacctcaagt

SEQ ID NO: 39706 - DNA, 371 bp, Gossypium hirsutum
  Clone ID: LIB3165-038-Q1-K1-E12
cccacgcgtccgatttgaagaatcatttgttttactatggatcgtttctgataacgggggtgtgtaaatgtgtatggaagcattccaacaaccagtggcattatgactatggacttctcgtgagtgagatagctaataagtataccttagtgaaaaaccttgataaggctgttaatctcaaagatggtaccactcagcttcagcttgagactctcctacaaggtggactgtaatatggtggtgcatatttgaaatatcttcatcctcaagatgctgcatggaagcctacagagtttgacaatgaattctcttactctatcatgtttggacccgacaaatgcggggccacaaacaaagttcacttcatcctg

SEQ ID NO: 39707 - DNA, 389 bp, Gossypium hirsutum
  Clone ID: LIB3165-038-Q1-K1-E7
cataaccaagaactacgtgaccctttctaacattaaggaccctattatgtcggatatggggggacgcaaaagtcaaggaaaatctctcgaatgtgagcttgtattcgccaagatgggaatcaaaccgattatgacgagtgccggataattggcaagtgggaacgccataaaaccagccaagtagatcacgctactgtaccgtgcggacgctgacattatcaataaagggaaaatgcgaaacctctttatcacactatcttcacgctcgagccaatcgtgtggcacgaaccacgccatacacagctgaacaaccaaatggtgaacaccacactcataaacatggcttgttacctcaccaacgttaatataccatgtatgtacaacaagga

SEQ ID NO: 39708 - DNA, 284 bp, Gossypium hirsutum
  Clone ID: LIB3165-038-Q1-K1-G11
ggaagattggtaagacaggccggttcccacatgtggtcatgaggacaatcagcgggtacgttcaaatctcatgcctgagaaactctaatgcaagacagattcctgtccttgctgaaaggacctcagtttctgtctctaccggtgcaggttggtgaaaatacagtactgatttcatttattttacccctttggcttgatgtatatctacacattctttacttttgagcactaatttcagtttgggatggatgaggatatgaaatattatatctttgatcttttat

SEQ ID NO: 39709 - DNA, 397 bp, Gossypium hirsutum
  Clone ID: LIB3165-038-Q1-K1-G12
cccacgcgtccgctaatctttgatgatcatgtgttttttttaattccttttttttttcagggaatatctataacattcctctttttcatattaacttcatattgatatacatagaaaattgcactattaggaactgggatcagtttgaaaccaatcaaaagctatttggtgtaaaaagtactttcaatgaggagctttacacaacaaaacttgagagaggtcctcaaacgagagagttggagaaggaagcaatgagaatagcaagagagattgagggtgaggagacccgggacctacatttagcagaggagagaggcttaaatcttcatgataattttgatattgacgaggagatgagatattcctcggtttataagggtagagggcttgatgatag

SEQ ID NO: 39710 - DNA, 382 bp, Gossypium hirsutum
  Clone ID: LIB3165-038-Q1-K1-G3
gctgccagtattgtatcactgttgtagtgacatgttacgaatatggctaaagatcgtgtgtacagatggatacactgaggatcatgtgtggccttatctcctccatgagacaggagatgtgattacacgatctgatgttggacgcatctaccaagatcgcatacgactttgctaattactagacgaccaactcgttctaacacttaacttatttcgcactgtttacattccaagatcgatgttttcgcctacaaacacatactgggagatgaagatgaaacacactgtcatacctgagtcgttttacgcactgacaaatagatgagggaatgcatttcatgcttgggtagaaagcaatgacgacttgttggacatacttgtg

SEQ ID NO: 39711 - DNA, 408 bp, Gossypium hirsutum
  Clone ID: LIB3165-038-Q1-K1-G4
gtttcatatggtgggggttctacagctggaggcattcagtcatggcatatggatgatttgttggggctaactggcttaaaccaaagctttggttacatggataatgagttatctaaggctgatagtggcaagtgcggagactccgatggctcaccgttcttgcgacctgctgaggaagaggtctttgatgatgaatacatgggtcaggtgccggaatcccactgggcagtaccacaagtgccttcacctcctacagcctcagggttgtattggcctaaagattctcacaatcaatctgatagcgcggtatttgtccccgacatatcctggtctagtgtggaaaaccctttccactagtcgcatatcggctccaccccgtaacaatggcgacaaattcacagtcagatc

SEQ ID NO: 39712 - DNA, 216 bp, Gossypium hirsutum
  unsure (1)..(216): unsure at all n locations
  Clone ID: LIB3165-038-Q1-K1-H10
tcgcccacgcgttcgcggacgcgtggggcgaaattgcaaaccaaagctggtcttncttgcctacattcattcatccaaaaaaaacacctttttaattcctaaactgaagccatgaaatctcttaaattctaacttgtagaaatctttctatttctgaggttgtattattcatgtattgcaacagaaaaaaagattcagaaagcttaaaagacttat

SEQ ID NO: 39713 - DNA, 316 bp, Gossypium hirsutum
  Clone ID: LIB3165-038-Q1-K1-H11
cccacgcgtccggttcggtacaacccaagttacagatttcttcctttttcattattggatttatttattttcaatcgaaacaaggaaactaatatcgaatttcggcgcttacccataccagtttctctttaattattttttctataataccccgtccccatagaaacctcaattatctctcttcttgtaaaaaaatctggcttctttttatttatttattaaagttagcctaaaaaatgctgtgcacaatggtgttgatgccccggaagaagaaagttggatcggttccggtttatttgaatgtatatgacttgac

SEQ ID NO: 39714 - DNA, 414 bp, Gossypium hirsutum
  Clone ID: LIB3165-039-Q1-K1-B12
ccgacacaaacaaaccgaacaaaaaaccggattaagaagaagagcgggcataggagcgggcgtcgaaatgctgtttgtctagttgggttaataccctgggtacagggcgaagagcagggagaagactgagaaattcacttaatattattattaataaaattatgaaaacactcaaaactgcactaatacgtgcttgactaggagcttgactcggtggatgaatatcagggtatataacaagggatataaggggttaatgtatggcaagatgtgttgcaagtcgtgcgtgaattcatttgagaattcataatagaagagttgattgtgcaatctattgaccaacctattactggttgaggtgctgttcatggcgatattcatgatctaatgaatgatctaatgactgtatgtcat

SEQ ID NO: 39715 - DNA, 425 bp, Gossypium hirsutum
  Clone ID: LIB3165-039-Q1-K1-B8
cccacgcgtccgcccacgcgtacgtggttatttatcagccatgttttggtgtagggggggcatcaaaatctcgacagctaccaaagctaagagccccatcaccactaaccttatactaacttctttatcccatttcagcaccgccaaccaacccccagttgcggctcaaccttgaggtcttggacccaccaaagcagatgagaaaccaagggtggtggtgttaggctcaggttgggctggttccaggctaatgaaaggcttggaccctaagctgtatgacatcgtttgcgtttcccctaagaatcatatggagtatactcccctcttggcttccacttgtgttgggactctcgagttcaggtacgtcgctgaacccatttacaggattcaaccctccatttgttcagcacctggctcctattttt

SEQ ID NO: 39716 - DNA, 254 bp, Gossypium hirsutum
  Clone ID: LIB3165-039-Q1-K1-C12
ggcagtgcagatggctatccgagtttcaccttctgcaaggctttctcttccaccaccatgaccatcaccaccttctccttcagtaccatcatccacaatctcaaccaaaccttttttaaaaccccaacaacctaaacccatctttttatcacttccaacatccacaactatttttttattaactttattttcaccttcccattaaacccaagctattaatcttaacaaaaaacaaattatttcattttttaatg

SEQ ID NO: 39717 - DNA, 422 bp, Gossypium hirsutum
  Clone ID: LIB3165-039-Q1-K1-D8
cccacgcgtccgcccacgcgtccgatcgctgtctccaatggccctcgctaacccactttcacctccatcatcatgtaccaaaggtccgggtcctgtaatccctgcaacacccttactaagtttccttgtacgtgtccaagaaactgctttgcaaacttatgggaaatcgaattttgatcctaaacactatgtagacttaccgttaaagtctaatctttccaccaccgtggaagcattcgataaacttcccaagacggaagatgggtcagtttctgttaaggattttgaagcgtttatcgggaagtactttactgatgcaggggatgatgttgtatatgccgagccagtggattttgtccctgagccgcatggctttttgcccaaggtggagagcccagaggtgagaggttgggcattggaag

SEQ ID NO: 39718 - DNA, 411 bp, Gossypium hirsutum
  Clone ID: LIB3165-039-Q1-K1-D9
aaaagccgttcgaaaagcattttttgtatgatttatggctgcaaccacgctttccgccgggctaaacggtctgactaacggcaccactattcgcagaccgatggtcaaactgccgaccaaaacctacacttatttttaacctacattgaccgagccctggacagccacctcaatcgcccactcactgcgaatattagcagctatagctggatcacgagctgatgattcagctgattatgagatgtctgttgagaacgctctcaagctcgttgtggtgttcgaaaatgcttcttttgatgatattcttgatgctatgaattcgaccgaggactctattgaggatgaccaaaaagctgtcgatcaagctgtggctgagtatgacatgttgcttatgctgagcttaatgcaacg

SEQ ID NO: 39719 - DNA, 412 bp, Gossypium hirsutum
  Clone ID: LIB3165-039-Q1-K1-E4
cttaaagtgtttaaggaacaaggtctggttttgaccgctcttttaggtctttcagctttcttctcgatggcagagactgcaataactacattatggccttggaaggtgcgtgaactggctgataaagactctgaagatggtgtttttaaaatgctttccagtgatgtaacacgctttctcacaaccattcttattggcaccacggtggtcaatattggagccactgctttagtcacagatgctgccacagctatatttggggaagctggtgttactgcagcaactggagtaatgaccgttgccatattgcttctcactgagattactccaaagagtatagctgttcacaatcccacagaagttgccagatttgtggtcaggccagtggcatggctttctgtaatactatatc

SEQ ID NO: 39720 - DNA, 311 bp, Gossypium hirsutum
  unsure (1)..(311): unsure at all n locations
  Clone ID: LIB3165-039-Q1-K1-F5
cccacgcgtncgaaaaaacaaagggctgaaaacgcacaaccgtgtcctctgcttttctcctcaagactttagcagtggtcgacaagcctacctcggaaaacgcggagagtctttgtctaccaaccaaaactgcagaaagcacccaccctggtacccggcggggtcttagtgaacgtgcaagaaaataggcctaagagcgggacaagaccgctggagctattgattgtgggggcggaaaaattggcgccatggattaatccaacgctgcgtgcggcaaacacttggcgtccatgggtctaaaaaacacagag

SEQ ID NO: 39721 - DNA, 424 bp, Gossypium hirsutum
  Clone ID: LIB3165-039-Q1-K1-G1
atccgcctgttctcacagtatctcctcccctttgttcctcgaaatggccgccgctatctgctccgcctcctcctcccctacttcccattgcaacgtcttcctcggcatcgacgtcggcaccggtagtgcacgcgccggtctctttgatgaggaagggaagcttctaggatctgctagtagcccaatacaaatatggaaagaaggcgattgtattgagcaatcttcaactgatatctggcatgcagtctgttcagctgtgaaagcagcatgttcacttgcaaatattgatggggaacaggtgaagggcattggatttgcagctacttgttcacttgtggctgtggatgcagatggctctccagttactggttcttggagtggtgattcaagaagaaatatcatagtctggatggaccatcgggct

SEQ ID NO: 39722 - DNA, 298 bp, Gossypium hirsutum
  unsure (1)..(298): unsure at all n locations
  Clone ID: LIB3165-039-Q1-K1-H11
tggagaagttttagtgggaaaaaaaaaaggaagataggatnggtgtttgaataggtattttaaggaaagaaaatgttaaagttgatgatgttgttaagattgttgaaaaattnnagggataataaattgaatttttnggtgatntgagggnaagagtttatgatgaagaagtgaggaaatggattggagaggttggagtaaatggtgttgggaaaaagnttgtgaantggagggaagggggaaaatattttgagaaatngaagatgataattgagaaggtgttggaatatggataaat

SEQ ID NO: 39723 - DNA, 426 bp, Gossypium hirsutum
  Clone ID: LIB3165-039-Q1-K1-H4
gaaaaaagcaaagctaagccctgatcaggttgtgagttgaggaagaaagatggtgggggctttatcggtggtggactctcacactggtccatgtttgtgctccaccagcatgaacttgaaaactggaggggaattggtttcgcaaatgaagaggaaacaaggggtgggaagggcagggtggttggaattaggcagctcatttgtagattcatgccatgattggaggttgtcttccaagatgattcctggagttgtgaataagaagagttcaaggaaggcccgcacacttgtggttgtgaatgaattaggagggcagtatgaagaaactttcggggatgttaaaacgcaattagtaaattacttcacatacaaagcagtgaggactgttcttactcagctctatgaaatgaacccaccaaaatatac

SEQ ID NO: 39724 - DNA, 420 bp, Gossypium hirsutum
  Clone ID: LIB3165-040-Q1-K1-B10
ccaatcccaggctcagggatgcaacttacatacatcgcccacgtttgggacttgtcgtctatgcttaccctagctgttgagaagccagaagctgcatgttgtaatatcttcaattgtgtgagtgaccgggcagtgactctggatggaatggccaaattgtgtgctgcagctgctggcttaccagttgaaattgttcattatgatccgaaagctattggaatcgatgcaaagaaagcttttcctttccgtaatatgcacttttacgccgaaccaagggctgcaaaggacatactggggtggaagagcaccacaaatctgccagaagacttgaaggagcgattcgaggagtatgtgaagatagggcgtgacaagaagcctatgcagtttgagatggatgataagatactagggtcccttaaa

SEQ ID NO: 39725 - DNA, 244 bp, Gossypium hirsutum
  Clone ID: LIB3165-040-Q1-K1-B2
cccacgcgtccggtttgtttgaatcctgaagaatttcttcagctccttttggttttgaaggtattatttatagttccaagaaatctcaacagcgacgatgaccatgaatctggtggaatccgatggcgtttggggttcttcctaggggcccggctttgttttccttccttaaagggaccgtgaaaccgcgggggaggtttcggtttggttttttgcaaacgagttttttggcaaaaaaacccaa

SEQ ID NO: 39726 - DNA, 424 bp, Gossypium hirsutum
  Clone ID: LIB3165-040-Q1-K1-D2
gccttcatcacctggagagacactatgtgcagcggtctcagcctctgcctgggtggaaccccatggaaaatgtactattgcattttctcttgcttggtcttctccaaaaataaaatttttaaaagggagctcataccataggagatacacaaaattctatggcacttctgaaagagcagctttgaacttggcgcatgatgcactgacaaattacaagcggtgggaagacgagattgaaaaatggcaaagtcctatcctcaatgatcaaaggctgccagaatggtataaatttacactgtttaacgagctctactttttggttgctggcggaactgtttggatagattcttccttgccatctacaaatgtgaaaaatgatcaagattcaccagaagatgcacaaagggtagatgtaaaagtaact

SEQ ID NO: 39727 - DNA, 218 bp, Gossypium hirsutum
  Clone ID: LIB3165-040-Q1-K1-D5
cccacgcgtccgtgacagtggaaaagaagctttgcgttccgacttccgcatgggaaaggtacgaatacgtgtatctactttggaaacgggtaaagtgtacaaaaatacatatccgttggtgatgttgggtaatagccgggtacaaaaaatgggtgaagctggaggtggctgtaaggtttgttcgtgcagcttcaaacactagaattttcttacaacgt

SEQ ID NO: 39728 - DNA, 317 bp, Gossypium hirsutum
  unsure (1)..(317): unsure at all n locations
  Clone ID: LIB3165-040-Q1-K1-D8
gtctcctaatccacnttttctccggcttctacttctctagtccctctttcaacccgcagatttttgaatggctgcgacgccaaaaattaacacgattagcaggacactctttcgtcttaaagatggcttccgtgggcatggtgcctgcttctggttcaagagaatctaagaccgccagaggtgaaaagttacctgaggagattaacgacatgaaaatcccaaatgacatacatacggaagcaacattcttggacgaaaacgaaactcaaacaaggcatataattgcgacaaccatcggtggtacaaatggccaacca

SEQ ID NO: 39729 - DNA, 323 bp, Gossypium hirsutum
  Clone ID: LIB3165-040-Q1-K1-E10
cccacgcgtccgacgacggtggtcattgatttcctaatcccctaaggagtgcggaccaacttaattgccgaatcaactacccccaaaaatggacggcgcttaagcgcgccacctatacaccgccgtcggtgcaagggccaagcccccattagtaagagggcacggcagtcgccgcaaaacccgggcgcgagcccggtcatgaccggacgaatgagcatatcttgatgttggtcacacatattcaaatgacaactttgaccgccttaaaggggaaaggttgcatgtgaactgcacttgcacatagtttagacgatcctaaaaga

SEQ ID NO: 39730 - DNA, 409 bp, Gossypium hirsutum
  Clone ID: LIB3165-040-Q1-K1-E11
cttttctgttgctaaggctcttaatatgatttgtagtggctatgtttggattgctgcagattggcttccttcatacttagattcaaaggacgcagttgattccaacacaatgaatatcttgcaaggggttattgctctccgccattacacccctgatactgatctcaagaagagttttatgtctaagtggaacaccctaaaatataagggaagtgcaggtcatgcaggtttcaattcatatgcgctttatgcttatgattcggcttggttggctgcacatgcccttgatggttttctcaacgaaggtgggaatttatctttctcttatgacccgaaattgcatgatacaaatggcagcatgctgcatctagcatcccttcgtgtgtttaatggcggggaacaacttctc

SEQ ID NO: 39731 - DNA, 201 bp, Gossypium hirsutum
  Clone ID: LIB3165-040-Q1-K1-E12
tccaacacaacaaatatctatcatggggttattgcactgcgtcatcacacccctgatactgatctcaggaagagttggatgactacctggatctccataatctattaccaggacgagcttgtctcgcaggtttcaatcttatataccctcaattctttcaatacctttaaaggtgtttgcacatggcgggggggggggggg

SEQ ID NO: 39732 - DNA, 416 bp, Gossypium hirsutum
  Clone ID: LIB3165-040-Q1-K1-F5
cccacgcgtccggtttggtcaatggaatccatagtcatggcgttgagaaaaggagcagtgtaagtagaaaggcgattgttcacagatacattacaatttacaaccatagccatttcctctcgccatttctcttaatctcagtctcttttgaggttcaaagttcaaacaacacataagaatgtcgcctttggcttttgttttgactttgagctgttatagacgttggccatcccgcttcagcaccccctattctcacaaccttctcgttttattctcttcaaccgccaccaccattaccccacctaacggaaacgagtcgccgtcgagtggacccgctccgcctcctatccgagtcgcactaaccgagtcaacaggtcgagccgtgttcgccactcggagaattggtgctggagaca

SEQ ID NO: 39733 - DNA, 146 bp, Gossypium hirsutum
  Clone ID: LIB3165-040-Q1-K1-G11
ctcaaacttcctgaaccgctacgcgtttttttacttcaacgatcggaactccggagggcgcagttgaggccatcggccgagacatcatctcaggttaacggactgccaacgctgaaaacggctcacccggacagtcggaccagcgg

SEQ ID NO: 39734 - DNA, 422 bp, Gossypium hirsutum
  Clone ID: LIB3165-040-Q1-K1-G8
ctcatggtatagttcatcgtgctatgatgggggaaagctggactgggcaattcgctgttaaaaacaaaatgggggaaagattttcagctgttgcaaccaatactccattttatgatgatgatggttctttggttggaatcatttgtgtttcgaccgatactcggccttttcaagacatgaaagttgcattgtcagctgaaaagcaagccgatggtgattcggcttttagctggtctaaaaacgcagtctcggctaaactcggtcttgatcctcagcagccgttacaagctgcaatcgcgtcgaaaataacgaatttggcgtccaaggtgagcaacaaagtgaaatcgaagattaggacgggagagaattgttccgatcgtgaagggggaagtggagatagtcattattctgatcatggtttg

SEQ ID NO: 39735 - DNA, 260 bp, Gossypium hirsutum
  Clone ID: LIB3165-040-Q1-K1-G9
atcgatatcattcccccgtttagttgtataatgtccaatttagaagtggcaaattaaggaatatagagcatggcatgttgcggttgggtgtaaacataggacaaatgcgagcaatcaatagcagcctccgctaaacagggttgtttttattacatctaattgatgtcatgtttatgtttatgttttttttttttatgatatcattgtactgaaactgttaaatatttatataaaactttgacaggttaatagtgcttggc

SEQ ID NO: 39736 - DNA, 408 bp, Gossypium hirsutum
  unsure (1)..(408): unsure at all n locations
  Clone ID: LIB3165-040-Q1-K1-H12
atctacaccatgattgtaggtcaaggatattacaccttgatgttaaaccagaaaatggattgcttgatgagagttatagagcaattgtggctgattttggtttatcaaagttaataggaaaagatgaaagtggggttattacaacactaagagggactagaggttatttagcaccagaatggctattacaacatggagtttcagagaaatctgatatttacagctatggaatggttctttntgaaatgatcggtggtcaaagaaatgttagtttgattgaaaatgggattgacagatctcaaaggaaatggaatttctttcctaaaattctgaggaaaaaactgaaagaagggaaattaatagaagctattgatcaaagactggttgaagcangtggcggtggtggtg

SEQ ID NO: 39737 - DNA, 284 bp, Gossypium hirsutum
  Clone ID: LIB3165-040-Q1-K1-H9
caaatggctttagcggtggaaactaccatttttttagatctgatgggcctgcgctcggtgcttctactgagatcgcaccagacgaaggcttgcttcttcgagcgtggccgcatccacatgccattcaactggtacagaacgagaggatggaaacggtattgtagcaccaagttattaaagaagctgtgcagcaccagcaagcgttctatgagaagcctgataatactatcgtgaccaacaatactcacaactgagattgtgaacagctgtacgtacctcaccaa

SEQ ID NO: 39738 - DNA, 184 bp, Gossypium hirsutum
  Clone ID: LIB3165-041-Q1-K1-A1
aaaaaaaaaaaccatacctttccactatatattattttcccattcacccaatttctccaaaattttgttgtgattgctcaggattcgttagtttgaaaaaaaggcttccattggtaatagatggtcttcaccacttattatttgaagaaatggggaaaggtaagcttttgttttttttactttt

SEQ ID NO: 39739 - DNA, 209 bp, Gossypium hirsutum
  unsure (1)..(209): unsure at all n locations
  Clone ID: LIB3165-041-Q1-K1-A12
gcgtggcctatcaatcctttataccttcttatttttaagctcgaggagtcaaaaaggttggcgcatgtataactggcttgtcacanccaatcgttcatagcaactttgctttttgaaccttcgatgttggctcttgctatcattgtgaagcccaatacaccaagtgtttgattgcccacccaccaatgttgatcatgagctgggtttac

SEQ ID NO: 39740 - DNA, 197 bp, Gossypium hirsutum
  Clone ID: LIB3165-041-Q1-K1-A5
ctgaaagataaacaggtgagccttaaagaagttgaaccatggcaggttggttaacatacaccacccaatcccttaattcaacttggtcaatctccacaccagcgaaaacccatttaaggtttcaccaaaaggaagtagttttctataggagaagcaacaagagaagtggcagcggcagcggcagcaacaacgggcca

SEQ ID NO: 39741 - DNA, 172 bp, Gossypium hirsutum
  Clone ID: LIB3165-041-Q1-K1-B4
aaccaaagcagcagtttcaatttcagtggccggttctattacgggtggcttatcttcattttcgaaggttgggatccatacacctcatcgggtcttggggctcaaaagggtggcttctttcaacttcttttctggttctggcttggccctcaaatgcccgagttttaacaat

SEQ ID NO: 39742 - DNA, 440 bp, Gossypium hirsutum
  Clone ID: LIB3165-041-Q1-K1-B8
cccacgcgtccggcaaaagatggcccttttcaaaccggccttcctcaatcacctcaaaatgctcgcccatccccgccaccgttctccgccctctttcattgctctccgctgcctctcatttagcaccccagaagaagccgccgccgaacgccgccgccgcaagcgtcgactgcgagtcgaaccgacactctcgtttgcccagcgctctcaacaacaggctcagcaggtggctccaccgaaaccgatccaaaacccgaacgcccctaaaggtcccgaacccgtcactgcgctaaccggcaaccgtctcaacctccacaacaagatcttgaagctcattcgtgaaaacgacctcgatgaggccgctctatacacgcgccactccgtttattgcaattgccgccccacgatttacactgtcaacgccgtattaaacgcccagc

SEQ ID NO: 39743 - DNA, 316 bp, Gossypium hirsutum
  Clone ID: LIB3165-041-Q1-K1-C2
gaaaaatgctcaccctcacctccgccagctccgctctaacattattcccggaatgcaaaacccaacggcgccgatttacaatttcggcggcggcggatgataagttcccttcctttctaccaaagcaaatggaagaaatcaaagacccatttgcccggaaactcgccacccgaatcgaaagactgcccgttaatgctagcttctcagaaaaaagcattatgagtagttgcgtgaagccattgattcagagcagccaaaatccagtggttctccttcatggctttgacagttcttgtttagaatggagatacacatt

SEQ ID NO: 39744 - DNA, 134 bp, Gossypium hirsutum
  Clone ID: LIB3165-041-Q1-K1-C4
ttcctctcttccaatttatgattgccatgatttctgtggtttggatgttaacatttggcagggcaattaacaccagatgaccaggctgccgaaattaacccctggaaggaggaaaatgaccagttcttcctcca

SEQ ID NO: 39745 - DNA, 435 bp, Gossypium hirsutum
  Clone ID: LIB3165-041-Q1-K1-D11
cccacgcgtccgagctgattctcacatccgatctttcctttttttttaaataattttttatctcccccagttcatggcataagaattgtcttcattcagattcgggcacctgctctctttcccccttccttcagctctggttctctggaggatggatcatgaaagggcccccattttgagatctaaggatcaaaagaaaattgagatgccgttggcgttggtgtctgaagaaagtaatatcattttaattccagcagagttgaaatgcttctctgtttctacttccaggcaagaaaacataactttggaatcaaaggaacgacagaagtcggcatcccaactttctgggcttatcattttctatcttgtggttatgttagtagagattgtcggtggaatgaaagccaatagccttgcagttttgacagatgcggc

SEQ ID NO: 39746 - DNA, 260 bp, Gossypium hirsutum
  Clone ID: LIB3165-041-Q1-K1-D2
caaaatcaactggttaacaatggcctctacaaccatggatgtctcttgcccatcattcaccggtaaggcagggaatttctcaccatatcacccctgaaatacagggaactggccgagttttcatgatgaaaaccaccgagcctgttacttctggtagcccatgggacagtcctgaccgagttaaggacttgggtccactttccggagagccaccatcttacttgaccagcgagtttcctgcagactatggatgtgacact

SEQ ID NO: 39747 - DNA, 167 bp, Gossypium hirsutum
  Clone ID: LIB3165-041-Q1-K1-D5
tttatcatggcttcctcaactctctcccctgcagctccttggcagctattctcccgcaagagggggatgttcttgccatcacaagcgttttttgggaaaacaaccaggacccattttgtcaaaaaccaaaaggggattagggtcacattccaagccccttacattcc

SEQ ID NO: 39748 - DNA, 417 bp, Gossypium hirsutum
  Clone ID: LIB3165-041-Q1-K1-E1
gagttgattatggtgaacaacatagcaagacttgtggccactctcggtttggtcgaatttatgaacaagggcattacccacaatgggatgaaaatcaccctattcactttgttggccattcaactggtgctcaagttgtgcgtgtcttgcagcaaatgcttgctgataaggcattcgagggatatgagaatacttctgagaattgggtgttaagcataacagccttatctggggctttcaatgggactacaagaacgtatttagatggcatgctctatgccgcttaggagttataatatatgattggttggacatccccttgctaaaggcctattacaatttcgggttcgatcactttaacttgtcatggagaaaagtaggtctttggggtcttggtgattgccttttggggaatgc

SEQ ID NO: 39749 - DNA, 450 bp, Gossypium hirsutum
  Clone ID: LIB3165-041-Q1-K1-E12
attggtgccaatatactccatcaattttcattttattttcagatctcttcctcaaaagcggtgtgttgcaccaaaacaacccccatttcatttatttcttcaccatttctccacccccccccataaaaaaaacaaaaaattttaaacatatattaattatgtaatgtaatttaatttctcttttgatctaatttattcacagagaattcttaatttttaaatctccattcactcttaaacaaatattttcattgtaggttttgcttcctaagaacttaccacaatttgcttcatatccactgtttcttttctttattcttttatttccacccattgtctttcattcttcatcaattgttctgtgcccaaaaataggaccctttttcttaccctttttattcttcttcatttagagacaatttttcttttaaaatccactttttttttttt

SEQ ID NO: 39750 - DNA, 286 bp, Gossypium hirsutum
  Clone ID: LIB3165-041-Q1-K1-F12
cccactcgtccgcgatggaaaaatcaaccactttcctcattacaagatctatctacgacggtgcttcattactatcactactacactgcaactgcttcaatccttgctttgccatactccctttcagatctcgtttcgcagtactttgtcctctcttctcctctgttaccatcaatatcacaatcatctgaatgccattttcattgcggccgcttttactccctcctcgtactttatgtggacagtcagttttaatatttcccattccatttcttcatcaatcttt

SEQ ID NO: 39751 - DNA, 222 bp, Gossypium hirsutum
  Clone ID: LIB3165-041-Q1-K1-F2
gttaccataacgggcaagtcccacaggcggaatcttaatactgagcatcaggcatagcaggagggctggccaccgatagtaccgccttgcacatcgaccgagcatctgacatgtcatatcgaaactgaactgtcatggggtagggagactactacacactttagactaactcacgggttgcgtcatggagcttgaaggtgataccagattgtatcgctattc

SEQ ID NO: 39752 - DNA, 411 bp, Gossypium hirsutum
  Clone ID: LIB3165-041-Q1-K1-G2
gttttatggaaagagaatcctcttactttctttctagggagcataataacaggagcatgcttgtcaaggcaaatgttgaaaatttacctgtagctggggctgagacagtgtctgaagttgcttgtatggggaatgaagttggcaggttgtcatcattttctggaaatgctaatgcaatcattgaagagtcatgtcagcagatacccagaacatcaacccgtgttacagttggagaagatgattgtgactcaatagaagaaagttgtaatgaaattgaatctgcaagtgagtctgtgcctgaaattttagacaatgatttacagttttttgaatcgattgggataaaaatggatgggagatgttcatcctcggtaattggatcggcagaaccaaatggacaatcaaataact

SEQ ID NO: 39753 - DNA, 413 bp, Gossypium hirsutum
  unsure (1)..(413): unsure at all n locations
  Clone ID: LIB3165-041-Q1-K1-G4
ctcaaattccatcatcaaaattagggtttctgtaaagctaaaaaaataaaaattgaaatcaaaatcgtttcgaaatcttagggaatcgggccgattggtggtcatgtttcgttgcctttggttctgaagtctttgaatttccttcaagctttccttgaagtggcaattttactctactcgttatggatgtgggatcaatggaatcatcccgtccccatttttcctccgccgtcagctccgtcgccggattcttctctcccggttctcttcaattcgagaccgggggttggaggagctcgagcagctaagtattcgatgattagctgcccgcttggtctcggntngataatggagtcggcttgaattgagtcgtcagctacctgctcatggtcattactctntatggagtggca

SEQ ID NO: 39754 - DNA, 359 bp, Gossypium hirsutum
  Clone ID: LIB3165-041-Q1-K1-G7
tgaaacttcatttctctgacacaaaaagctctcacgacccgactcccctggcatcaacaggacagttctaaacccaaaaacataaaaaaatggccgcacgtgtactaacactggcgaagctcaatgcaaaacgcctaatcatcaactcaactaagatgagcagcccaacaaagcacaaccccaaagacctattactttctttacatgcacaacctcctcaaaggcctaaccatgtcaaaaccagccgacaactcaaacactaccttcttcactcgcttacatcgcaatagatggagctatcttctcaacctcaaggtcatgtgaccccggcttaactacacaacagatcgctgatatag

SEQ ID NO: 39755 - DNA, 424 bp, Gossypium hirsutum
  Clone ID: LIB3165-041-Q1-K1-G8
gtctatttagtccaaggattccttttttgttattattttattttcctagtacttgaaatttctttgctcaagtatttctcctgtcttctacgcttatatcaaacgcaaatgaacagaaaagattgtttctttttcactgtttctgggattttcttcatttggaatgaactgaattttgattgaaagatggtggcttttgggaagaagttgaaagagtcacaaattcaagaatggcaagggtattacataaactacaaattattgaagaagaaagttaatagatatgctcagcaacttgaaattggagcacaagatcaccattatgttcttaaagatttctcaagaatgttagatagtcaaattgaaaagattgtattatttctgctggaacaacaaggacaactagcaaacagattatgtgatc

SEQ ID NO: 39756 - DNA, 333 bp, Gossypium hirsutum
  Clone ID: LIB3165-041-Q1-K1-H1
cccggccgaattccggtcgccacgcgtcgccaccgtcggagacggcacaatatattcagcaaagctcattctttctcaattcaactttttatattagcactagtttacccttaaagaaagcttcaatatattaattgttggcaactacaaagcaccatacaaaagaggagaaacccactgataacataagaagtgtgagcgacacctcttaccacaatagcgagcaggattttggctttatgatcttatctgaactgtctgaagaatatcagcagtaaggtttgcaaattattttatggatgtggctgttattcttacatggagggggtatat

SEQ ID NO: 39757 - DNA, 230 bp, Gossypium hirsutum
  Clone ID: LIB3165-041-Q1-K1-H12
aaaaactgaacctatcctctccctttcaaggtttcttttttccaaacattgcccacgccggcgagcggctttttcaaattccaaaactccttcaccaaccgtgatctgaacaagaaaaagaagtctttttaacccccttctctacctccaccttaaagtcctggcctccataccaaacaagcctaaacaatgagagacctttcctctccttttctttccgattccaacac

SEQ ID NO: 39758 - DNA, 440 bp, Gossypium hirsutum
  unsure (1)..(440): unsure at all n locations
  Clone ID: LIB3165-041-Q1-K1-H3
ctcttcttccctctaaaaccatagcagtccagagttgcaacgttgcgagcctcatcggctttcagtcaaccccctggtggttactaatcttctatctgggaaaacaaaaagaattactgtggagaatgccttctcttctggatgtacatccaaataagcccattccttttctgggaatttcggcttttcctttattgctaccttcaactaaatcaactactgcttctttcatacggggtactgcagaccctcagatcttgcatagaaaaagaagcttctctctttctgcaaaatgagttgaacaacacanggtcaaagaaactggtctcctttgctcccaggtgtagcgggtccacaaactccagtgacagtaaagatcaaactaagacaccttttggatacacaaggaagggatgtctattgattggccttgagtcact

SEQ ID NO: 39759 - DNA, 186 bp, Gossypium hirsutum
  Clone ID: LIB3165-041-Q1-K1-H4
aacagcagcaattgcaacacaactccaacgcctttgttgttggcggatatgccgataaggcacggggttttgttccaactttgccgactaaacacagggggcaacaaggttaatacgaagaccgactgaacaaacttatccaagaatccaagttcccatcattttatttgggtgataaccggttat

SEQ ID NO: 39760 - DNA, 434 bp, Gossypium hirsutum
  Clone ID: LIB3165-041-Q1-K1-H9
tgaaattcaaagggaagggatggcgatccccgaagtaaaccgccaacaagccagagggagacctacggcgtcttcaacacgaccgccggttcgagctagaattcggctccggcagctgcttcgagtcacttccgtggcatgcgggatacagttcggatgggctttacagctctcgcttttgacaccttacgttcaagagctaggtatacctcaccagtgggccagcatcatatggctttgcgggccgctttcgggcctcctcgtacaacctctggtgggacacatgagcgaccgatgcaccagccgcttgggtcgtcgccgaccttttatcgtggctggtgcagtttcgattatcgttgccgttttgatcatcggtcactccgccgatatcggatggttgttcggcgatacagaggcgtcccggccgagagcta

SEQ ID NO: 39761 - DNA, 381 bp, Gossypium hirsutum
  unsure (1)..(381): unsure at all n locations
  Clone ID: LIB3165-042-Q1-K1-A5
gaagactggttattccaagagggacccggcctcataaaaaagggggtcttaatgccccccctttaggaaatggcccaagcaaggaggcttcttctaatttaatcatatgctaatgcccagttcaacccggaaggggggccccccttttccatattacaccatctgatgtattattcctttgccatcatgggactctgtgtgtgtttttgttgttgaactcgtgattctgcagtgcttttaatgggggctagcaagttatatatgtatgatgatgatgatgtgagcagccatggttggcatggaacttgatgtatgttattgtttggttttggggtgtaatgtaaatggtaatgttttgtcntctnnnnnaaaaaaannnna

SEQ ID NO: 39762 - DNA, 395 bp, Gossypium hirsutum
  Clone ID: LIB3165-042-Q1-K1-B10
ggagaaccgaaggggaggaagaggaggaagaagaacaccaacaaaagttaaaaataagaggtgcttcaacttttgtttctcttttccttctttgttttacaatatcaatgcttaaaaaactctagcttttctctttctctctctatgcatcgatcggaatcaaaatcctcttggttttttggaacttcttggtggaaatctcgagcttggtggaatcgaagtgctttttcttggaattttaggttttggagattgtagattggaatttggatcttaaagtggttcaattcgagtttatttaaggcaatttgtgagattatttggtggattttcagctgtggatattggaaaaagattggaaattgaataaatttttattttattttttgaaattt

SEQ ID NO: 39763 - DNA, 250 bp, Gossypium hirsutum
  Clone ID: LIB3165-042-Q1-K1-D1
gtatatgatgctagaagagtcagaaaagctaccacagggatgactggctacgtggcagtcaaccgtacatacaaacgacggttactcatacttggacgtcgggtatccctattattgggtaccaccaataactacgtgtactacatgttcacgccacagtggggaacgagaagctctgattacaccgtgatgagacgggtttataggaccatactgatcgccttatagaaaatgtaattcaacctattac

SEQ ID NO: 39764 - DNA, 388 bp, Gossypium hirsutum
  Clone ID: LIB3165-042-Q1-K1-D10
ctcaatcgactatccgagtctataaaatttgtccatgaaatgggagcagcagctgaaaaactcaatgaaggaacagtaacttctactaggttgaacagcctggtgcaacaggcatgggcgtcgattgttaagacataggtgatgatccaactccaaagaactgcatcgtttttccaaaagctagattagggttttgaagaaatataagcatggcaagtgtagaaccagcagttttgctatagttgcatattttgaaatctcatgtaaaacaagaactataaaaaggtaacagagaaattaaaattatcccgagtcagaatctgtataacagattatatggtatatgaacaatagtttacatatgaaatgaaccctttcttctagaacc

SEQ ID NO: 39765 - DNA, 297 bp, Gossypium hirsutum
  Clone ID: LIB3165-042-Q1-K1-E4
gtttccttcaaaggcctctctgttttcatctctgtttcaattacccatcttcgccaaacaaacaaaaaaaagcaaaaatggcaggtgcaaggagggaaatgatcaacggcgggaatatctcacggaggatcgcgggccggccgataccgaggaggggacaagtgaaagttgctatagtggcggggattgcccattcttttgcttctattttcactgcaagcagtcgcagagcatcttcttctcgtttgtcttaatttataataatgtaaatcgattttttgatgattttgtaagggg

SEQ ID NO: 39766 - DNA, 392 bp, Gossypium hirsutum
  unsure (1)..(392): unsure at all n locations
  Clone ID: LIB3165-042-Q1-K1-E6
cccacgcgtccgcccacgcgtccgctcgttacaaacaaaccattactcctcactctgacttagtcgctttgacaatatccttaaaaaaaaaaatagactatagctntatcactcttatatatatgtatatgtaatattaaaacaataacaaaaacctccattaaacccatctctctcttctctttatataatatttctcttggtttttcgttccattttcacttctattatggacccattttcttttttgtcctttcttttccatgctctgtgaaaggtagcagctttgacattagaatcaacttgaagaaccattttttttaactcgggggttttttttggtgtgttttttgggtaaaaaaaatgggtagtaaatggagggagagtaagtt

SEQ ID NO: 39767 - DNA, 399 bp, Gossypium hirsutum
  Clone ID: LIB3165-042-Q1-K1-E9
cccacgcgtccgcccacgcgtccgcttcttcaaattacttaccactgacgacgccatttgatcatgaatgggtataaggatgacagttacagctgctatttccatcctaaacaacaggttatcggggtttgccctttgtgcttaaatgataggcttcttctcctagcttcaaagcaaccccgacactcttcttcttcatcctcatcttctaccagaggcggccatggatttattcaaggtttttcactaaagaaaccacccatcaacaagctccctaagatctttgctttaggctcattgctcaatcgtcttgagttcaagcattggaaacctggaaattctgatgatgatgttcttgatgtttcaaccagtcaagaagactcctttatctcgatcaag

SEQ ID NO: 39768 - DNA, 383 bp, Gossypium hirsutum
  Clone ID: LIB3165-042-Q1-K1-F8
aacccagaaccttcttccgtgtttttctcctctcccataaatgaagttcttctctgaattaggttcctgttatcgcccatccacatcccatcgagatgaggataaggcttctctccgcaccacccgccatgcagaacgtactattaccaagtcaggcggtggctctgcctcctcaccaagtcgacattggagaccggttcttcaagctatcagggaagacggcaaggttacggaaaagagaattcccaataaaaacaaatccaaagggaaatatacgtctaagccttacagagttagccatgatgagaattcctactactccaggaataataacagtgagccgatggttatacctgcgttctctccgacacccttcatgtttt

SEQ ID NO: 39769 - DNA, 386 bp, Gossypium hirsutum
  Clone ID: LIB3165-042-Q1-K1-G10
cccacgcgtccgcccacgcgtccgcccacgcgtccgcccacgcgtccgcccacgcgtccgcaacaacgcttgggctctcttccacatcttcgtctttcatcaatggcggagctggagacccacgctccctctcatccattttctctttcagaccccttactaaactcacgaccgcaaagtcttcttcttttactagtagcagagcttcatggcaagagctggtgggagtgctgctgttttcagcagttcctttcacggcggtcaaagccatcgctaatagccctctaggcgaggccctgcagaggcaattgttaaagaggaagaaggaagctcttgcaaattcttccaagttccaggctttagctcagaaggcaagaaatgagagc

SEQ ID NO: 39770 - DNA, 276 bp, Gossypium hirsutum
  Clone ID: LIB3165-042-Q1-K1-H8
atacacacactactatatcccactactagcaatggctgactaacagatctcatcggcggcgcagggacactgcctttacggaacaggctaacatggacgctcattccaccgaccttaagtctgactatgctcatccagccaccatgaaggccaacaacgacattactactatcgtaagccctggcgatagaatgcaaagcatgcccgagtagcctcctactggaaagaagaagacccagactctctcatactatactggatcttacacccatgcag

SEQ ID NO: 39771 - DNA, 433 bp, Gossypium hirsutum
  Clone ID: LIB3165-043-Q1-K1-A10
cccacgcgtccgaaaaaaaaaacatgtctgggtttgaagcagacaaccatggcgtctccatttcagttgcagtcgacaataaaactcttgcagattttgaggttttgaagaaacctaaaaggaacaagttcgcttttgcttgtgccattcttgcttctttagcttctatcttgcttggatatgatattggggtgatgagtggggctattctttacataaaagacgacctgaaaattagcgacgttcaagttgaaatcctcgttggaattctaaacttgtattgtctcatcggagcatacgtcgccggtaggacttccgactggataggtcgccgttacaccatcgtcgtggccgcctccatcttcttcgtgggagctttgctcatggggttcgcaacgaactacactttcctcatggtcggccgcttcgtcac

SEQ ID NO: 39772 - DNA, 329 bp, Gossypium hirsutum
  unsure (1)..(329): unsure at all n locations
  Clone ID: LIB3165-043-Q1-K1-A6
cccacgcgtccgttcaaaactaactgtctcggatatctttcgtctcgtttatgaaacagtgtaacagacccactaaggtttcagtatcttgaagtaaagtgaagcttttggatttgtttgattagaaggagctcaattttaattaggtgcctttaattngattagcatcgtgtcaatgggaacttcggaggctgttctgcacgttttatcgggggctgtcccctcagttttaagtagtgatatgtgttctagcaattcggattagtttctattctaaatgcacattaagctgtaagaaaaaaggtcaagggtttgcgccttgagtgtct

SEQ ID NO: 39773 - DNA, 349 bp, Gossypium hirsutum
  Clone ID: LIB3165-043-Q1-K1-B10
cccacgcatccgctcacccgttcgcttcggtgccagacatacctatcttcggctcgggccgatggaatgcaaaagcgactctgattgcctgtcgagcacgataaaaatgatctcacttactccctatctttatttccccaccacaagcgcctttacttttatagccaagaagctctcaatctgtcccaaaccggcgacgatgccaggttgttgctcttattccagatatggatagcagctgagtgggatgaacggttactgtgatattactacaaagtactacaggagggtcgatggaatacgactgatcgacgacgccgtacgcccggagagttgggtcgcggtgact

SEQ ID NO: 39774 - DNA, 263 bp, Gossypium hirsutum
  Clone ID: LIB3165-043-Q1-K1-B7
gcttacggcggatacctactctcaaactaacaactaaagacggtttctgaaacgaatgagctgcccttgagaccaaaatgcactcaaagacttggacatgctattagggaagaacttgcaactgttgctgcttccgtggacacacgttaaacgaccggacaaactgtaacatattatttgccagagtgaaagaacgcaggatctattcctaatgtatcagctagcgatacctgagctaactacaccaaggtcgaacatgatga

SEQ ID NO: 39775 - DNA, 428 bp, Gossypium hirsutum
  Clone ID: LIB3165-043-Q1-K1-B9
cccacgcgtccgctcttctcttattcactcctcttccaatggccaccgctttccaccaccactacaatttcacgcccactcccatcctccgccgtcgccggtctcccccgtcgccatcccccattaccctccacctcaacgcccctctttctactaccttcaacttccccactaaacaatgcagcagcagcagcagcagtaggatcacttgcaaagcgacggaaatgtcttctgtgagcgaagaatcagcggcgtcgggcggcggcgctggtgataattgggtgccggtggtgccgcttgcggcgcttccgaaaggagaacggcgtgtgatcatacaagacggggagaccatactgttgctttggtataaggatgaggttttcgcaatcgagaatcgttcgcccgctgaaggcgcttacaccgagggc

SEQ ID NO: 39776 - DNA, 261 bp, Gossypium hirsutum
  unsure (1)..(261): unsure at all n locations
  Clone ID: LIB3165-043-Q1-K1-C4
cccacgcgtncgctttttttttaaatatttttcattggcaaacaatcccttattaataaggagaggattttcacaactgggttaattcccttcattccctgggcttcataatcttgggacccaaaggcaaaaaaattttttaacattttaccccaaagatggggattacaaatgggagcgagtattaagaaattgggaaacaaaaagtggccaaaatgggggattacttccacccatttggggcttaggacccatgggcat

SEQ ID NO: 39777 - DNA, 153 bp, Gossypium hirsutum
  Clone ID: LIB3165-043-Q1-K1-D1
gaagcaaaccaattggtctcttcataagggggtccattatcttccgatctgattctaatggggaaaatctaaaaaggtattccggggctggcccttatgacagggtgcccatgggtaaaaaagaaaaaggggggggtgattactcatcggacc

SEQ ID NO: 39778 - DNA, 264 bp, Gossypium hirsutum
  Clone ID: LIB3165-043-Q1-K1-D2
aaaacccttaaatctctcttcctcttcctcttgttcttatctaacaaatactaccctttctttgtttctttggttcggtttgcttttgttccttttcaccacttggccagtctttctgtcatggaacaaccaagggctcattatggtgaaataattgcaccatgtgctatatacaacggggcctctgtcttgctatgcatgtggaagggtctcatcttttctcctctcattcttctttctatctgacataaattgctgattact

SEQ ID NO: 39779 - DNA, 338 bp, Gossypium hirsutum
  unsure (1)..(338): unsure at all n locations
  Clone ID: LIB3165-043-Q1-K1-D5
ttcaataccaacaattacaaagcaaaattcagcatcccttgggcatacggcatctctgcaaactttaatcgcagatcccaattaaatactctttttacattaacgaaaagcttcatggattacacatctaaaaagccaagtcaaaggggcctttttgaaagtctctatagagtcaatatgcgaagaaactcgtctacgttaccttatcatcgccgggcttcctcgggaacggctggatatggagtatagcttggaaacaacatgtcgaacgttacaaacattcatgctagacaagcatcaagaagaacaagatctgggattntgagtgtatgagatgg

SEQ ID NO: 39780 - DNA, 432 bp, Gossypium hirsutum
  Clone ID: LIB3165-043-Q1-K1-E12
cccacgcgtccgtgtggctatggcggcagcactcagctactgcaagccttccccattcattggccaatttccttccaactttgggaagccagtatctctgcgaagcatcgaaatctcgacgcaggcatctagaatcactgcactgttttggggatctaagaagtctgtgaagcatcaacctgtggattcttctttgggggatttcactttgacagggtcagaaacagaggaacttaaagagaacccgacaaagggcaagaaggtatcggtatcgattatttcctcaattctggacgtttcttcacatgaatgggattcttgcgctctggatgctaccggtcctgaaaagttcaatccatttctttctcatggtttcctttcaagcttggaagagacgggttgcgcagtgaaggaaacaggatggatgccgag

SEQ ID NO: 39781 - DNA, 412 bp, Gossypium hirsutum
  unsure (1)..(412): unsure at all n locations
  Clone ID: LIB3165-043-Q1-K1-F10
cccacgcgtccgcggattggacccaagggtcaagatttacgggagctacgaccaactgctggatgacccgtcggtggatgcggtgtacatgccattgccgactaccttgcacgtccattgggctgtcatggctgcccaaaaaggcaagcatgtgctgatcgagaaaccgacggctcttgatgtgggtgagcttgatacaatacttgaagcatgtcaatctaatggcctgcagtttatggatgggtcgatgtggttacaccatcctaggactgttaaaatgaaggagatgctttttgattccaagcttttaggagacgtcaattatatatacagcacatcaacaacttcagcatcccctgaattctttgagaatgacataagagtnaaaaggaaacctggatagtctcggagc

SEQ ID NO: 39782 - DNA, 345 bp, Gossypium hirsutum
  Clone ID: LIB3165-043-Q1-K1-F2
gagatggttcttgctttcaaaccgccattgacatacttctccccattttcttcgcctcatctacctccacgctcaactccttcttggcccctccatcactctaactctacctataaccccaacacttgtctttctccacttccaatctatgcacattccaagtggcctacaaacacacactccttcgccatctggtatcgctactccagcagtgaagaagaagacgacaaccatagctttgacgaggcagtttcccttttcaaccaaagggaatactataagtgccatgacttgcttgaagccttatggaacaaagccgaggatcccactagaactctcattcat

SEQ ID NO: 39783 - DNA, 175 bp, Gossypium hirsutum
  Clone ID: LIB3165-043-Q1-K1-F5
ggccggcccacgccttcgttcaatttggggattaaggtttgtggagtgcttccttttttgttttgttcgccctttaacaagggaaaaaaaacatcaatcaattcccttccattgaaagagacttaccttattgggaggtgctccacaacttggattctgactcttattctattct

SEQ ID NO: 39784 - DNA, 434 bp, Gossypium hirsutum
  Clone ID: LIB3165-043-Q1-K1-F8
ccctaatgccccatgttttcccctcatttaaccgacaaaagaaccaaaaccttagatccttttgattctcattaggtttaaccggaaaaaaactcattaatcgccatgacaccactgtatttgatgattggcgacgagtatatgcccctcttttaccccgtttaaaaccacaacttgtggactactgattttaattctgaaatcccatctcaagctccgattgcgacgaaggagatagggaccccgacggtgtacttacgaagaggagaagacctggtggccatgcgtgggaaccactcgtgggagtcctgatctgctattgttctagcgttttccagaaacctttagggtttctggtatcctctgttattgggcctttttcgggttatttttgggtctcgagtttaggcctgaaattttgtaaatgggtttgg

SEQ ID NO: 39785 - DNA, 225 bp, Gossypium hirsutum
  Clone ID: LIB3165-043-Q1-K1-G1
ggaaggtagattaccttcttcgctcaaaatgggttccttgcttggaattcgaattagaggagggattcgtgcaccgtaaatacttgagcctacccacgtactacgatggacgcttctggaccatgtggaaactggctattttcgggtgcaccgacttcgctcaagtattgaaagggcttgggggatgccaaaaagaataccccaatgcattcattaaaatcattg

SEQ ID NO: 39786 - DNA, 147 bp, Gossypium hirsutum
  Clone ID: LIB3165-043-Q1-K1-G2
cccgtccgaattccggtcgacccagcgtccggatctggtcagataacctgccgctgcttaacacatcaatcggcggcaagggtgtttccagtggcgacgggtgataacgcgtagaacctgccttgggaggggaacacagctggaacg

SEQ ID NO: 39787 - DNA, 198 bp, Gossypium hirsutum
  Clone ID: LIB3165-043-Q1-K1-G4
ttccttttccttttccaaaaacctccggtacttcctctctccctttcctccgattctatatctctctctttctgctaggggttgggagttagtgaaaaaagggttgttatttcaggggcaacaatgtgactacgcctgggacgggacgggctagcgcttcggtacgactcgtattagtcactcttaccgatcagagct

SEQ ID NO: 39788 - DNA, 425 bp, Gossypium hirsutum
  Clone ID: LIB3165-043-Q1-K1-H10
cttttgtttaacgggttgtgggaattcatttaatttaagatgcatttctcaatgggatcaaataatgttgggatatcaaatatttttctttataatcactgctcttctcaagttcgataaagtcactgactttgcaggaagcacgaattttgttataattgctgtgttgactctgataattaaaggatcatggcattttcgtcaggtagtattgacttcgcttgtagtaatatgggggctacgcttggcaatttttctattgatgagaattttgcaatggggcgaggatcgacgttttgatgagatgcgcagtaatttggggaaattagcagttttctggatatttcaggctgtctgggtctggaccgtgtctttaccttgtaaccgggttaatgctagtgatagagatcccatcggttcggctg

SEQ ID NO: 39789 - DNA, 255 bp, Gossypium hirsutum
  Clone ID: LIB3165-043-Q1-K1-H6
accggaacggcagggccggcccaggcgtccggtaacagcacgcgtgcgaaacgcgtgcgctgtgaattgaaaccctcaaaattccacttaaaaacaggactacacagcttatgtctacaccggcggaaacacaacttttttcttcgggggcaccccggcccgaaaaccctaagcttccttcctttcaaccaatcttttttcgggcttaaaccccaacgaaatgggcggctcaccatgggtggatacaaagggaca

SEQ ID NO: 39790 - DNA, 278 bp, Gossypium hirsutum
  Clone ID: LIB3165-044-Q1-K1-A6
gaaagctcatttttcatgcgtttaaccttctcccaatttcttctgccctgttttaccctcccaactgctcctttggatttcttctgattccataactttttccttcctttcagccgccacaactgcttcttcttcatcactcatcaacggactgcttcttcttcttcatccgctcgccggctgccaatcatctgtgttcaattttggacaacagtgtttttgacagttcgtattccgtaggacaccagttcgaggaggggaagatccgtgtcgatgct

SEQ ID NO: 39791 - DNA, 302 bp, Gossypium hirsutum
  Clone ID: LIB3165-044-Q1-K1-A9
ctttcgtataactgtagcacatagtactagcaagcagtaatagcaagggcctactgcatgatctcatcagtgaccattgccaccaggaactgatgctccccggtacaagccaacatggtggcccccttgaccggcctgaagtctgcctgtgctttaccagccactatgaaggccaacaacgacatcacttatctcgcaagctacggtgggagagtgctacgcatgcaagtatggcctactctcgggaagaagaagctcgagacactctcatacctccccgatctgacacccgtacagttggc

SEQ ID NO: 39792 - DNA, 125 bp, Gossypium hirsutum
  unsure (1)..(125): unsure at all n locations
  Clone ID: LIB3165-044-Q1-K1-B2
gccacgcgtncgcaacaacggcctctacttcatctggcaccgtatctgaagccctcctttgtgaagctatgtctgtccatgcctacgcccaatcctacgaccaccggccctgcctgtgcaatata

SEQ ID NO: 39793 - DNA, 420 bp, Gossypium hirsutum
  Clone ID: LIB3165-044-Q1-K1-B5
gccggcgccgctggttccttcttctctttctttattttttttccatcttttccggtggttttctctttattggccaccacgacttcttcttcagaagccaatagcagtgtcgggaggattagacgcatatccacgggtgtggccgccgttcagaatatagccttgtagctgacactccttgcgcttgtgttttgcccttgcaatttatcatctcctctaccccttgaggatgaagataaaagaagctaatgccggcgcacttaccaatttcgaagtactcggttttctacgatctcgaggggcatcgaaagatccgacaagagttattgttccaatagcaccatctgagttcaaggtttatgattatttggtagagagtgccgcttgcaatcaaacgaaagaacatgtcaaggagttctt

SEQ ID NO: 39794 - DNA, 416 bp, Gossypium hirsutum
  Clone ID: LIB3165-044-Q1-K1-C3
cacactctccgtccggcctgaccgtctaactcccggctcccctattcccagaccgccggtgcgcctccctaaccaaacccacccttctttaaaacccgctaaaatcgagccctggagagccgccgcaatcctccatacgcgacgaccattagccgctcgtgccggttcacgagctgatgactccgctccgttcgagatgtctgttgagaacgcgctcaatctccttggagtctccgaaagagcttcttttgatgatattcttcgcgccaagaattcgattgttgcctctattaaggataaccaagaagctatcgcccaggttgaggctgcatatgacatgttgcttatgaggagcttaacacaacgacgagctggaaaagttgtagacagaagcattagatttgcagatgttaaac

SEQ ID NO: 39795 - DNA, 307 bp, Gossypium hirsutum
  Clone ID: LIB3165-044-Q1-K1-D12
gaagagcatccctccagaccatcagtgtctgattttcgccggaaaacagctagaggacagagagacctttaccgattccaccaacccataggagcccacactacacttcttacttagtatggacaatctgtatgctttagcatcttcatgtttatatcaatttacatcacactcaaacacaacttcatcattctgcataccatattactcttctgttattagacttaattaattcttttttttcttttttttatataaaaatataatttatttatccctttctgtataatcttcttttccttatttc

SEQ ID NO: 39796 - DNA, 415 bp, Gossypium hirsutum
  Clone ID: LIB3165-044-Q1-K1-D8
gggctctattgatcgacccatgaggcttgctgaaatttttgttgctgctgaacatgctctgaagcaaacaatttcaaatcctgatctgctgaaaactttgtcatccatacaggatattgagcaaaaatatatggatctcactaaaggtgctgctgacaattaccatcgttcttggtggaaaaggcatggtgttgtccttgatggtgaaattgcagccgtttgctttaagcgtgggaactttgacctagctgcaaagtcatatgagaaggtttgcgctctttatgctggtgaagggtggcaagatttattggctgaagtactgccgaatttagctgaatgtcaaaagatactcaatgaccaagctggctacctaacatctattgtacgattgctttcactagataaaggtttattc

SEQ ID NO: 39797 - DNA, 409 bp, Gossypium hirsutum
  Clone ID: LIB3165-044-Q1-K1-E1
cccacgcgtccgcccacgcgtccggcatactcgtgaagttgtctacgaacatctaattgttgatggctttattcaggggtataaaaaatggatttttcatggggagtgtacatctagtggaacttcttcaacgattaatccgacttatcctgatactgattaccatcagtatgttagacaagatgacatggaaggtatgttgcgggatgcatttaatttgcacagtcatggtgagcaatcgtttccacctgattttattgcatccgatgattgtaatattggtggaaatgtttttggcgaaacgggaacaagtgcaccttatgaggagccaaatgaagaagccggcaagttctacaatttacttaatgaaatgaacgaagaactttaccgaggatcaaaatattcaaaa

SEQ ID NO: 39798 - DNA, 428 bp, Gossypium hirsutum
  Clone ID: LIB3165-044-Q1-K1-E11
cccacgcgtccgcccacgcgtccgaattcatattctatttaagaaggtcccaatttctcgatgtctttaacagcactcccgacgagactgctttctttcgactgatgctgaatcgtgaaggagttacagattctattgtcatgatccaacccacactcctacaatattctttcgatggacctccggttccggttctcttagacattcgttctatatccccggatgttattttactctttgactcgtacttttgcgtggttattcattatggatccaagattgctcaatggagaaagctcggttacgataaagacccaaatcatgggaatctaagaaagttgtttgaagcaccggagctggatgcaggtcagttggtggcaggacgagttccaccaccgaagcttattaaatgcgaccagcatagcagt

SEQ ID NO: 39799 - DNA, 294 bp, Gossypium hirsutum
  Clone ID: LIB3165-044-Q1-K1-E3
gcggttggttcacggtatgtaacatttccattgaaattccttaccaactaacaccatgaaagagatctctatgtaacatttcctccaaatccctaattctagtaaaaccgggagatggcttggttaacacgattcttgacggcggtggctttctttgccgtcggagtaatattctcgccggagacctttggatcaaaatccgacgacacaatttcacccattctctctacttctattaaactagctcatctcctctgcttcgcaaccggctggggcaccgcccctttgggtcac

SEQ ID NO: 39800 - DNA, 240 bp, Gossypium hirsutum
  Clone ID: LIB3165-044-Q1-K1-F3
tttttgtctaaattccttgcccttggttcctagaaccagacccaaaccccaactcaaagaccccgcggctataccaactggataatgtcgtggtattggccgacttatatccactcacctggccggactcggcgctaaacgtcgcagtgactacacttccagagcagaccaagccgatctcagagctacccagatcaatactctgagtcctgacgactacgcgtgagctgcgactgtcaa

SEQ ID NO: 39801 - DNA, 403 bp, Gossypium hirsutum
  Clone ID: LIB3165-044-Q1-K1-F6
ttcctcccgcctcctcctccacaaccgtcaccagcaccactcctctcctcccccaaaaccacccatggtggcgtcgtcatttccacatgaataattccctctcctccgaactatcaggagcagtgggagacttgggcactttcatcccaattgtcctaactctcaccttggtttcccacttagacctctccacaactctaatcttcactgccctttacaacataaccactggcctacccttccacatccccatgcctgtccaacccatgaaatccatagctgccgttgccgtctccgaaacccctcaccttaccacctcccaaatcgccaccgctggtgcctctactgccgccgtcctcttctttctcggagctaccggtctgatgtcgaaccctttaccgtc

SEQ ID NO: 39802 - DNA, 428 bp, Gossypium hirsutum
  Clone ID: LIB3165-044-Q1-K1-F7
ctcatttccttttcattctctaattaatttaacatatttctctttgccattttccattcatggagacaaccaatgggacatccatcaataaccacaagttcaccatccctgctgtgaacgatgtcgagcaacaacaagcaagcatggaactcgaacccaccgacgatttcaactactcgaaacgatcacaatggctacgagccgcggtcctaggtgccaacgatgggctcgtctccaccgcagccctgatgatgggtgttggtgcagtaaaacaagacattaaagccatgatattaactggttttgctggtctagttgcaggggcttgcagcatggcaataagtgagttcgtttcggtgtattcacagttagatatagaggtggcccagcttaagagagacaagctaagagacgaaaattcagaaaca

SEQ ID NO: 39803 - DNA, 249 bp, Gossypium hirsutum
  Clone ID: LIB3165-044-Q1-K1-G7
cccacgcgtccggtgagactctcacgtatacctgcaacatatagtagtagccagcgataatagcactggcctcctccaagatctaatagcattgcattgccaccgcgaaccgatgattccatggacaggacaacatggtggaccacttcacgggtcttaaatatgtctctgtttttccagcatccttgtatgacaacaaccaccctgacttatcttgcatgcgacggcgtgagagagccatgcatgcca

SEQ ID NO: 39804 - DNA, 366 bp, Gossypium hirsutum
  Clone ID: LIB3165-044-Q1-K1-H2
cgcgtaatttctacataattaacaacattataatgccaaattcaaaccaaccaacttggtactagataagagttcaacctatgtatataccaaacctataggagacaacacttaaagaatttgtacttactcttcaaactttgataaggtgatgaaatctcctgaagtgggcatgggttctattggaacatcgatatgcctcctggcacagcgaaaaaataatttcggtgatcacaacccatggtataagcaagtgacatattaagaatatgagcaccaccattatgtaatactaaacccacaatcaagccttcatcccaacaagaaccatcaacactcaatagctcactgaactccatatctttc

SEQ ID NO: 39805 - DNA, 372 bp, Gossypium hirsutum
  Clone ID: LIB3165-044-Q1-K1-H3
cggttctttggtttcttcaaacccccaaaacaatggcaatctcacttaatacaaatcttcatcacccgtctctgagttgtgggactaaggtttactctggtttgaagcttcaatctccctgtttgtttgcaactggtagaccaaacttgactgcggacttctataccagagttaataagagtctccaatgcggaacgcgaagctgcaaagcaacaaggtcacgagtagggatgatgccaataggaactccaagagttccctatagagttccaggtgaaggaacttggcaatgggttgatttatggaatgcactatatcgagaagccgttatcttcattggacaacatatagatgaggaatttagcaaccaaa

SEQ ID NO: 39806 - DNA, 429 bp, Gossypium hirsutum
  Clone ID: LIB3165-044-Q1-K1-H9
taatgtttcagcttcagctattaaaggatttaaagctacaatacaggtatactgatacaaactacaaagcaactcattgtacttcatttagcaccttttgagggttcctaagctttcaagcaacaaaatttcgttaggataagaggtgagttagaagaagtctgtcatcaatgaatccagcggctgctgctaaccagaaagaagagttcaaattgaaggacacaaaaccgcagctcggggaacgatggcctcatggaggaacacgccgcgggagtggttggattagcagtgaacgagcaacaagcacatatgaccttgttgagcagatgttttatctttatgtcagggttgttaaagccaaagatttgcccactaatcctgttaccggaaccaatgatccttatgtcgaagtgaagctggggaattata

SEQ ID NO: 39807 - DNA, 290 bp, Gossypium hirsutum
  unsure (1)..(290): unsure at all n locations
  Clone ID: LIB3165-045-Q1-K1-A4
gccgttggggctttcccctctttcctttccgccacccgtaacttctttgtacgaaatcatcggcgattgccgncgttgccgtgtatccttctttttcttttcctttctctggttttctttctttgatcttcacgcggcatttttgaagtggttccgagatgaactgaaggagcttgagattggaagtattgacacctgtttttcttattcattcagactccctcactcgaccactcaaaacaatctctcgaccctatgcttatggtctaagaaccaattatttacgacct

SEQ ID NO: 39808 - DNA, 425 bp, Gossypium hirsutum
  Clone ID: LIB3165-045-Q1-K1-D12
gtcccgactgttaccatgtgggcttcatgttattggtgagcctccatctgctatggaagcagttgctacattggtgaatattgctgctttagaccgacctgaagatgggatttcatcactgccatctatattagctgagactgttggaagaaacatagaggatgtgtacagaggaagtgacaaaggcatcttgaaggatgtagagcttctgcggcaaattactgaggcctcacgtggggcaatttctgcctttgtgcagaaaacaaccaacaagaatggtcaagttgttgatgtggctgataagttaagctcgatccttgggtttggtatcaacgagccgtggattcagtatttatcgaacacaaaattttaccgtgcagatagggaaaagcttagagtattatttgagttcctaagtgagtgtt

SEQ ID NO: 39809 - DNA, 356 bp, Gossypium hirsutum
  Clone ID: LIB3165-045-Q1-K1-D2
attccaaaatagaattaatggttccccaacccgttgagggtggttttaaatttggtccaggacaacttgtggaagggattttttggaaccattggattccgaattttgtgaaggaggcccttgattgggaaccaattctttggttgggggtggaatgggtttatttgggaaattcttatttattattttggaaaattattaatttttccgtttacctgatgggattttcattgatttaaattaccagaattaccgaagcctggggtttaattccaaaatgggaacctttaagttttcgattttttaaccccattcttttttcggtagtcgaccgcaaaattaatttgttctgtatt

SEQ ID NO: 39810 - DNA, 441 bp, Gossypium hirsutum
  Clone ID: LIB3165-045-Q1-K1-E12
ccgaacccggagagaaaacccatctttctctttcactctccttgattctatctaccgttcgattgatgaaccaggcggcagtaaaggagaggaaaagctgattttctgcaaagaggctaccatggcaaagaagcacaccagtaaccgttcgtccaaggaagaagaaatggcgagccttcaacgtgcctgcatgatcgaaaaatggatggagaagaaggccgttgatgataaggttgtctttaataggcgaaatcccatggcgggttctcaaagaaactctcgaaacgactttgatcccatgctgttgaactccagctccacctcttctgattctagtggtgggttctcatcctcggagtcggattccttttacggtgcaaaatcaaggtcgtcgtcttcatcatcaagccgttacaccactcataggcctaaacctattcg

SEQ ID NO: 39811 - DNA, 179 bp, Gossypium hirsutum
  unsure (1)..(179): unsure at all n locations
  Clone ID: LIB3165-045-Q1-K1-E3
ccccggggaaggccttggtttcaattgcgggcttgttgcttgttgaagcttaaagttcggtttgggtattttggggctaaagtcggggttaggtatttgaatgggtattaaataaaaaacgatttngccatgttggcccatgtatttggactttgnnnactttaatgtttatttggttt

SEQ ID NO: 39812 - DNA, 279 bp, Gossypium hirsutum
  Clone ID: LIB3165-045-Q1-K1-E4
cgccaatacatacaatgggaaaggtcgaaggcggatcaatgggcgggaaaaactcggactcagggaggccccattttcgagcaaccgagatgaccatgaaactgtgaatatggatacatgctgtgtgacagaaatggaaggtcaatgctgcaaattgaggactgcctgaaagctatgacatgcttaagagactttaagggaataacttaaggagaaaaattatatggcacaaacaaagaatcccctttggctaatgatgtgtttctttgtgtttagtga

SEQ ID NO: 39813 - DNA, 542 bp, Gossypium hirsutum
  unsure (1)..(542): unsure at all n locations
  Clone ID: LIB3165-045-Q1-K1-E9
cacgcccgatccggttttctttttttatttcatgacttttcctcggtatttggtttggtaattcattaacaacccttagatgtcgaggatgacacggnttttttccccactttanttagaacgttgaaaggcttttcttcacgaatcttanttgaaggaaacattcgccacctgggattttcttcnnctttatttnntctttgcttcnntgttaaacctggtgagcgtaagggttattatttnncttttgggtttttgggaagaaatgatcccttgggaaaagaatcgcattgtttgctcccttcattgttcacctcgcgaaaaatatctgctggtttttctttcgagaagaaatacccgagttcnncttttcacctttctctttcnnacttgggttcttcgagagaacgatttcgaaaccattttgaaaagaaaaaaaagcttccctctttttttttttgtgaatcgtcctccaccccacttatgggtgcttaagttaaaatactttagatctggncttcattcttctaagtttttcttat

SEQ ID NO: 39814 - DNA, 162 bp, Gossypium hirsutum
  Clone ID: LIB3165-045-Q1-K1-G2
gtccgataagaaggcctggcccatgggcaacattaactttggcggtggcggttatccattttttaacggccttaaaggcggggccaccggaggttaaggtaggggcaccagccaaggtggaagcttttcaatcccaaaggttaacattaaaggcttccttaa

SEQ ID NO: 39815 - DNA, 182 bp, Gossypium hirsutum
  Clone ID: LIB3165-045-Q1-K1-H2
gcttgggaaaactgttttaattggacctcagtttgcacaattagagctggggtgagccaaagctcccgcctcaatttttatctggtgggaaaattcatttggccgcctttcgagggttcaaccaaaccaatctggcattctcttcatcttttggtcattcattcaaagggcggtggccaaaa

SEQ ID NO: 39816 - DNA, 242 bp, Gossypium hirsutum
  Clone ID: LIB3165-045-Q1-K1-H5
cccacgcgtccgccgaatcatacgaggctctcttctttttatatctcaacctctctttccgttgcccgatttctccgagtctacttcccgtccaaattcggcacctcgctccgcgtacttaccttcgaacacagaaggatcgcgaacggtacctagcgcaagatgggacggccgcgtgacgaagttaggttccgcgggcttgacgagaataaacgggaccgcgatggtaagttgcatcaacg

SEQ ID NO: 39817 - DNA, 243 bp, Gossypium hirsutum
  Clone ID: LIB3165-046-Q1-K1-A10
gttatctataacatacactactactacttacttctagcattgactaccccaatgatgtggattttttccattgccactgctctacccgcacaagctaacatggtccttcctttcatcatcctcaaaccacccatttcttttccaaacatcaagaatgccaccaacaacatctctcttctcacaagcaattacttcacatttcaattatatacaatgtctaccctcccactttaaataacaaaa

SEQ ID NO: 39818 - DNA, 361 bp, Gossypium hirsutum
  unsure (1)..(361): unsure at all n locations
  Clone ID: LIB3165-046-Q1-K1-A4
gaaaacaagaataaagccacatttcatacaaagaacaaatcaaagcaaagaaaaagaaatgggtgggtaaatagaagattcaagaggcctgtaacgatcaacataaagacgactgcgccgacttgattttttggcattataattacaactacaaaaaagagctttcggattttcactcttttgtgtcttcagataaaattgaatgaaaagattaagaagtttcaaactttctattccatatccgtttcagctaatacttgggtgtttttgtttgagctgtacgagatgaaattctcatatacggttctcggngggggggtcctcttggtttacctatctcaataaagtctatgattggttc

SEQ ID NO: 39819 - DNA, 398 bp, Gossypium hirsutum
  Clone ID: LIB3165-046-Q1-K1-B4
gcttattaagccagggtctaagaatttctttaatggtgggttttgaagaaaattagtattaggtgaactgggtttttgtttttgtatttgccttcttcttttttctattatcttttttggatctgggatatgataaaagtttggattttagtggtattttccgggaaaattctggggttgagttctaggatggaattgtagtgaattttatgaagatctggaaggtaaaatattaggcaaaacatggagcctcccaagggatttttagctactttgtggaactttatatgctttcttccttacttcattggcttgcttcttttaagcacaattaaaggaatcattttctgctctccgatatgccttatcatgacaattggaaactcgtccgtcatatt

SEQ ID NO: 39820 - DNA, 371 bp, Gossypium hirsutum
  Clone ID: LIB3165-046-Q1-K1-C3
ggcaaaggtcaacgaaaatctttccaacgcgtgcttgtgcctgacaagatgggtttcaaccgaagcatgacgagtgcgggcgaactatgacaagggtgaacgcctgatgagaccagcgaagcttgctcaagcgaaggtaccgtgacactgacgacgtctttaataagggcacatggttcgcccgcttcattaacgatcttgatgctgacgccgaccgtattgcaggaacctactctatacagcgcgatgacaaccacagagggaatgttacacttatcaacatctgcgttaaccgcaccaaggttcagatcgcccgtatgtacaacatggatgacaacccacttgttgccattatactctctggtgacgat

SEQ ID NO: 39821 - DNA, 421 bp, Gossypium hirsutum
  Clone ID: LIB3165-046-Q1-K1-C9
aattttcatttttttcttctttaaattctctctcgacgcgccaccgtgtactccggcactatcgccgccgctcacgcctaggcgtctcttctataaggattagctctttattagcatttaagagccatgccgacgttcactgcaatagctttggacaggttgatagaacctggaccttccagatctgtcaacaactctggtcctaattcgaaaccacctatcccgaacccaaagcctatccccagcacaaaaatgaagaggagcagcagtacatcagtaacaagtaaggtaaatcgcccccaaatatcaccagccctatatgctactcctgaggcaaccccactgcctgattcaccatcttctttccctccttctccttacatcatcaatcacaagcgtcgtggtcctcgccttttgaaga

SEQ ID NO: 39822 - DNA, 376 bp, Gossypium hirsutum
  unsure (1)..(376): unsure at all n locations
  Clone ID: LIB3165-046-Q1-K1-D2
ccagcntttcgtatagtaagacttattatttccccactcaatgctttttcaatagactggaagtgactgaattctctggacttttatccaactcattcgttacctttgccaaaaattttttatatgcttccttttttcacttgactactacccaacttattcccaaggattgttttataccatcaatattttttatttaagaaacatttgccaaactgaaagattcaatctatataattagactcattatcattaaacttctccaatacttatattttttttaatatactcacctctttcaagtttatttgttttaaaattaccaatgggttttgttaaataatgctttaaaactttcataaaaaaaaaactttca

SEQ ID NO: 39823 - DNA, 407 bp, Gossypium hirsutum
  Clone ID: LIB3165-046-Q1-K1-E3
tgaatctggttggaaggagggcggttgcagtgttagtatagattttttacttcctacttttaaggtctcgccgtcattgggtgccacatagttcttcttttctttatttatgattgcatcagatagaaccatggtggctgcattaaagtaagaatctttttctacgcctaaagtcttgactgactaagaggaggcaagcagacccagagctggatttttagaggcaaatatttttgccaattcttgaaactctctatccccatttatacaagtctgagctacacatattctgcctgaaagattctttggctgtacctttttcattcaaaacatagatatttgggggtcattcccacatacttgcttgattttccaaaaattttttacacgaaacagacaacttaaaa

SEQ ID NO: 39824 - DNA, 308 bp, Gossypium hirsutum
  unsure (1)..(308): unsure at all n locations
  Clone ID: LIB3165-046-Q1-K1-F10
cggnnccggaaacccggggcgacccacgcgnccggcgagacgcnccngaaaaccaggagcaacacgcaacagcaagcaagaagagcaggggccggccccaagagcggagcggcagccaaagccaccgggaaccgccccgccccggcgcaggccaacaaggaggcccccgccaccgggcacaaagccgccacagcgagcccaggcaccaggaaggccaacaacgacagcacgggcgcagcaagcaacggagggagagcgcaaagcaagcagggggggccgccaccagggaagaagaaggccgagacgcg

SEQ ID NO: 39825 - DNA, 392 bp, Gossypium hirsutum
  Clone ID: LIB3165-046-Q1-K1-F9
cccacgcgtccgtctctcctcctctctacaccctccaacctctcctttaaaacccagactgaactctcttagcactccacttcagaacgctgtcgttaccaagagacaacttatcattaatacaactacttccttctccatcatttttggggtccaacaaaacccagttccacaatgtttagctcaaccttctaatccttccaaaccgtcggttttgaacatcgcaaacaccaaagcttggttccagttctatggtgatggttttgccatcagggttcctcctgagtttgaagacatcatggagcctgaggatttcaatgctggagcttccctgtatggggacaaggcatagccgaggccttttgcggcacgatttgcttcaaccgatggat

SEQ ID NO: 39826 - DNA, 383 bp, Gossypium hirsutum
  unsure (1)..(383): unsure at all n locations
  Clone ID: LIB3165-046-Q1-K1-G10
gctatcaagactgctggtttaacttcgttccccgattatttggtattgcacatgaggaagtttgtcatggaggccggctgggtgcctaaaaagcttgatgtctacatagatgtccctgacgtcatagatataagccacattcgcagcaagggccttcaacctggggaagaactgttgccagaggctgctcctgagggtgcggcggaatcaagtcagcctgtggctgatgaagcaattgttgcccagcttgcctcaatgggctttaaccagcttcattgtcagaaagctgccataaacactntaaatgctggtgtggaagaggcaatgaattggttgctttcacacatggatgatccagatatagatgctcctatcctccatga

SEQ ID NO: 39827 - DNA, 418 bp, Gossypium hirsutum
  Clone ID: LIB3165-046-Q1-K1-G12
cccacgcgtccgctttttgccggaatacaaaaccctatcttcttcttcctcttcacttcaccacataccctctcttcccttatccctttccctatccctttcatcaccattacgctgttaatccccatcccaatatctgggtttctgaaggaacccctgaaggagaacggaataataataagaaaccccactctttttcttgccccctttctgactgattcaattttagcctttcgtttcttttgattcaatttatctcttttttttatttttctttttttttaaaaaaaatttgaacctattattctttattaaccctcaaaagatggcgattgcttggtctgaaaccgctgcttcaatggaagctttatctttgtctcctcctatgtccccacccgtcatcctaacccaagacgaa

SEQ ID NO: 39828 - DNA, 400 bp, Gossypium hirsutum
  Clone ID: LIB3165-046-Q1-K1-G6
ctccctctcaaaaaccaaagctcaaaccctcatgctttttcaaggttgattgattaccaggttacaagctgtcatcatcatcatcatcatcatcatggacatattcttcaataaacctaataccatcatggttattgacagcatatgcttcaaaagagcaatctccaccatggatgttgttgaacaatacttaccaagcttctttacaacaatggcttgttgacctctgtcttggtgctatcccacctgagcttatttttaacaatccccccctccccccccccaaaaaaaaagaactacccttttttttattatctcaccatggtttcctcttcttgaccttgtaaggccttttcttgaccttgtaagacccttaccatcacctactacactcaatacc

SEQ ID NO: 39829 - DNA, 157 bp, Gossypium hirsutum
  Clone ID: LIB3165-046-Q1-K1-H5
gaggccgcccacgcgtcgattgatgatttatattgaagttcctttttgttttaattagcaaacagatgcagtgcttgttagactctaaccggaagacacactcttatgcgggagctccgttacgatcgacaacgggaggtcaaaaccaagaaaggaa

SEQ ID NO: 39830 - DNA, 245 bp, Gossypium hirsutum
  Clone ID: LIB3165-046-Q1-K1-H7
acgaccactcgtccagttggcaccattttgtttcttttaaacaatgtcttacgaccagtggcgaggaggtcacagtaaagacaacggctcgttctgcttaccgacgagcagatctgtctattcaaagaggcattcaccctctagctcatggataggtgaagggagcattactgcgacgaagctgggcaccgggatgcgatcgtttaagaccaccctaacttgtagcaatacgcaaaatgttctta

SEQ ID NO: 39831 - DNA, 411 bp, Gossypium hirsutum
  Clone ID: LIB3165-047-Q1-K1-A3
tgcaaccctagcctttttctcttcaatcgtcaagccttaaactcactccttcaagcgccgatcctccctaaggggcgatcaacgcctttaaattttaggggatatttcatagcctcacgattcctttccaacctcgattttgacgaagcgaaacaaaattcgtggctctttctttaggagcagccgtacagaggaacgaagggaggcgcgcatgaaggaggccgtgcatgggactattcgtagggagcccgatcctggctagctgctggtgttttccagaaacctctagggtttctggtgtttgggcctttttcgggtcattttgggtctcgggtttagtttatttgggcttgtattttaatgtttgggttggattttatgtaattgggtcattgacttttatcgttttgg

SEQ ID NO: 39832 - DNA, 297 bp, Gossypium hirsutum
  Clone ID: LIB3165-047-Q1-K1-C12
ctcaaatcaaaacccataaaaccctcaaatcctctaccatggcaattgccagaacgggcgtgtacaccgacgattatttggagtactcaagcaccttcccagctgagcttcaaagacttctcaatacacttcgagaactcgatgaacggctccaatctatgattaatcagacgaggcaacaaactaagtatcgttctggaattgcggcgaacagagggaatggcaataggtatatgaataatggtcatgatgatgaggaaaccgatgagaaaatgaggaaggatatagaggccggtc

SEQ ID NO: 39833 - DNA, 410 bp, Gossypium hirsutum
  Clone ID: LIB3165-047-Q1-K1-C9
gttcggtgttaggttttttgtacgggatggggatgatgcgtgagagaaacaaagctaaagcatttttgaatcattatttcgctgccgaaggtggtaatgcccagtccaagatggctttggcttacacttactcgcgtcaagatatgcatgaaaaagctgttaaattatatgctgaactggcagaaacagcggtaaacagtttcttgatatccaaagattcgccggtaatagaaccgattaggatacacaatggagctgaggagaacaaggaagctttgaagaaatcaagaggtgaagacgatgaagattttcagatattggaatatcaagcacagaaagggaatgccggtgctatgtacaaaatgggtcttttttactatttcggattgagagggttgcgccgtgatcat

SEQ ID NO: 39834 - DNA, 416 bp, Gossypium hirsutum
  Clone ID: LIB3165-047-Q1-K1-D3
cccacgcgtccgccaagttctattacatgctgcctttcaaatgatggagaagaagcccacccttgattctgattggcgttcgtttagagctaaattagtggcaaccgagaaagtttcaagcccttcatcatggattgatcctgatacactagtggaccaacctcctcaacctgttacaattggtgacaaatgggctcacaccatccgtgagcccgaaaaaggttgtctacttatcgctaccaaaaaactcgacggggtccacatttttgagcggacggtgatcctcctcttaaaagcagggtccataggcccattagggatcatactaaatcaatcatcgctcaaatctatcaaagaaataagatcaacaactatccgagatgtctcggaggtgttctctcatgtgccattgttct

SEQ ID NO: 39835 - DNA, 425 bp, Gossypium hirsutum
  Clone ID: LIB3165-047-Q1-K1-D4
cgtccgcccacccgtccggttaattattgaaaccatgggctgcaatcatatgtggctttgtagcagcatgggttctaattggattcaacatgcttgcagccgagttcaagtacgatgacccactagaagcagcccaattacatggaggatgcggcgcgtggggtttactcttcaccgggttgtttgcgacaaaggcctacgtcaacgaggtgtatccggggctgtcagggaggccatatgggatgttcatgggcggtggagggaagctgttaggggctcaaatcattcagattggtcataacagggtgggtgacggccacaatggggccactgttttatgtgctaaaaaagatgaatttgttaaggatttcaagagaggatgaaacagcagggatggacttgactaggcatgggggatttgctta

SEQ ID NO: 39836 - DNA, 310 bp, Gossypium hirsutum
  Clone ID: LIB3165-047-Q1-K1-D7
cgggagatgataaatccaagcatgtctgcttgtcactggttcataactgtattctgaggggctttcccatttgctttggctcttctaatttgggatgtattactctttgagggtgttaagattgtctttaaagttggattggccctttctgaagtactgccattatgatttgataaaattatcctctgaaaaactcattcatgctatgcgtaacttccaagaggattcaatgaatcctgatatatagctgcccatggcttattcattcaaaggatcccgattcttagcagaattttatatcgagtgctat

SEQ ID NO: 39837 - DNA, 271 bp, Gossypium hirsutum
  Clone ID: LIB3165-047-Q1-K1-E11
cccacccgtccgggcagccacttttgcaagcctatcaaccggcgttggccttcgaggcaccgccaccgttatgtcattctcgactatgaaaaccccgctatattgagggcttacaaaatcttgggagacagataggaacccataccggctggatgtagcttgcggaggcaagtttacttgcttcgagagagactgtctacgacaggactttaacgatatcagatctgcactgattggttggatagcaccttatatatataccgaacactca

SEQ ID NO: 39838 - DNA, 338 bp, Gossypium hirsutum
  Clone ID: LIB3165-047-Q1-K1-F1
cccacgcgtccggcgtcggatacgaggtacctttaggacgaagtacaaactccactgctgataacgctattctacttattgcgtggatcttaagcgccgcacctatcctctttgtggacccaagggccacttccgcctgactatccgggcgcaagacattgtcaagaacccagttcgcctgccccggcacatctgtcaaaagatcacacatgtgtgctaagatcagctcttcgagaacaaacttttaatgtcgaacagaaggatggaagcatgttagctgctcttgcacatggctaatacgaacctagaagacgggggctatccatcctacagacctt

SEQ ID NO: 39839 - DNA, 368 bp, Gossypium hirsutum
  Clone ID: LIB3165-047-Q1-K1-G2
cctaattttccacatccacgaaaaaaacccaatagcttatacaactctgtgttactacccgcctgaggccaatccaggacttgattgttttccatctgaaaactctccaacggataaaatgagttcaaaatcaaataacccagaaccaggataccactgtaatgatgagaaaaagagcaaagacggattcgcgactatcttctctagttagcccatgtgagattgtgttgaaaattctaaccaaggatgttaccaatgatcagattacataccctctctcgtactttctcttgcttcctactagtgcaacatattttgaagtttatatctcacaaaagtaacattgcatacactattttacatttgaa

SEQ ID NO: 39840 - DNA, 271 bp, Gossypium hirsutum
  Clone ID: LIB3165-047-Q1-K1-G9
atgacgcgtgggcgcattcagcgcgagcttttaatgggaaatcggtttaaatttcggaaccgaaacgctggggatgacggcaaccttacttaaagctgaaactaccctgatggcctcaataaaagttattttttctttaaaaccgactgcccaccttaggaactgctcaagcggaggtaaggtccaccggtcggaagatgaccgtacttcgcttagctgctcgttccccaccggccgcccttgataagctcaaagatctattgatgctccc

SEQ ID NO: 39841 - DNA, 425 bp, Gossypium hirsutum
  unsure (1)..(425): unsure at all n locations
  Clone ID: LIB3165-047-Q1-K1-H10
aatgaaagcaagcaatccagttgtcatggtccaggcataccgcctccttgttgctgaaatgtacgttcatggctgggattatccattacacttgggagtcactgaagctggagaaggtgaagatggaaggatgaaatccgcgattggcattgggaccctccttcaggatggtttaggtgacacaatcagggtttcactcaccgagccacccgaggaagagatagatccgtgcagaaggatggctgaccttggtatgaaagctgccgaactccagcaaggggtggcaccatttgaggaaaagcacagacattactttgatttccagcgtcgatctggtcaattgccaacacaaaaggaaggcgaagaggtggactttataagtgtcctgcatcgtgatggctcgngtcttatgtcttgttcccttg

SEQ ID NO: 39842 - DNA, 432 bp, Gossypium hirsutum
  Clone ID: LIB3165-048-Q1-K1-A11
cccacgcgtccggaaacaattctaacaatgatggtttcttgcatggatgtctcagagcctgtggcagtcagaatagagggatttagacttgcccaacatttggtggcagatgaacaacgatgcataaaaatgacaagcttatgttctgggcctctaattaaagccattattggaggaatgagagtatggaggttgggctctggaaagggtgtaaatgatctggtgtctttgctagatgaggcctgtcggttggctctaattactcgctggccaggagaacatcacaatcacttttgggagcaagggattgacaaagttcttcttgatctacttcttgaaaattttgacaaacaagcatcggagcacactttgacacctcaggcacgaatctctattgctcagcaaggccttgatactaattttcttattgca

SEQ ID NO: 39843 - DNA, 379 bp, Gossypium hirsutum
  Clone ID: LIB3165-048-Q1-K1-A2
gtctactcttgctcgtacctctctgcttcatttatctcctcttcgttcaacttcttctacgagggataacgcaactgaaagtgttgccatcgagggtcgtaatattaacttctcggtcaatacgaggcaaggcaaaatggtgccaattctcaaggattgttcaattcggattccttccggacagttgtggatgcttcttggacctaatggttgcggtaaatctacccttttaaagatcttggcaggtcttttgacccctacaaacggggctttatacgttaggaggccaaagagctatgtattccaaaatccagaccatcaggttgtgatgcctacagttgaagcagatgttgcatttggcctttggagaataaactta

SEQ ID NO: 39844 - DNA, 276 bp, Gossypium hirsutum
  Clone ID: LIB3165-048-Q1-K1-B4
cccacgcgtccgattataacagggaaaggagcactagcacagttaaacattgagacagggattcgtattagcgacattgaaccccttgttttgttcaacgttgccttcttcttctttgctgctataaatcctgggactggtaaatttgttactgatgaagcggaagaagactagattttcccaagcaatttgtaattaaagtctcaatacttttctctcccctttttttcttcatgtcccttcgttggcatcaatggattacattgctttttaacc

SEQ ID NO: 39845 - DNA, 428 bp, Gossypium hirsutum
  unsure (1)..(428): unsure at all n locations
  Clone ID: LIB3165-048-Q1-K1-B8
ccgccatgtaaatccatgctaaaattgcagactccaagaggtttcaaagcaacacctgttggacaggataactcaacagttgattacagctccacggcctcagtatttccagctgaggcatgcgatacacttggaggagaagcctgtgatgttgagatgttccctgaagtgaagctaaagccagatcaaacacaaagcaataagggtaagacaggttcagagcaggttgacagagaatacttggagtacaacagtcccaagacggtgttcataggagaggcttgtgatgatcttggaggagaattctgtgagcctgagtatcagaaaggagttcaatgattttaccagataaacctcaaaacagtaactgcaaataaataatggggtggtcaccttctttgtaacctgcatactgncttgtgtttctt

SEQ ID NO: 39846 - DNA, 250 bp, Gossypium hirsutum
  Clone ID: LIB3165-048-Q1-K1-C3
gatccggcgcccagctcgtaattggttgacatggggtccgttataccgcctaccggctttctggacatggaccaaccccgattttcaacaaccatcatccacatggcatattacgttgttgtgcggtttgcttaggctaaactcgacgtcggcgtacgggaccggaggtgttcagactcgcagactgaccctggcgtccggtgaaaaaaccgtgcgaatcataccggtcggttgaaggattaaggtcgat

SEQ ID NO: 39847 - DNA, 429 bp, Gossypium hirsutum
  Clone ID: LIB3165-048-Q1-K1-D2
atcatcaggatggccttcggttgttgcagtagttggtaactggttcgggaagaaaaaaagagggctaattatgggcatatggaatgcccacacgtctattgggaacattactggttctttgattgcttcaacactattgagctatggatggggttggtcctttgttgtgcctggtttgcttattgctttcatgggcatcctggtttgtcttcttcttcctgttagtcctgaatcagttggagctgatagacaagaagaagaagaagatgatgcagtagattcccctaagaagaagaaagagggagtaacagagcctctattgcgctcacatactgagatgaaggaaaatgcagtggggttcatagaagcatggcgaatcccaggggttgctccttttgctttttgcctctttcttgccaaattagttgc

SEQ ID NO: 39848 - DNA, 434 bp, Gossypium hirsutum
  Clone ID: LIB3165-048-Q1-K1-G4
cccacgcgtccggacgacaggattacgagatctatcgccaccgccaaattcagtccccgcaacgcttcatccaaatatgacttcgtcaaggtgaaggtctggttgggtgataatgccgatcattattatgttttatccaggtttttgcttagcagaatgttaaccgtcacgaagattccgaatcatgttgcagttaaaatctctcttgagctcaagaagctgcttatagacaacagccttttggatatctcgcagtccgatttagaggctaatctttttaagctgatggagtggcgaggttatggacaggagtacataagccggtacaagatgatgaccagatttcaccatcagagagttcctttggtaattcttgtttgtggaactgcttgtgttgggaagtctactatagctacacaacttgcacagaggct

SEQ ID NO: 39849 - DNA, 321 bp, Gossypium hirsutum
  Clone ID: LIB3165-048-Q1-K1-H4
tccactcattcgtatgatgagtgccagagaattcgaatgtgagaacgccggataaccaaccaaggggatcaggcagaggtaccgcgtggtcaacaacattataaagaaagggataatgtttagcctttttatcaatgaactcgacgctggagccggacccatgggatgaaccacacactacacagtggacaaccaaatggtgaacaccacacttatgaacatcactgataaccacaccaacgttcagttcaccagggtgtacaacacggaagagaaccctattgttaccatcattgttacctggaaccatttctcgacgct

SEQ ID NO: 39850 - DNA, 380 bp, Gossypium hirsutum
  Clone ID: LIB3165-048-Q1-K1-H5
caaaaacaaatacttgagttcacgctctgttcctccctttaatttgggttttcggatcgtgagctgtcgggtttttttctctctccaaaacaatggcggtttcttcgactttttccggtgctaaattggagcgtttgttgatcaattcttgctcatcgccctcggcttcttctttgcgggcttgttctctttctcaccagcaaatgaaggccttttccaagcctaatcgtggcagaaaagctctggctcagaggactggtggagttagatgtgaagttgctcaatccgacgccattaacgaaggcgaaaaactggatccttccaaggcttctgcactctccgctcttgacagctcaagacttccgctgctgacaggtata

SEQ ID NO: 39851 - DNA, 340 bp, Gossypium hirsutum
  Clone ID: LIB3165-048-Q1-K1-H8
gtcaaccctgttaaacgagaagctattgcaactcgcggtggcggattacgagttccgacagtcaatatacaggaaggagttggaggaagtgataaggtggtccaagaataagggtatgagcgacatgggatttggtcgagataaaactacatattgctactttgccattgcttccagcattccactgccatatgactctgaagtgaggatgataattacaaaaagtgcagttgtgataacagttgccgacgatttttatgataccgaagcttctttcgatgaactgaccacccttactcaagctattagaagatgggatgctgagggattgaatgggcac

SEQ ID NO: 39852 - DNA, 274 bp, Gossypium hirsutum
  unsure (1)..(274): unsure at all n locations
  Clone ID: LIB3165-049-Q1-K1-A1
ggcccggggggtggaagatttaatcatggacccgcttgggaaacaaatgacaggtccactgctttcatggttgtcacnatgttggtttttttttttctataaattcctttttcccattaacttttttccatgatgtgtttctcaagattattagacctcattttgtttctctttagagcacgtgcaagtttgttggtgactgctatccttgaatgcttcttgatttggtattatatattactactgctgatataatgaactatatgtttactat

SEQ ID NO: 39853 - DNA, 427 bp, Gossypium hirsutum
  Clone ID: LIB3165-049-Q1-K1-A12
cccacgcgtccgcccaactggaaatagtttatggtgtctttggatacatgcaggtattgtcagcttgcttcatgtcattcgcccatggaggaaatgatgtctcaaatgcaatagggcctctagctggtgcattatcgattcttcaaggtggtgccagcagcgctgagatcgttatcccaaatgatgttcttgcatggggaggattcgggattgttgcagggcttttgatttgggggtatagagtgatagcaactattgggaagaagatcaccgaactcacaccaactagagggtttgcagctgagtttgcagctgcttcggtcgttctctttgcatcaaagctggcattgccgatctcagcaacccatactttggtcggagccgtcatgggagttggctttgcaaggggattaaatagtgttcgagc

SEQ ID NO: 39854 - DNA, 148 bp, Gossypium hirsutum
  Clone ID: LIB3165-049-Q1-K1-C1
atcccactccttttaccgtattttacctaattccgggattcggaggcgggccccggcccttttttttgaacccaaggccgctttcggccggccgatccggccggaaaacattgtagggggggaagttggcttggggcggacatttgtt

SEQ ID NO: 39855 - DNA, 267 bp, Gossypium hirsutum
  Clone ID: LIB3165-049-Q1-K1-C7
ttattttttttttaagacaagaacatagtggagatattataacacaaaaatagaggatgcaaatccacttaaaacacaaaaggaaaacaacattcaattaaaacacaaaggggggatatcctttgtttgtgcccaatatagattatatttctacccttagagcttaaattcccatttagaaagctcctcttttgatagcatagataatagcattatcaagggcagttttactcaaaattttggaagccaattgaaccactcttacat

SEQ ID NO: 39856 - DNA, 411 bp, Gossypium hirsutum
  Clone ID: LIB3165-049-Q1-K1-D7
cccacgcgttcgaaaaaaaaaagaatttattgcttcttccatggctatctttggggagggtgtttccatccttcccatctccgccgtcatcttcctcctcctccgagcttatcgtctccggcgcctccgtctaccgccgggaaacttgggtttacctttcgtcggggagactttacagcttatatctgcttacaagaccgaaaaccccgagccgtttattgatgaaagggcgaaacggcacggttcagtatttacgacccacgtgttcggtgagccgactgtgtattcagccgatccggagacgaaccggttcatcttacaaaacgaagggaagctgttcgagtgtacctacccccggtcgatttcgaatttgctggggaaacattctttgctttggatgaaaggaaacct

SEQ ID NO: 39857 - DNA, 203 bp, Gossypium hirsutum
  Clone ID: LIB3165-049-Q1-K1-E5
ttgcgaagcggcggcgcctttttctcacaattgtcagatagcagtaataaaaatgggtggttggtaattgggggtgtgggctgggggagagagccatccttgggcgctcgtgcgcagcaatatataacacaactggagcgaaaagggtccgataactctatgcctgggaactttcgcttcactctctgatactgcctttatga

SEQ ID NO: 39858 - DNA, 266 bp, Gossypium hirsutum
  unsure (1)..(266): unsure at all n locations
  Clone ID: LIB3165-049-Q1-K1-H12
acgtgaaatatctagggattttcatcatncttcttcttctcatttcctacttctgaagatttcatcttaattgcatgtaaaagaaaaatgccttaggtatgatgaaccgccgcggcatatggtatctcgctctttattgttggttcacttatccgtcaagtgacaacgaacacgttaatctctagggcattgtttatcagatacgggagaatacatgatgtggatatgaagcgcgactatgcatttgttgaattcaacgaccctag

SEQ ID NO: 39859 - DNA, 197 bp, Gossypium hirsutum
  Clone ID: LIB3165-049-Q1-K1-H8
accactcattctgacttctaatactgtttctttttccaaacccaacctatacattgaggcatatttaatgggtgtaggttcctccaaatatctcatgcctacacaacttctctactatccttccctttgtcatgaaaaccttttatgacttacattcactctttgcttttcatacatctactatatgaatcaataat

SEQ ID NO: 39860 - DNA, 300 bp, Gossypium hirsutum
  unsure (1)..(300): unsure at all n locations
  Clone ID: LIB3165-050-Q1-K1-A2
atccgctcacttgtaaatttaaatgtgtaaatttgacattatgttgnnggaagnntaatgtgcaggggtgtacatacttcaattgaatccaataaaatgatttctagactcacaaaattatgctgctctttgttaaaccaattatacgttctagttataattaatcctttgccctcatcttcctactgaacacattgccaagagcatttatcaatgacactgcatcaaaatttgtgcccacatctgggacacgtatggatgtaacaatgaccaccaaaaacattcattgagaatataaaa

SEQ ID NO: 39861 - DNA, 216 bp, Gossypium hirsutum
  Clone ID: LIB3165-050-Q1-K1-A6
tcggccaagccttcgggtgggtttaagaacaaaccaaatttttaaagaaccattctttcaagctgcgtgttttggtcttcaacgaccacacaatttaacttaacggcctggccattgaagcttttaggttttaacccctcggccttattttcaattttttttctaaaccaaaagaatttccggcttgaattattccgtttcccaaccatttcaaaa

SEQ ID NO: 39862 - DNA, 219 bp, Gossypium hirsutum
  Clone ID: LIB3165-050-Q1-K1-A7
ctcacgcgtccggtcgcatacactattatgatctaatactagcgacggtccccagagggagctcagacactaccattggcgctttttcctgaacgggaggtggcaatggcattactctcaacgggctttagtccgcctttgataaagcagccatgaggaacgccaacaacgacattccttctatcggagcaatggcagatgaatgagatgaatgccggt

SEQ ID NO: 39863 - DNA, 216 bp, Gossypium hirsutum
  Clone ID: LIB3165-050-Q1-K1-B7
aacacacctacggtaacatattctacttgtagtttatactagcattgaggaacctggtgaggttatccacaaacattgtcagttcttcttaatcaaaagcatccatcgttactgcttgtcaccggacttaaatctgacaatatgagcttagccatgaggaacgccaacaaccacattgcttgtatcgcagcaatggcagtttacattaattattac

SEQ ID NO: 39864 - DNA, 384 bp, Gossypium hirsutum
  unsure (1)..(384): unsure at all n locations
  Clone ID: LIB3165-050-Q1-K1-C8
attggcaccatccaatgaggatcaagcctatgatcctttccttaccccgatggagaatttcttctcccatgcgattatgaaattggccgtacttctttttgcaatgatattatttgttcagttgaattcgctcatccatggtcgctgtagggagaatccggaacgagcggcggcgactcagttggcgacggtggggttgaataaacgggacttgaaacgaatcccggtggccgtttacaggactggcggcacaagctttacggccaccgactgtcccatttgtcttggagagttcttagatggngaaaaggtacgagtgttaccaaaatgcaaccatggattccatgtgaagtgtatagacaaatggttaatgtcgaagtcatc

SEQ ID NO: 39865 - DNA, 439 bp, Gossypium hirsutum
  Clone ID: LIB3165-050-Q1-K1-E4
gcctatcgtactagtgagtacacttagcaatggccttcttcatgatgtcatcgtcaacgattgcgaccgttaactgttcctccgcctcacaggccaacattgtggcggcctttacttgcctcaagtttgcctctgcttttccagtcactatgaaggccaacgacgacatcacttttcttgctatcaatggcgggagagtgcaatgcatgcacgtgcagccttctcttgggacgaagaagaatgagacactgtcattcttatacgatcttacacttatacagttggctaaggatgaagaagaccatcatcgctctcaatggaaaccttgttcgggattggaattagaagaaggagtcgggcaccggcagtactcgagcttacccacaccctacgactgacactactgcaccatgtggaaactgaccatgtctatgtgcac

SEQ ID NO: 39866 - DNA, 308 bp, Gossypium hirsutum
  Clone ID: LIB3165-050-Q1-K1-E9
gcctgcttcctcttcttcacatcgactttcacccctaaaaaaccatggcagcggcgagggcgataaatcaagctaaatcgactgggtttcaacctcactttacaaagaaggctatttttgcgacaaactccactgacttagccccaccttctgtttttactgccaaaaactcactcacttacaccaaagaaaccgtttccaatgaacaaaacattcgcgtgagaacacttacgctatagagtgatggagctattacagcttatttactccctgcaaaaccccttctagcggaaaagataccacaaaac

SEQ ID NO: 39867 - DNA, 127 bp, Gossypium hirsutum
  Clone ID: LIB3165-050-Q1-K1-F2
ataagtaatctcaatcaagcaggatttttttcaaccagtacatcccaatccggaccgaaaagtaggatccagagcttataatacattcaccacagcgggaaagaaaccatatcatgaaatctccatc

SEQ ID NO: 39868 - DNA, 308 bp, Gossypium hirsutum
  Clone ID: LIB3165-050-Q1-K1-F3
atgtccttaagtagcagtctttaatgtttaaacgcgctagtaattggtgataacgtatttgctttgtcgattatatcttttcgattaaggaaataaaaaaattttaaacgctacctttgaaaaattccattctccctaataaagtcaaaaatcaaagcttcggtatataaaaacgaaaaagaatgttgtattgttaagaagcaaaaaatcgaacatcggatgaacagatctgtctatcgttggtccagcttaattttaagaaaaatggccgaagaaatcaataaatccgagattcgatcatccccgtc

SEQ ID NO: 39869 - DNA, 321 bp, Gossypium hirsutum
  Clone ID: LIB3165-050-Q1-K1-F4
tttagctatagcatacactactagtacccactactagcaatggcttcctcaatgatctcatcggctgccattgccactgcctctccggcacaggctaacatggtcgctactttcaccgccctgatgtctgcctctgctttgcgagtgaccacgaaggccaacaacgacaatacttgtctcataggctgcgggcggagcttgcagtgcatggccgagggaactggtactattaagaaccggtgaaagactcttgttgggaagaactttgttagagtatgaccctttggtaatgtgattattgaattagaaggataatgttta

SEQ ID NO: 39870 - DNA, 246 bp, Gossypium hirsutum
  Clone ID: LIB3165-050-Q1-K1-F5
cccacgcgtccggaaaccttcactactacactcaaataatggccttgacagcttcaatgatcacagccgctaccaccaccactgtccttccggccacgctaacatgaaaacctctttttacctgccttaaaaccaactttgctttgggctaaaacacgaacgaaaaggacgacataccatggctgcctacaaagggacactgataacaccgcatggaccccaagacttctagtgcacagacgacgt

SEQ ID NO: 39871 - DNA, 178 bp, Gossypium hirsutum
  Clone ID: LIB3165-050-Q1-K1-F9
accacgcgtccggttagctattgcatacactatttgtacccactactagcaatggctagctcaatgatctcatcggctaccattgccactgcctgcccggcacaaggtaacatgggctgttcgttcagcggactgaaagctgactctgcgttcccagtcatgaggaaggccaactacg

SEQ ID NO: 39872 - DNA, 206 bp, Gossypium hirsutum
  Clone ID: LIB3165-050-Q1-K1-G4
ctttatcggggtttctgccgatttgcatcatcatcatcagcatcaacctccgatcgtctatctctatgtaagcgtcatattttcgttacaacaaatgtcttggaatggatgttgctctccgcctggggggcctggctgaagaagaggctcacctgaattgtacaaacagcagaagggggagggcggtttgtttctattacaaggaa

SEQ ID NO: 39873 - DNA, 119 bp, Gossypium hirsutum
  Clone ID: LIB3165-050-Q1-K1-H1
gccacccgtccgatccaccaaacttatagtacgtattataaacttcggcatcctcaacggtctgggctgctaacaatggcagtggctctccagcataatctactatacaacattctttt

SEQ ID NO: 39874 - DNA, 362 bp, Gossypium hirsutum
  Clone ID: LIB3165-050-Q1-K1-H5
aattcccgcgccgaccccgcgccccctttgtctgacttacttgcttgtacttgttaacgtttttgtaggaacccctccttccggctggtgctgttctttgctttatggattgactaatcagcaagcagtccttagcctttacactgtcataaaagccaatgttctaggaattaaccttaacattccaactgttataaaattaatccttagtgcatatttgtaggaggttccttcattctataaatgtgattaaaaaagatatattatcatttcgttggctaaagtttgttctaagttactttcatttctagtgattctcgttggtttttaagtcggatatatattgttttttttttgccatt

SEQ ID NO: 39875 - DNA, 215 bp, Gossypium hirsutum
  Clone ID: LIB3165-051-Q1-K1-A1
gcgatcgcttttgtcaagcgaatgcgctactagctggtcctgtcaccatcaggtgtgacatcaggaccatggctgtcaggtctccagagcgtttttaaggccttcggtttggagcctgttggtgctaggctcacctgctctttcaaactgacctcaaggacttggctcagacgtgtgttgatgctaccaagctcgctggtttcgctcttgctaca

SEQ ID NO: 39876 - DNA, 418 bp, Gossypium hirsutum
  Clone ID: LIB3165-051-Q1-K1-A12
gtagagaacgtcgttctgaaagagtaaattggcgcagggagagagagaggcattgcgggtcgctgtctctctcaaaggtcaaaactttctctctccaaccccaaaaacacgctacttgttttctctctctatcccatcgattcaatttctttgaaaaaaaaagaagcttacagatcgaaaccttaactttcgatctctctcacacatttccttcgatcgaggtagctcgtttacaatttgatttctctatgttaaaacaaaaccctagttttctctctgaatttccgaagtttagcacaaaaccctagaaattctcatttcgatttaattagcgcttttatttgattaaatactcgggatgatatatatgcttaggagatgctgattttttaccgaaatatccttttggttcaaatcg

SEQ ID NO: 39877 - DNA, 294 bp, Gossypium hirsutum
  Clone ID: LIB3165-051-Q1-K1-A8
gactccaacttctaagctcaacctatacttgtctgttgcttaagtaccataccgctggggcgtgtgcacctggtttaccattgccatcatgaactgctccttctaaccccaggccaacatgaaggccgattacactggccttgagtctcactctgctctcccaatcactaggaacgccaacaacaacatcactaacattgcaagcaatggcgggagagtgcaatgcatgcaggctacagctctgctcttgggaagaataagatcgagacactctcataccttccctatcttaca

SEQ ID NO: 39878 - DNA, 408 bp, Gossypium hirsutum
  Clone ID: LIB3165-051-Q1-K1-B11
gtcccttttaatttttttctctctttcattttgagggctaaaaacattgcctcaaatccaacccccccttttttttccactcccaaaaaacaaaataagaaaaaaaaaatccaatctttatctatcttctataagatttataatttaattattttttccttgtttctatagagttttaattattttttccttgtttttatagtgttattatagtgttaatcgcctggtatagattcttctccaagtgactctcattttctagctcaatttgttttttaggctcatctgccacaaaaccaacatcttttggccatatagtgtttcttgcctttgaaaaaaaaaaaacaatcaaagatgttttttttcatttttttcctctatggtattagataaagttggtaactttag

SEQ ID NO: 39879 - DNA, 263 bp, Gossypium hirsutum
  Clone ID: LIB3165-051-Q1-K1-B6
ggcagacttttttgcttacctgatccttgtcaacatcgggctcagatttagcaccggcctccttcttgatactatcgctaaccattgacaccggaaaccgctccttcccggtgcaggccaacatggtggacccctacaccgggctaaaattggactctgctctcccagtcaccacgaggggcatcaccgacttaatttctattgcaagcgactacggtagagagcagtgcatgcagaaacagccgcctatcgggaagaagaag

SEQ ID NO: 39880 - DNA, 275 bp, Gossypium hirsutum
  Clone ID: LIB3165-051-Q1-K1-C10
gccacacggtcgactactggtacggactattttcactggcggccttacagggctcagagggatccattggcacagtctatggttctacatgctgacatggattcacttttgaccgagattagagctgcctgtgcttgaccaacggcatgaacgacaacatctgacacccttgggtggtgggcgatggcatgccactgcaaagcacgcaggagagacctgctacagtaaagaagaaattagaaactttctgatacctacccgatcgtacaccggct

SEQ ID NO: 39881 - DNA, 145 bp, Gossypium hirsutum
  Clone ID: LIB3165-051-Q1-K1-C12
gtcacccttattttaatacatgaaataaaatcgtatgaatggatctaactatgacacacgtgactatgcatttagttgagataaaagacagtttaccttaaaatgtatctttgtgctcctaggcggaatactaaacatgactatg

SEQ ID NO: 39882 - DNA, 157 bp, Gossypium hirsutum
  Clone ID: LIB3165-051-Q1-K1-C2
ccctgccgatggcttaaaatactcatattatgcttgttgggatggccaatgcttttaccgtgcgtgattatgtatctgttacaacctgtatacgctgtaataaatgaataaccgaattgttcaaaaaactttattacctatacttaaatggcgaatt

SEQ ID NO: 39883 - DNA, 310 bp, Gossypium hirsutum
  Clone ID: LIB3165-051-Q1-K1-C3
ctcttgtgctatttatacttatctttgatacttcttttgaacccgccgggagatcattcgattgttgtttttaccaaattcctcactgggtctggctttcttggattccacagctcttactttcattgcataggactgaagctccttattgcatactcgagcttcttaaaattgctactgtttatccgcaggctctatattactggctccttacatatttttttgagctcctcgatgtttcaaattaatcaaatctttgccgaatgaccatttttcagctaattatgcattacactattggatgtatttt

SEQ ID NO: 39884 - DNA, 418 bp, Gossypium hirsutum
  Clone ID: LIB3165-051-Q1-K1-D5
atggcatgttttcgcctcttaattttcctctatcgcagcccctggagaaaaagatagaagggtgatttgtcttgcaagaatgattggtttttaacttgttatatataaatattctttatagcccgtaaatcttataagcttgagtgaagttttctggccttactgttggttatttatggatgcattatttttaagataggtagaagcttaggggtagtatattgacaatcataatcactagggattgattctcgatattgcgtaaagtctcttcttaatggaaagggattaactatttgggttaaacttgggggatcattatgtatgatttaaagtgttcctaggcagatcagactcgatttaaacattaggttttgtggttctttatttaaatcttgtaaagtggccgaataaattt

SEQ ID NO: 39885 - DNA, 417 bp, Gossypium hirsutum
  unsure (1)..(417): unsure at all n locations
  Clone ID: LIB3165-051-Q1-K1-D6
cttatcttcctcctcttttccctcttataattcttccccctcaccattttcttttggtttctagaaaaaaaaacccagatttttctttcatttctgaagtgaattaagcaaaaaaaaaaagatgaagaaaacccttttggactctntttaatattgtatattgaattatcatcgtttttatagaaaacccaatatgttcttatagaacagttcatttgttgtaattgataaacaaaaagtgaagagaaaaaaaaaatcatttttgtattgaataagtcaaaacccagttcagctttctcggtaaacaaacatggcatcggtgtttttataccatgtagtgggtgatctaacggtggggaagccagaattggaagaattttatgaaacagaaacgattggatcagctataagagcaat

SEQ ID NO: 39886 - DNA, 255 bp, Gossypium hirsutum
  Clone ID: LIB3165-051-Q1-K1-D7
ggctttttcttccccatcattcgccggttatgttgtgaagttctccccttccacccctgagatcctaagaactggccgtttttccatgaagaaaaccaccaaacctgtcccttatggtatcccatggtacggtccttacctatttttatacttgggtccacttaccggtgagccactatatcacatgaccagagagttctcttgtgacaatggcttggacacttctatactcttaactgatccctaaacctttgc

SEQ ID NO: 39887 - DNA, 359 bp, Gossypium hirsutum
  Clone ID: LIB3165-051-Q1-K1-D9
acaatctccagctgccaaggtaaatatgccgatcagaaacataccggctggccgggccgaagaggctactgaccccgatgctctcaaggctgctttggctgaattcatctcaacctggagactcatgtaattctggagagggctcaagaatggcactataacaagtgcgactgacaacggagcaaccaccccggaatggtctcgtagccgacggtctagctcatgggtccagtcttttcactcctggctccgaaggccccaacatgttaagtggcacacgtaaaccctgacgacaccttcagtgcttttgatggcagaaacatcactctcgtgcgcggaatcatgtactggatcggcca

SEQ ID NO: 39888 - DNA, 129 bp, Gossypium hirsutum
  Clone ID: LIB3165-051-Q1-K1-F10
gatagatatgtctaaacgacttcaatactttttttaaatcaactacactctactggggggattccaaatagcatcaatggaaccccctataactcactataacactaaggggtatcttgctttcattct

SEQ ID NO: 39889 - DNA, 411 bp, Gossypium hirsutum
  Clone ID: LIB3165-051-Q1-K1-F4
ggccactgacgcttcaccccagctccggtccgtgccacctccttcagactttcaccctgaaatctcactttcccagtcgccaacccacgatggccttcacttttggcaattcatgatcgctggctccatagccggcaccctcgagcacatggctatgtttcctctcgacacacttaagacacgcatgcaagctcttggcgcttcatgttcggttcaacccgtcagcgttcgtcaagccctcggttccatcttaaagctagaaggtcctcccggtctttaccgtggtatagctgcaatggggcttggcgcaggacctgcacatgcagtttacttttctgtttacgagctatctaagcaagttttgtcccgtggtgatccgaataactcaatggttcacgctgcttctggcgt

SEQ ID NO: 39890 - DNA, 324 bp, Gossypium hirsutum
  Clone ID: LIB3165-051-Q1-K1-F6
aaagcactgaaaacgccaaaccatggtctctgcttctttccttatgactttaccagctacagacatggctcagagggttgagggtcacaccctacgacaaccgtctacttctgcggagaggcgccgccttgtggcaccctctggactaacatgacgtgcatagctcatatgcctatgagcatgtgcaagactgctatagctactgcttgtcctggacggggaatttgggccatggatgactacaacgctacctgcaggaaacgatcggcctccagcggactaaaacacacactagcttaccgtcaagcctacaagactgcgctt

SEQ ID NO: 39891 - DNA, 418 bp, Gossypium hirsutum
  Clone ID: LIB3165-051-Q1-K1-G2
actaaatgtgctggaaatgtcaactgttatatttaacatgatagtattattataaatggtttactaattaatcttaaaagagtgatcccgaataagttctagtcttactgtgaccttgttccagcaacagacgggcttgggttaagctgaattgtctttgttgactttattattaacgatcaagaaagggtagtggatcacccttttcctctttccttctcttttcgtttttcttcagaaacgtagggctctctcgttataatttggtgggttcagtggttttaagggtggctttagtggtggtaatgttggacgattctctgccttcctcttgcagagaggcttgatgaagctcgttttgtggcttttctatcttatcctgcgacagggtggtggttgccgtggaaggttcggtcat

SEQ ID NO: 39892 - DNA, 300 bp, Gossypium hirsutum
  Clone ID: LIB3165-051-Q1-K1-G8
ttctactgttctcctcaccagggtgcaggtatcgttgtaaaattcacagctaactgtgttgtacatatatcatgggaacgcctctgtgctttgtatgtatcatctcacacatcgtttctactttatgagcactagagttaagagtattggggatggatgaggtgattatgaacaatcaacaatggggcgttgatcaccctctatcttgtactttaaattttgctcatatttgcgagacacctggctttatctttacacttcaacatctcatctgtagtaacgcaacatataatggagttt

SEQ ID NO: 39893 - DNA, 362 bp, Gossypium hirsutum
  Clone ID: LIB3165-051-Q1-K1-H10
cccacgcgtccgttctctcaagacctgctcttaactgctcccaagcctcaatctcaatcgtctgaccttcccgaaggcagccaatggaggtacagtgagttcttgaacgcagtcaagaaggggaaagtggagagagtcaggttcagcaaagacggttccgtcctccaactctccgccgttgatggtcgtcgagcctctgtgattgtccccaatgaccccgatctcatcgacattttagccatgaatggtgtcgatatttcggtgtccgagggtgaatccgctaataggctttttaactttattgggaatttgcttttcccttttcttgcatttgcccgattgttctttctctttccgtcggc

SEQ ID NO: 39894 - DNA, 415 bp, Gossypium hirsutum
  Clone ID: LIB3165-051-Q1-K1-H7
cccacgcgtccgcccacgcgtccgatccccaattcttatccagaaaaccctaattttgtgaattttctaataaatcttattttcgtttcctttaattttgattttaataactcaagctcataacccatctgaaaaagaagaaaaaggaaatgagcaatctgaggactgtttgtagaccacacatggtcttcacttcattgatgtgtagtagcaggcaccactacctccatcaagctcgatccagaactagagttgcctttcgaaaccctgattttaggtcatcttccttctctccgtggcttcatttgtccagagatttgaggaggaaggagccttggtttcgggtcaatcaaagaagaactgtcgttagggcatcgaattggtccgatcaaaagtctccctatgaaactcttga

SEQ ID NO: 39895 - DNA, 326 bp, Gossypium hirsutum
  Clone ID: LIB3165-052-Q1-K1-A10
ggcacttaaactcgcgatctatacccggacgtatgggcgagggtcagtcccacgatgagggggacggcactgtggtcgccgcaaaaccctgggcgcaagcccgagcggagcgtccgtcggtgcatatcttgttggtattagcaaatatttaaatgagaactttcacggcaacttagggggaaggatccgtgtgaacgggtcttgcacctgcgttattccatcctaagagacgtggtaagaccctgcgacagcacgtccaacacgtgcttcaaaaggatatcggactgaaattcctgaaccgtacacacggacgttgacatctatgc

SEQ ID NO: 39896 - DNA, 417 bp, Gossypium hirsutum
  Clone ID: LIB3165-052-Q1-K1-B5
agccttccgccaacccttccgccaacccgtccgcccacgcgtccgaaaaaaatgaggggctgcacctgcttctcctttccttcatcccctccaattttctccttttacagtaatagcaataatcgtttctcttcttcttcttcactgttattttcatcagcctctcacaactgctctgtgaaactgtcccctctcctcttcgccaagtccacgcgcttcagaacaaattgcaaagccaaagatcccgaagttgtggactgcgtagggacgggcctggacgtggagtgcctcgtctctcaaaacgagaaacaagatttggaaatagaagatgttgaaaaggcggaaagcaacattttgttggagtgggcagtgctcgtttctccattcttcttctggggcaccgcaatggtggcaatg

SEQ ID NO: 39897 - DNA, 218 bp, Gossypium hirsutum
  Clone ID: LIB3165-052-Q1-K1-C5
tcggttaacctttcctttcatctttctgtaccagtgaatgcccaagggtaatcacccgctagtgggacaccggctcacctaccgtcagaccaaatctttggacaagaatagtcaacgtttctcatgcttcggctaactcaatcggtcacgtcggcgaatgccagaacctaatatcgcgcaggcaactaaggccctcctggctaatctaatgctcgtca

SEQ ID NO: 39898 - DNA, 429 bp, Gossypium hirsutum
  Clone ID: LIB3165-052-Q1-K1-E1
agccttccgttcaatattgggaattattccctggtttttaacttccaaacaacaataaataacccgtcttcgctaccatcgtccaccactaacgaccgtccgtgtcagtgctgcaaccgtcactacaaccaccgggatgccagaccaccaccacccttcactctaaattactggtggaggagctgatcgctttatccctgctttaacacccttaaccttgcttacaaacctttccgcatgattgggtggaaccgtcatgttgagaccatatttgctgccttcttacgtactgtccccgaagataagtaccgccgtgtgtgcctgcggacccaatacaatggcaccatagccttggattgggtctatggcgaccaccggaggtagtcttgcgactctacgattctcattttactgccagcgctaactgga

SEQ ID NO: 39899 - DNA, 449 bp, Gossypium hirsutum
  Clone ID: LIB3165-052-Q1-K1-E2
ccacgcgtccgcccacgcgtccgcaatacctcccataatcacctttgatctttgcacttaccttcaatcaggtgcgaattttgttgctgtcgttatatattttctcgagaagagcacccaaaaattccaagaaaagttgcatccctgaaccatctggttcattgccactcatcggtcacctccatctactaggtgggaaaaagccaacctgcaagaagctagcaacaatggcagacaaacacggcccactctactcactcaaactcggaacccaccgagtgttggtggtgagcagttgggaaatcgccaaggattgcttcacggacaatgaccgaaccctggctactcgagctagcatcgctgctgggcggcacatgggttacaacaatgcggtcatggcactcgccccatacggcgaatattggcgtaacatccgtaagatagccacg

SEQ ID NO: 39900 - DNA, 437 bp, Gossypium hirsutum
  Clone ID: LIB3165-052-Q1-K1-E5
cccacgcgtccgcccacgcgtccggtggagtcagtaaacactcctccagcataagcaaatgggtgagctaacaatttcgggacactgaattatgccgttaggccatttaccagaaagagaactttggggagggatgctcaaaatctgcttgattatttcaagaagatgcaggcatagaaccctggtttcttttatgcaatacagttggatgatgataatcaaatggctaatgcattttgggctgatgcaaggtcaaggacagcctacacacattttggtgatgctgtgaaactggacaccagttacagagtaaaccactatagggtgccatttgctccattttcagggatgaaccatcatggccagaccattttgtttggttgtgctgtactactagatgattccgaggcttcttttgtttggcttttcaaaacatt

SEQ ID NO: 39901 - DNA, 383 bp, Gossypium hirsutum
  unsure (1)..(383): unsure at all n locations
  Clone ID: LIB3165-052-Q1-K1-E6
ggatagccttgtgtcactccccacctcacactgtcactcacctcttttcacctcaaagccgcggtcttcctccgccaccaccaccacctncacctccgtttccttctcccttccaccaccacctcaacctcccgaacctaatatccgccgccccaagtccatcaatccctcccccaaacccaaaatctcttccaatcccctcaaaaacttctccactactactcctactcctactactaccaataacaatttttctcatgtcccttctcctggtgaaactacaagaaccactcaatctcttgtctccaaacttcgcctctctagcaaactcttnccgcctnctccacctncgnctnttctacatgatacccgaaaggcaactc

SEQ ID NO: 39902 - DNA, 397 bp, Gossypium hirsutum
  unsure (1)..(397): unsure at all n locations
  Clone ID: LIB3165-052-Q1-K1-E7
gactggccttgtgttactccccacctcacactgtaactcacagctttacacctgacagtggcactcttcctacgtcgccaccaccacactaacctgcggttgcttttccgtgccaacatgacctcaaacttacgaacctaatatgcggcggcccaagtacaacaatccgtccgccaaacccaaaatctctttcaatctccctgagagactactacactactactcctactactactactaccaataacaaggtgcttaatgtccctacctatgccgaaactacaagaaccagtcaatctcttgtctacaaacatggcctgtctagcaaactataaccgcctgctccagctccgnctgttctacatgatacccgaaaggcaactgaaatttctgaacc

SEQ ID NO: 39903 - DNA, 430 bp, Gossypium hirsutum
  Clone ID: LIB3165-052-Q1-K1-F8
cccacgcgtccggaagaaggttcatcgtcgcctttggcgatggaaatgcgagacatcggcgatctgccgaagaacgccgccaactacacggcgttgacgcctttgtggttcttggaacgagccgccaccgttcatcctgctaggaaagcggtggtccatgggtctcgtacttttacttggctgcaaacttaccagcgctgccgtcgcttggcttctgctctctctaacctctccgtcggcttcggtagcacggtagcagtaatcgcgccaaacgtccctgctgcatacgaagctcacttcggaattccaatgtctggtgctgttataaaccctgtcaatattaggctaaatgcatcaaccgttgcattccttttgggtcactctcaatcagccgtcgtcattgtcgaccaagagtttttcactttggcag

SEQ ID NO: 39904 - DNA, 337 bp, Gossypium hirsutum
  Clone ID: LIB3165-052-Q1-K1-G12
gaagccatggccagcctgagaatggcttactcaactcctgtaatctacattggtgagagatgatccttttttggcaaacccagactcaaacaaagaccacaactgtgccttccaaaacttcccacaacaaacttcttgataatctcacagatgccctgactgtatccaccactctcaaatctatatgaatattgacactcaccactttatccttggccaacccttttcttgctgcaaaaatagaaaaggccgatcttttgaagctcaacttaaccctgcccatcatgatgaaccaactcttaggcctcatgattgctcttgacatggtctactttac

SEQ ID NO: 39905 - DNA, 325 bp, Gossypium hirsutum
  unsure (1)..(325): unsure at all n locations
  Clone ID: LIB3165-052-Q1-K1-G5
cggnccggaannccggggcgaccaagccttccgcaaacgggtaaaggaaattacgttcttggttcaaaatgggaacctaacccggaaaaccatggggaagagggattttagaactgtaaattctcaagcttaccgagttactaaaatggacacatgtgtaacatgtttgagctgcccatgtttggatagcacagactcgtttcagatgctggaagatctggtataactaaataaggcatacacaattgcataaattataattagtggatccaacaacatgcaacaagagctgtgcataaaccgcattgagaaaaagtcttcatac

SEQ ID NO: 39906 - DNA, 429 bp, Gossypium hirsutum
  Clone ID: LIB3165-052-Q1-K1-H8
catgtctcctcaacccgacccatgcctgactccatttgtagcatctgctggcgaatgggggccttcttgctgcacttccggagaaaacaattgctgaggaaacgccttttgcttcttattctggtctccagatcaagcgtttgttttctcttttgaatatccgatttgagtttttggatgggggaaaattataacgagctgaaaaaatcaacggcttcacaaaccgttctaaccgacgttgttttgggctgggtgattctatacatcgacgacccggaggaccggagcgccgtttccctcgtttgtcggcgttggtacgagctcgacgcgttgacacgtaagcacgtcacggttgcgctttgttacacgacgagtcccgaacggttgctgcggccgttcccacacttggaatcgttgaaatcgaaagga

SEQ ID NO: 39907 - DNA, 305 bp, Gossypium hirsutum
  Clone ID: LIB3165-053-Q1-K1-A11
tctaagaaacgtaaacaaaatccttcaagaaaacttttggagatggaacttgctgggagatgcgtgccaaaatatcttcttctttgcattttagcgttggttgaaggaggaaggagatgaagagttgtgagctcttgtatgtagcggcgacaacattttgagaatcggaccaagccagattgtgctgggattgtgacgctgtagtccacggcgcttacttccttgaggcaagacatgtgaggttgttgttctgtcacgcttagtattatcttactccgtggatagtcactggtttcaagcttggt

SEQ ID NO: 39908 - DNA, 240 bp, Gossypium hirsutum
  Clone ID: LIB3165-053-Q1-K1-A12
tatgttaggtttcttttttgagtggtttttattttgcccgtcttgctttctgcaggtacagggttaaaccatcaacccttctgattttggttgaaccaacttatcatctggatttaccctttatcagatatgctagaggaggctattatggaatacatcggcactgtcactatctgttcgcatgaccgatactttatttggcagatagtcaacagagtactgggagtaaaagatggtcat

SEQ ID NO: 39909 - DNA, 415 bp, Gossypium hirsutum
  Clone ID: LIB3165-053-Q1-K1-A5
gaattaattttacaccccacaccagctgttaggcacgttttgatttgcgcaattgggatccattttttccaacaagcgataggcttggagtctgttgttttgtacagtccaaggatttttgaaaaagctgggatcacatcgtcagatcataagctacttgccaccatggccgttggattttccaagacaacctttatcttagtggccacatttttactagacaaaatcggacgacgtccgttgctcctcatcagttctggcggcatggtcgttatattggctacactagggctttcattaaccgtcattggtcattcggacaagaaacaaacttgggccgtcggattgtgcattaccatggttttatcttctgtggcagtttttttcgatagggatgggacctattacgtgggtt

SEQ ID NO: 39910 - DNA, 286 bp, Gossypium hirsutum
  Clone ID: LIB3165-053-Q1-K1-A7
actcgtctttcgtagacaaatcatttcccaaacggggggggtttctctgggccgtggaactctctcttctctcccattgccagctaagtccgaggaagttttgtcggaatgggaaagagtctaccttcccatcgatcccggtgctgtccttctagacatcgcctttgaccctgatgacttaaaccatggatttttgctggggacgaggcatactattttggagacaaaagatgggggaaatacatggactcaacgttcaattctctttgctgaggatgatgacttc

SEQ ID NO: 39911 - DNA, 225 bp, Gossypium hirsutum
  Clone ID: LIB3165-053-Q1-K1-B7
gccaaaactagtgtttgttgaactttttacactgttctgatctccccctttcgtgtgggtgttctgtttcagttccatctatatttccatggatcttacacctcaacaacttatccatatcaacggcttctacccatccaatcccatctactatgtaatcaatggtctcatctactatgtcaccgcctgcaaatccttctacagtcctggtgtgtgcctacgcca

SEQ ID NO: 39912 - DNA, 430 bp, Gossypium hirsutum
  Clone ID: LIB3165-053-Q1-K1-C3
ggagaaacaaattactggtggaaacaattgtatgcttattgccttcagataagggtgtgaggtggtcatgtagtttcttgctgaagctgttgaaagttgccattttggttggggtggatgattcagcgagggaagatttaatgaataggataattttaaagttgcatgaagcttctgtcaaggatttattaatcccagcacggtcttctcaaacaaccatttatgatgttgggatggtgcattctatttgtgaatcagtgtatgatcaataagaagtgcagtcaagatttggatcttggaaagaatgatgtgggatgtactgatttttgttctacggcatggatcattgttgagtgttggtaaagtgattgatgggtattttgtaaaaatttgacgagatccgtatttttccttgtcagtttcattgtct

SEQ ID NO: 39913 - DNA, 207 bp, Gossypium hirsutum
  Clone ID: LIB3165-053-Q1-K1-C7
aaaattaaaatgatctccatcaagttaatgcatttttattacctcagtttaatgttttcaacccaagaaaaccggaacttttattccctttgtttccttattctgtttgcttgaaagctaatgttcctgtttccaataaattgattgaaagttcatctattattttttcatcaattatgctcctttaattgaaaaataagatatttt

SEQ ID NO: 39914 - DNA, 368 bp, Gossypium hirsutum
  Clone ID: LIB3165-053-Q1-K1-D10
tcgcccacgcgtccgcccacgcgtccgtctacgcttctggagatagtgaagcaaatgattcagattctggaactgctattcctacacaaagcaatatagtttccgtttgataatgaagcaaattactccgattccgaaattgctattcctacacgaagcaatatagtttttttctgatggctctgtgctaattgccaagcattattgtccgtgcaaatatggccactgtttcagctagatctcgataattaagttccttcaaagttgtgctatatgtacagatatcattcttgccttagtctgtatacttggttatgttcttcttattcctttggtttgagtacttttgcatgatattaccttttcat

SEQ ID NO: 39915 - DNA, 192 bp, Gossypium hirsutum
  Clone ID: LIB3165-053-Q1-K1-D7
tccctcgcgtcactccacacgtacgcttactcttttctgcttctatcgttattgcgggggttgtcatctcatacaccatctcccataatattgtatcaatataggtgacaacaaaggcttctttcctgacacgtaataaactttatactgttataaagttcacaaaaccagctgtcggaccaacaattacat

SEQ ID NO: 39916 - DNA, 194 bp, Gossypium hirsutum
  Clone ID: LIB3165-053-Q1-K1-E10
tccggggcgacccagcgtcgaggcctgagaagtgggcttctctactgccatgccctcaaaattttgtgctccaccaatgcccctgttttccctctcagagcttttcactgttttggatggttgaaatatgctgatacatgaatggtgaatcactaagccagttctccatgcatactgaccatgctcagaccatt

SEQ ID NO: 39917 - DNA, 306 bp, Gossypium hirsutum
  Clone ID: LIB3165-053-Q1-K1-E6
gttttctttccttttaattgaagattggagtgccaagggttaagttccaatttagttttctgctggcatggatcctagcaggacaaggagctagccatacccagagccagaccccaacattacagtacgggtcaatcgtgacgggcaatgggaaagatcatccgaccgtgtcttcacacccttcaactgcgaacggcctcggacggagctgcaacatttgtgacctatgtaggcaaataaattctgagcctgactgacaccagcgggactcgagttgagactgttgttaatgttacgaagggcaaa

SEQ ID NO: 39918 - DNA, 245 bp, Gossypium hirsutum
  Clone ID: LIB3165-053-Q1-K1-E8
ccgtatttgactatggtaatcttgaaattggttttgcagaagctgcttagttgcccattattctgattctgtgtcttaccatttatatacatggtgataatcgtcgcttctgttctgtggcaacaaacaatatatatagaatgtatgttttgctcttaacctatgcaagcttgtagtactactctatatgttttgcctcgttggttttatgtcatgcttgtgggctgtggctccaatttcaatat

SEQ ID NO: 39919 - DNA, 314 bp, Gossypium hirsutum
  Clone ID: LIB3165-053-Q1-K1-F7
tccactcgtactcccacacgttcgcactttttaagtaaaaaaacccgtccctgaggggtgagatgtgactgaagtggctcctgctgtcacttatgaaatctaatatgcctttgtgaaaaacattacgagaagaatgactcctcaacctttgtatattctagctgatatataaattaaatgtttccagtttgaaggcgtatactcacattattgaggctattctctaatctgatgctgctgggaattatgattgatctgttaaaatcaatcttgatgcttctccattttatgttctgaccacttaaacttttgac

SEQ ID NO: 39920 - DNA, 341 bp, Gossypium hirsutum
  Clone ID: LIB3165-053-Q1-K1-G4
gggacgacccacaatggcgaaaacgggtcctcaatctctttattccttactttctttcccatcaaacactccttttttttttccaaggctgtttaagatggcagatggtcatgatattcagccccttgtttgtgacaattgaactggaatggttaacgctggttttgctggcgatgattctccccgtgccgtttttcctaacttccgtgggtcgttcacgttttcacctgtgttattgttggcttggaccaaacagatgcctattttggtgatgaatctcatttacatagaggtactttgactttgaaataccctattgttcatggtcttgttagcaactg

SEQ ID NO: 39921 - DNA, 423 bp, Gossypium hirsutum
  Clone ID: LIB3165-053-Q1-K1-H12
gccagaaggaccctttcgactttctaccaaaggggtttctggagaggacaaaagggcggggtctagtggtgccatcgtgggcaccacaggctcaagtgctgagccacagctctaccggagggtttttgacccactgcgggtggaattctactctggaaagtatcgttaacggggtgcctttgatcgcctggccgctctacgctgagcaaaaaaatgaatgccgcgatgctaacccaagatattaaagtggcactgcgaacagaacccaacgaaaacggtttagtttgcagagacgagattgcaaaggctgttaagggtctaacggaaggtgaagaagggaaaggtgttcgaaatagaatgaaggacctcaaggaagctgcggcaaaagcactttttgaaaatgggtctttcaccaaggcactt

SEQ ID NO: 39922 - DNA, 334 bp, Gossypium hirsutum
  Clone ID: LIB3165-053-Q1-K1-H2
gaaaaacaaaggcacccgtatgctctcataccctttggaattgggccacgggcatgcgtcggccggaagttctccttacaggaaatcaaactttccttgatacatctatatcggaaatatacatttcaacattcttcaaccatggaaaatcctttggagcttgaatatggcatagttctcaacttcaaacacggtgtaaaactcactgtcacaaaaagaacatgattattgtatctgactgagttatatttcctcagtcgtattaatgcaaaaaggtgtcatactatacgcctaaaattctaaaacaaatgaaagaacaaagaaatgtttggtc

SEQ ID NO: 39923 - DNA, 192 bp, Gossypium hirsutum
  Clone ID: LIB3165-053-Q1-K1-H7
ctcgttagattctgatattcagtgcgttttctaaccgcgaaagcgtggcctatggggcgtgtttacctttggaatttgaagctagaggtgttttaaaagttaccacaggggaaactggtttgtggcagccaatcgttcatagcgacctagctttttgatccttcaatgatatgttttttctatcattgtgaa

SEQ ID NO: 39924 - DNA, 363 bp, Gossypium hirsutum
  Clone ID: LIB3165-053-Q1-K1-H8
cccacgcatcctccttatcctcatatccactcaattatctcttttttatattctctttctacatctggccaggaaactttactctaaattctttcctcctccttccatcctttatcttccttctacttcttcaatcacttcccttccttaatctcaatcaagaatcccaaatattgtatctgattcatacttgaactctttgtttgataatctttatgaaaagctcttatgacgacgacaaatgggagactgttattgataagaaaaccaactctttatcctacatggcataatgttgcacacctattaattaaccactaaaatacctgtactcaactgtattttatggatgctcttcggatc

SEQ ID NO: 39925 - DNA, 125 bp, Gossypium hirsutum
  Clone ID: LIB3165-055-P1-K1-A2
acagcaattaactacgattcaagtgtaaagctccaatcgggattcatggtcttggtgcaatgtcatcaaggacaaccgtatcaacggtaacatgacactctacgttgacttttaacctatggtgc

SEQ ID NO: 39926 - DNA, 353 bp, Gossypium hirsutum
  Clone ID: LIB3165-055-P1-K1-A3
acggttgtatctttgagtattttctcttcattcatattaatcaccaaaagtcttcgacaccacgtacgaggtaaagatgaagatgagcagttctgctaccatgggggcctcaaagagaaggctatcaagcagaggccttggaggggttctccgagagaaaagggctaagctttatattatacgaagatgcgttattatgctcctttgctggcatgattgaaactcctactcctagccatgctaatgatcatggaggatcttaggggctcctcttcttttcttcttcatttggtggagtgtaaatactgtcagtggtcggcggatgttatcggagagttaagaaatttttttgt

SEQ ID NO: 39927 - DNA, 214 bp, Gossypium hirsutum
  Clone ID: LIB3165-055-P1-K1-A7
cacacttgcatcaacaaattacgtttcaagttaaagctccaattgggattcatggtcttgagcaatcacatcaaggacaaccggatcaacggtaacatgacactccacgtggactttaaacctatgttcccaccatagcatcttagcggtgccgctaatctccaccttagcatccagcgccatctctcttttggccacgtccgcgaaaaactta

SEQ ID NO: 39928 - DNA, 351 bp, Gossypium hirsutum
  Clone ID: LIB3165-055-P1-K1-B11
gttcatacatcaaactttcactctttctttctttactttagtttcctcgtctcgctttcttctttgctctgctccttccaccaggagcttggttttgtgcatagaagagggaaaactggattgatttaaagaaaaaagggggaaaaatactttggctgaaaagctttagttttgtttgaaatggaaggagggtcctccttttgtctgtgtacctcctaatggccctttcctgtctgggttttcaccatttttcccttttagtggacaacaagtatcccaacctacacctgaccttaaccaaaattacttaaattcaactgctgttccgcttcggtcagttagagccgaacc

SEQ ID NO: 39929 - DNA, 358 bp, Gossypium hirsutum
  Clone ID: LIB3165-055-P1-K1-B3
gccactcgttcggaaatgaataatttactctcttaacttgacaatcaattatggattgggttgtcgcctggacgacccatcaccatattaggcgcatgggctataagggtccctcactgaacatcttttacattctaatccacctgatccatggaagggagaatctgctgcacttatagtgccgtgatcgctcatcttgtgcacaaagagggtaagaactttgtgagtggtatgctatgccccaatacatcggtgcagaccctgtagagatgttcaatgatgaataactcagctaggacaaatatactgactcagatgacgaggtaatagctggtatagctcacccataagctgatat

SEQ ID NO: 39930 - DNA, 353 bp, Gossypium hirsutum
  Clone ID: LIB3165-055-P1-K1-B7
cccacgcgtccggacgattgaaattgcaccggagatgcgtcttcatgagggtggcggaaatagcaccgttgagcaacgtgactgaaccttgagtagatctgacactgaagccgaggccgaaagctccgaccacggccacgcaccaccgaacgtcccccacgtgatgaaacatccacaaccggtgacgagtcttccacttaatattcgcggcataaacaacttctttagccgcttgcacctgacgattttcacactcgatcagcgcatcgacaagacgctggaaaggaagagaggtcgaagacagtgtagcagacgacaccacggcgtcaaactccgagggaagaccgggaagt

SEQ ID NO: 39931 - DNA, 359 bp, Gossypium hirsutum
  Clone ID: LIB3165-055-P1-K1-C2
cacactccatctcaaaaaagcgatttaaattttgactgagtactaacccgaggtgtaggtgaccattaaaatgaacacaaaagccaatcaaatgctattgattgaccaaaggtcgaaccaccccttccactgccactgccataaacatatccctaaccctttgtctctgccattgatctgactgacgactatgacctctcttctgctatttctgcaactaccaaaaccttttttcgcaatgcttataatatattcaacactacaagcctgccttctctttctataccaaccacacgcatcggccttacaaagaacgcaccgaccatacccactgctcttaacacggattctccctctac

SEQ ID NO: 39932 - DNA, 344 bp, Gossypium hirsutum
  Clone ID: LIB3165-055-P1-K1-E1
cccacgcgtccgccaacgctcgcgttccatttgtagaggccgcaagctttcctcgctaagaggactttgggggacagaacctagtactcccaatatgagagcctcctgataatcaacaccaacccagaccaaaaacagctgctgatcgtaccttattagacatggctaaaatccaaactcttaaatctgcttttgaactgactgatcaggcggccatagaccggaactgatgcaatccataccctatgactcaaagcgcttaccaggctgctgagatcattgcatctggcaagggtgacaggctcagctatataggagcagaggacagtttcttggatgctcat

SEQ ID NO: 39933 - DNA, 358 bp, Gossypium hirsutum
  Clone ID: LIB3165-055-P1-K1-E3
tcgcccacgcgtccgcccacgcgtccgttcttcttccttatcacaacaatatgttctgccttgctctctgcccatcaacctccgcctcttatccttatctccgttcgttggtcttacctccgaatctctatctcgtcatctctgttggatgactgtcgttcttaccaaatctgtaagaaaccctaaaatttggctttccattcctatcaagaatgggtaagggaaacaaagaagggatatccaagcaattcaggtggacaaaactgatagaatatctttttctcgaaattctaaaagaggaggcccagaaaggaaataaaccttcaaacactttcaaagcagtttctattaattaggt

SEQ ID NO: 39934 - DNA, 318 bp, Gossypium hirsutum
  Clone ID: LIB3165-055-P1-K1-E7
cccacgcgtccggccactcttagtttgacacgaacgaagagcatgcttgttccgtctgatatacaaagcctgacaataaactaggactggacgaaatagcaatgcccagaaattcatcgtaactcaaaacaatcaaacaggtggtgaaaataccataatggctctcacgaaaataggaccttaccactctattaatcaactcactaacaacccttgcatacaccgttacgcatggaacacatacccgatgtaggcggccatttgggagccatgtaaatggtcataagcaagcagggatcacaagacaatatctctggc

SEQ ID NO: 39935 - DNA, 351 bp, Gossypium hirsutum
  Clone ID: LIB3165-055-P1-K1-E8
ctcaaagccaggtctgggggcttttaagttttgacaaagatggaagtgcaaaagcctcaacatgggcaatatattgaaataaatgtggatgttggtcaaggccaaaggcgtataggagggagtaagttttgtggggaagcaccttgtggattttctgatgccggtactagctctaaggatgccgaagaaagatcggcttccatgcgcaagcttttaattgccgtggtgctttgcgtcatcttcatgagtgtagaagtagtgggaggcatcaaagccaatagtctagcaatattaactgatgcagcacgtttgctatctgatgttgcagcttttgccatatccttgttttcg

SEQ ID NO: 39936 - DNA, 354 bp, Gossypium hirsutum
  Clone ID: LIB3165-055-P1-K1-E9
cccacgcgtccggtggaagtcaagttcatgtctccatcagataatttaagtcaagaagattggaattggccattggggtttattttttccctaagaaccgagaactagaccgaaaacagttatagtttgagaagaaaagagaagaaaggcaaaaaggaagaaactttggagagaaatgagtggtggagcggaagaaggggtaacattagagcatacgccaacatggattgttgcagcaatttgtactgtgattgttgccatttctttggctatggaacgtttgcttcatgttgttgggaatgttttgaagagaaaacaacagaaaccactctttgaggctcttttgaaagttaa

SEQ ID NO: 39937 - DNA, 352 bp, Gossypium hirsutum
  Clone ID: LIB3165-055-P1-K1-F12
cccacgcgtccgcaacagttatgttctacgacagattatccctctcctgtaaggcaaagctccaaaaactcgaaaaccctgatccccgtttcctcaaatacggttcccctcatccagctgttgtttcccacacgcacatactatcttcccccgaaaccaaaattacaactttgcccaatggccttcgtgtcgccactgaatctactctatcttcccgcacggccacggttggggtctggatcgatgcggggtcgagatttgagactgaagagactaatggaacggcgcacttcttggagcatatgatatttaaagggacagagaggaggtctgccagggacttggaggaaga

SEQ ID NO: 39938 - DNA, 354 bp, Gossypium hirsutum
  Clone ID: LIB3165-055-P1-K1-G7
cccacgcgtccgctttccctctcatttccgctcatcttccttctttcaggctaggccaatgtctacttgttcacaggacttagctccgctcctcggcgtcaacggcaccggcgccgccgactacatatgcggcaagttcagtgatgcttcttatgccgtcgacaacacttaccttctcttctcagcctacctcgtcttctccatgcaactcggctttgctatgctctgtgctggctcagtccgagccaaaaacaccatgaacatcatgttaaccaacgtcctcgacgctgccaccggtggtcttttttattacctttttgggttcgcctttgcctttgggtccccttccaatgg

SEQ ID NO: 39939 - DNA, 226 bp, Gossypium hirsutum
  Clone ID: LIB3165-056-P1-K1-A12
cccacgcgtccgcccacgcgtccgcttattgtgactgtaatgatctatgcaggtggtcatgtttctggggcacatatgaaccctgctgttactctcgctttcgcagttgtcagacattttctatggaaacaggtctcattttatggtgcagttcaactaacaggggcaatctatgtatcattcacactccgtgtatcattcgattcaatataacatgctggtttca

SEQ ID NO: 39940 - DNA, 209 bp, Gossypium hirsutum
  Clone ID: LIB3165-056-P1-K1-A8
ggtcaaaggaacaatgtaggcattttaagtcggcaaaacggattcggggggtggttaaaaggaagggctttgaggtcttgacacgggggtaccagtccctaacccgctggttgccggcgcactgctcgagctgttcccgagacgagagcggttctatcacatgccggccgttggacggactggtaacggcttctttgggggcctttcct

SEQ ID NO: 39941 - DNA, 176 bp, Gossypium hirsutum
  Clone ID: LIB3165-056-P1-K1-D3
tttcgactcctgagatccaaaacaccaagttcattttcccgtttaacctacaccattgttgaaatttatgtccctttcgaggtatttaccaaaggctctcttaaatatgaggagaaagatggtatagattattctgtcttcacattttatctttcttgtggtgagcgtgtgctttt

SEQ ID NO: 39942 - DNA, 237 bp, Gossypium hirsutum
  Clone ID: LIB3165-056-P1-K1-E12
cccacgcgttcgcccacgtttccgctcacgcgttcgtgaaaatccactgtgatggttgtgagagagtttcagcaacagtgatatgttgtgcatatgaggctgcactttgtgctaaatgttatttcgaattttatgcacctaacaagcttggtagcaaacaccataggtttgtcctttaatgccttcttaacaatgttttcttcttgtgatatatgtcaggataaagctgctatcatc

SEQ ID NO: 39943 - DNA, 209 bp, Gossypium hirsutum
  Clone ID: LIB3165-056-P1-K1-G1
cggaaaaaccggggcgacccacgcgaacgaccaagcgaacggggaaaggaaccaagcgaacggaacaggaacaaggagaagacgagccgaagagacgggggaagcccgaacgacagcgcgaacagcgcgagcggcgaaagggaaccggggaaaaaagacggaaccgggacgcggcggccgacggcaacggaagggagaccggagacgaa

SEQ ID NO: 39944 - DNA, 146 bp, Gossypium hirsutum
  Clone ID: LIB3165-056-P1-K1-G12
tccactgcgtacgagaaagttacatgtttacaaccccactaacattaaacttgtgatctatatattctatggcaaaacccttcagcttctgacattagaacctaagaaaaaagagtttaattcattttgaatttggtctgagattg

SEQ ID NO: 39945 - DNA, 295 bp, Gossypium hirsutum
  Clone ID: LIB3165-056-P1-K1-G9
tcgctcacacgttcgctgacatttgtttttctctcttatcaactccactaccattattactaccattatggcttcggctactgaacctgaagccaaacccaacctttagatacaggcaaaaggaaagggtgttggattagcatatttctaaggctttcacatcttctctactatctggacatttgccaggaaaacctttgtagatctttcattcactctctgcttctctaacataggctctatggaatgcaacaatggcgggttcacgaaaggtatggcataggcatatctaaag

SEQ ID NO: 39946 - DNA, 202 bp, Gossypium hirsutum
  unsure (1)..(202): unsure at all n locations
  Clone ID: LIB3165-056-P1-K1-H12
gcaacccacgaaaacccaatttttcccgcacaacaacggcaaccaaggggaggttttaaaaagaggtttcccttaaccaaccagcnggacggacgagaaggagcactacgccgatagcacaccccggaccgctgagaacgaccgagcgcacggcaccggcgagaaaggggtaggccggaacggcaaacccctccaccacaaa

SEQ ID NO: 39947 - DNA, 418 bp, Gossypium hirsutum
  unsure (1)..(418): unsure at all n locations
  Clone ID: LIB3165-057-P1-K1-A1
ccggnnggaaaaanggggcgacccacgcgtcgctccctatgcagcgggcccactaggtaacggccctttggttcgctgtaatcccaatcgggccgaatcggttactcccctgtaccttgattgcgcataataggtaatacgccccctcagcaccgattacccattccgcgtttttccttgtctgctattccgttttttgccctcgtcctcaacgttctgattctcggacgcctacttgcacagctaagcaacaatggcggggatagcaatattgctagatctatacaggaaaaacccaagcttttgctcttaaccaagcttccactcttctgggttcttctctgcctcagctgccggcacatcaaccgccgctactgtctttgctggaaccccttttgcctccaggttcctttttggg

SEQ ID NO: 39948 - DNA, 159 bp, Gossypium hirsutum
  unsure (1)..(159): unsure at all n locations
  Clone ID: LIB3165-057-P1-K1-A8
taaaccaatcatccttaacttttttttttagaacatttactgcgcacccgggggggattatagaatcggcgtgcgcacacanattcacacaaccaacaattttacccttgattacattgaaaagcttgatgacaccttccactaccaatccattgactt

SEQ ID NO: 39949 - DNA, 275 bp, Gossypium hirsutum
  Clone ID: LIB3165-057-P1-K1-B12
tatcaaccattttttattccatgttttttttcctcctattgcgtgagaaatcaggtctgttttgtttgagcactgaatgtaaccaagtagattctgaaacaaatattatacatgtttttcactgttggcttggctgtaatcatttattttatgaatgctagggaagagactgagtgccttttcttattcccttaatttgaggatctttgtttattaaatgaacttctagctatgatatatactggtgtctggtttattgagaatgattttatgta

SEQ ID NO: 39950 - DNA, 393 bp, Gossypium hirsutum
  unsure (1)..(393): unsure at all n locations
  Clone ID: LIB3165-057-P1-K1-C11
accggccggaaaccggggcgacccacgcgccgcagagagccaaancacaaaaaagcgaggcaacacagagaagcccagaaggaagccgcagaagggggggaaaagggccacaagagagcaccacgcgaccagcaccggcacaaagggcaccacgcggcgacaaacgcagggacccaaccgccccccaaccaagacgaagcgcggaaccgggaacgcaaacccaggcgcaccaagagcaaanggggaaaaggacgcgcgagacacgagggggcgaccccagagaacacaaaacccgaaaacagcgaacgaggacggccagaagaaagagagcaaaccgaggaagacaacggaagggcgcacagaagacgaggggagagcacgcgaaaagaggcg

SEQ ID NO: 39951 - DNA, 334 bp, Gossypium hirsutum
  unsure (1)..(334): unsure at all n locations
  Clone ID: LIB3165-057-P1-K1-C12
ccggaaaggaaaaggggggggacccacgacgacgaccacgcgaccggcggaagcaagacgcagaaccggccaccagaccaancgggggggaagcgaaagaggggggggggcgagcacgnacacggacggaagccggncgggacgagcaggacgagcaggacgaagagcaccaggggcacgcgccagccgaacagggagacaggcgaaaggggcgcacgcccgacggggaggagcaagacgggacccagggagaagccggcaggacgaagagaaggggggaaaaaggccgcacagcaggagagaaagacagaaggcggggggggggggcggaccg

SEQ ID NO: 39952 - DNA, 389 bp, Gossypium hirsutum
  Clone ID: LIB3165-057-P1-K1-D1
gaaaaaccggggcggcccacgcgatacgtccactcgttcgattaaccctaatttttttttccaaatttggttgagaagaaatggggagattaactgatgaagcccgcctgagatcctttaatttggaaacctacgaattagctttacacagtttatgccatggccttatcttccacgcttttttccaccaatattaaccattaacgcattgttcttggcagttttctctaagattacacttacagagttgacataatctcatctgattcagatatcctctttcttaagacctacccaaagtttgtctttgaccatccttatgcacttatcaatctcattttccaacccatttcgtaaatccgttttatcctttttttctagtttcgatc

SEQ ID NO: 39953 - DNA, 156 bp, Gossypium hirsutum
  Clone ID: LIB3165-057-P1-K1-D2
aaaaaaaaaccgggcggcccacacataacgattgatggatacttatgaaaaattgtttttttctcatgctaaagtacaatggggggggacccaaatgtgtggcggggcttaaaaatgctttctcaattgcaagattagttggatgcaacaagaatg

SEQ ID NO: 39954 - DNA, 157 bp, Gossypium hirsutum
  Clone ID: LIB3165-057-P1-K1-F12
tcgcggacgcgtggggttggtggtttttttaacgatgctcatgattgagacgtgtaccatcatgttgattacggtgggtcgctattactctaatatactaccgtcttcagcttttatatctctgtataatattcatcacattttttctttctttatt

SEQ ID NO: 39955 - DNA, 242 bp, Gossypium hirsutum
  unsure (1)..(242): unsure at all n locations
  Clone ID: LIB3165-057-P1-K1-F5
ggcaggaacgggagggggggggcccaaaggcgcaaaaaaaagagacgaagaggaacacggcgcggcgaacgagccgcagaacacaaccgaggacangacacacacgcgcaaggacgacagaggccacgggcaaaggaagcagcaggaacccaaaggcaaggaaacggagacccacagccagggggagaagacagacacgaggacacgccagcaggaacccaaaaagagaaccccaccggggc

SEQ ID NO: 39956 - DNA, 173 bp, Gossypium hirsutum
  Clone ID: LIB3165-057-P1-K1-G12
cccacgcgttcggaagtcgttatttttgatccgtaacctcggaaaaaggattggctcttaaggctgggcacgggggctccattaccgaacccatctgctgccggcgcactgctctagctgctccttcggttagagcggatcgtctcctgcctgccggcggacggactgggaac

SEQ ID NO: 39957 - DNA, 366 bp, Gossypium hirsutum
  Clone ID: LIB3165-057-P1-K1-H11
acggcgaagccgtgatcaggaggttttttttatgctttagccagggcccaagaagagaagaaagtcaaagaagctggggatgttcgattcataatggcgcagatacagttcttgcaaaagaacgtggacgaatctttgatgagttaccaggaattggtcaaagaagatccaactgattttaggccgtatttttgtcaaggtatcatatatagcttgcttgataggaatgcttaagctaaagaacagttcgtaaagtataaggagctttcaccaaacaagtttgtggtggatggatacttaatgacatctttatcgagaatgaaaactgttttgtgaccagtgtggatgaattgtagtttgggggtt

SEQ ID NO: 39958 - DNA, 246 bp, Gossypium hirsutum
  Clone ID: LIB3165-058-P1-K1-A2
cttctcccatttgtttcatggctcgagaactggcagagggggggcttaatttattttcaactcagtcttcaagttatcctaaccggagctgtgctcctcctcataagtgcccaattctcaagcgactctgctattatttttatgattcaagaattttatgtctaataaatctgtcaacttttgtgctttgttggtaaagtttgtgtttgatttgatgagactgtgatgtaattttcttctctttga

SEQ ID NO: 39959 - DNA, 199 bp, Gossypium hirsutum
  Clone ID: LIB3165-058-P1-K1-A8
gaaatggaccgatggaaaggttttttttacgatatttcggacgaccaacaggacatttcttttgggaaagggatggtgcataccttgttccaagctcccacgattgatggaacttactatgctggtatgagttcctattattacattaaccattgtcttaaaactttacaatttgtacaacatcatggatggactttac

SEQ ID NO: 39960 - DNA, 381 bp, Gossypium hirsutum
  Clone ID: LIB3165-058-P1-K1-C4
ctcatttcaaggttttagaaattgggtaaaccaaaaaagaaattaagctcttaaccatggctgccatcaatccagcagtagcagcaccatattctatgggtgttcatagaaatacagcgacccaaagccacaaagttatggcggctgccaatccagcagtgaaatacggacgtgcagcttcgattctttctacacccacacagacacagtccccattactacgtagaaattcggttcccagcagaagctcagacacgagaatcatggctgccaaccctgaagttttgtcgtcaccgtcgtcgtcaaattttaatgggggttctgatttttacgcagtgccagtttcggaaccgttacggtcaggatttaaagctggaagac

SEQ ID NO: 39961 - DNA, 371 bp, Gossypium hirsutum
  Clone ID: LIB3165-058-P1-K1-C8
tttattcgtacgtttttaccttatattaaaccaaaaccagcaggcaccggtcagagaatcttcagacaccccctccctccataatctggaacaaccaagatgacgaatatgcctggcaccactattgtggagcctttagatttggctggtctacaaataccttatcatttcaggggccccatgttcctcgagctaatgcatgaccctgtcaccgtgtgcaccggccaaacctacgaccgtgccagcatagagtcctgggtcgccaccggcaacaccacttgtcccgtcactcgtgcccccctatctgattgcacatttatgcctaaccataccctttgacggcttattcaagattggtgaggagcgaacca

SEQ ID NO: 39962 - DNA, 312 bp, Gossypium hirsutum
  unsure (1)..(312): unsure at all n locations
  Clone ID: LIB3165-058-P1-K1-D12
cggaaaccccgggcgcccacgcgccgcccaccgccgaggcnaccaagcacaccaaggcgacacaccgagagggcnaaggncgccggacaagaggacggagccccaggggcanacgggaccccgccaaaggaccccggaaagaccaggaccccagcacaccgaaaagcagacaacccgacagcaacacccaagaaacaacccacaacggcgacccacaaggaagcccgagaaccaaacacccaagccccaaaagcacggaccnggcaacccccagccaaggacggagcgaaccacgacagggggaacgaaggg

SEQ ID NO: 39963 - DNA, 192 bp, Gossypium hirsutum
  Clone ID: LIB3165-058-P1-K1-E8
atcgaccactcagtttaacttatttttttgctcatggaagctctcagctcggagcgccttttaccttctcttgcatcatttcttctaaaccataatatttcccggctagaatcatacgctctcccactccattccaaaaaggacctgtactcttccgttttccaattacgttcctaacaacacaagtattct

SEQ ID NO: 39964 - DNA, 302 bp, Gossypium hirsutum
  Clone ID: LIB3165-058-P1-K1-F10
ggggcgacccacgcgttcggtctctatcttagtcatggctttatttcatctccaccgtcgctgccgttgtcggcgtcataccgagctctgggagtgttagtcccaaccttagctctcatggggaagaaagtgagctcaagattcaacagcaccagtcatgttcctacgtgaagttttaaggtgatggctgcgtgtaaagagatagtcgttgcagacacctgactgaaatggacctatggataagggttggcttactatattttcggaccatcaacatgccattacttttaggtaaagggttg

SEQ ID NO: 39965 - DNA, 156 bp, Gossypium hirsutum
  Clone ID: LIB3165-058-P1-K1-H7
caaagggtgttgcaggcggtttttaatattttcagcctctatcccttccatggcatctacttcaagcaaggtcccaaatgggtcagatgcgacttaagactatcgtcaacactaactcatcggcgaatatctattctataacctcagggtttgatc

SEQ ID NO: 39966 - DNA, 328 bp, Gossypium hirsutum
  Clone ID: LIB3165-058-P1-K1-H9
gaaagagtggaggaagatgactcttaacaaaacaatgttaaaactaggcccaagggaggattggtcaccatgcctttcattttctcaaatgagatctgtgagaagctggcggtggtgggatttaataccaatatgataagctacttaacaacacagcttcatatgccattaaccaaagcagccaacactctcacaaattttggtggaacagctagcttgacaccattgcttggtgcctttatctttgatttatacgccggtcgtttctggacaataacagtgcgctttcattatataccaaaattgggatgacatgtttaacactttt

SEQ ID NO: 39967 - DNA, 258 bp, Gossypium hirsutum
  Clone ID: LIB3165-059-P1-K1-A11
attcgctgcccatttactttgttttcttaagactaatagccaataactttggcactctgttagagggcttcttcctctgccaatgcactctatttctcttgttcctccattcctattgtttcccttgctttttctctctctatatgcttttccactgtttaggatgggctgatgtatgctttttctcttgtatgggtgttgcatgttagtccttgtgctacctttggcttcactgtccatgctctggaccttcttgga

SEQ ID NO: 39968 - DNA, 146 bp, Gossypium hirsutum
  Clone ID: LIB3165-059-P1-K1-A9
cggacgcgtgggcggacgctttgtttttcccctacgctctcactaaaacgagctgtctcttcttagttttccaatagttcgtaacaatgtcggtctcacttcttgctgcagctaccctgatgcaacctatctaggttgctgcacca

SEQ ID NO: 39969 - DNA, 223 bp, Gossypium hirsutum
  Clone ID: LIB3165-059-P1-K1-B10
tttctatgactgaaaaaaaaattccttattcttttctttccttctaatctctccttatctccacatcctccgtcatctccgccgtcctccgccgctacgagtttcgattcgttatgtgttgtaagtttatcgatacgtgcttggattagagtataatagtgtttgggttttgatttatctgatttatttataagatgttaaaaaaatatggagttgtacgtgc

SEQ ID NO: 39970 - DNA, 236 bp, Gossypium hirsutum
  unsure (1)..(236): unsure at all n locations
  Clone ID: LIB3165-059-P1-K1-B4
cggacgcgtgggttttgctatagctttctctactagnaccctctacttgcaatggctgcctctatgatctcatcggctaccattgccactgcctctccggcactggctttcttggtcgctcctttctccggtctcttgtctgcctctgctttccctgtctccaggttggcctactacgactttacttctctcgcttgctttggcggtagatagcaatgcatgctggtgtggcctcc

SEQ ID NO: 39971 - DNA, 298 bp, Gossypium hirsutum
  Clone ID: LIB3165-059-P1-K1-D11
cccacgcgtccggctaaacgttttttggactatggattccatggtcctactaagtcttggcctgttcctggcacactcatgattgaacccactgaaatagattgcatggcggagctcgataggttctgagatgctctcatctccattagggttgttattgctctgattgtgtaaggataagctgatatccactactaagttctgaatggagctcctcatccaccatctttgctcatgggtgatgcatggacttagccatattctcgagtattcgccgctttccctgcttcctggcttc

SEQ ID NO: 39972 - DNA, 258 bp, Gossypium hirsutum
  Clone ID: LIB3165-059-P1-K1-E10
ataggaatctaggttcttcattcttctcgtcgctttctccttttccatttttctctttgccttcttcatcctcttctctcctcccaattatcttacccactctctccctccttgccctttctctttccctttcattggcaactacttttttctccgtatatctttcttcgatttcgtgccaatactccgcaaccttcgcttttagtatggttccatggtcactctccacattgttcctcgcccctccttctatgtctc

SEQ ID NO: 39973 - DNA, 246 bp, Gossypium hirsutum
  unsure (1)..(246): unsure at all n locations
  Clone ID: LIB3165-059-P1-K1-E12
cttttnagagcacgcccacatggcagaagtcgaagttcctttgtagctagaatccgaaatcccctccgaccctccgccgccacccaccgatgccgccgaggataaatccgagactccacctcctcctactgaagataagcccgccgactctacggataagcctcccgaacccatcgaaatggcggcagagtcgtcggtgaagtatagcacggtggagtctgttgatcgtgatgctgagcttgcttg

SEQ ID NO: 39974 - DNA, 313 bp, Gossypium hirsutum
  unsure (1)..(313): unsure at all n locations
  Clone ID: LIB3165-059-P1-K1-E7
tattagtattcatatttatattttttcacacattnttatttcacgaatgtatatattcttacttgtttattatcttacaattttttatacctatatatatatacatatatatattacttttgcaattttattcatttatttatttatatttncattattattttgaatgaaagttttaattttattcccttatatgcattgatatttaatcctacaaataaagggcttaaatcacaactatctgtacatgtatatactatactacatttctatcttttcctatcataatngcatatacattactactttttat

SEQ ID NO: 39975 - DNA, 214 bp, Gossypium hirsutum
  unsure (1)..(214): unsure at all n locations
  Clone ID: LIB3165-059-P1-K1-E9
ccctcgcgtccgcccacgcgtccgtttttttntttggcggaatcttttcgtatgatgcggtttttatagttgattctccggatatggtgnttgcttactggccctgntgtcatcctctgcggcgttgtgggagcctccgtcgttgctcactttctctttgttgtcgttccatatcttaaacctaagaagaatactgattctcctccactaacct

SEQ ID NO: 39976 - DNA, 217 bp, Gossypium hirsutum
  Clone ID: LIB3165-059-P1-K1-F10
tatatttcccctagaagtctctttctatccctactaatctctcaatatctattttgatgccaaagctggtgacccaagtgatccccaaggcttcatcctgatcattgattgtaagctcctcctgctatcctttcttctccgacttatcggcttcatctctccaggccttctctgcggctcttgctctttcttccatccttctttctgctcctctccc

SEQ ID NO: 39977 - DNA, 133 bp, Gossypium hirsutum
  Clone ID: LIB3165-059-P1-K1-G10
tccttcttttcttcaccggcactgggcccattgactacctctttgccctcctcgccgatcctggtcttgccaccatttttgctgctttctccccctagagagcttttggtgggggaacccttactgccttgtt

SEQ ID NO: 39978 - DNA, 313 bp, Gossypium hirsutum
  unsure (1)..(313): unsure at all n locations
  Clone ID: LIB3165-059-P1-K1-G6
catatgttagcatctaaacccgaatcttctagagctatggatatagataactctgcggcaggattctgagggcttgcatcaaacaataactagagtaagcaaagagcatctgtacacgttgtaaacatctaatctttgaatgtactatcataacatgagtgctccattagaaaaaaaactagaatgatctgattcacattgttcatggagatttgngaatcatacattatgttcttgaaaagggttactgaacatcgaaaacgatcagtggaactttgactgatcattnnccattttttttttttttatattt

SEQ ID NO: 39979 - DNA, 201 bp, Gossypium hirsutum
  Clone ID: LIB3165-059-P1-K1-G9
gagtgactctttagtatacctgttgtttatagtaatagttagcagttattgctttggcctcctccatgatctcttcggcaaccattgccaccgagtaccgctcctccccggcacaggcctatatggtggcccccttctccggcctcttatctgcctctgctttcccagtcaccaggtatgccttcttcgacttctcttctt

SEQ ID NO: 39980 - DNA, 255 bp, Gossypium hirsutum
  Clone ID: LIB3165-059-P1-K1-H11
tggcattcccttggtgctctgtcgtgtctccgtcatcgggttcccatgcgctctcgcgcctccgctgacttcgccgagtacggcggtctgtattcgtagcgtttcgccttttctacaggaaaaaaagagtaatctcttttatttttttttatagtatttggcatgcatgatacgtagatttctttgtattgatattggatcacctttgttttcagacaaagtgaagaattctgtaatattctcttgtgctctttt

SEQ ID NO: 39981 - DNA, 206 bp, Gossypium hirsutum
  Clone ID: LIB3165-059-P1-K1-H4
acccacgcgtccgagcctaggatagtagcacaacagatattatttgttgtcggaaaagttttgaaaccagtcatagatgctggggtacctattgcccagaaagctggagaagaagcattgtaagaggcttttccagctatatccgaagcttctaataaagccctagaagcatttcaaggcactgggcttgacactgaacctgttct

SEQ ID NO: 39982 - DNA, 151 bp, Gossypium hirsutum
  Clone ID: LIB3165-060-Q1-K1-A7
gagtgaggattttatcgaacacaagcatgtagattctgcaactttttcgggattctgcgggatctataggcaaaattgacaccacatcaccaactgcatcgcttatatgatgcctcggatcatttttaccaaacaagggcccatgcgatgt

SEQ ID NO: 39983 - DNA, 324 bp, Gossypium hirsutum
  unsure (1)..(324): unsure at all n locations
  Clone ID: LIB3165-060-Q1-K1-B5
accgcccgaattccgggcgccacgcgncgttttcccttccttcaacttcttctctatttccgcatggaaatagctctgctttccttcccttctcaaacccccgctttcaaaacccttctctaaaacccaccgcccattcctcgaccttcaaacccaacctccttctttagaccatccccattgccttcatcagagccgcatttcccgaccaagaagaagaaaccgtcgaactgtcaaaccgagtggagaactgtacctcttggcagccgcgaatacaaggcttaccggaagcaattcaggacttggccgatcgcttccgaaacg

SEQ ID NO: 39984 - DNA, 396 bp, Gossypium hirsutum
  Clone ID: LIB3165-060-Q1-K1-C8
tcggcctcttgttttgggatgaggtcgagttaatcgcctcaaccttcgcttacagcatagtccaagcctttgcctcttttgaagagcaatgggaagaaatatgcagtgatatcaaggacggcacactgagctcaaggataacactgcccaggatgcgaaaagccgtgttggatataatttctccaaacccgtgtttggcatcacagattgaagccatttgcagggactccaaagcttccaactggtatggcatcgttcccaggctgtggccgaatgcaaagtatgtgtactctatcatgaccggctcaatgcaaccctacttgaagaagcttaggcactatgctgtctcgttaccgctagtgagtgctgactacgggtcaaccgagggttggattg

SEQ ID NO: 39985 - DNA, 233 bp, Gossypium hirsutum
  Clone ID: LIB3165-060-Q1-K1-D1
gtggggtggggggggggtgggggggagcatatatgcagttctcacattaaaacgagatctgtctttggcttgttattgcaccccacatagtttggagtttagcgattaagattctgatggaagcagggcaacataaattttggtcacatggatgatgcatggatatttgtctttcatccttgtgggaatgtagcattgtcaaatcatctgcccagggaataactctttgtccc

SEQ ID NO: 39986 - DNA, 326 bp, Gossypium hirsutum
  unsure (1)..(326): unsure at all n locations
  Clone ID: LIB3165-060-Q1-K1-D4
agaaatccttctgaagagcctgagttgaagttgaagaaatggcgtccaagtttggtgactcgtgcaaattagccacctccgacctcttttgccgccctcactcagcgttcctttgctgtaactgtgattccactacccacgccgccaatcacctcgcatcgcctcaccctcgtgtttgcctctgtcaagtctgcgagcaagcgccggctcacgtcacctgcaaggccgacgccgctgctctctgcgtcgcctgcgaccaacacatncactcagcaaaccctctcgcccgccagcatgtgcgccttcctattatccccttctatgac

SEQ ID NO: 39987 - DNA, 280 bp, Gossypium hirsutum
  Clone ID: LIB3165-060-Q1-K1-E2
cccacgcgtccggggtcaccctggcaccaaatatggaatctctttccctgtcctggcgagatcatcttttggcattcgtggtgcacatgttcctacttcgcttagtgctttggtttgttgtgggtggtatgggatagagagttggattggaggtgaggctatctacctttttctcccaaactccattaaacaatcttccttttctcaacccttaccatggcttggcacttcccctcttgaattcgcttgttttattgccttttggttggtccagctggtc

SEQ ID NO: 39988 - DNA, 382 bp, Gossypium hirsutum
  Clone ID: LIB3165-060-Q1-K1-F11
attgttactcgtgactttgtcttttgctgttgttgccaccgccgacggtgcttgccaggacgacggccctgagttacctgcttgcaacaaccctttcaaattggtcaaggtgaagatctgggttgatggtgttgaaggtgaagatttgtctggtataactgcgagctttggagcatcattgcccgaggaagccaacaaaagttctaaattgcctgctgttttctcaaatcccctaaatggctgttctaattcttcttcaaagctaactggttctgtagccttgtccatacgtggtgattgtgactttgtaactaaggcaaaagttgcacagtcaggaggtgcttcagccttactggtgataaatgacaatgaagaactttac

SEQ ID NO: 39989 - DNA, 213 bp, Gossypium hirsutum
  Clone ID: LIB3165-060-Q1-K1-F2
accgcccgaattcccggctgaccggccttcgagatttgcaggcaatcgcaaatgggccagcctttgcgcgggagtgcgtggggagttatggaggtgaaaagccatctatatgcaacatgcctcgttacaaagaagatccgccagcggtttgcgtgtatacagtgtcggacgcatcctaatttttgattgtcacgatcgttgccacattgggat

SEQ ID NO: 39990 - DNA, 386 bp, Gossypium hirsutum
  unsure (1)..(386): unsure at all n locations
  Clone ID: LIB3165-060-Q1-K1-F8
cccacgcgtccgatccctagctttttcccccttctaactgtcggttcatctccgcacaatggtgctctcaatcttggaggaacctttcatccttggaatctcttttgattcgatttcaacgaagcaaagagaagaaatctatggcctattcgcacagtaaggtttttattttcttttgtttttttttctattttaaatgcgaaaaaaactaaaagaccaaaagaataaatcgaaaagaaaatcaaaagcctcaagaactttgaattagaaaatcatcttttaacctttattttagtatgcgtgtgtatttctgggaaaaaaattcccatttacatcctttttattctggtttatagccgnaaaattaattaattaaattaaaagaa

SEQ ID NO: 39991 - DNA, 302 bp, Gossypium hirsutum
  unsure (1)..(302): unsure at all n locations
  Clone ID: LIB3165-060-Q1-K1-F9
gtttcttagcattgcgcaacactgcaactcccgcgccccttctttcactctcacactacatatggggttggcttcagccaccaccatctcctcctcctcctcctccttgctctcctcctccctatgccctgccagaagaggctttcttctgccctgccatcatcacttctgcttcctctcaacttttagtaaatgcaatttgaattggaaaagatcatcaggaaagaagagaggtgaaagagtaaagtgtagtgcantgggagtgggagtggaagatgaagcatgtgaattagtgaatggag

SEQ ID NO: 39992 - DNA, 269 bp, Gossypium hirsutum
  Clone ID: LIB3165-060-Q1-K1-G3
tcctctacagagcacactgtctatgcaccctcaaactaagaaaacagcataaatggtgaaagtagcctgttacttcgctatggcatacgccgcctctatcttctggcagaccatggataaagtccacgtctggatcggcctccaccaagacgagaagaaagagagacttgagagagaagctggggtcaggagactgatggaagagttgcttcagcatgccaagcagaacgatcgtctcccctaaattctgcgtacaactccctcttcta

SEQ ID NO: 39993 - DNA, 418 bp, Gossypium hirsutum
  Clone ID: LIB3149-003-P1-K1-C6
ggttagcatattggaattttatttaggtaggttccctttcgcggttggtagacaaggggattgggccagtctcatgtgcgcgatttgtatgtctcagccaccggaggccccacccactgctttcaatgaatttaggcattttatatcatgttgtttgcagagggatccagccaggaggtggtcggcggcttacatgcggcagtatgcttttattgtgagaggacaaccacatcagaggtgatcataaccttcatcagttattaccacctccacctcctctttcttcttagctttctatttctttttatttggtttgggattaggggaaaaaatcttttgtaagttttgatataatgagggtctggcgggagttgggtgcaatggctttccttcttctttttttttttcccttcaatgt

SEQ ID NO: 39994 - DNA, 362 bp, Gossypium hirsutum
  unsure (1)..(362): unsure at all n locations
  Clone ID: LIB3149-003-P1-K1-D11
tagagcttctgatgattttcaagaaattgtttctgaagaaagaacttttanaagaaagggtaacatggatgcaccggtggggaacaagatttgtgaactttatgacctctatgttgatggattagatgaagatgctggtccgcacatcagaaagttttatgtagagcttgcacagctctggccagatggtatgatgaacaaccatgagattaaacatgcaatttgtagggcgaaagaaaggctgagagcaagatacaatagacgcaaggatcaagagaaaatgaggagggaaaagatgttgacactaggaccggaggagagtgttcgagtggactcttgcttaagtgcacaatcgcagcaca

SEQ ID NO: 39995 - DNA, 397 bp, Gossypium hirsutum
  Clone ID: LIB3149-003-P1-K1-G6
tcgagacaaagaagtccccctcaccaacagcaaatgaaagcgatcagtgagtactaggacatgtttgagggttgagaaggtccagagtcgtcgtccagcgttgctcagtatgggtgtctgaaagtcagtcttgtcgtcctcatgttgctgcggttatcgagttactctaccttctcatgatcagtgttcagttgtattaatgctatggtatttccggtctttatggatcatagatgcatcattgtgtcagccatctaatctggaaaagattttaatgttgattctggttttatctattacttaggttttgtactttggaatcaactcatctattctagtgacaatgttactatggacttagatatgttgctacacttgccaaggggggaaaaaatac

SEQ ID NO: 39996 - DNA, 351 bp, Gossypium hirsutum
  Clone ID: LIB3149-006-Q1-K1-E6
tcgaaaagttttacatttaagaaaggcgataggtgttaagtttgtaggtactacttcaccttcgggattttcctctctacagcctgctttgaggggaccggcaattggttttcggggaaaagttctccttgcttttgaagaaaatggttcatcaaaaattggggtcagatttgacagatctattccagagggaaatgaccttggtgggctttgtgaagtagaccacggtttcttctgtgctgctagttcactccgtttggaaccttctggaggtgatgatgttgacaagttagctgttaatgaactttttgaggctgcagcgaatgaaagcaagtgtagtcccttaatatt

SEQ ID NO: 39997 - DNA, 203 bp, Gossypium hirsutum
  Clone ID: LIB3149-008-Q1-K1-G7
gttgaaaccaaaacaactgatttggtaagaagtaaaaaaaaaaaatttggacgtcttctgttccttttgtatgttgtaacgtgaaagggttgaatttgaattgaatgtatctatctaatgggccctctaagcaacacatagagttggtcttatcagtatatgttacggttctatctgcgctcataaaaaatttatatatatat

SEQ ID NO: 39998 - DNA, 120 bp, Gossypium hirsutum
  Clone ID: LIB3149-008-Q1-K1-H3
ataatatgacctcaaaatgggcaaaattgaatgtattgggagctgagaatcttcatttcagggcaattaagtattcacgtgttacgccgtacaaataaacagataaggtaataaaaagaa

SEQ ID NO: 39999 - DNA, 314 bp, Gossypium hirsutum
  unsure (1)..(314): unsure at all n locations
  Clone ID: LIB3149-013-Q1-K1-E2
cttcgacattgatgaattcagctgccgcccttcctgccgcacttatgatgtacttgcttgccaaattaatctcacccttgtcattgtaattttgcttgtaagttgtggtggctttttggtttagaatgttgcttattttttgacctgtcccgcctctttgttcgttctatgtaactttgttcaagactgtatttacattttccgggtgggttctcaaaactcactagtgaagctaatttgcttgattgatcatggcagttttcgncctttacaatccttcgttgaaaagggcgaggcaaaaatctgttaatcgg

SEQ ID NO: 40000 - DNA, 161 bp, Gossypium hirsutum
  unsure (1)..(161): unsure at all n locations
  Clone ID: LIB3149-013-Q1-K1-E6
gaaattgcaagatattctccctgttcnttttttgtacaacagccccngaaacgagttcggggattttttaattgaaaaacaattccaaaatcaagcacctgctgccggtcctgaatttgatatcaagcatgcagttgctgctgcggttacccttaaaggtg

SEQ ID NO: 40001 - DNA, 146 bp, Gossypium hirsutum
  Clone ID: LIB3149-013-Q1-K1-E7
gccgcacagctgacatggttactctagattttaaagagaccctccgaactggcttgcaggccgtgaatagtcgaatagttctacaaaggtgcctactatgcatcaggcacaataacttggacttggttgcaagcttaagcgtatga

SEQ ID NO: 40002 - DNA, 361 bp, Gossypium hirsutum
  Clone ID: LIB3149-013-Q1-K1-E8
gctcttgcacacattgcaagacgggcattttttaagagacccttctgcgatgactttttaaggtttcgttttgagaagtttgaagttggtatctggtcttcatgaaacatgagaaccttggaatgagtcgtcgattttctgatcggagacatgaaacaaaatttgcttttttgctgggtaattataacttgttttcttttgctttctgttaaacttgcttagctgcacaagttttcgactttcggtgtgcgtctgtaccctgtatgttttcaagtcatctttgtttacatgtgaaattaaactagaagagttccaacgttcgaccatttgctctatgcgcaatgacttatcatgattcata

SEQ ID NO: 40003 - DNA, 138 bp, Gossypium hirsutum
  Clone ID: LIB3149-013-Q1-K1-H4
aaccgggtgagttccaggcgtgcgaaaattagagataattttttctccaaatttacctcgccttgttttcggaaatggtggcggtgtgattggcctgtatgtacacatgtagtgtaatgtcataggtcatgacaggga

SEQ ID NO: 40004 - DNA, 138 bp, Gossypium hirsutum
  Clone ID: LIB3149-014-Q1-K1-B1
actcttaatccatatcttttctacttcttataactatcaccgactgcacttcctttacgggggcgagtcttttctcatacctcgatatgaaagctatcgcactagaaaaataccattatgtcctctacttcattgttc

SEQ ID NO: 40005 - DNA, 361 bp, Gossypium hirsutum
  unsure (1)..(361): unsure at all n locations
  Clone ID: LIB3149-014-Q1-K1-D12
ccacgcgtccggctaccttcgtggagagtgtgatgggttctcaatgtccaaaagagctcgaaccagctgatccgagaacaaaagtggatcttcacctctntagacgggatgaaaactattccgaaccaaatagacgccaaagtgtgtttcaaggtgttggaagaaccctangaagtagcagcccgagccctactccctctgagtcaactgctgcagccggtaatatcatcactgcaccagcgccatcaatgggcctggttgtggatacatcatngccaacaacctctattcagctgaggttatcggatggtacgcgcatgatctcacgattcaatcaccatcatacgatcagagacattcg

SEQ ID NO: 40006 - DNA, 211 bp, Gossypium hirsutum
  unsure (1)..(211): unsure at all n locations
  Clone ID: LIB3149-014-Q1-K1-F8
atcaactctacctctcttacctaactctntaatttccnnctccaaatttcttggttttcattgcttntaatcaaatccccgaaaattattgcttctctagaacttacagaatgagcagaaaagggcactccaataacaagttggtgagattcatcacaattcctttcagagccttgggcaaagctagggatctntatgttaaaagcatgac

SEQ ID NO: 40007 - DNA, 250 bp, Gossypium hirsutum
  unsure (1)..(250): unsure at all n locations
  Clone ID: LIB3149-014-Q1-K1-G11
aaggaggagaaatccatggctggcccgttctttctatatttttataacaatggtgaataacccanacagagaacgaaatgatgcatagaaggctaaagggattcggaggaagaaagaagtcacctctgccattngattgctnntttgttttctctatgcgtatatntcgtttgtccaaaatacaatgatntttttgaggcctttatagctgaaaagaaagaaaataaaaatacaattttcattcctttct

SEQ ID NO: 40008 - DNA, 271 bp, Gossypium hirsutum
  unsure (1)..(271): unsure at all n locations
  Clone ID: LIB3149-014-Q1-K1-G9
ctcaaccagcattntataaccaagagtacagaaccaggaatattagtggtcttggaaattattctgttggccaaggaacttttactgattctgcaatgggtaatatcaataatttgcaacagttaaccagtctgaaaattcatgtgaatagtggtggtgatcttggtggtgatattggaatgaagactggaacatgccagccactaaaacagttaaactcagaaaatnttggaactcgtggagctggaatcaagattaggacccgtggatc

SEQ ID NO: 40009 - DNA, 396 bp, Gossypium hirsutum
  Clone ID: LIB3149-015-Q1-K1-A1
gtgattttctggtgtcgtgaggtattaggagagtcggggatcacaatttataaagacagggctatttccgtcgtctatagagcatgacactgacactcttctaatcaaatgagacctcatcaacaagtccacggggctatttccatggtctaaagagcgtgatactcttgtaatcaaatgagacatcatcagcaagctcacttcaatcaagcatgatgaaccataattactttgaatgtaacacccctccctgtgattggtattttatcattttgttcaatatttttttatagttattgagagtcttttctgtctcgatgacaatccggttttcggtcagaatctaggattggctctatgcttcttgctaaagctgatttccttgctagagttcat

SEQ ID NO: 40010 - DNA, 361 bp, Gossypium hirsutum
  unsure (1)..(361): unsure at all n locations
  Clone ID: LIB3149-015-Q1-K1-A3
gattgtgcaaggagcgctaaagccacttgagttgaatctggtacctgtaccatagtggaaagaaataaagaaatagtagtggagggggctgtttttctgaggcctcatcttgctttagcagccgaatgaataactcgatccgctatttgctgttttgattcattcttgattttgtatctatcatcattggtcaattttccaactgtctttgaggtgagtgttgggcatttatttgtttcacaatagggagagaatgggctgttgtatcttcttctgctcgagatatggggggctcccagtcgtctcgaatgcactggctttcaattattatttattttaattttgggtggggaaaaannaa

SEQ ID NO: 40011 - DNA, 222 bp, Gossypium hirsutum
  Clone ID: LIB3149-015-Q1-K1-A9
aaactggactgtttacaacccaaaattaatctaatcatcagcccaaatacccgcagcccgagcacaaagaatcagaggcccgagccttagctactgctggccgccgctcctgcctctgcctagctccagcgccgcacgagccactccccacgcacgtagcagtactcacaccagggaccacgccgtacgcacgcccgcgcacatgcgaacctgctggagatc

SEQ ID NO: 40012 - DNA, 420 bp, Gossypium hirsutum
  Clone ID: LIB3149-015-Q1-K1-C10
ataaaacaaggcttgctcatgggggaattcacaaggaggttcacgaccttctcttggactatgggcttgaaattattgcagaaattcttattgaaggtctatcacgagtgaaaagatgtactgatgaaggacgagctctcatgtcattagaccttcaggttttaatcaatggcttgcaacactttgtctccttgaatgtgaagccaaagttacagatcgttgaaactttcatcaaggcttattatctccctgaaactgaatatgtacactgggcacgagctcatcctgaatacagcaagaatcaaattgtgggattgataaaccttgttgcttcaatgaaaggttggaaaagaaaagccaggtttgaagtgctagaaaagatagaataaacaggtacatagccctggaatcactacttaa

SEQ ID NO: 40013 - DNA, 110 bp, Gossypium hirsutum
  Clone ID: LIB3149-015-Q1-K1-C8
gccacgcgtacggtgaagatcaaaatgatgcatctttgttatagataaaatatcaggagggatttggatcttaagagcatgaatgcaagctatatcgaaatacgatctcc

SEQ ID NO: 40014 - DNA, 415 bp, Gossypium hirsutum
  Clone ID: LIB3149-015-Q1-K1-C9
atcgaggactaagctcgaaaaggaatatgaagaagaagttttggttctacaaaacggtcgactagaccgagatgcgggggtgaagttcgatgtgtacattaatgatgaagacgacgagacaccgactgaacctgaagattcagagttcgctgggagctttacgaatctaccgcataaccatcacaagactgggatgaagcttaacaccaacttaacattgccattaacagatttgttggaggatttgaatgttgaaggtgatgagagtattttggtgactttggtgcctaaagaaggaaagggtctggtttctattggtaacattaagatcgactacatccgagattgatgatcagttaatttgccgactcttcggtcgcttactgaaacattttgcttcgtgaatttgtttccc

SEQ ID NO: 40015 - DNA, 418 bp, Gossypium hirsutum
  Clone ID: LIB3149-015-Q1-K1-D7
atgaaaccattatttgaagatgaaaatataagactgtttcattgattatgatctcggcatcatgttgcagactggtgtaactttactcgtgatcaacttgagcaatcagacgaatttcataatgaatgctcaaaacagcatcaatctgaagttggctgcgaatgaacaaaacattagcagggacagcttcacacatagtcttaagaaaacattctcctgggtcggaaccaaagcttccgacgatgctctactccgagaagagtatcatttaacaccaaaagacggataccttagaagtcgaactatggttctaaatggcatccctttagaacttacaagcaccggagacatcccatcactaaaccccgtccgtgttaacgtgaagtctccaataaccatctcgcctttgtcaattgca

SEQ ID NO: 40016 - DNA, 387 bp, Gossypium hirsutum
  Clone ID: LIB3149-015-Q1-K1-E10
tccacgcgtccgaaaaaaatgtaaaataggtggaagggaagggatctaaccgaacattcggtgttctttgatttgttttatgcatttaggcgcagtaaccccatttgtcctgggacgttccatttgttggcttattatttttaggccaaaggtgtctaaagctctaaaaaaatccattctaaattgaattcttgaaggtcaaaattttaataaattaagtcatttaatccttaaagttaaaaggttaactattaaagagtaacatagctattttgaggttgttttagtaatgtaacatgttaaaattgtgtaatgtgtcgaaatatgatattttttatttaaaattattaaagatcataaaaataccaaaattaaaatatatttatt

SEQ ID NO: 40017 - DNA, 385 bp, Gossypium hirsutum
  Clone ID: LIB3149-015-Q1-K1-G11
agagttcagaatggtaactaagctgcaaaggagaacagcttctcgcagaaagcttcagtgtcttccaactctctccaacaccaaatctgtaatgcaaatatacatttactctttattattttgagatcccttttatttctttatccagaaaaaaacttaaaacatttttcttttgttttggttttcaaaggttaaaaggagttccatagtcctaaatgttcttctccaatgtcacaagctcaaagtcaagctggaagaaatacacagagagtaccaaaatctgatgactatcagaaaccaatacttcactctattgaaacatatacaagtctcaaaggaagtgaaggtggagaaagttggagaagaatttgtagtcaaagtgagt

SEQ ID NO: 40018 - DNA, 242 bp, Gossypium hirsutum
  Clone ID: LIB3149-015-Q1-K1-G5
tattctataaatcctttatttcttaacagcacctcccattaaaccggaatgtccttcacactcattcggacgcccatttcccactccaaatcaactcaatctataaattattttgagatcccttttatttctctatccataataatacttacaacattcttcaatgcttttggttctcaaaattaatctcctaatcctccctcccctaatatttttgcatctactacacacacaaattcaat

SEQ ID NO: 40019 - DNA, 409 bp, Gossypium hirsutum
  Clone ID: LIB3149-015-Q1-K1-G8
aaatgctccccaatataatgccgcgtctggtggggggctccctatgtggataccgcagccgagagcaattggggggccacagatgcatccaatgcgtgaggcaccacctgctatgcaaaaggcacctgtccaacaatgcatcactatgaatcgaccaccacacaagtctccaacagtgggcatgaacccaaataatatgcctgtgcccactgcagctgattctcaatatactgctgcatcacgtcctcgaccatgagtgtcacttcctgtatccaccaccttatatgcactatgatgcatgcacacttcacctttgcctgaaggaatctctacatcaccaccacctgataaagctccttcaccactttctgatgagccagacccacccagactgtaactctatgatgcc

SEQ ID NO: 40020 - DNA, 326 bp, Gossypium hirsutum
  Clone ID: LIB3149-015-Q1-K1-H3
ctatcccgtcccttcccctcggaggctttttatacgactagaagttcccatcaaatttttaagttaatcacatcttctacatcccgcactgctcgttcataatccaagacctttttcaccataatttctcacaattcacattaacccttttcttccataactacccgaaccctacaacttcaagcataacacccccactctgccccttttgcctcatcaccatctttcgattgtcattatccaacataaaatatttctaccacgatttttgcgaagatggtatttcccctaaagttaaaaaaccgacgaagtcgaggaattttatc

SEQ ID NO: 40021 - DNA, 274 bp, Gossypium hirsutum
  Clone ID: LIB3149-015-Q1-K1-H6
ccggaacggaagtgcccggccaggcgtcccgtatctttgggatggaattttcaaaatgcaaaattagtctccactttactgtattgaggctgtgggtattttggttcatggcgttggggcctgcatgttggctctaattctatatcctctatgtattggctattttaatgttttaatgaattaaagtttatgctttgtcaatcaaaaaaaaaaaaaaaaaaaaaaaaaaaaaaaaaaaaaaaaaaatgctggtgcaaaaaaatataaaacaaaa

SEQ ID NO: 40022 - DNA, 208 bp, Gossypium hirsutum
  Clone ID: LIB3149-016-Q1-K1-A1
ggactatgaatttgcttcaaggtcaaagacaacagaggagttagctagcaaatacataggcatctacacattcaccggcggcaaggctgtctactaccggaatctattagttataccggggacttctttcatgggtgaagacagacttcacttcataaatggcatactacatcttgaggctgagttaaccatcaggcgataaccaact

SEQ ID NO: 40023 - DNA, 377 bp, Gossypium hirsutum
  Clone ID: LIB3149-016-Q1-K1-A2
atcgatgccatggttatgtatcccatacattgaatattggtgcctctgtcgtaattcgagtcttgcatgtatggtagattgcaactattatagatgtcatgattcaaggccaccttcatttggcctaacttgagtaaattggatatttgtagctgtttttaagctgctttttttactagatagagaattttggttggacataagctgctgcttcttttttgtttggttcaaacttaggtatcggagttaacgaacagctttctcaaagagatggggggtagaatcaggggcttacctcagttaatgcttgcaatcccaacatctgcaattctttttttttatctccagactgccgctttctttgcacctaataaaaa

SEQ ID NO: 40024 - DNA, 378 bp, Gossypium hirsutum
  unsure (1)..(378): unsure at all n locations
  Clone ID: LIB3149-016-Q1-K1-A5
ggggggngggagaagggtggaaatatacttttttaanaactactgcattctaaccccncaaacttatcggtgacgggattattaccttcagagggaccaaaccacatctcaactgctgttgtatgaaccatcctatatgcagcacctgaatacattcaaacaggactccttacaatcaaaagtgatgtatgtatctatggagtattcctctatgatctcataaccgttacgcatccgttgtatctgaaccgtccctaaagttgataaaagctcttctaatggttgccaccacacatctccaatataataaaatttcaagttgatcatttaccctaattttgatgtcaaatatttcatttcaattcctctctataaact

SEQ ID NO: 40025 - DNA, 237 bp, Gossypium hirsutum
  Clone ID: LIB3149-016-Q1-K1-A8
attggattcagctggtttcaacaatatgatttagggttcttcagcaaattctatcaaacaagcaaattgcacttttgtttcaagtgtttcaagtgtttacaagtcgattgtgccaaacaaatcaaaagacaataatagtgagagaacaacatgagagcttttaaattaatttgaactggtgggaaactcgccattaactgaacttttggaagatactcatcttttttcagcattcta

SEQ ID NO: 40026 - DNA, 366 bp, Gossypium hirsutum
  Clone ID: LIB3149-016-Q1-K1-B10
gaaattcagaggagtaaggcaacggccttggggaaaatgggcggctgagatcagggacccgctaaggcgtgtacggttatggttgggtacctatgacaccgccgaagaagcagcaatggtgtacgacaacgcggctattcagctgcgtggtcccgacgcgctcactaactttaccactccccagcaaaaatcactgcaagacaaaaacagtcaaaagccgttatccagctcagagtacaactccgtggaagaatcccacaccaccaccaccaatatttgctccccaacctccgttcttcgttgtccttcgctttcgaccgacgaagtagattcgccgcaaagcgtcaaaagaatctcgagaaatcg

SEQ ID NO: 40027 - DNA, 384 bp, Gossypium hirsutum
  unsure (1)..(384): unsure at all n locations
  Clone ID: LIB3149-016-Q1-K1-C12
gtctgcctctgttgacaccagatgatctcaaggagatgggtatatttgcagtcggccatcgaaggaagttgtacaatgcaatacagcggttaagaggcaatgattcttcttgaagacttttcagataagcagagtttgaagtatcacaagtgatgctgctatgccaactgttgtaattcgaggacaaggaaacgttattgctgcaaagcttaggtatgaattttgtgtttaatgctagtgttgttgttatgagctttatatcaaaaacttaaaccacaaatcacaatcttcattccaaaatcttttaagtagttcagagatctcattttcttagttntgcaaataaaaactatgtttatatatatatangtgtgtgtgcgtgtg

SEQ ID NO: 40028 - DNA, 375 bp, Gossypium hirsutum
  unsure (1)..(375): unsure at all n locations
  Clone ID: LIB3149-016-Q1-K1-C3
ccacgcccgtaccgaaagaaaaagtagattttgggttctattcctttgtgtcatctcagaaagatagttcccggtcattgttggtgtctgaaagtttgtcagggatgggtggactatccagaagagttcntggtgatagaagaaaagaaaagcattctgaacatgtgaattatgttcagctttcggcttaatatcgagcgatggggccatctggccttgtcaagactagtggaagtgctaaagttggtgatcatcctgattatactgagagtggaagagcagtatgtgtagaggtagcacaagcagtgatgtaagcaatgaaagttcgtatagcagcttaagtagccgaatcaacagacctaataagacaaacga

SEQ ID NO: 40029 - DNA, 394 bp, Gossypium hirsutum
  Clone ID: LIB3149-016-Q1-K1-D7
aaaaaataagaaagacaaaggaccttccgtttgactcttccaacctccacgatccatttctagttcttcacgctgcgattttgttctagcctgagattatccgggtccatgcatccatccgatttagagattttagaacaaatccacagtgacgtatttctatcaggtatgaatctgagtttttccaaaatgttgtgaatggacgtgatattgtgtcgtgggcagctgttgatcacagtcgacccaatggtcaaagtgatgagcttattggatttgttactgcaagaatcgtaacggcaaaggatagtgagatagcagatttgctcaggtatgatccatcgaaggggcatcaaacattagtatatattctgacgctgggagtggtagatgctta

SEQ ID NO: 40030 - DNA, 400 bp, Gossypium hirsutum
  unsure (1)..(400): unsure at all n locations
  Clone ID: LIB3149-016-Q1-K1-E1
gcaagttcctttcccccatctactctctgtctatgttggcatattgctagacaatgaaggggaaatttctaaaggcatgcattaccaaatggaggaagatggggaatagagtcataccttgtggcagttgcgaatactgttatgagtgggcaaagtggcctaataccaagaatgaagagagttcaatcccgagagatgtgccaaagggtcacttggtagtatatgttggtgaaaactataagaggtttgtaaattaaacttaccttgctcaagcacccactgttcaaggcattgctagatcaagctcaggatgaatatgattntaccacagaccccaaactctgcattccttgtgatgaaagccttttcctcgaagttgttcgatgcgctagctctcctc

SEQ ID NO: 40031 - DNA, 376 bp, Gossypium hirsutum
  Clone ID: LIB3149-016-Q1-K1-E10
cacaaatctcttggctgctgttattatagctttaacatttggccaaattggggacagcacggttgaaaggcccaatttcttcacgcaactttcccaggataattggtcttcggttttattcgcaatggctggtggggtggttctcagcttgggaaacctttctacacaatatgcttgggcttttgttggtttatcagttgtagaagtcatttcatcaagcatgactgttgttataggtacaaccttgaattacttcttggatggaaaaataaacaaagctgagatcctttttcctggtgttggttgcttcctagttgctgtttgtcttgcatcagctgttcactcatccaatgcagctgattataaaacaaagctt

SEQ ID NO: 40032 - DNA, 286 bp, Gossypium hirsutum
  Clone ID: LIB3149-016-Q1-K1-E11
cctgatcttaccaaagaagaacggattaagattagacggtttctggaatccttaactgaagaatagaatagaaaaagcaaacatgtaaattttgtttgaaataagcttgtatcctactgttatcttgtacaattactacaataaattgatggctttaataattgcccacaaaataccaccttcaaaaaaaaaaaaaaaaaaaaaaaaaaaaaaaaaaaaaaaaaaaaaaaaaaaaaaaaaaaaaaaaaaataaaaaaaaaaatataaaaaaaaaaaaaaataatgg

SEQ ID NO: 40033 - DNA, 261 bp, Gossypium hirsutum
  Clone ID: LIB3149-016-Q1-K1-E7
gccaattttatttacataataccaaatttattgaactcgccaccacacttaccaatgggaggaatattccaatcgttgggttacctcttctacttttccattctaaataccacttataccttatcatcaacttcattaatcttccttatctaaatttttatctctctttttaatacaataacaaatcaaaaattcattacttatcctcttaatcattcaaatctatactcactaatacatacaacctctattttacaacca

SEQ ID NO: 40034 - DNA, 336 bp, Gossypium hirsutum
  Clone ID: LIB3149-016-Q1-K1-F2
gaaaaaacaggtggagtttgcagggaagaagatgataagaacccaaagattgtggcactggctttgggttacattgagcagaaacacaaagggtatgttcaaggattgaatcagattctaagagatggatgggattgaagaaagcagtagctgtcaaatttttttggaacaatttgggttcacatggtttggggccaaccagtccattatttcatgttggaacgatatggacgaggcatgttaaaaatgggtgttatgtcttgttatatgatattgatatctccacctattaccaactgattctatagatagaatgcagatcatttcccttttttg

SEQ ID NO: 40035 - DNA, 317 bp, Gossypium hirsutum
  Clone ID: LIB3149-016-Q1-K1-F7
aacaggtatagtgagtattgaggctggatcatcatttgcgtgggggaagatggttggatcgcgaacggaatgcaatcataattgatcggtttgtggcatgtgcaccatcggggagaatatacatggaatttggcttaactgcacaggctactattgctgctgccatagaactttgctaagcttggatgaaagtttctgttgtaacttaacgttttcgattgtagatgtcgatgaacatctgttccaattgtgacacactcttctgcatagtttacttttataagaaacagacttaaattctctttagttgcttatga

SEQ ID NO: 40036 - DNA, 404 bp, Gossypium hirsutum
  unsure (1)..(404): unsure at all n locations
  Clone ID: LIB3149-016-Q1-K1-G5
gaatanncgggcggaccgcacgcgtccgatcgtctataccgtaaaattgattntcatactaatgtaaaaagacatatatggtagaatcatgacggttttttacgaccctggccggaaatacatacatttgtctcatacactatgttgatggtgagaatagatttttcctacataccagatgggctataattggagataccattgtttctggtacataatttcctattaaaatgatgaaattccctactctttaccaatattcccttatgctcttacatacatttcattttaattacactttttatttttggatcaattaactatattcatactatttcctgtttgcaataactgatttcataatgaaggtttaaatccgctcacatttttaaatttaccctttt

SEQ ID NO: 40037 - DNA, 252 bp, Gossypium hirsutum
  Clone ID: LIB3149-016-Q1-K1-H10
agacccacgcttacatacacactttcttcatcattaactttatttagtctctatcactttcacatttaggggaggttaatatgatgagcaggctgggtccccattttttcaacaacccactatattttatactacactttcacagacgatcactttctctctggaacaaacaaccaccattcagagaaccatatcacatttccaaattccaactctttcacttactatcttttttgtcatagccatattcac

SEQ ID NO: 40038 - DNA, 397 bp, Gossypium hirsutum
  Clone ID: LIB3149-016-Q1-K1-H7
gaaaaaggggtgatcaccttcgacagcctgaagaagaattcggcattgttgggtttacaggatttgagtgatgatgatttgaggtgtatggtgaaagaaggagatttcgatggcgatggtgcgcttaaccagatggagttttgtgttctgatgtttaggttaagcccagagttaatggaagcgtctgggtttttcttggaagaagcttttgcaacatgatttcaaggattttatttaatccccttcattttgctctttctttcttgtaatgaaattgtagaatttgagatcagaaatttgctttttgtcattgcttctctcattttttttattcattctggcaaatataattatagctgaaaattaaaatggaaactgtataataatttcatttcat

SEQ ID NO: 40039 - DNA, 286 bp, Gossypium hirsutum
  unsure (1)..(286): unsure at all n locations
  Clone ID: LIB3149-016-Q1-K1-H8
ggccgaccacgcgaacggaaaaaanattatcaccttcnacatttcttataaaaatacaacattcatccatttacaagatttttttaaaaattattatgagccccaccaaccaaataattatatttctatactatttttcacttaaccatatttattttcctattctaatatataatttaaccccatattttaattcaatcaacaaaccaaatcttataaaaatctttttcttacactcatttacctattttatttaatcccccttatattaactctttcttccttt

SEQ ID NO: 40040 - DNA, 423 bp, Gossypium hirsutum
  unsure (1)..(423): unsure at all n locations
  Clone ID: LIB3149-017-Q1-K1-A5
ttttgtgattgttgtgatggaagtgatgagtatgatggtagcatcctgtgtcccaacacatgtatcatgggtggtaatgtcgagtacaaaactgaagattatgtttctacaactagtcatctgcactctactaaattgaaggaaatgaaaattggaattaaattagaagacttgattcagactcttgcagggttgaagatgataacagtagcagaggtggctcttggttgtgttctggtggttaaatggatatttcataagcgtgtcaagtctaagaaaagacatcatagatgaaggaatctaccgttagcttggtaataatactctagaatatccttgtcctctaattntcactttntacattttaatatgtaggggaaggatccacttatttcataataaaactcaagtgattttataccc

SEQ ID NO: 40041 - DNA, 372 bp, Gossypium hirsutum
  Clone ID: LIB3149-017-Q1-K1-A6
ggatggtacagagtcatctagctttgcttccttgtgtggaactggtacatctcccggcggcgatgactatcgagaccagccagctctttcgttctagccattctcgggatgtcgatggatatgatgcatgtttaaggactcctgcttgtatacgcaaatagccgtgtctgtatagtggtcactctaacttcaatagctacatgtgcagtagttctacaccggcttgactggacatgcctatgggttcatcaactgattcagctatcagcacataagcctttggtgagataggatattaccgattaggcattgattgattgatgcttcgaacatttgctcatgcataatagacaatggctcgcccaatggagc

SEQ ID NO: 40042 - DNA, 318 bp, Gossypium hirsutum
  unsure (1)..(318): unsure at all n locations
  Clone ID: LIB3149-017-Q1-K1-B1
ggatgtcgaatgttgaagaagctaccgttaaactccaatagtgcaaaaggaaaaaggctcgtcattgtaggaagggaggaatggtggaatgatctanaatgggaggatgaattcactcgaattgcttttctcccctctttcaaatctcgtgatctatgaaattttggatattaatcaaggcttaaagccctcattgtatcatagcatacctcactataagttgtattttgcctatccctaaattacatgcagcttggttctttgttttacacaatgacttgttcacttacataaaataatgtgtttgaatttgagcgt

SEQ ID NO: 40043 - DNA, 421 bp, Gossypium hirsutum
  Clone ID: LIB3149-017-Q1-K1-B11
gttataatggggagtagagggtgtggagctgagaaaagagggaatgatgggaggttggggagcgttactgattattgtgtgcatcactgtgtttgtcctgttattgttgttaggcatcctgatgagaaagatggcgggaatggtcagcctgtggtgatagataaggaggccagggtggaggaaaaaggtggcaaatgttaatcctattgatgcctagcaagtccggtaattgcagctttatcccatcagtagcagatagcaaagaagactatgagtcgctcaggattagctcggatgaaggattcagttaaaatggatcctgggattctctttttctactttcatctccgcattgtttaactttttattggtgatgttatcgtatgattgatgaggttcttgatttccttttatggcactc

SEQ ID NO: 40044 - DNA, 256 bp, Gossypium hirsutum
  Clone ID: LIB3149-017-Q1-K1-B12
gggccgacccaagcggacgattggaatcaaaactaattagtgtaaagtttttaaaacaaaaaacgatggaaggcgggcggtcgttttttatcatgagtcgcatcactataatgcgtcccgacatatgcagttaggcataccagaagagaaagatctgcgttaattgtcagcctgacgtgactgataaacctgccagggcggaacaaaaaggcagcatatgtaaagactattgactcctatcaaaaactttgaatgc

SEQ ID NO: 40045 - DNA, 298 bp, Gossypium hirsutum
  Clone ID: LIB3149-017-Q1-K1-B7
ctgagttgtatttgatactaaatttataattggcaacaaatagaaatgaacatgctgtgggaatctaggccatgtatatataagtttagatagtaaatattgtagggatcacaggacgaagatgaacaaaagcgggactgagaaaacaaaaagagcaaacgcaactaaaacccctagcaacagagtcctaatatagccagcaggatacaaaagcaaaggggcccgcaccagataagggcttcccaactggtgcccaggaagagcggctaaagggactcgcaatggagcagcaaattaa

SEQ ID NO: 40046 - DNA, 353 bp, Gossypium hirsutum
  Clone ID: LIB3149-017-Q1-K1-C11
gttattacattattgaagagcatggatgctaacgatggatcagagcatgctccgggtactgaactgaaagcatcggatgaacatcttaagggacatggaccattcatggctggggaaaggagtacggctgtggagttatggttgggaccaaagctgtgccatatagggatcacactacgcacattttaagaagtcgactgatgctgaatgcttgactaatgcccacaattacatgaaggcgattgttcgtcggaaatctttcgcgaaaactacagctgacaaggaacatttgatcgcagaatgggcaccgaatgcgaatgcatgaactgtacttgaacagctttacgtctttg

SEQ ID NO: 40047 - DNA, 337 bp, Gossypium hirsutum
  Clone ID: LIB3149-017-Q1-K1-D1
ggctccgtcatcacggatggcaatgacaagaagagtgcatcctcttgtttcattgaatccttaccagggcaattggatgattaaagttcgtctcacaagcaagggaaacatgcgtacctataagaatgctagaggagaaggttgtgttttcaatgtggagttaacagatgaagatggtacacaaatacaagccacaatgtttaatgaagctgctaggaagttctatgagaagtttcaactggggaaggtctattacatatcaagaggaacactaaaagttgcaaataagcagtttaagactgttcaaaatgattatgaaatgactttgaatgagaat

SEQ ID NO: 40048 - DNA, 404 bp, Gossypium hirsutum
  Clone ID: LIB3149-017-Q1-K1-D8
aagaaaacaaggattggaaacccatgaaaattcctgatcatttccagcctcagcaatcatgagaagaagctcactgaatcttttttttttttttttttttttgctatttttttagatcgaatgtgagatgtatgtatgtgtgtacaaattgatttgacctttaagtattgttaataccaaaaatcaaagatgtaaatgaattcccaataagcatttttttgataaagcaaagtacatttcaacaaaaaaaaaaaaaaaaaaaaaaaaaaaaaaaaaaaaaaaaaaaaaaaaaaaaaaaaaaaaaaaaaaaaaaaaaaaaaaaaaaaaaaaaaaaaaaaaaagggggggggggtttaaaaaaaacaaaatttaaaaagggggggccgttttaaaaaaaccatttt

SEQ ID NO: 40049 - DNA, 423 bp, Gossypium hirsutum
  Clone ID: LIB3149-017-Q1-K1-E12
gcttgccatttcttctgaaaagagatagagattgaaaatggaggctgatcaaaagggtaaatccgatatctccttcgctggaacctttgccagcagcgctttcgctgcttgctttgctgagatatgtacaattcctttggacactgctaaagttaggctccagcttcagaagaaagctcttggtggagatgctgcagccttaccgaaatacaggggtttgttaggtacagttggtactattgctagagaagaaggtttagctgcactatggaaaggtgttattcctggattacatcgccaatgtctttttggtggcttgagaattgggatgtatgagcctgttaagaatttttatgttggaaaagatcacgttggagacgttcctttgaccaagaagatacttgctgcccttacaactggtgc

SEQ ID NO: 40050 - DNA, 337 bp, Gossypium hirsutum
  unsure (1)..(337): unsure at all n locations
  Clone ID: LIB3149-017-Q1-K1-G1
ccccccccaccnacacacaccgccacgttttattattatgggccacacccaaatcactaatacatccatctattcaacttccccagaaataaccttgatgcaagtctaaacgatcattcaaatgtttaaccagtcttctaacacagcaactaatttgcattacctcaatttaaaccacataacgcttttaataacattcatagtgattctccattgtgcttattgatctacacctgatattttgtataataaaagatcattgctcttaactaacgtacaaaaagcttgcttacatgtcatttaacatacaaccatctttaatctttcttatcataaa

SEQ ID NO: 40051 - DNA, 378 bp, Gossypium hirsutum
  Clone ID: LIB3149-017-Q1-K1-G12
gttcggggtgcgtcgatcttgagaactgtgtgcactaacaactaaaagttacaatttttaaggtttttagcgttttaagaggatgtaaatagggaaataaaaggaaataaaggcagccaccaagggaaagcaagaaaattaccttgagaacaccattgaagccaatcttcaagcaattttccacaaagatttaagagtccaagttgattttcaagagagttatcatggatttcttttattctagtggttatatagtattattggtttactcttgctattattaattaattctcttaataccaagagagatgaaccccgagatagattctattgtttgatttctatttttatgcaataaaatcttagtttctttgtttt

SEQ ID NO: 40052 - DNA, 414 bp, Gossypium hirsutum
  Clone ID: LIB3149-017-Q1-K1-G2
cattgatgtaggagtcgatgagggtgtgaagttgctaaaggcatctttgcagtccaagactgtgctcactgatgtgttcattgagaagaaggtgggcgaaactgatgctagcaattctgctggtgtagtacattcaatcgagatataagaaatgctggccgattttcagtttgcaagtttgttttatcagtcccggtctaagaagggatgctcattggtttttttaaaaccttagcagtctgtatgaggatcctttgagcctcttttgtgttttaattgctagtcttcgaagcctcttttgtatgtaacttggtttttactttttaaccaatgtttaaaccccatctaagtcaaaaaatcttagctctttttagagctaccatttgtatgttataatagaaatataatatggaa

SEQ ID NO: 40053 - DNA, 368 bp, Gossypium hirsutum
  unsure (1)..(368): unsure at all n locations
  Clone ID: LIB3149-017-Q1-K1-G7
accacacanacnccataaatggctctggtttgattccaaacccgaccgcccacacaaatannanaaacnaccgtnttacactcatgtttttggataacatctactacaagaacatactgtacaacatggttttttttattgttgttcaccaactgtcttactacaaaatgaccataccttatatgaataaaattaccaatatccaagactatttcttcaattagttttcaatttccattactcttcttttttaaaacaattttttcactaatatcaactgtcaaatcattaaatcaattcaatcttacaaacaatcttctttaataattcttttctaaacataaattttctatttttttcaaataaaa

SEQ ID NO: 40054 - DNA, 402 bp, Gossypium hirsutum
  Clone ID: LIB3149-017-Q1-K1-G8
attagttgtggttcacgctagtgcaagaaatgttcccacaaagactactacaatggctgctaacgccgtgcctagtgctgcatctgcgtccgttggtgaccaaaagaacttccttacttacggtggtgcagggggcttcgctggcattggctcaaatggcatgccatttggtggtggtggggttcttggtggggttactccctttggtggtgtaggtggacttggtggtggtggtttgggtggacttggaggaaccggaggattcggtggacttggaggaaccggtggagtcggtggacttggaggtcccggtggagtcggtggatttggaggtaccggtggagccgatggacttggaggaaccggtggagtcggtggatttggtggtgctggtggtggtgt

SEQ ID NO: 40055 - DNA, 386 bp, Gossypium hirsutum
  Clone ID: LIB3149-017-Q1-K1-G9
gcaagggttaataatccacagtggttgattgtcgttgggggttgcacacatgtgggttgcattcccttgccaaatgctcgtgattatggtggatggttcacgcccttgccatggttcccattatgatgtctgtggcaggattcgcaagggtacagcaccatacaacctgtaagtacccacttacacctttttggatgagagcaaactgcttatactttaaaaattggtagcgttcctttgggttctcgtgagttcatataatgttattagataatgccgaacgcttgttacaaaattttgcttttacttgcctcggactttgacggcattggtagtgttgattttgtaactggaataattgcaactgcaaccagttcatatttctc

SEQ ID NO: 40056 - DNA, 243 bp, Gossypium hirsutum
  Clone ID: LIB3149-017-Q1-K1-H10
taaaaaaaaaaaaaaaataaaatttaaattttaaaaaaaaaaaaaaaaaaaaaggagaaaggggagaattaaaaaaggaaacaggcaaaaaaattaaatataatttatgtaggggccattttgttgcagtgacctgcttttgatagctttattattgcccttttgctagtattcttatgttaattcgggttttcaacatttccccttttaacaataggtctattagtgaaaaccatgggaatg

SEQ ID NO: 40057 - DNA, 269 bp, Gossypium hirsutum
  Clone ID: LIB3149-017-Q1-K1-H12
accgctgcgtctacgcgctcacctatcaaaaatatggtactggaagctgcataaagcacatcagaatggtgcttgcgtgtgtgtttgaatgcggaagcatcctttggcctctcagcttgaacactgctgataactgattatcgcattgcttttattttgatttgatcggttttatcattgtcctgatatatgcaccaacacatttgtgagatgtggcatatgatgcacacttaatatcctttttaaggaaagggaatgatattgatatt

SEQ ID NO: 40058 - DNA, 419 bp, Gossypium hirsutum
  Clone ID: LIB3149-018-Q1-K1-A12
aaatagaagagaaactaggatgtggagttaatgcttgctgatgattaggtttgaaaatggaatttcacaagtgaatgagagagtttgcctagttcgtaaagcaccaagctttagtggtccgttgatgcttcctactcgagcatctgcaaacagtttatcagctccaattaaatcatctggagggtttagggattctctggatgacaagtcaaaggctaatctggtgcaaataaaaggtcgattttcagtaacatctgaaaatttatatcttgtaaaggatattcctctaagttcagtttcgcgccgatcgtcacagacttcacctctcagaaagtctgctagtgtgggtgactggatacctgaatacaaacaagcggttcgtgcactagatcttctcctcaacatggtttaatcctaac

SEQ ID NO: 40059 - DNA, 308 bp, Gossypium hirsutum
  Clone ID: LIB3149-018-Q1-K1-A3
gccggatccggcgccacgcgtccgcgaactcgaagcttgaccaaccaaaaccaaattaaaataatccttaaataacctactaaatcttataactctaaaaacccaaattcctccaaaagtaaaaaagagatcggaatgcgaccataatgaactgaagatataccgctgaatcactgatgaggagcttttgcgatgaaagccctcagccagatacgctatctattggccaccggacggaaaggactaatctcatataagatagactgctggtactggcacgggaatgcgaagctgtgtgtgtaaaccct

SEQ ID NO: 40060 - DNA, 224 bp, Gossypium hirsutum
  Clone ID: LIB3149-018-Q1-K1-A4
acgacgcgtacgctcacgctttcgttcacgcgtacgggagacgaggacttttgggagctgacagacctataagaatgcacgcttacgagtaccactcgcgtactacttaaagctttgacgctgctctgaaagaatataaaatggcgggcgatgttgatgatccgagcctacatgcgcgggcttgcgacgactgagctgtgctatacagccacctaagtctaata

SEQ ID NO: 40061 - DNA, 422 bp, Gossypium hirsutum
  Clone ID: LIB3149-018-Q1-K1-A7
cgacccacgcgtactttttttttttaatttttttttttcccttttttttatctcacaaaaaacaccaccttgggtagggaaaaacttaatttggggtttccaaaaaatccacaatttaatgaaaaccaacatattctttatacttaaatattttctttcccaaaccttttataacaaccattaacattctttccaacattaaatatttcacatatcacttttcacttcccccaaacaagtaatccatataaaacccacctccaccctcttctttaaccttaattgtcctcccctcctatataaatattccacaatttctttccatcccctccgaaataaatattcgtttttttttcctttaacaccccccccgatctttttttctttcccccattatttttaatctaaattccgtttttttt

SEQ ID NO: 40062 - DNA, 232 bp, Gossypium hirsutum
  Clone ID: LIB3149-018-Q1-K1-B6
gtctctactgacatgtccgccaagcagccagctacagacctttatgtgagactgaacactggcctggtggcatcctctatggaatgggttccacgtccatctaacggcggacgatatactagctccagacttcatttcgcgagcaacttaataagtaaatttgctgtttttgcacctaatgacaataggattaccgagcttttcaacgttggtgactacaaacaacctctca

SEQ ID NO: 40063 - DNA, 366 bp, Gossypium hirsutum
  Clone ID: LIB3149-018-Q1-K1-C11
atgagcgataaagggtgggtgattggatgatgtgggcatgggatatcactagcttaaaagaactttgggggaacacaaacaatgatgaatgccctgactcttggttggatgcctacatatttataagctacatttaattatgaatacactgaatatagagagaggacaagatgggaggaagacattctggatatatatcatacaatatcgaacagagcttgagccttcctaatgggcatgaacaccggaaagcatatgaaacacatgaagcaatttgagcttactgtttgaagtctcaatctccacaggtgggctgtttaaacgatgcaatctgaattactcgttcatgcgacgatatcttgaaca

SEQ ID NO: 40064 - DNA, 427 bp, Gossypium hirsutum
  Clone ID: LIB3149-018-Q1-K1-C3
ggagggggccgcgcgaacacgagcccccaactgccacaaattatgacgtacactctccataagaaggagatgttaggctgatgcaccacctcaatgtgcaatggaggccaccaacctaggccatgggcctacttgatcgcccatagaccccgtccaggtatgtatggatgcacttgccccttttcctcttttttaaaccactaacctccacctgcatcttgcttacctcagcgatgtgggataataggaaatatggcttcttaatttttaaatccaataactgccaataactggctttctttgggaagttggggcctgcaaaatgcactaaccagtgaccaatttgattggtaatctaattacataaagttgtaataatctttgttgtgaaaatgagtaatttctttagattattgggttatgattt

SEQ ID NO: 40065 - DNA, 414 bp, Gossypium hirsutum
  Clone ID: LIB3149-018-Q1-K1-C6
cttagaacagtcttttctttctggtaatctttctcacaaatcaagtggtttttgtgatgaacgtggcaagtataaaggtaaagaagaggttgttgatgaagaagaagacctttccatggtttctgatgcatcttctgggcctccacacttgaatgtagataatggttatttcaatgatgataatcattatcaatatactttacctaaaggtgctacattgaataaaaatggtggtactaaaagacataggaagaaagagcatcaaagacaaagggaagttcatcaagaattgccttcgttacttgatgatactgccagctctcctctcatcaagaacaattttgctcacaccaataatcatgcttcagtggaggaaagtgtcctccattatcccccagggttctctgcaacaca

SEQ ID NO: 40066 - DNA, 247 bp, Gossypium hirsutum
  Clone ID: LIB3149-018-Q1-K1-D10
gttgcacttcctgtgtgtgttttgggtgtgaaatctgtcggttcactgattgcaggtgcgaaacttgcattgacttcattaggaatgccgaagcttgagttattttaagggtggggattcctttttgttgctctggttccttgaagtcattgtctttcattactattaattgccagtccctgagttcagcactcatggtgtcgttatctggtttaaaaacttcaaattaatttatatttagatctca

SEQ ID NO: 40067 - DNA, 207 bp, Gossypium hirsutum
  Clone ID: LIB3149-018-Q1-K1-E1
gtttacatgtatgcattatacggtcttagtgggaaaaaagaaataatggttaggcggtagtagcaccttggctatatatttctttgattcatgttactgtgtcgaattggtgtaccataaagcactccgaaagtgggagtatggacagctatcaagaatgaaagaaacaatatgtttttgatgaatctacaacttggtgatagcact

SEQ ID NO: 40068 - DNA, 341 bp, Gossypium hirsutum
  Clone ID: LIB3149-018-Q1-K1-E4
ctcgcgattcctatggctactgctgttgttgtatctattgatactgctcttgatgaggagaaaactgcatgaattatgtgaggagcaagatgctacatcagatgaagttcttgacgctgctactgctgaagaagcagctgccgctgatgcaaaggaagcagatcctgcagaggcggcagacgcggaacctgcagcctcggctgaagttgaaaccaaagacgtggttgaagaaccaaccgctgttgctgaagaaccaccaatagatgatactgctgaggcaacagtgccagaaactgctgacgaagcaatcacagaaaccactgcacaggccgttgaagcca

SEQ ID NO: 40069 - DNA, 445 bp, Gossypium hirsutum
  Clone ID: LIB3149-018-Q1-K1-F1
tatttcctttggcttaggataggcctaataagaaaacaaataattccaattcatatatgaacatttttgcctccttatttcttgaaaatgtggaattggaattcctttcctttggcttcaggataggcctaataagaaaacaaatgattccaattcatatatgaacatttttgcctccttatttcttgaaaatgtggaattggaattccccgaggaattccgatctcatttcctttggcttcaggataggcctaataagaaaacaaataattccaattcatatatgaacatttttgcctccttatttcttgaaaatgtggaattggaattccccgaggaattccgatctcatttcctttggcttcaggataggcctaataagaaaacaaataattccaattcatatatgaacatttttgcctccttatttcttgaaaatgtggaa

SEQ ID NO: 40070 - DNA, 422 bp, Gossypium hirsutum
  Clone ID: LIB3149-018-Q1-K1-F11
caggcgtacgaatgacatcgccatctttcaacatctggttattgtatcacaatgaacacggctcacaccaggatggtaacaaactccatggggccggcaacatcaacccttaccaatgtccatctaaggatacatttgcattttagactgccacattaccatataccatgcatgttcttctacaagaaatgttgcaggacatgcctttgtgttcctccaacgtattataggaacaaacaatttaaaaccttatacaacatctgcaaaaccaacgaaggaggccccaaatgcctttaaattactcaaaaaaagacccttttattactttcatacattattatccctatcaaatttctattttaaattcaagtcattgaatcatagtgtcgcgctgtgatactaactctatatcaaacgttctt

SEQ ID NO: 40071 - DNA, 422 bp, Gossypium hirsutum
  Clone ID: LIB3149-018-Q1-K1-F7
aaatcgtcatctcctagctcgtaagtacagatccaaaaagtccttgactccctgtccaattcttctctcttaaaactttaaaagcaatggagaatctatggcgagccgcaacgcgtcaggatccgaatccggaagactacaaaggcgtcgatttctggaccaaccccgaacgagctggttggttaacaaaacaaggcgattatatcaaaacttggcgacgccggtggtttgttttgaagcgaggcaagctgttatggttcaaggaccctggctccgtcgcccgcacctccgctccacgcggcgttgtatcggtggacctttgccttactgtcaagggagccgaggatatcgtcaaaaaggccttcgctttcgagctatcaacacgagattcaaccatgtatttcgtcgccgatacggagaag

SEQ ID NO: 40072 - DNA, 111 bp, Gossypium hirsutum
  Clone ID: LIB3149-018-Q1-K1-G2
gtaggccagcagccccagcagacgatctattcgttccaacccgaccttcccatgcatgcgacgtgatatctcgtctattgagtcgcctaaactcaacgcactggcccaacg

SEQ ID NO: 40073 - DNA, 420 bp, Gossypium hirsutum
  Clone ID: LIB3149-018-Q1-K1-G3
ggaagattagcaaaagctatcctctagcaattactaaagttgaggaatctggtgagcacactatattaggtactggagagttgtacttggactcaattatgaaggaccttagggagctttattcagaggtggaagttaaggtggcagatcctgttgtttcattctgtgaaacagtggtggagtcttcatccatgaaatgctttgctgaaacacccaacaagaagaataaaataaccatgattgcagagccattggagagaggtcttgcagaggacattgagaatggtgttgtaagtgttgactggagtcggaagcaacttggtgacttcttcaagacaaaatatgactgggatttgcttgctgcacgttccatctgggcatttggccctgataagcagggacctaacattttattagatg

SEQ ID NO: 40074 - DNA, 414 bp, Gossypium hirsutum
  unsure (1)..(414): unsure at all n locations
  Clone ID: LIB3149-018-Q1-K1-G5
tttccaaccaactttgaacccatcacttcgaacaatgtttctcaaggcgcttaggggattaaacgcaacaattgctatcctagtagacgaagatgcggatttgacatcgaataatttggtatgcagattaagatctgcattcaattatctgtggataccatacgatacagtggatacgttccttccaataggaagcaaacaaaggcagtggtatgaagctaatatttgttggaaagtagagaatgttatagctcatgaaggtttgcagagggtggaaagggttgaatcaaagagccgatgggtgcagcggatgcgaaacgctgagtttagaggggttagctntggggatgaaacggtttcggaagtaaaaacaatgcttgatgaacatgcagctggatggggattaaagaaaga

SEQ ID NO: 40075 - DNA, 331 bp, Gossypium hirsutum
  Clone ID: LIB3149-018-Q1-K1-G8
caccaatcacaaacgctgggaggctatcttaatagtgggaaggctacaacccacaacatctactacaagaagagatggcatcttcccccgtggctatggactgatagactgcatcctctctccactccattctccacaaagtacaccagaccgtctatctttgtagtccttaatctcaaccgatccatatgatctccattatttaaaccaaaccctttttccacattctccaaatttaccactcttttcatctcttattcgtggaaaactatgtccaggaaaattttctaaaaaacttcttaacttccccaattacatacacttgcatttt

SEQ ID NO: 40076 - DNA, 304 bp, Gossypium hirsutum
  Clone ID: LIB3149-019-Q1-K1-A11
ggaagagcaagaaaagagattgtttaattcattttcctttgaagactatgcatggagagtttataatgaatgttatctctttaatgatccacttgatagatatcgaatttaatgggtttttttttgtaatttttctcgattttagtactgttgctgttataacaatttgaagatcgtggattcgagtgtgtttaaaaaataatatttttcgatttgattagttgggatttaaagagatttatgggtaatttaagaaatatattaatttttttcttttatctttataaataatggaatttttgtc

SEQ ID NO: 40077 - DNA, 369 bp, Gossypium hirsutum
  Clone ID: LIB3149-019-Q1-K1-A2
aaaaaaaaataattaaaatatactaaacaatttatttttttaccaaagcctaaaacaactcaagagagctattcatactacaataacaacccattcaccccctcatgcgatacaagtaacatcgttacaccgtatactcaaccttacactgccctgccttcatcatatacaagcaaaaacaaaacaacatgctcaggggatgatattacgacatcaactgatctatattcccccaccggcaacaacttgagacccaaactaaagaaaaaaaaccggatcccgttgaaaattgatattgatactaaaaagacagggacacccgatggattttatatctataaagtggggattagagttacctgtgaagac

SEQ ID NO: 40078 - DNA, 342 bp, Gossypium hirsutum
  unsure (1)..(342): unsure at all n locations
  Clone ID: LIB3149-019-Q1-K1-A4
ggccgaggaggcgtacgatgacgaacaanttacaatatctcaaccctttttatttattcccaaccgtccaaaaacccaagttaggttttctaccttaatgacgacccaacaaccctctgatgcgttacaaggaacaacgatcagtttataagcaacagtacattgcccgccttcatcaattacaacaaaaacgagacaacattcaagggagatgaaaaaacgacatcaatttatttattttctttcaccggcaacaactagagacccgatctgaagaagaaaaacgggatcccggtgaaaattgaaacagataccaaaacgaccagaaaagtggatggactg

SEQ ID NO: 40079 - DNA, 388 bp, Gossypium hirsutum
  Clone ID: LIB3149-019-Q1-K1-A6
cgcctcttcccatctctcaacccttttcaacttaaccctttcttccaaaaacccaaattcccacctcaccttcacttacgacccattcaccctctcatgcgttacaagtaacaacgatgtgtttataggcaacggcacattgccggccttcatcagtaacagcaaaaacgagacaacattcaagggagttgtaataacgacatcaagtgatctagatgccgacaccgtcaacaacttgagacccgatctgaagaagaaaaatgggatcccgttgaaaattgagatggatactaaagtgacagtgaaagtggatggattgaagagcaagaaagtggggattagagttacgtgtgatgacattaaagggactgtgccgaaaggtaagtca

SEQ ID NO: 40080 - DNA, 257 bp, Gossypium hirsutum
  unsure (1)..(257): unsure at all n locations
  Clone ID: LIB3149-019-Q1-K1-B4
aggcgtacgccgacgagaaaccttatgactggtaggagttatatttacttccggacccaaatgctgcaagggcgggtgattgtatagacggtgctcacaccgaaatcgaggaaaacgaggcacccccaccagacagatttttacctgataatccttgtttgataaacgacactgaagcanccaagcaagaagactgacatgatgatgaagaccgtgagaggaaagcccccaaaacccatacccctaacagagagaca

SEQ ID NO: 40081 - DNA, 227 bp, Gossypium hirsutum
  unsure (1)..(227): unsure at all n locations
  Clone ID: LIB3149-019-Q1-K1-B5
caaatggtgcattactggatatttgcagacttgtgtatctttctttatgcaaagatgccggctgaatattgtcttgaggcttatgaacgcatatgaactgaaggaggaaggatacccnaaagaaggataaaagatcagcctgaagagataaaatgatccagacgcaaccaagccaggaaaatgggatgatgaacaggacagggagtgggaagcccgggggggcggtt

SEQ ID NO: 40082 - DNA, 318 bp, Gossypium hirsutum
  Clone ID: LIB3149-019-Q1-K1-C5
cttacacctttaaacactgtgcatagttattcaattaagcccaccagatgccaaggcttggaaaaaccctcactggggagaccactaccctctcggcggagagtgcacacaccattggtgatgtgcaggctaaaatgcactataatgatgggatatctccggatctccctaggcttatatttgctggcgaacaacatgaggatggtctcacgctatccgtctacaacattaagaaagaatccacccttcacttggtgcacaagaattcgtggcggcatgcatatctttgccaagactctcactggaaagacaattacc

SEQ ID NO: 40083 - DNA, 115 bp, Gossypium hirsutum
  Clone ID: LIB3149-019-Q1-K1-C6
ataagacctaaaatcactttacattttttgtcattaaagcccacaagaatcaaagcggggaaattacacttactgacaagaccattaccatataagttgatagtacacacaccat

SEQ ID NO: 40084 - DNA, 296 bp, Gossypium hirsutum
  unsure (1)..(296): unsure at all n locations
  Clone ID: LIB3149-019-Q1-K1-D10
ggatacatcttgcgccgttttttctancgtttgttcaccacgangcaagagggnggaagagcgggccttacgggagaacgaagcgaaaccganggaggnacaggaaaccgcaaatgcatgaggagccataaccacaaccaagaagggagcaaacccaaccctttcaacctatgctgaagtccttgccttaatcaatggagcttttgattattatcatcaaaccttaattaactatgcctatcttttttttgttttaaaattcttacattttcttagtatagggttttagaaatttt

SEQ ID NO: 40085 - DNA, 371 bp, Gossypium hirsutum
  Clone ID: LIB3149-019-Q1-K1-D11
gtctgatatttgaagccattccttggatgatgatcacacttgctgaaatcaataatcattcatggtttgtgacgcacttgcccagactgctaacatacacagcacacagctgcattattaccgtagcgataaccttacattttctatgcaaagtataaacgagataatgaaaactgcggaagaggcaagaattccacctccatccttagtgcctgtcaagggctctggttggggccaacacgatgatgataaagtggtagacatgcttctggaagtgaatgaagacgtcgaacaacatgtatatgataaactggctatggaagtacatgcaagtgtagaatatactatatattcagcacacgtaatcttta

SEQ ID NO: 40086 - DNA, 316 bp, Gossypium hirsutum
  Clone ID: LIB3149-019-Q1-K1-D5
gctagaactcgagactgctaacagtttttctattttagagaagaacgatgacttgcctggcggtcaagtcaatactagtggagctgagagatttccactacccgaagttttataacagccaggcttcataaatattgaagctgctagactaaatcaaactacatacaactctattatgaagagtgacttgaatatcaaaaaggatctctacggtcacattgacctaagcaggggtacaacgaagctcccttgtgtcgcacaccgcatcagcaccgaaatcactgcaattgttccaattaccatgaacattaatgtt

SEQ ID NO: 40087 - DNA, 284 bp, Gossypium hirsutum
  Clone ID: LIB3149-019-Q1-K1-D6
gacggtttgaaaactttggatgaatttgtttagttaaattcgaaatgtctcgggtaggggtacatatctaacaagcgacatgaacaatcatggaccatatttggagtaccaaacacctgcccaacagggcaacaccgacagaagctcactccatcaattttttaaaagatgggcacttctttaagatcaattggtctgacaaacacaacctttgctgatactgtgtctgtaccgaacttcctggcgacgattcacttattattgttctaaaccactattattac

SEQ ID NO: 40088 - DNA, 396 bp, Gossypium hirsutum
  Clone ID: LIB3149-019-Q1-K1-E12
agaacaagttattgatggcctcgataaaactgtgaaggccatgaagaaaggagaacttgcacttatcactattcagccagaatacgcgtttggttcgtccgaatcacagcaggagttggctgttgttcctgcaaactcaactgtgtattacgaggttgagatggtctcttttgtgaaggagaaagaatcttgggacatgaatgctcaggaaaaaatcgaagctgctgggaagaagaaagaagaagggaatgctttattcaaggcaggtaaatatgaaagagcattgaaaagatatgagaaggcttttaggttcatagaatatgactcttctttcagtgacgaggagaagcagcaagctaagttgctaaaagtaacttgcaatctcaacaatgcagc

SEQ ID NO: 40089 - DNA, 386 bp, Gossypium hirsutum
  unsure (1)..(386): unsure at all n locations
  Clone ID: LIB3149-019-Q1-K1-E3
atttacctggattaaatggaattgggttaaaacctaaaaccggcggccgtttaagattgttagggtcccgattgattccccttcggaaaatccgtaaagggaccatttaaagggaccttttcccctaaattatggattgattgggcccgggtttttaaaaccaataaaatgtcacaagggttggcttaccttttattcttatccccattctaatttaatgacatacatatcaattagatccgacaatgaatcaacaaaatccctttatttgaactcctaaattttctcttttgtggaaatctctcactcttttggaatccctatacgaatcaaatcgaaacnccggattgatttattttatttgaaaaaaaaaaaaaaagggcggc

SEQ ID NO: 40090 - DNA, 329 bp, Gossypium hirsutum
  Clone ID: LIB3149-019-Q1-K1-E4
gtagtgctggagttcctatcttggttcattttaataattttctgtgtgaaaaaagaaaaagtgttcaaaagaaagtgttgtttaatttgcactctagaaggaaaatcttgagcttaacggagtagggtttttttcaatttgtgttgattcaaattttaagaatgaaatcaacttaagttgcgataagaaatttaagtattgaatttaaaaaaaaaaaaaaaaaaaaaaaaaaaattaaacaatgggtcggtcgatgtattagatctgagctttctttcgctttcacgcaacaatatcgctttattttaaagtcaccaaatttcaatttt

SEQ ID NO: 40091 - DNA, 388 bp, Gossypium hirsutum
  Clone ID: LIB3149-019-Q1-K1-E6
atttgtgaactgttcaacactgtatggtgaattactcgtttttcttttataaaaacactcaacctgcttgatattttaagacgggatttcttagtgaaagatgttaataagcaagactcgcagtcgtggtcaatcatatatcttttctatcccttaaataatcatatatgatcgggatcaattaagatgtatttttggttcagtgtttcatatgcatttctctccatcctgatcgcaggataggaagatttccccctgtggtgaggactgcagttcctgtggatgggaggtttgagcatatagttctttcctgcaatgcaacctctgatcatgctattatttggatagaaagagagtcccaaagagctcttgatttgatggtggagaa

SEQ ID NO: 40092 - DNA, 170 bp, Gossypium hirsutum
  Clone ID: LIB3149-019-Q1-K1-E7
gtctgggtccagataaagaatgtattgtgtttctctgagataatgggcaacggctgacatagccctacctcgccaagctatgacaccaattccgacccgaaggtgttcgtcaaaactactggcggaaggggtcactactatacgacttatatccgtgcaagaagtatcta

SEQ ID NO: 40093 - DNA, 302 bp, Gossypium hirsutum
  Clone ID: LIB3149-019-Q1-K1-F5
gccaggaaggccgtgagcttcgtcgtaggttgcctcacccaaggttcaatgctcagcctgtgctggtcatgatccctcctggcgagcagaccatgggccgtggtgactgagttcattctggacacgtgctgaattcgaatagcttgttgccgccttgcccatgtttttgtcagcgtgatgtcatgcgataaaatagggttgaaggttatccacgttgttcaaattcttaagtacccactgaagtatgatcgctagttgcggtcaagcacaataacatattgacggacatatggtttatacgt

SEQ ID NO: 40094 - DNA, 304 bp, Gossypium hirsutum
  unsure (1)..(304): unsure at all n locations
  Clone ID: LIB3149-019-Q1-K1-F8
ntccgatacatccggaaacctaaatgaaactcttttttcatgcaatcgggatcgactcttaaggagactgtattgttgatggcctaacaaccaattcaactgaagggaactacactactgctactactgcagctactactattgcctacaattgagctacctagataaccatacaccatgaccttctattgctccagatggatgctatatacatgttatgatcagctaaccctttaaagactacacaaaaatcatatgtgtccatgtactaataaacttgaattatctctatacctttttggga

SEQ ID NO: 40095 - DNA, 264 bp, Gossypium hirsutum
  Clone ID: LIB3149-019-Q1-K1-G2
gatacatttaagggagggggaaacgttgcacggagtagtataaaatgattaggcttttgaagagcccttaaaagagcaaatggatgggctctatcaaatctgttgggatctcactctaaatggggtcaacagatcgctactatctaaaaactgtggaatgatatggatccacgcttggtatgtaaccaagcccaagagaaaaggcacgacgggaagaatggagaacggtccttaacagaagaaataaatacaggcgggcgctct

SEQ ID NO: 40096 - DNA, 249 bp, Gossypium hirsutum
  Clone ID: LIB3149-019-Q1-K1-H1
catggaatatatacttacatttactttattttcaggggcagaattgttcacgggagggatataacagtgcaggaccagacaaccaggaatcttcttttcagagaattatgggaatctagaggatatctgtttctgacctagccttacggtaggacgaaactgttacctcgttttaaagccaagcattaatccatgataattcacatgtggcggcatcgactcattactgcaaagaataaaaatttggtc

SEQ ID NO: 40097 - DNA, 415 bp, Gossypium hirsutum
  Clone ID: LIB3149-019-Q1-K1-H3
cgattacatggaatatatacttacatttactttagctccaggtggtcagaattgttcagccaatgctaatataacagtgtcaggaccagacaaccagggaatcttctctttcaggcagaattatgggaagcaagcatggcagagctgtggcctgtacctaggccttagcggtcaggacgaaactgttaacctcgtctttgaaagccaagcagttgaatccgatgataattccacatgttggccggtcatcgactcattacttgtcaaagcagtagaaaatctggttcaaggcaaagataacctactgctgaatggaggattcgaatttggcccagatttcttaagtaactccaccgaagggattctacttgattccgcatcaagtccagttcaatcgccattaagtcaatggtct

SEQ ID NO: 40098 - DNA, 146 bp, Gossypium hirsutum
  Clone ID: LIB3149-019-Q1-K1-H5
ccagtgcatgatatctatcattaactttattttaaccaggcccgaatagacctgcccacgcgtattataatactaccctgaccggaccatccaagaaatttatcttttatgccaaacaatagtaagggaagcaagcatagctgagg

SEQ ID NO: 40099 - DNA, 113 bp, Gossypium hirsutum
  Clone ID: LIB3149-019-Q1-K1-H6
cgggccaggcccacgcgtgcgctagggcttgatctctctcctctatttgattttagccacagacgcgtgcctgcgacgggggagcttttttatagtgtgaccgaaacccaaat

SEQ ID NO: 40100 - DNA, 258 bp, Gossypium hirsutum
  Clone ID: LIB3149-019-Q1-K1-H8
ggcgaccgtaagctttgcgccatcacatcttcatgagagccaagtggaacaagaagcgtatgagaagattgaagagaaagcgccgaaagatgaggcacatatccaagtccacagcgaaatctgtgggttgtgttttagttattggattactgtcttatttcgatctttcgaatcgagagcaatccatcagtggatgggttttagatttttaaatagatgagaacagcttactggtttctatagaatgggtatttgtac

SEQ ID NO: 40101 - DNA, 411 bp, Gossypium hirsutum
  Clone ID: LIB3149-020-Q1-K1-A12
atccaaggtcgaggaagctacgaagatcgaactgaaatgcttcgccttattgttgatctggtggaggcaagcatatgtgcagataatccagaatggagtgtggatgagcaggtagcaaaggacatacaactaatagatgctattgctgagaaacaagccctgatattctccgaggaatgcaagttgttccctgcagatgtgcagattcaatccatatatccgttacctgatgtttctgagttggagtcaaagcttacagaacagtccaagattctctcaaatcttcagcaaaaagttgatgacttggcatcaaagcatgcttacaaccctgatgaggagtatacggaggtggaatcgaaactgcgggcacaattggaatcttttcttgaaactgcaagatcattcaatatg

SEQ ID NO: 40102 - DNA, 402 bp, Gossypium hirsutum
  Clone ID: LIB3149-020-Q1-K1-A2
gattttggagtcgcgttacgagctcggggatcgtcagcatagactatcacactatcgacgcggtttggtattttataaattctgaattcgaacctatggcatgtatagtgtagttaatatgtttaaatttgggatttgtgaatatgagccatgcgaaaatggcttattcattttggctaagcttggttttatctttttgatctatttggtatatatataagatgtttaagcttatgcaaatttcggctatatatatggaagtgtgatgtgtgtagcatatttggtcgtgctgataatgccaatcaaccttatgtcatcgaggtatgtcatggaggtccaatatccggtccattagaagctgagttcatattgaaaagaacaaaaggagtttatgggtttttc

SEQ ID NO: 40103 - DNA, 186 bp, Gossypium hirsutum
  Clone ID: LIB3149-020-Q1-K1-A3
gattgtggagtcactttacgagctcggggtatcgtttcatagactatcacactatcgaccggctggggtattttataaattgtgaatacgaacctatggcatgtatagtgtaattaatatgtttaaatttgggatttgtgtatattaaacatgctaacatggctgattcattcggggctaactttg

SEQ ID NO: 40104 - DNA, 310 bp, Gossypium hirsutum
  unsure (1)..(310): unsure at all n locations
  Clone ID: LIB3149-020-Q1-K1-A5
aagagatttctttgtctgctttgctttggttcttgncctttttcttctcattatactcaggtctgtcagttgtaagatgtcaaatttcttcatttacttgaatatttgctcctcctacacagatttcgagtcaacctatgggtatcttatgtctaaatcaactatgaacaaagaccttattatgactttggtcttggactcaattggacagaacaccatccaatggttcataaacgagtcgatattattgcttttatcaaaggggcctgaactcataacttnttaagtataactgctactttcaaactta

SEQ ID NO: 40105 - DNA, 248 bp, Gossypium hirsutum
  Clone ID: LIB3149-020-Q1-K1-B2
gcacagtgcacctcaccatcaccaccggcatagctttcgttcaacttcacttttctccggcgcttgcctcgttggtggcgcggcgagggagacacaagtccgtcactgttctactccacgtagagttaatgggttttccggtttggtcaccggcgccggtgggttcatcggttctcactgttcacttgctttgaaaaaacgcggcgatggggatttgggattggatgactttaacgattattacgatc

SEQ ID NO: 40106 - DNA, 156 bp, Gossypium hirsutum
  Clone ID: LIB3149-020-Q1-K1-B5
gtcaaagctgatttgaaaggtgaattacatttcataacgggcaacatggcctatcggagggggggcattccatatccgacaggcaaccaaaacaaattacaatcaaaataagcaaaatctggataagcaaatccaatacctcacaacacttattgc

SEQ ID NO: 40107 - DNA, 324 bp, Gossypium hirsutum
  unsure (1)..(324): unsure at all n locations
  Clone ID: LIB3149-020-Q1-K1-C2
gttcagttcactttaccattaccaccgntataacttacgtaaaacatcactaatcatagcagcttgggtccttattagcactgcaagaaacactcatataactattttaacactttctttaataaaccatctactaaattttttaacaataatttctaagcaaaataatgcttttataaatctttcacgtccaaattaatgacctttttttcttattttttcatttacataatttttaaatataactatcaatttttatatctaaaataagtttttacttctttaataaattatatatttttttatatttttaaaaaaaattta

SEQ ID NO: 40108 - DNA, 352 bp, Gossypium hirsutum
  unsure (1)..(352): unsure at all n locations
  Clone ID: LIB3149-020-Q1-K1-C4
ctggagagttgatacattctgttaggntgtttctttttgaagaggactgngtagtngangggggcggtctattatannctggctcatcccaacaaatttttagttcataaattttttattcacctttctagtactcgtgtcttgtatatctcaaccaatcatccccatccttcatttctttttccctccactaaatccttgctcccattctccctattttctttattcaaattttttcctttttccccttctctcttaattctctatatatccttatccctctatcttttagcttctcctctttttcttttttttcttctcaaacaccttttccaactccctttttattttt

SEQ ID NO: 40109 - DNA, 148 bp, Gossypium hirsutum
  Clone ID: LIB3149-020-Q1-K1-C7
gcagaggcaatagaaaatggcagataacgatgacattcagcctcttgtttgtgacgagggcgactggaatggacaaggctggattttctctaaatgatgctccaagaacttcattccctaacattgttggtcgcccacgtcacacatg

SEQ ID NO: 40110 - DNA, 168 bp, Gossypium hirsutum
  Clone ID: LIB3149-020-Q1-K1-D1
gacgcgtgcttgagcagtgcattaagcgctgtagctgtggatgatacgcgcagggtgaccggtatactcgcaaggtgactagtgcactctccagtggcttagtgcccgttctttttggtcacgtacgttgccttttcgccacgtgctctagatttggcgctccagcta

SEQ ID NO: 40111 - DNA, 126 bp, Gossypium hirsutum
  Clone ID: LIB3149-020-Q1-K1-D2
gcgggtggcatattccactgtcgtcaaccatatcaatatctgataggctcgcaccaaacccactgatcccacatctgatcatcctgaatatcaaatgcgcagccccaatagactttgcaacacgcc

SEQ ID NO: 40112 - DNA, 350 bp, Gossypium hirsutum
  unsure (1)..(350): unsure at all n locations
  Clone ID: LIB3149-020-Q1-K1-D3
ccggggcagacccacgcgtccggagggtcagaatttacaaaaggttttagatataccacggacgccngcaagcgacgggcccggttttaaataatttcccctaaattcactacactgaccctcaaaaaacaacgcctttacccaaaaaaccctaccttacccaacttcaatttccaccgcacacatccccctaaaaccagcactcgctatttttaataggccctcaccgaacacccttaaaaacaatagcgccgcccccattaccaatgcaacacaccctgaagcggcgcattaaacgcgccggctgtccgattcacatgcaccgtgaccaattcacttaccaccgccct

SEQ ID NO: 40113 - DNA, 398 bp, Gossypium hirsutum
  Clone ID: LIB3149-020-Q1-K1-D9
cacctacttccacaccttatccactttcataggaaactgtggcatctcaaactctctatcgagaacctctttaagctaaatttgtcatctaatttgattacttttatttcatggtcattattgtatctactatgattaaaattatcgttacttgatctagtacttgtaatggcccaaattcgtctgacccaaaccaaccaaaaaaaaaaaaaaaaaaaaaccaaacaaaaaaaactaaacaaaaaaaaaaaatacacaaaaaaagaaaaaaaaaatatgaaatctttttcatatacaccctaattcgtgatcaaaaagaaaagggggcggcccttttaaggaatccaagtttaacgcccgggccttggaaggtttaaatttttttttggggcccccaa

SEQ ID NO: 40114 - DNA, 405 bp, Gossypium hirsutum
  Clone ID: LIB3149-020-Q1-K1-E12
aggatttgctcggcagtgcactcatgcaaaatattcattttaatttcaccaccttcagaagtcaggaatgcgggcaaacgatgcgcagtaggtcatgatgtgctgattaatatccgtaaattgtctttgcttgtgaagtgaataccaaattgcaccttattgttttcatatttctgcagatggatagcaatttaccaagctgaatgctcgagtttattggtaaagctctatatcagtgatgcagggttcttacatgctgatgtcctgatgttctctcattgatgctcgagtttatcgcctgcgtacaaggaattgtgttaatttcagggtctggtaacctcctcacccttgttcttaatactaaactgctaatttattaggaatgtattactacaatggatagag

SEQ ID NO: 40115 - DNA, 391 bp, Gossypium hirsutum
  unsure (1)..(391): unsure at all n locations
  Clone ID: LIB3149-020-Q1-K1-E2
ggcagaaggcagcttcttgaacccgatcttaacgttaaattttccttagtggatggacaacattaccagatcttattttccaatctagaatcttcctgggaggagaaatgagttatgaagattgagacagaggtgtagctgtagataaacagcagcataaccaatatgggacattccaaggagttgccaaatacaccttcttacgtgctctacagttccaccaccacaacccgcatacgcaacagcaacagcaccagcaccagcaacagcaacagcaccatgtgccaactattgggtttcctccacctccctctatcgctgctcctcagnattacccccaagcctaccagaccgtgccgggttatgatgttgctgaaggaacacctgttag

SEQ ID NO: 40116 - DNA, 199 bp, Gossypium hirsutum
  Clone ID: LIB3149-020-Q1-K1-E3
gaaaaaataagggtgatatcggatcagcttttcattagttttaaactctctctcgctctggggctggcatgagtttcttttaaacggatgtatgatatgcaacgtttaatactaaattattttatttatggctttagccttgaactctacatgttatctatctgatggaagccataatatataaaagctttttaatatt

SEQ ID NO: 40117 - DNA, 353 bp, Gossypium hirsutum
  Clone ID: LIB3149-020-Q1-K1-E6
aaaaaaaaaaaaaaaaataaaaaatttaatttaaaaaaaaaaaaaaaaaaaaaaaaggaagggagaaaaaaaaaaaaaaaaaaaaaaataagggtaaaaattaatgaggggggggggttttttaggatccaagtttactttcttttgttttcaatggattagcttttttttatgtgaaggtaaattattttcattggccgtggttttaaaattctgggattgggaaaattttggggttttcgaaatttttcgcttttggaaaatttccttttttcccaattggcatattagcaaaaagtttcgaaccatttgccttttttaaagggtgaagggcttgattggttaatgggatc

SEQ ID NO: 40118 - DNA, 149 bp, Gossypium hirsutum
  Clone ID: LIB3149-020-Q1-K1-F2
atttgctgcaactgactagttttagaaacattgagtgaaaaaagaaaaaaagaatccatgacatgtttcatagtaaacttgcaaggatgctatgatatgattaataaatattcatgttaataaaagattttatgtacacatttatttgt

SEQ ID NO: 40119 - DNA, 392 bp, Gossypium hirsutum
  Clone ID: LIB3149-020-Q1-K1-F4
gagcatttgagtataggatgttataccggctgtttattgtgaattacaaatacatgacctggaaggacacggttagcttgcgtggatgaagtctaaacaacttaccctgtaaagatctatctcactgttgctagcgcagaactatttgacacacatatggcaattgcttatgaactagcatctcccataaagatggtttaacagataataactgcatataatgacttaaagtcgacacgaagaatgtatgatggatggtattaatcatacaaaactatcatttttcctatctggtaaaatgctcatatgattgctcctagcatatatcacctttctttcctcatgtattgaagaagggaccgcaaacaatgaatgggcattatgatccttgg

SEQ ID NO: 40120 - DNA, 288 bp, Gossypium hirsutum
  Clone ID: LIB3149-020-Q1-K1-F5
aatcatttcaatatatgataacatttcttctgttcacagcaaaagacaatcacatgaccacggaacatatcaaatccatcgcgtccttcaaaacgaaataccatatcctagtcttacctcattctgttatcctacctattaattacccgccaaaaagataaccatatctaatgaactactatataccacaatcttaacttgctcccccaaaccaacatcaaaccactccaagacgccacttataatataactcttctggtacctatcataccaacatttcttttctcc

SEQ ID NO: 40121 - DNA, 356 bp, Gossypium hirsutum
  Clone ID: LIB3149-020-Q1-K1-F6
gaagacaaatcctcagacggaatttcattttgtgatgtcacacgcgaaacaggtggtgggtgcacatgctatgaaaatggacggtacgtatattctgatgacgatgacagcttcaaaggaaggtacatgttatcctatagcacctctggcactaccacattctttacatgcatgcggactagtcttttcagcagatgaactgaacatggaaggtttccatacatttcgtgggggattctggaattacttcattatgggaatggatgctccactatcttatgctattcactcagagacggatgatgatactgaaaaatttaaaaaccaaggggattattatagcactaatgcaaaga

SEQ ID NO: 40122 - DNA, 298 bp, Gossypium hirsutum
  Clone ID: LIB3149-020-Q1-K1-F8
cccaggcttacgtccacgccatcgtgaaatagcttacttccacagctaaacaggaacagcagtgcgccaaatcttagtgaaataaaggcactacctgctccctgaaataatactcgaccgtcaccaccacagcctgtgcctgctcaacccacggggccacatgaggattaaaggaatgacccggatcatactgtctaagctgatcatcatgggaacacataggctacgggtttataaaatggtccttctgctaatcatgggtacggatcatggaagacttctccatcacatggaccat

SEQ ID NO: 40123 - DNA, 364 bp, Gossypium hirsutum
  Clone ID: LIB3149-020-Q1-K1-G11
gatgcccgattcacgttgcgcatgtccgtgtgatgctctatgccaaaccagaaacttacctgactttatgaaagcgtcctgatcctctctgcgagcaagggatgtcgaaacattcaggctggctgattggctaagagccttcaaaacgaaggtgtgattgttgatgaggaccacaaattgcttcataaaatgaaaacatactttgtattatgagggtcacctaccactaaactgttgtcattcgttatgacaagatgcctgtaccggcattggctctcatattattcagactaaaagaaatgcgaattgcatatttaaactcacatacttttgtctaactgtcttggaggtgcacttatattat

SEQ ID NO: 40124 - DNA, 203 bp, Gossypium hirsutum
  Clone ID: LIB3149-020-Q1-K1-G5
gtatgacaaaacataaattaaaatttatgtttaatacaatctaaaaataccttggcggctagtccgaatggatcaatagtatctccatatattatccagctattatctttgttacaggacgaaaaaagataaataccatgtacaccgttttacactcacgttttatagccaaaaaacaaaccttactcaacttaataaaattg

SEQ ID NO: 40125 - DNA, 322 bp, Gossypium hirsutum
  Clone ID: LIB3149-020-Q1-K1-H4
cttagacattgcaatactatatatcacactttaatttcctccaacaaaacagaaattctggggaagcatcatattctaactatgacatatttactaatttacatgcgaccaatcacacgaccatacaaactgacgaggatgctacagatcaagctctatctgctactgttacatctacaaataataactgcttcaagtcctaagcgatctcatgaacttatcacactttacaaatattaacattcctccaagctatagatctatccaatattccatcaggtttatttggagagaatattactaatacctgaaattgatgcat

SEQ ID NO: 40126 - DNA, 226 bp, Gossypium hirsutum
  Clone ID: LIB3149-020-Q1-K1-H5
tcaaaacaggaagggcggggaaacttcataactagactaggacatctaaaaaaatgccacccgacccataccaaaccaaacatcaggaggggatgctactaagctggctctatctggtgcagagacatgaacaaagttagctgatgcacgagctaagcgatgtgccgtactcaccataccatacaaaaaggatcgttgcgccaagctctttatctatacaacatta

SEQ ID NO: 40127 - DNA, 296 bp, Gossypium hirsutum
  Clone ID: LIB3149-020-Q1-K1-H8
aaaggaatgattttcttatgcacaagaaagtttgaaaaaggtgaaagatttgtgggaaattcatttttggttgatggggttttgttgatcccctcaagcaagaaaaagaaacttcagaaatttttttcttttttttacaaattattgtaataatctgtttgatcatttggactacatatatatatttattgtaagctgaatcattccctgtaaacgtgaagcagtctttaagttccggctgaaggatgtagacaattccttattattaatgtgaagctaaggttcggtagacgttc

SEQ ID NO: 40128 - DNA, 275 bp, Gossypium hirsutum
  Clone ID: LIB3149-021-Q1-K1-A3
ccatacgcggcacggcataaggaaggtttattgatctgattttcaacacttatagaccacgcattaacactgtacatgggcgtgtgctagcaaattcatagatcaagtacaacgaaatgagccttaaagtggttaaataccatggacacacacaaggagttattgatctacttgacccatgggtgactggccaaaacctcttatatgcagagagaacaccgatccaatcaatatctgataatcagctgaaatcaccatgctcaatcttgcataat

SEQ ID NO: 40129 - DNA, 379 bp, Gossypium hirsutum
  unsure (1)..(379): unsure at all n locations
  Clone ID: LIB3149-021-Q1-K1-B1
gggggggagggaagcgtggggnnaaaactaatttttcaaaccctgtctttttattaccaaaggcancatggcatagggagggttattgttcagatctgcaacactcataaaccactcatgaacattgatcatggtcgcgttgatagcaatcaaatatctcaagcactccgcaaagaacctttgactgttcaattacctgcaacacagacaaggagtttctgttatgtatccgacatggatgacggcttaatccgacttatggaacgagataacaccggaccaatcaatatcggtaattcaggtcaatccaccaaactcgagcttgcagaatcctttaacaaccttatcaatcctgaagtaaatatattgatggttgaaa

SEQ ID NO: 40130 - DNA, 412 bp, Gossypium hirsutum
  Clone ID: LIB3149-021-Q1-K1-B8
gaggactcaaaatcagcacttgaaaaagttcttagacatgaagatcttcagggagcccctctcttgatattagcaaacaagcaggatctctcagaagctttatcagctgaagaacttgcccaatacctagatcttaaaaagttggacgaaagggtttacatgtttgaggcggcttctgcttttgatgggatggggattaaagaaggtgttgagtggtcagtggaggtaatggagagaagcaagagaaccgagactttgagaattcgtgcaggtataactggtcctaattagagctttagagggaaagaaaccgagttacagctgcttcaaccctttttttgtagcttctgtgcataaatcagggttcacgttaggttttatattgattaaaagttaaatcaatttttcccac

SEQ ID NO: 40131 - DNA, 220 bp, Gossypium hirsutum
  Clone ID: LIB3149-021-Q1-K1-C11
gagatattgaggagggaattgaaaataatgcttcatcagagcgacggaagaagaagaaggttaaaaatgaagttgataagtgattgattttgcggcattttagcaattttgttgttttagatgaccgattgaaggtgggttttgggctttttggatgctatttgtaattgaaggaagtatgtttctaatttataatgaatgaaatctatccatggttatt

SEQ ID NO: 40132 - DNA, 200 bp, Gossypium hirsutum
  unsure (1)..(200): unsure at all n locations
  Clone ID: LIB3149-021-Q1-K1-D10
aagccaaacaacggcgcctatatgcgacccatccggggacancgacgtcttcncccgcgtcaccggtggtgaggtcggagcagccagttccatcgctccaaagattggttcgtcgggtctctctcccaaaaagatcgtgaaaaacattttcaaagaaactgccaagaatggaaggttctccacgtaactgataaactcac

SEQ ID NO: 40133 - DNA, 261 bp, Gossypium hirsutum
  Clone ID: LIB3149-021-Q1-K1-E2
tttttttgcaatatcctgcttccgtaactgtgcttcaatatcaactcttctttttccctcaagttcttcaatggttgttgggaacttaggctgttccacaggtctatcttcatcagcaacatcataaaaccccggaggaggcctcttctcaaaggggatttcagcattataatcaattccctttctttttctctttcgttgccttgtatcgatcccagcagccttaagttccctccttttctgcaaagatgcaaggcaacg

SEQ ID NO: 40134 - DNA, 410 bp, Gossypium hirsutum
  Clone ID: LIB3149-021-Q1-K1-E8
aaaaaaaaaaaaaataaaaaaaaaaaaatagtttagaaaaaaaaaaataaaaaaaaaagggaagggttatataaatagaaaagaaaggcaaaaaaaaaaaaatgatgaaaaataaaagaacctaaaattaaataaaaggattaatgtagtgcacacctaatatacatcactttaaataaaaatatatcgaaaattttgggctcttttttccagcggagcccactcctactggctcatactgccctttctgttttcctagagagggcaaagttcaaccaggcatgcggcttcaaaatgaacaaattctggggacttaagaggagggaatatgaagcaatctaagattgcattgccgatatgagcgagagcgtgtacaggctgagcagatcaccgcaagagctcacctacat

SEQ ID NO: 40135 - DNA, 147 bp, Gossypium hirsutum
  Clone ID: LIB3149-021-Q1-K1-F1
tctcactcttagctcttgtttaactgccatgcatgtatttgtttagataagtctacctaaggtaagacccatggaaagaagctaactccaagtacaacaaacgaaggacagactaactcaccggataagacctcaggaccggtctat

SEQ ID NO: 40136 - DNA, 350 bp, Gossypium hirsutum
  unsure (1)..(350): unsure at all n locations
  Clone ID: LIB3149-021-Q1-K1-F9
acgcgnncgaggagactggtgtaatgtactacactgcttcccataggcacttacttgggccaaactatcagcgactacgagccaatgctgccaaatgagctcatcacaacgatcaccaaaaaggttttatgaatttcatagcacacaggatcaggacagaaatttctttccttcaaggtacaataacggtgcgtcgatgcaaaggaaccccctatcccacctgctgtttgcaccgtaaaagccaaaatgtgcggtatatgacaaggagagcatctttatacagaaccggacagagatacccgcgccgcgcagcgggctagcaataacgaatggtctggcgctgtatttag

SEQ ID NO: 40137 - DNA, 219 bp, Gossypium hirsutum
  Clone ID: LIB3149-021-Q1-K1-G10
aaaccctttggtattaaacctcccacggaacttgcgcggaattacatgggtactccagaggctgtatcagctcagactgcaatgcatgaggagaaacaccaactagtaggcaagggtggagaaatttctacacataaagtacccgctgttgctcctgcatcaaaacctgttgctgaagaaccacatgaagcagtgcctgaagcagcattctgagaaccc

SEQ ID NO: 40138 - DNA, 393 bp, Gossypium hirsutum
  Clone ID: LIB3149-021-Q1-K1-G12
gtggtagaccagagatggtggcgggagggtaccattcacattctggatctggctgccggctcaatggagtggacataaacacacagcttagttacgaagctttgaaccaaagggccgcccccaaggtggagcacccaatgacgagcgtttaacggccagtggagaacgatgcatagcgttggaccaaaccacaaaccacgatgcttgcccaagagccacaaccatcatcatgtactcgcctgcattttaataagccacctatccaagcgttactacatgggctccacacacattcctactcgatgaacattagactgaccggagattgacactgagaaaaagatgctgttgaaacttcacaagaagaagatgacagatggactgacacttaca

SEQ ID NO: 40139 - DNA, 222 bp, Gossypium hirsutum
  Clone ID: LIB3149-021-Q1-K1-G6
cgacccgatggcgatggattcactcttgttttaaaatttttatttcactccgaaaggcaacaacgaacgagagtcttttcttcaaactgagctgtcccctaccttacaatctatatgttagaccctgtcttctcaccaacatattgcaaaaaatccagatcataaaatgtaactatttaatacaacatataaccctaaaacctggcccatttttctgaacac

SEQ ID NO: 40140 - DNA, 419 bp, Gossypium hirsutum
  Clone ID: LIB3149-021-Q1-K1-G8
ttttgaatggtgctagcttcaatttttccgataatcacggtctctgcggcatacctggactacctaaatgcggaccccacctctctgctggtgcgaaggttggcattgcctttgctgtatttttgtctcttgtacttcttgttatctgttcaatatgttggtggaaacggcgacagaatatccttcgagcacagcagattgcagctgcatcaagaagtgctccctatgcaaaagcaaggactcaatcatcacacgatattcagatgtcaaggaatcctagtcgtggccggacagcttccgagaatgggccgagcttgctatcgtgatccaatcagttttccatctctttgttgtgtttatttttgaccaggaagatgaattgcagaaacaaccgagttgattttagttcatgatgccct

SEQ ID NO: 40141 - DNA, 262 bp, Gossypium hirsutum
  Clone ID: LIB3149-021-Q1-K1-H4
aaaaaaaaaaaaaaaaaaaaaaaaaaaaatatattttttaaaaaaagggcgaaaaaaaaaaggacggacaatattaaaaaaaccaagataacaaacccatacctccgccataatgacaccttctatacaagtccctggccttcaatttaacaaccacctttttacaacaacccggccggtaaaacccttggtcttcctaaatcaaaccccttttttcccatccccctttctacccctgacgcactcgcgaaaagcccttccc

SEQ ID NO: 40142 - DNA, 159 bp, Gossypium hirsutum
  unsure (1)..(159): unsure at all n locations
  Clone ID: LIB3149-022-Q1-K1-A1
ggccgggccaggcgnncgagcaaggcaacaactttttatccatcggctatcaattttataccaaagaactcaactatgatgaacggctttttctaaaaattgccaattcccaattccaaaaacttaataaagatgctcatttatcaatgtaaacacaaa

SEQ ID NO: 40143 - DNA, 162 bp, Gossypium hirsutum
  Clone ID: LIB3149-022-Q1-K1-B3
gcctttgctggctcttagctaggatgggtctttattttcgcgcaacaattcctcctggacagagaggggttgtcatgaaagatctattcttctacagggagcctgatgaaactaaacatctagaagaggaggaagccatctctactcctgagtattgaatgg

SEQ ID NO: 40144 - DNA, 269 bp, Gossypium hirsutum
  Clone ID: LIB3149-022-Q1-K1-B5
ccggattttctccgatctcatttgagttttctttctctctccttgctttttgtgtttagagcggggtcctgtcgatcttgtctactctcttttcattccccatcctctatcatgatcatcatgcatggcagatcttgtttacaattgcgtgctctgaaaaaatactatatcagtgactcactgtaagtctttcttctcatattattcaaaaccagcatcaggcctgtaaatttcacttttctctttaacaagtataacttttcaacaat

SEQ ID NO: 40145 - DNA, 235 bp, Gossypium hirsutum
  unsure (1)..(235): unsure at all n locations
  Clone ID: LIB3149-022-Q1-K1-C11
aacccaanttttaaaccaaatttttttacccagagnacaaggccaaaccctgaagccaattttataacccaaaggaccaccctcctaaagcttgttcgatacctgtcaaaggagattctatagctgcaagtattgcaaattctgttgacccaattgtactctttaacaaaagtactcttaaaaagatgattgaaaaaatatgagccatctcatgttttaccttttttatttaaaa

SEQ ID NO: 40146 - DNA, 432 bp, Gossypium hirsutum
  Clone ID: LIB3149-022-Q1-K1-C4
caaatggataggatatcgaaagaggaaaggatttatatttcgggtatgattaaaaagattaaggcgactggttgtaaagttctggtgatccaaaaaagtattgggtgagatgcaagcacggatttatcaatgcattataaagccatggcttaaatgaccgatgctgaggactaaacgaggcataaaatactataaatattccaggatgaaagaagtcagctttgctcttatagtatgcactgtgcatatattatccttcgtcatacattacaaggattaaaatctcgactttatagctcgaaaaagagagaaaagaaaattataatataataatacaatgttctccttttgtttgtatttctgctgttgcttgtttgtttctttgcaagtgcaggtgtgctgacactcgggtattggctgtgctggcgcgga

SEQ ID NO: 40147 - DNA, 387 bp, Gossypium hirsutum
  unsure (1)..(387): unsure at all n locations
  Clone ID: LIB3149-022-Q1-K1-C8
gatccttcgcgcctagaggaatttcagcccgaaatccctcctccacttcaattttgaggaggaaaggaggagaaatccacggcttgctcgcacggtaaggctcctctgtcaccgtttttttgtttattttttttaaaacaaatatgatgaatgacccaaactggaaactaaacgatgcatagaaaactaaaaggattccaggaagaaagaagtcacctctgctttttttgtattctttgtgcgtatattttcgttcgtaaaacattacaaggattaaaatctcggctttatagccgaaaaagagagaaaagaaaattataatataataatacaatatttttcttttgtttgtatttcntgtgctgcttgtttgattctttgcaagtg

SEQ ID NO: 40148 - DNA, 243 bp, Gossypium hirsutum
  Clone ID: LIB3149-022-Q1-K1-D11
gcgaaatgatgattgtgtacgacttttacgccatacggaagcctcgacaaatggctgtttggcgcaggggttcttccctggacacgacgtttcaaagtcatcaacgacgttgcaaaagcactgagcttccttcattctaagcagctcgcccacaagaacatgaaaacaagcagcgtttttcttgatgtaagcttccgggcttgtttaagtgatttcgggatggtgctttcaacaaccgattct

SEQ ID NO: 40149 - DNA, 385 bp, Gossypium hirsutum
  unsure (1)..(385): unsure at all n locations
  Clone ID: LIB3149-022-Q1-K1-D12
ggaagggtattgatttggccaccacacttgaacgtatagagaaaaactttggcattactggtccaagggtggctggtaatcccattatctttggctctgataactttttggaacttgccaaagtccatcgggaaaaaatactggccaaaactggagtttctacaaggccttgaactgtccagctactgtaaggaaatcgggaggcatcgataccagacagaataactgtgcagctaataactacactaagagtgggaagaagtctggaatctgttncatctacagnctatgcgtgatcagaaaggagaagttcagtatttttatcggagtgcagctagacggcagtgccaaagtcgatccacttcattatagtattcctgatact

SEQ ID NO: 40150 - DNA, 350 bp, Gossypium hirsutum
  unsure (1)..(350): unsure at all n locations
  Clone ID: LIB3149-022-Q1-K1-D4
ccgggtccgacccacgccgtccggcgatgtccctggtcatgctcaacctccgtatctctattgaaacttnngccgtgaanntctcatccccgggtcgcgtcgtcttcacattttttcatgggggtgggttttgcctcccacttcacttcnntagggggtctcaaccagtactcgagcctctannacagtacctgagcctcacctctagcaaatgtgtggaccgccaaagaacccatgatgtgtgctnnngctgatcctcgtcacccggtcgataccttnngactgcatcttgctatgttcnncgtggtaaaatgaagctactcaaggaaagtggatgagcaagatgtttg

SEQ ID NO: 40151 - DNA, 429 bp, Gossypium hirsutum
  unsure (1)..(429): unsure at all n locations
  Clone ID: LIB3149-022-Q1-K1-E2
gaatgganagggccggacccgacgccgacgcgtggcggcgtatatccgctggctcagcatctaactccgtatttctttgaaacttcgaccgtgaactctcataccccgtgtcgggcagtcttcacgtttttcatggctgggtctttgcttcacactcacattttagaggggctctcaaccagtacgcgagcatctaacacgtacactgagcctcactccagcagaatgtagggaccgcacaagannacatgatgtgtgcctgctcgatctctcgtcaccggtcgataccttgactgcattctgctatgnttccgtggtaacaatgaagcacttcaaggaagtggattgagccagatnngttgaatgtcctagaacaaagaacctcctcataccttttgttgaggtggatccccgaaccaatgtgaaaat

SEQ ID NO: 40152 - DNA, 370 bp, Gossypium hirsutum
  Clone ID: LIB3149-022-Q1-K1-E3
aagaaaaagaaggtagcttctaaggaaaagtttgtggttctttgcaaggctcatcaaggatgtgctgcgcgacaaggttgaaaaggttgttgttcttgatcgagcggacgactcatctaggaggctacatgactgccgagcattgctggactgcaaacatgtaaagtattatgaaagcctatgctttgatgaatcacactatacattgttacatgtctagcacgtatacactggacttctaccctgataacttcatcatagaagatctgataaggagagccgatccataccatagtgatagatctgtccaggaccttgaactccttatcttctagactgctgatctgacctctaacttgaaacttgatga

SEQ ID NO: 40153 - DNA, 193 bp, Gossypium hirsutum
  Clone ID: LIB3149-022-Q1-K1-E5
taaaaataaaaatggcccaatacatctttgtatatggaagcctcatgctaattaattaatgtagacgatgtgttgcagattccttgacaaggcatccattctgactgaagaagatattgtaaaaccatggcaagctcctaatctattgatactgaacactatccatcgagttgtaggatcttaaagcagtgat

SEQ ID NO: 40154 - DNA, 431 bp, Gossypium hirsutum
  Clone ID: LIB3149-022-Q1-K1-E8
aacttttatcacaacgccgacgtgagtaggtgttgcagattgtctccggtgattgcgatacgaagaaaacgcctggacaagataatgatgtaatgggtgaagttttgaaaacccatgaagcaattcaatctctagacaagtcggttgcaatgctagagatgcagttagctgcctctcgtagttctcaggaaatggacaatggggaggcatctaaagttgtttcaaccttgactcgtgatggtccacctaggaagaaggtgttcatggtcattggaatcaatactgcttttagtagtaggcgacggcgcgattctgtccgggagacttggatgccacaaggggaaaagcttattaaattggagcgtgagaaggggatcatcattcgtttcatgatcggccataggttaaccatttcacgcaagagaaagctt

SEQ ID NO: 40155 - DNA, 433 bp, Gossypium hirsutum
  Clone ID: LIB3149-022-Q1-K1-F3
ccagtccagcggcattcactagggcaacagttgtcattgccgtaaaatattctattgttgagcggccagagaagatagatgagatcatttatcctgagattgcttcattccttatgcttatcaaggatcaggatcgacatgttaggcgtgcagctgtgttggctttaagtacttttgctcacaataagcctaacttaattaaggggcttcttcctgaattattgccgcttctctatgatcaaacgactgttaagaaagaattgataagaactgttgaccttggtcccttcaagcacatcgtcgatgatggccttgagctaaggaaggcagcgtttgagtgtgtagacacattgctggatagttgtcttgatcagtgaacccctcatctttcattgtcccgaccttaaatctggacttgatgatcattatgatg

SEQ ID NO: 40156 - DNA, 327 bp, Gossypium hirsutum
  Clone ID: LIB3149-022-Q1-K1-F9
ctttaaagtaggacgttacaacccagaagagagacaagaaaggatttccaagtacagagcaaagcgcaatcaaaggaacttcaacaaaacaattaagtatgcatgccgcaaaacactagccgacagccgtcctcgtatacgtggcagattcgcacgcaacgatgaagctattgagattcccaaagctgcatgttcaaccagagatgaagaggaagatgatttatgggtattgcatgaggttgaagatgatgaaacactagcaagaggagattttatgaacagtttctgtcaaaatcaatttcaataccaccatggctacttctgata

SEQ ID NO: 40157 - DNA, 102 bp, Gossypium hirsutum
  Clone ID: LIB3149-022-Q1-K1-H7
gaggtgctttactaagcaaacacccgtgactcaaccgttacttgaagagcaccttgagcgacataaagtcgctcgccaaatgaacccacaagccccggatct

SEQ ID NO: 40158 - DNA, 417 bp, Gossypium hirsutum
  Clone ID: LIB3149-023-Q1-K1-A10
cttaggtttaaagtcactttacacactcattgcggagggtatggcagatttggaatatctacagccttccattgccgttgttctaggttttattggatgcaaaatgatcttggatttctttggacttcatatatctacggaggcatcacttggtttggttgcaactagtcttagtgccggcgtactgttgagtttagcaaagaaagctgactagctgaaatcaaagtgcgagagcagatgaagggtttatattttgtatgtttgttcttctacgttaagtgagcaagtgagctctaaaattgctgctcaattctttgtttctcacctctcttcatcaatgaaaatgaagattaattatataatcaatgaatgattcatttagacgttgccgggaagttgatgctcgaattcaaagca

SEQ ID NO: 40159 - DNA, 284 bp, Gossypium hirsutum
  Clone ID: LIB3149-023-Q1-K1-A5
atttttatgaaagtaaactcagctagagctgggggcattcaacaagttgttaatacttgattgaaagcaattatcatgcatgatctaattactataatgttagttttaagcaaataaaagttaatcccctggtgcttaattctgggacaggcatatgcatacagggtttgcctctcagagccttgccttgtactcttttcaacttaatgaattaaccatttggttatttactcttctttttcttctgcttttttttttggctgccgaatgaacggatgctttcc

SEQ ID NO: 40160 - DNA, 235 bp, Gossypium hirsutum
  Clone ID: LIB3149-023-Q1-K1-A6
atcgacaccatagcacattacggtagagcttgtgacatgcaacaagttgttagtactggagtgatagtaattaacatgcatgatctaattactataatgttagtatcaaacacataaaagttaatcccctggcgcttaattctgggacaggcatatgctttcattgtttgcatattagagccttgacttgcactcttttcaactcaatgaattaaccatttggttatttactttt

SEQ ID NO: 40161 - DNA, 297 bp, Gossypium hirsutum
  Clone ID: LIB3149-023-Q1-K1-A8
aataggtcaataatttattatctttaagatttatacatccagacgccccagaaggatccagaggatggttctttgaattcaggaagccgccacccctaaactggccaaaggagtatattggggagagcgaccttctattttgtgacacatgccactggccccgtgaccatcatgcaaagaacaatcacgctccagcatgcactgagtactgtacataatattttctagtttgatatcccaaacaataatttgatagacgagtgtatattgctagatcatgctttaccaaataactta

SEQ ID NO: 40162 - DNA, 276 bp, Gossypium hirsutum
  Clone ID: LIB3149-023-Q1-K1-B11
gtttagaacatacataattctgtttagatttttaatacgtaatatttgcctgggggcggggatcaaaatcaatgaaagtgcgaattattcacacaggtttgagatgaaattttctggtcgtacgcaactgaaaccgatatcgattcataaggattataacagtgctaacattataataaatttgctttcagatgaccatatctctaagttgcgtatacttgataaatagaatgttgagttttacatattcgatataaacacggcaagacgagtgat

SEQ ID NO: 40163 - DNA, 395 bp, Gossypium hirsutum
  Clone ID: LIB3149-023-Q1-K1-B12
ggtacatggactaatttatctatttttttagtataggagccaaaatgcaatccaacttctcgtataggggtctctatgatacttttactgctcaaacacagagtatcagaaataaaaaacttgatttgttattacttttttttgggggggtttgcaggcttttaagaaggctagaagcatgggactgggagacatggatttttcagctgtgtttgagaccttgaaggttcttaaacattcatcttaatatatcatatggatttataaatgtcatgaaaacacgaacaatgtaggggactatatacttatttagggttttgattcttacttttgaacaaccattcagtacgaaactggaatttttagtgctacaataaataaattcaattatgagg

SEQ ID NO: 40164 - DNA, 226 bp, Gossypium hirsutum
  Clone ID: LIB3149-023-Q1-K1-B3
gatgaatcaagagtttcctgtttaggagattcaagattaaaaactcttgatggcaacgtagaaattagtgctctattatttcatatttcgaagccactcgctctgaactgtcatcatgacatactttgaagaccgctactttctctgtttgaacacatactgctgtcattgtcattttgatggctgaagaattatgctactggatgcactggagtagaatttataa

SEQ ID NO: 40165 - DNA, 216 bp, Gossypium hirsutum
  unsure (1)..(216): unsure at all n locations
  Clone ID: LIB3149-023-Q1-K1-B6
agcgacggggtagctctcatataaagtcacctaaaatcacttctctggccggcatcctacaacattttttttgtgaaaaccccgagcanccccaacctaaaaggcccggaaaaccttaccatttttaaaagttgaaaccctaggaattagaccgaaccctttccccctcccaaaaacccgccaagcaggatggatcaatggacccccccttgaacc

SEQ ID NO: 40166 - DNA, 248 bp, Gossypium hirsutum
  Clone ID: LIB3149-023-Q1-K1-C10
gcaagaatactttgagattcctcctaagattgtgaatgctaaaagagctcgtcgatgcaagcatcatcctcattgaatgtgggcattacccatccaagttttagctgcaattttctgctcgtttgtaactgtcacccacgtatattctcaaacttataatccacccctccatattcttgacatcccttttaaccaaccatttatcatgtttcaaaacatctatcctttattgagcacattatctacca

SEQ ID NO: 40167 - DNA, 211 bp, Gossypium hirsutum
  Clone ID: LIB3149-023-Q1-K1-C3
cggaggcgtggagcctactctttttaagatttaactgtacaatgcaacctatcgcctaagagggggggctgaacaactccttctatataatcccaatatagatactaccaatctattccagaacagaagaattcaacgtattaaatggctaccttcacattcgactagatacttgctggtcaaaaaactaagaaacccgaccctcaaaggt

SEQ ID NO: 40168 - DNA, 161 bp, Gossypium hirsutum
  Clone ID: LIB3149-023-Q1-K1-C7
gtccatctttttcttttaaattcccctttctacctcaattggattggatttggagctcagctggctagctatcagtgtagaccagttgtatttttcaatgattgtcgcaagtgtgtgtttttgtgtacgaccaatgaagcaatcaacaattattttctatc

SEQ ID NO: 40169 - DNA, 343 bp, Gossypium hirsutum
  Clone ID: LIB3149-023-Q1-K1-D12
atcggagctttcaagggaaaacaggcttcactctaaccagcacatctacaagccttagtccaagctattgaacgctgagttactatgcaggcaccacagaaagggatgttgtctctaaacactaaaagtacaggctagactccagctgatatgactaaaaaattagctacaatgggtactactactagctctacctaaagtagttcaactacaaacttgactggagacgcgctgacaacaagctcattcagagctggttcagactgaagattctcatttggacttgctacacgagatagtactctatccagagcaacaaatagcttctcttcatctaacatga

SEQ ID NO: 40170 - DNA, 305 bp, Gossypium hirsutum
  Clone ID: LIB3149-023-Q1-K1-D2
ggtggaaaatttgaaagagcttggtggtgggaaagcaagccccaacatgtccaagggttcccctagggattggctagacccacattgcaatgaatcagaatttgagaagccataccctcagtgaatcggagctttccttagcttaagatagttatcggtgcaaagttcgacgttccagcaccatttattataagtctttatcttgtatgcaagcaaattatcgagcttatgtattttgacaataatctatcaaccaagccatttggttttggtactaatgagaagacattgaaagatatatttat

SEQ ID NO: 40171 - DNA, 406 bp, Gossypium hirsutum
  Clone ID: LIB3149-023-Q1-K1-D6
gtctaccttttcgacaaaataatcacaaggtaatatcttttattcatatttatatttccaaccaatcaattgggataagtatttcatgcaaccttgtaatggtggcaggatgccaccagggcaagagaaattcatagtgataggagatcttaaaggatggggatacgcaaatagcgacatccgtgcataccttgcagctctatctctcgtacaggattattaccctgtaaggcttgaaaagctgttcgtagtccatgcaccattcatcttcatgacagcatggaaaggtgtttaccctttcatcgacccaaaaaccaggacagagatgatattcgttgattacatatcactcaaatcaactctgctagaagaaatacacgagagccaactgcctggtacattgggt

SEQ ID NO: 40172 - DNA, 268 bp, Gossypium hirsutum
  Clone ID: LIB3149-023-Q1-K1-D8
aacaaaaccatccttcatattttaaaaataaataaaacataaccaatattataattcccaggagaatttttttttctttatattttaaaccaaatttattaatatttatccacaataacctaccaaaattaaactctgcttaactgaaaactcttatctttgctaaacttctacttaccacttcacatgtaatacatcgttctgtctttaaaaaaccaatacttcacactagatcaaaaaacaatctcaatctaaatactcctctttc

SEQ ID NO: 40173 - DNA, 269 bp, Gossypium hirsutum
  Clone ID: LIB3149-023-Q1-K1-D9
gctgcaccacaactacagagaatagagttttggggaaaaaaagcgtcgttgttcttgctgcttcttctacttcgctctctctctttctccgaagttcctccttcgttcttttatttattcagtcttgtaaaagatggccgtcggtgaggatatccctcccctcgtctgtgatactggaactggattggtgtttgccggttatgctgatgacgatgctccatgcgcagatcatccctttcttgttttttgaacccctccctcttctgctt

SEQ ID NO: 40174 - DNA, 133 bp, Gossypium hirsutum
  Clone ID: LIB3149-023-Q1-K1-E11
tacactataacctgtatatagtgtaacctaaattcaagctactggcctgtgagttacaacgcagggactgagaaaaccatgtcgttactaaacattaatagtatacactagattccccttgttacaactgaga

SEQ ID NO: 40175 - DNA, 257 bp, Gossypium hirsutum
  Clone ID: LIB3149-023-Q1-K1-E7
gatgaatgccatataaatatcttacaggtttataacacataacatgtgctgaaacccgagggacagttactaaaatgactggataaacgaaaactactgcattatttcttttatactactgacacaaatagcataacggctacagaaagattcttcacaagatagagtgatattgagatgctcgagataagacttatgacgtagctgagggtaataactaagtccctgaaaggtctaggatacacatgccctttttc

SEQ ID NO: 40176 - DNA, 294 bp, Gossypium hirsutum
  Clone ID: LIB3149-023-Q1-K1-F2
tctagatcgcgagcgccgccctattctttttttttttttttttacttattagcttttttggcttttgggaaagattgccactaaaaaaaataacgtccaagcctatttcaaatacaaatgccacggcttactcaccccggtcgctaaaatatatattaaaacccaggtccaaaactcaacccgtgctcaagaaacggccaatgatggatctatacatgttgcgtaattccctgagcggggtacgagacacatacccttccacccctgatctacaatatagcatggatcaccagc

SEQ ID NO: 40177 - DNA, 248 bp, Gossypium hirsutum
  Clone ID: LIB3149-023-Q1-K1-F3
cggaaaggctgtaaaggtcaaccattcacttaaacatacaggcagtggtgaacaagatgccacctatgaaattaagctaactgatgcatccttgagggaagccgttgccaagacaacgggcttgtgcatcaacagtggatcatggactggaattccaggctattgtcgcttcaccattgccttggaagagagtgaatttgaacaagcattggcttgcctagtcaaatttaaaagcatagtcgataact

SEQ ID NO: 40178 - DNA, 140 bp, Gossypium hirsutum
  Clone ID: LIB3149-023-Q1-K1-F8
acggaggaatgcactgacaactacatacagctttataaatcaaaggaattaaataatccagggggcgccttgctttagatccatcttgaccaatgactacagcaaaacggcaaactacgataaatacatctcccacgact

SEQ ID NO: 40179 - DNA, 220 bp, Gossypium hirsutum
  unsure (1)..(220): unsure at all n locations
  Clone ID: LIB3149-023-Q1-K1-G11
aaaaaaataaaaaaacaatacaattgcagttaaaaacgaaaggcctgacttcaggagccaggggctcgtacacaaggagaagaaaacattggccttttatagcacagctacctgcgaagatatgcgncgagccatcatatagcctcctctgggaataccccggaagttcggatgccaagcggagtgctggatatgccccgtactcaccctggtgggatac

SEQ ID NO: 40180 - DNA, 413 bp, Gossypium hirsutum
  unsure (1)..(413): unsure at all n locations
  Clone ID: LIB3149-023-Q1-K1-G3
gttttgtgaaccacagggtccaaaccaagtgaactagggccaggtatgcacaaccagcccacatcaggcacatgaccgtgttaggctgcgaccagaacggagaagaagggtccagccggctctggaaacgcctggtgtgcgcgagaagcacctggggcgcgtgggagaagtgctgaatggtgccaaaaacatacccacaccacgtccaacaagaagttgtggggctttcaattctttccctgaagatttgaaccatgggagttttggtttcaacattgaagcctgtaccaatctttaccattatttaacattgtcatttactcaatagcagacatttctggtccctccccttttgattaacaaatggcattcacatctatattagtcnaaaaaaaaaaaatttaaaaaatagg

SEQ ID NO: 40181 - DNA, 363 bp, Gossypium hirsutum
  Clone ID: LIB3149-023-Q1-K1-G4
gtggtgtcaaaatacacctaatggttatctgatcgatttgcctttagatatctgtggtgtccaaatacacctttaatggttatgcgatcgatttgccttcaaattttcatgtcaacccagtttttaatgtttctaacctgtattcttttgagggtttcaatggagatattgctaaaatctcagaccaggtgcaccgacttcctaaggtttagattgaggtttttgaagatgtgttggatgttaaagaagtgaggtttagaagcggtaataactataggagatttttggatggctaggattagtttttaaggcttaaaatctagggtaagaattaaaccttatttgcaagggctaataaccttg

SEQ ID NO: 40182 - DNA, 381 bp, Gossypium hirsutum
  Clone ID: LIB3149-023-Q1-K1-G7
attcagcctaatatgggcaatattcgctattccgatttgcagaaatgagcagaaattttgagagaagagatgagagcagtttgtgggtgtggctaaaaaagtaaatgagccgcttagaagcacttttttgccggaaaagtagaaattttctgctttttcatcttttggaaagtgctttaaaaaagttactccactgctcattgattttcacccaaaaagcacttttgggtgtaaaagtgcttttcaaagcacttttaggcgtaaaagtgcttttcaactggggcaaagaactggccctaagtctaaaagtgcttttcaactggggcaaaaaattgggccctaatctagcaggctaattactggtgaattggatcaggtttt

SEQ ID NO: 40183 - DNA, 363 bp, Gossypium hirsutum
  Clone ID: LIB3149-023-Q1-K1-G8
ggagcattaaagattacagatggtcaaattgagaataataatgttgcggctgaaacgtacagaatgccctttctgatgcttggtctggatttgccagaaccaccacttttcaaagatgtgatggagaaaaatataatacctcaggtacctttgtttaatatactaaagaagtttgatggtgagatggtaacaactactgttcgtgctccagcaagaatgagatatcgagtcaccatattgccacagtattttatacttcatatgcgccgatttactaagaataatttcttcagaaaaaagaacccaacattggtgaactttccaaagaaaaacctcgagttgaaagactacattcctttgcct

SEQ ID NO: 40184 - DNA, 135 bp, Gossypium hirsutum
  Clone ID: LIB3149-024-Q1-K1-A10
gaagaatttgcagctgtcagaatgggacatggaaccatcgaaaatgactctctaccggttcgggaacaccttaagcagttttctttggtacgaattaagttactccgaagctgatggttgaattagaaagggtga

SEQ ID NO: 40185 - DNA, 122 bp, Gossypium hirsutum
  Clone ID: LIB3149-024-Q1-K1-A12
gcaactttaaataaacttcaggctagaaaaatgacagtaaagctggatatatacatgaaggtcacacatgcattggcaatagctggtatcatgtctgggggttggatatgttaccaacttta

SEQ ID NO: 40186 - DNA, 226 bp, Gossypium hirsutum
  Clone ID: LIB3149-024-Q1-K1-A3
gttcggtcttcacgatcggatgcacctccgattggtaacactcgctcgactgaaactgaaaagaaattaatggcatctcgacctgctgattactcacgttggagccgctacttcctcttccatacggagaaaaatttgatgcaagaactggagttgcgtacaaaaaatttcccctgggggtactattcctcgttagctgattataatcttacattatttttttttt

SEQ ID NO: 40187 - DNA, 390 bp, Gossypium hirsutum
  Clone ID: LIB3149-024-Q1-K1-A9
tgagaagagagttgagtgtgattgatgggatgtctcaacctctaaaaccggcctccagttacgaatgtacatgatgatcatggtaggttaccatcggagttcatttgttgggtttctattatggatgacagtgtgaactgtgatgaagatgtaaggatgtggatattagatgtatcaaccttatttcttagatttagttgtaactcatttcctcaagagaactgattgtagctaaatagtatatgctaagttgttaacaacagtagatgattgtgtagctcattgtgaacctatgaaatgaaaagaaaacatatgcaacttttctattttatttgtaaacaagttactttgatgtgatttgatcaggggattgaaagaaagatgatgaaa

SEQ ID NO: 40188 - DNA, 274 bp, Gossypium hirsutum
  Clone ID: LIB3149-024-Q1-K1-B4
cgtccggtgcgggaaaaatcctaataataaaaagatgttgtaagggataaagatgacatagaatggaggggtattaaagggggaaataaagaataaaataataaatctgaaacaacgttggaaagttcatgagattagaaaaggagtctgctaatttaatgaataaatttaatgagtaaaaaggggatattgttgttaagatggatataggggaacttaatattgtgaatataaccggagaatagaatggtaatgtgaaagaatagaaatgatg

SEQ ID NO: 40189 - DNA, 228 bp, Gossypium hirsutum
  unsure (1)..(228): unsure at all n locations
  Clone ID: LIB3149-024-Q1-K1-B6
gaaaaaaggggngagcacgcggcccaacggctaattactaacttaacaaggtcttttttatcacgaatatccttggcgagacggaggtgcgaaaagtggatatgttcgaaagggtatacattgttcgatcagagaacgataaagaccacatcctgttggtatgtgaccaaatataacttgtttcaccctcggccgctttgattaaccatacatgccgtgtgaagaaca

SEQ ID NO: 40190 - DNA, 143 bp, Gossypium hirsutum
  unsure (1)..(143): unsure at all n locations
  Clone ID: LIB3149-024-Q1-K1-C1
acgnggtgggggacatggtacacgcctatgatcatgagagggttgcacaatcaaagaacgaacgagatgcacttccatgagatgaatacctcaccaatgtcccgaaccttatcctaagaaacacaatcgatataccctatgct

SEQ ID NO: 40191 - DNA, 204 bp, Gossypium hirsutum
  Clone ID: LIB3149-024-Q1-K1-C10
ttttcaagtacgtgacagttaagaaaagtggtggtggggcaaatattggggaacaagaatcatcaaggggcaattgtattgtgggcaatgggcaacaacattggggaattttattcttctcgggggaaccccatttaacaaatttaaacggtcgattgggtttaagggccaaaaaccgaccagagggtttccacccttcccttg

SEQ ID NO: 40192 - DNA, 226 bp, Gossypium hirsutum
  Clone ID: LIB3149-024-Q1-K1-C3
aaataatctttatggtggggtggggtggggtttagagggttggaaaaagaagaaagatttgagtttgacgtggacgtggatgttcaggtattacagcacaacttaaatctataccacaaattttgacaaacgcataatacatcattatttgggataaccataaccaccgatggctaggaaaacttctcacgcggcgatggctgaaaacaaacgatgatattaacca

SEQ ID NO: 40193 - DNA, 374 bp, Gossypium hirsutum
  Clone ID: LIB3149-024-Q1-K1-C7
cattggacaaagtttccatctttttcaccactactgagtcaagtagaggttgatggggggaaatctttggacctgagtaattacccatacatatttatgagatggaaagagcaatacttcgtaaatgttgggacagactgtgggctaaccatagccggattttactatgtttgcttctcttgcagcgatggttctatcagcggcttctattacgatcctaatagcaggtttctgtatttcttcatgtccatttcagaagcttgagctgaaatccacaaatgaaggaagatcaggatacagtttttcatcatatgaactgcagtaaataagaatgtgggatgttgattccaatattatcagggaaatctgatttc

SEQ ID NO: 40194 - DNA, 243 bp, Gossypium hirsutum
  Clone ID: LIB3149-024-Q1-K1-D12
gccactcaagtgggacaaggtccaggcttaattggagctttatcacattgggtctatggctggtttatttgatctgctggctggtaccatattaaggctgttttcttaccaattcccttaaattcctttttggggttggaaattgaataaaaattatatttattccatttaatttgatatgaccgataatgaatggtatattatttacaatttgaaggatattaccggaaattgatttaaggc

SEQ ID NO: 40195 - DNA, 375 bp, Gossypium hirsutum
  Clone ID: LIB3149-024-Q1-K1-D5
cttggcgataacaacaattctagttgccaaatcaacatcagcagcaaagcagaagacaagaagaagaacaagaagaagaagcgtgggggaagcaagagaaagatgacggctgagcaaacctcggctttcaaatcggtgaccgaatgggtttatttagaccggcaccaccaccccaattcttcttcgacggcgggtttatcgtcgtgggtggtggatgattttggtgtgcaaaagagtttggggagagggacggagaaaatggtgtttgaattgcattcccattcgaaacacagagatgggttcttgtcttcttctaagctcgttgagagagctcatggcaatggggtgaaagatcttgctctgacagatcatgat

SEQ ID NO: 40196 - DNA, 388 bp, Gossypium hirsutum
  unsure (1)..(388): unsure at all n locations
  Clone ID: LIB3149-024-Q1-K1-D6
attctagcgacggtggacagaaaacgatgggagtgtggctaattttgttggagggtactgggatggagatgttttggccagatctgntatcttactggtaggttttgatgcggcttcaactttagtcattgctcggtgacagattcagtcggtgttggtgcctttacctgacatgcgtgtgtagctgggaaagatgatggggttcatgatacatgcacaggaacatttgatgtgaactcgagcttgtcaagtggaccaaattccaagctgctcgtttcaagagaggatccaattgaaattcgtattgggcctatgaaaagtccaatccttattgggcccctgataaagccccaagtccatgcaatgttttgtatgtagatttttaatg

SEQ ID NO: 40197 - DNA, 366 bp, Gossypium hirsutum
  Clone ID: LIB3149-024-Q1-K1-D7
gcacttgaaaaggctactgtgtcttacgggactgatcttgtgagatttacccagaagaattgcctgaggatatatcccaagggtactcggtttaactcctcaaactacatgccacaaattggttggatgcatggagctcaaatgattgcctttaacatgcacggatatggcagatccctttggttaatgcaagggatgtttagagctaatggatgctgcggttatgtaaaaaaacccgatttgctgatgaatgtggatgcgaacagtgagagagctaatttaccggttcagaagagattaatggttgaagtctacatgggacatggatggcactgagattttaaacacacacactatgacacctat

SEQ ID NO: 40198 - DNA, 215 bp, Gossypium hirsutum
  Clone ID: LIB3149-024-Q1-K1-E1
aaatgcaaagacattttagtattggaatgagccaaatccgtccgggcctaacaaccgaaaattaatcccaaaataaaagcccaataaatattattaacaggccacaagtccaaattgcatgacccaaatttaaaacctaaacctaatacaactcaataggccaaaattcaaacccattccttagcccaactaccctgggccaagaacacaaggta

SEQ ID NO: 40199 - DNA, 199 bp, Gossypium hirsutum
  Clone ID: LIB3149-024-Q1-K1-E11
tggaagactaaatgacattgttggaagtgcttattatgttgcccctgaagttctgcatagatcttatagtctggaagcagatatatggagcattggagtaatcacctacatcttgttatgcggaagccggcctttctgggcacgtactgaatctggaatttttcgttctgtgctaagatccgatcccaattttgatgat

SEQ ID NO: 40200 - DNA, 394 bp, Gossypium hirsutum
  unsure (1)..(394): unsure at all n locations
  Clone ID: LIB3149-024-Q1-K1-E4
ncatttcagggccattgttgtggttggtgatttgcaagggcaagttggggttggagttgggaaagctaaggaagtcattgctgccgttcagaaatcggctgtgaatgctcggaggaatctcattactatacctatgacaaagtacttgactttcccacaccgatccgagggtgactatggggcagctaaggtgatgcttagacctgccgcacctggtactggagtgattgcaggaggtgctgtgcgaattgttcttgaaatggcaggtgtggagaatgctttgggcaaacaaattggaagtaaaaatgcccttaacaatgccagagctacagttgttgctgtgcagaaaatgaaacagttccaggaggttgctcaagaacgaggaatccccatg

SEQ ID NO: 40201 - DNA, 147 bp, Gossypium hirsutum
  Clone ID: LIB3149-024-Q1-K1-E5
gcagttcaaaaggatactgattttttcaattctgatcccaggaaacactcccggaaaaagggcactgttctatatcccaccggcactacgaataacctctactaccgcacgacacaaattgtttgcatgcataacgcccaaaggata

SEQ ID NO: 40202 - DNA, 327 bp, Gossypium hirsutum
  unsure (1)..(327): unsure at all n locations
  Clone ID: LIB3149-024-Q1-K1-G4
accgggggtggacccacgcgtgcggaggaacagcaccaggtataattaagctaacttataatttgctgtgttgctattagatgcatatttctatattggtaaccatgaattattgcatagagaaattgtgagagttttggtattataaactgagttcaaaactgaagtgaaaacgccagtttattctcatgcatactgcattctcaaaatttaaatatggatattggtttttaaaaaggctatgttcaccaaagtcgaactttggattatgattaaccttaanttaaatgctttttgtttggaatgctggaatgcttggattattct

SEQ ID NO: 40203 - DNA, 208 bp, Gossypium hirsutum
  Clone ID: LIB3149-024-Q1-K1-G6
aatcccacttaataaagtgtgtgaatttgtatggtatcttttttactttctttcaactttgcatctatttagtaaatattaataaggttaaattttgttattagcccctatattatgtaaaagttgtgaatttagtctttatgttctaatttggtaatttataaacattttactctttgaaattttaattgatccaaaagtaagtgtt

SEQ ID NO: 40204 - DNA, 265 bp, Gossypium hirsutum
  unsure (1)..(265): unsure at all n locations
  Clone ID: LIB3149-024-Q1-K1-G7
gcggcggaaagnaaacattcatacggttaaaaacaaaaactagcccctgtattttgtaaaagtggaaaaacaaaacggcatcgaccaacatgattaacaataaacattgaacgtcatgaaattataaccgatccgcctgtcaattgttaaaaaaagaaactagctaccgggcaggccatctaaaagatccaaactgacccacccagacatgcaatagaaccgctcttcaataaaggtacctaaaataaattaacaagcccatctt

SEQ ID NO: 40205 - DNA, 266 bp, Gossypium hirsutum
  Clone ID: LIB3149-024-Q1-K1-H5
ggattagatgatgcagtagaccataactgtttggataatgatgcagaccgggagcttgtggccttgcccattgaatcacgagacttgagtattcaagatacacagtctccgtctttgacgtaggttatgttggacggtgtagacaaactggaacactgaggcctgatgcatgggagtgccacccgtactctatgatataggcgtacgttatacgtgaagcccttctactatttgggaaatacatttggcaaatcttgcgcctaaaa

SEQ ID NO: 40206 - DNA, 257 bp, Gossypium hirsutum
  Clone ID: LIB3149-024-Q1-K1-H8
ggtgataacacgtctcgtcatggaccatgtagggtgtatgttggtaatggtaattctctgcctgtgttatgctccggtcagtcagctcttattactaagacatgaccactttacatgaagtctttactatatacaccttgaataactaaaaacctgctttctgtgtctaagttcaccagaaacaatcaagtgatgtttaaaatctttccttcacaatgtcaagttcgagacttaaagaccaatgaggggcttcttca

SEQ ID NO: 40207 - DNA, 111 bp, Gossypium hirsutum
  Clone ID: LIB3149-025-Q1-K1-A11
ggagccaccaaccaacttaattgttgggtttgaaaaaagctttgcggttgtgtttctgggaaattattactaaattaataggaggaataagcgaatgccaaggctttcttc

SEQ ID NO: 40208 - DNA, 401 bp, Gossypium hirsutum
  Clone ID: LIB3149-025-Q1-K1-A12
ggagtattcaccccattgaatcggaggggaaacaaggattacctagtaatgcggtcgatgacgatttaccgaatatcacaaagatctatacatagtgtgcttgcgctacttgaaagaaggaacttgctaaccaaatgttctatgatatggaagcatgtaaaaactacatacgtgtatagacacagtgaacgggacttgattgggagaaatcatatgatgaatctaggatatgaaactatgatagcgaatgcttaaaattgactgttggactaaacgatggctaattataagataagcatgtgaatgttcaaccatgggcttccggagtgcaagagacgtttactgggtcttatgtctttgtgtgcgctcatggtaatcgagacaagagatgtggtgtatgt

SEQ ID NO: 40209 - DNA, 260 bp, Gossypium hirsutum
  unsure (1)..(260): unsure at all n locations
  Clone ID: LIB3149-025-Q1-K1-A2
gcgggcgaatttgtgatggatcaaaataaaaaaatatttttttttttgnnncangaaaaatatcaaatcgaacgttttgatttaaataaggatcctccgacccaaataatggatttctcccatgtttaaacttattatttcgtttttcaaaaaaaaaaataaaaaaaaaaaaaaaaaaaaaaaaaacaaaacaaaaaagaaaaaattctattttttaaaaaaaaaattaaaataaattggctgcctttttaaaatatcca

SEQ ID NO: 40210 - DNA, 247 bp, Gossypium hirsutum
  unsure (1)..(247): unsure at all n locations
  Clone ID: LIB3149-025-Q1-K1-A6
ggaaagctanttcaaatctaacactttttgttttcaaaaggaacagcacaaacatgtgctcgtatcatttctaataatgacgtcctcaaccctactgaaaaaaaattaccttcaatctttcttgataaaacctctgttcacaaaatacagagtcttacaccaaatattgcagatccttacagagaaatggcccctgactttccaattttgaatctaaaaattataaaacacgcagaacattatcata

SEQ ID NO: 40211 - DNA, 301 bp, Gossypium hirsutum
  unsure (1)..(301): unsure at all n locations
  Clone ID: LIB3149-025-Q1-K1-A8
acccacgcgtccgagcaggcnataaaatatttattacattttcttttaaacaccctcaataaaacaaaagggccgcttatatataaaactagtgcagcccccccccacattgtcaaaactagggctgctgtatacacatgaagtttcaaacagcactataaacgatgcataatgtcacaaaaccataaccccccctataataccacatctactattctcttattaacctaaaccccctacaatccactctaactcaaccattatgactgaatcgtcacaaaacacaagctccacatgtgaa

SEQ ID NO: 40212 - DNA, 199 bp, Gossypium hirsutum
  Clone ID: LIB3149-025-Q1-K1-B12
agatattgggcatgaaactgtaaatatctaaagggagtgccacacaaacccacacgtgcgactgtgatttaaagggggggagagaaaaaacaaacgtgtgaaaaaaaacccagatccgcgatggggaaaaaaatttcagtttatggggggtgaaccacccacgaatgataaaattcacatcgaagcgttcagtacattc

SEQ ID NO: 40213 - DNA, 216 bp, Gossypium hirsutum
  Clone ID: LIB3149-025-Q1-K1-B3
aaaaaatgataccgtttccttactaaaaaattctagttaagagaaactgctggtaaaattcgtgagaattttctgagcaacatcaactggaaaggtattattaattaagtctcaaaaaaataaaagtatctctagatgaccatccgtctatgaaaaaaaaagtttagtcttctttcaccataacgaagaagcccgcaccgatccttctttccaaca

SEQ ID NO: 40214 - DNA, 395 bp, Gossypium hirsutum
  Clone ID: LIB3149-025-Q1-K1-B9
cgtcgaaccaccatttcttcggtgaccgacggttctcaggccagatctagccttcttttacccacagacttccctttaaactccgatctcgacgaagtgaaagggaatcaacagcctaatcgtagggtaagtcctcttttcttttttctttcgctcttttttgatgtaaatgataaagaaatcgataaaaacaggtgaaaagaacagaggattaagaggagaaaaaggtcacctttctcggattttttattgttttctattggatattgcctccatttttcgtaaccttacaattgattcaaagcttggcttttatagccgaagagaaagagaaaaatgctagaaaataaagcataaatacaatattctcccttggtttttggctattctgctgg

SEQ ID NO: 40215 - DNA, 262 bp, Gossypium hirsutum
  Clone ID: LIB3149-025-Q1-K1-C12
ggagacttttctatattttttttccaccattttactatacaactgtttgtgggattatcgggaaatattgcaataataaatatgaccctggcggatggactacaatatattatgagaaaccatttggaaaagattacgactatgcacagcaacgtaacttctcaaatcggacagttgattgatgaaccacaaatatactcgcatagatcactatttgacaaacgaattgtaacagaacctgatggcactaggctttgctaat

SEQ ID NO: 40216 - DNA, 313 bp, Gossypium hirsutum
  Clone ID: LIB3149-025-Q1-K1-C8
ggtaaatataacagcaccatacgatgttattttcatgttcggattcaccgggtcggaacatttactgcagaggaggatttggtagtatgttattggtaattaaagttatggtgtgtcgctgaatatggtcttttgatgctgcttttgaagattgttgtgttttcgcacattttggatttggctgtttatgctgggggctggaatgcaatggacatctctgtatcttttgttcataaaaacattagtattctttttagattacttgcaaatggtgaatggcacggtcgatagactttatttgattcgagctttt

SEQ ID NO: 40217 - DNA, 189 bp, Gossypium hirsutum
  Clone ID: LIB3149-025-Q1-K1-D11
gccggagataaacagcattttccccgcccttttggaacttaaataaagaggggacctggggggaatactggatgggatcgcggccaccaaattatacattattgcgggcacatccctcaacactatgacacaggcctacacacacttcggactacagatcaccgcgccttatgtgagataagcaacaag

SEQ ID NO: 40218 - DNA, 421 bp, Gossypium hirsutum
  Clone ID: LIB3149-025-Q1-K1-D5
aatcaattcggtcgttatggtcggacaaaatattttaattgttaatttatattaaattgaagtttattattattcgaattaatattcgaattatataataataattttttaatattctacaaaataaaaaaataaataaaaaaaaatgaaaatctagaaatttaatattaatatataaattgcataaaattaaaataaaataaagtaggaaattactaaaaaaatgaatacataaactaaatacaataatagataaaacgagatgcgacttccccctagatattttacactttctcccacaaaaaaacttgtaatgcctactccatttgtaattccatcgattactcgcctatcaaaaaaatgagttagttcggccaatcctcttataccttttgttaaggatattgaataaaacatatct

SEQ ID NO: 40219 - DNA, 308 bp, Gossypium hirsutum
  Clone ID: LIB3149-025-Q1-K1-D7
ggcggggatggtgtcattggactggttaattttattgactttatgaccctttactggaaagggctcggtaagcacttgtggaacgaactggggttttcattgtggaaagagatatcaatgattcggctctttttgggaagcttttcaaggttgttgcatttacgcacgttatgcatttggctgctcaagctggggtcaagtatgcaatggaaaaccctggctcttatgttcatagcaacattgctggtcttgttagtttacttgaaagttgtaaagtagccaattcacagactgcaattgtgtgggct

SEQ ID NO: 40220 - DNA, 296 bp, Gossypium hirsutum
  Clone ID: LIB3149-025-Q1-K1-E10
ttgtaggggaactaatgattttatgctgtttaatgaatacaaatacagatggatactcgtggacaatcactacagcatatcacacatatgcataacaattccaatataaatcaaagaagctttctatgaatcaaaacacataattctttcgataattaactgaacaagcagcggtttactgaacaaggaggtgcactatcatttgaagctaaacttaacaacatatacctgcgaactacgactaaaatagtaattctcgatcatgcaatgaactgaactcttgtattacacaaaga

SEQ ID NO: 40221 - DNA, 173 bp, Gossypium hirsutum
  Clone ID: LIB3149-025-Q1-K1-E11
tcgcaataaagctgggagaatgcaagctgtgtatgttagaactgagaaaggtggactttttgaaggtaaacctcatgttagaatttcgagaacatataagcggttctctggtattatgttgcaactgctacaaaaactaaatataactgccgtcggcaagcgtgaaaagcttt

SEQ ID NO: 40222 - DNA, 244 bp, Gossypium hirsutum
  Clone ID: LIB3149-025-Q1-K1-E4
ctcacacgtacgaccacgcgtacggaggatctacattggattctcatcatggctttgatcgtgaatatcgaattgacagggacgttgagcttgacttccatgtggacgattccgaactcactcttaaatgtttgcttgtatgaacaatattctggaagggacttgttttttcgaggtgttaggtgtgataagcatgtcattactatcacccagacggatgaaattttggattattcacatgttc

SEQ ID NO: 40223 - DNA, 339 bp, Gossypium hirsutum
  Clone ID: LIB3149-025-Q1-K1-E9
ctggaggggaactaatgattacatgctgcataatgaatacaaatactgatggaaagccatggacaaacactacagcatattacacatatgcataacgatttcaatataaatcaatgaagcgttgtatggatcataaacactagattccttcgataatttactgaacaagcagcggtttactgaaacaaggagacgccctctctttaggagctgaacttgacaacacatacctgcgaactcctactaataatgtaagtctcgatcatgaaaagaacagaactcttgtattacacaaagataggggtaataatgctgcggtgcggaattcaatgggataaa

SEQ ID NO: 40224 - DNA, 381 bp, Gossypium hirsutum
  unsure (1)..(381): unsure at all n locations
  Clone ID: LIB3149-025-Q1-K1-F10
tttacgcgcccgggcaaggtttggcctccttgtttgaccacaaaaacgcatttttgcaacgcgctagcttgggaaccgncgcaacccaacgcaaaaaacggggcgacggtggataaaggggggacggggaacacaaaagagtaacgcatcgcattgaaaaaaccggacattaccgtgtggtcgggggggcggatacgggaagaaggcgagccgcgtggccagtgtctcaagagggaacacatggtggagaaggggtcaaaaggtgaccaaaagcatgcaattcagggggtgggagcagcacccgcagctggaagcgaacgattgcgcatgagccaacgcgggacccatggggctgccttgagctccaccaaggggaaaagg

SEQ ID NO: 40225 - DNA, 332 bp, Gossypium hirsutum
  unsure (1)..(332): unsure at all n locations
  Clone ID: LIB3149-025-Q1-K1-F12
tcacactcnccggcgggagaaaccagagaaaaatgaccaagtgttacccaaccgttagcgaggactaccaaaacaccgctcaaaaagctaataggaagctaataggtctcatcgctgagaagaaaagaggtgcactcatgctccgtctagcgagggactcatctggaacttttgatgttaagaccaacaccgagagggcgttctgaaccatgaagcaacctgctgaggtcgctcatgctgcttacaacagactcgatattgtagtcaggcttctcttgccgatcaaagagcagaatcctatcctttcatacgctgacttctattaacttgct

SEQ ID NO: 40226 - DNA, 354 bp, Gossypium hirsutum
  Clone ID: LIB3149-025-Q1-K1-F2
gccaagtttcacaatgatttcctgatgaacacatgattattttctgataaattttagcagaaccaaacattctatagtatcgacttagatcgtgtaattgtttgtatatattggctctaccctttagttttgctgagttgggttagccaaattgtttttgttttgttttgtattgtagggttgtttgttgtttggttttggttttagcatctgatgtacccagaagttatgaccttttgacctttctgtggttttttacgattgtagaaacactcaagtatgtcaaattcactttatttcccttggtttttaaaaaaaaaaaaaaatgagaaaaaaagacctacataaaataac

SEQ ID NO: 40227 - DNA, 397 bp, Gossypium hirsutum
  Clone ID: LIB3149-025-Q1-K1-F7
ggcatgccccacaaaaagtaccattttcgttttggtcgcgactggaacagaaccaagcgcgcgatcagttttaatgttaacaagcaagtatctaaccaaattatcaggaagaggattcatgtcaaattgtagcatgttcagcacgaaagatacactgaggaagtcaaactggggaagatttcaaatgatcagatcaaggcaaaggccaaggcaaaggagcgggtgattagcacacataggcagtctgatggcccaaaacctatttacatgatcgttgatgcaattatataaacggtaacttcgattgcatatgatgatgataatgatctcaatggtggctactaaatctactctgatttttggtttattcttggcataacttaaataagctttgcta

SEQ ID NO: 40228 - DNA, 368 bp, Gossypium hirsutum
  Clone ID: LIB3149-025-Q1-K1-G11
tcgggcgaggtcaggctatacgataggggttttatttcggatgcatgcaacgtcatatcttttaaatagtgttaactatatctaaaaaactggccgacggtggataacgggtggacggggaacaagaaatagtaacatatcgtatttgagaaataggatatttccttgtctttggggaagcagatacttgatgaacactattcgatcggcctgtctatcaagaagacacacagagtggagtatggctcacagggtgaccaaaagcatgctatgaatggtgttgtaacagtatctgaagttggagctgaaaggtttggtatgagctaatgtgggactcatgggtttgccttgagctctatcaagggtaa

SEQ ID NO: 40229 - DNA, 223 bp, Gossypium hirsutum
  unsure (1)..(223): unsure at all n locations
  Clone ID: LIB3149-025-Q1-K1-G2
gtcgcgagcgccgccctttntttttttttttttttttttttttnnnnntttttaacaaataggattgttcttcattataaactaagatccttcaaagaaaaggtttaaatcaaatagtgcagatgttgaaagaaattgatgataaatcaaagcagcttggacatcaaaagaagcctgaagaaaaaggtagtgggacttttttcctaaagatccaaaacctaaa

SEQ ID NO: 40230 - DNA, 290 bp, Gossypium hirsutum
  unsure (1)..(290): unsure at all n locations
  Clone ID: LIB3149-025-Q1-K1-G4
angcggaacatggacatttttaacatatttttttttttaaagaacagacaaggacataaatgactggttttatattaatatgtagaagaacctacaaaaacatctttaaattgaagaatattgctgaaataatattacaatattatctgcataaaaccttaacttacaaggtcaattttagaaaaatttacatactgatattattatggctaaacaaactttaacaaatacattgtctccttaaaaattaagaaatataactttgtagaaaactttttatgggaacaata

SEQ ID NO: 40231 - DNA, 346 bp, Gossypium hirsutum
  Clone ID: LIB3149-025-Q1-K1-G7
gctctggacaatccaaacttacatattcgtttatgcgacatcatacctcttctatagcgcggcctaaattcaatatactggccgcccttacacaacctactgactggaaaaacactgccgttaccaaactaaatcttcttgcagcacaacccccactacacagctgccatgatagcgaacaggcccgcaccgttcaaccttcccaacaaaggcacaacctgaatcagtggtcacacacaccttgtgtcagctcattaagctcaaccattatcctgggtacactcatccagaccgctactcttaccatctacctagctccctatcgtttcactttcttcccttactt

SEQ ID NO: 40232 - DNA, 363 bp, Gossypium hirsutum
  Clone ID: LIB3149-025-Q1-K1-H10
aaaagaccctttgtgaatgtgctgtttgtttgaatgagtttcaagaagatgagaagctaaggatgataccaaattgcaaccatgtttttcatatagattgcattgacgtttggcttcaaaacaatgcgaattgcccgctttgcagaacgagaatttcgagtagtaccatcaatgcaccaagcttagctccacaagatccaatcattaatggtggtgatgaaagttatgtggtgattgaattaagtgataataataaccatagttcaagcgatgagtcaattagtggttcacctatggagctcaaggatgtggagaaacgaggaaggaagttgcataaagggacaagcatgggggatgaatgga

SEQ ID NO: 40233 - DNA, 417 bp, Gossypium hirsutum
  unsure (1)..(417): unsure at all n locations
  Clone ID: LIB3149-025-Q1-K1-H4
caccaccccacatacaacctttgacaccagtctcggaggtttcggagccgccggaatcgccgtctgcgtacttggatacaacagcggaagctgctggtgaagcggcacaggtggaggcggaggaagagatggaagaggaagaagagatcgaaccgccccctgccgctgtgcccttctctggattgtttgcctgtgctgacaggcttgattgggttctcatgatcgttggatcccttgctgctgcagctcatgggactgctcttgttgtttacttacattattttgcgaagatcattcangttcttggacttgggccacaagaacaagggcaagacagaatggatgagcagtttgagaggttcaaagaggtggcaaatacaatgaagcgagctgttttattagttttacatattcgac

SEQ ID NO: 40234 - DNA, 393 bp, Gossypium hirsutum
  Clone ID: LIB3149-025-Q1-K1-H6
cgtgcccccaaagggacaaaaactccatatcatttgcaaaagcaaaaatactttcgggaagacaactctaggaagagtgactatacaaatagacaaagtcgtgaccgagggagtatacagcggtttattcagcctgaaccatgatagcaacaaagacgggtcttcgagaacgcttgaaatcgagattatctggtccaacatgatttcgaacgaagataggatataaaatgggttcaaagattatttggctacataccagccaccaccatggaaccgggtgccaaaatttaccggtggagggtattatattaatactattcaggaccggttccgggttccatttggttgggtgaaggaaatggtatatatatctatctattccaaggccaagtt

SEQ ID NO: 40235 - DNA, 392 bp, Gossypium hirsutum
  unsure (1)..(392): unsure at all n locations
  Clone ID: LIB3149-025-Q1-K1-H7
accgacgcgtacgcangggcccaaacagacaaaaaatttatattttttgcaaaaacaaaaanaaataacggggagcgaggcttttgaacagggactatgcaaacacaaaaaaaagcgaccgaagtacaatacaaaagatgattcaggatgaaccaagacagcaaaacacaatgcatggccacaacgctggaaaggcaaagcatgaggatcatcacgatgtcaaacgatcaaagcataccaaaatgaaggaaagaatatctgctgaagaccaagaatcaccactaaactaattgcagaaacttacattgaaggaagactattaacactatcatggacagcgaccttgttccatgtgctcagataacaaaatcgtgatacaaaactatctatgc

SEQ ID NO: 40236 - DNA, 392 bp, Gossypium hirsutum
  unsure (1)..(392): unsure at all n locations
  Clone ID: LIB3149-026-Q1-K1-A12
ccgaattcngggcgaccagcgtccggccgcggaaaacttaaacaacccaaacaaacagaaaaaaaaaagggctgctgaagggacagcctttgtccaagactggctgtttttcaaatacgtatccttctggatccatggtgtgctattattactcccctccaattatgattctccaaaagggcaaatccctaattaattttctctctggatctttttccattaatggggttctgcaagagtacctgcatactgttctagttgtaagagtgacgattttatttgctttaaaaactttttgtatgaatttccttttctagacttgtaaaagaaaagatattatgtatgaatcaagaatgccattcgaaccctgcgaatatttggatattatgtgt

SEQ ID NO: 40237 - DNA, 444 bp, Gossypium hirsutum
  Clone ID: LIB3149-026-Q1-K1-A3
cttgttttttacttcgtttctaatttcctcctctcatcccattttccccttaaacttatattgataatatccttaaactttcactttgttgattactttcctgagccaaatatcagtacaatgtcaagcagaagatcacgttctaggcaatcaggtgcttcaaggatcactgatgatcagatcatcgatcttgtttccaagttgcaacagcttatccctgagcttcgtggaagacgccccgacaaggtatcagcttctaaggtcttacaggaaacctgcaactatatcagaagcttacacagagaagttgacggcttaagcgatcggttatctcagctattagcttccacagacaccgatagcgaccaagcagccattatcaggagtttacttatgtaatgatcagatttttggtttttttttcctagattaagtattactcac

SEQ ID NO: 40238 - DNA, 405 bp, Gossypium hirsutum
  Clone ID: LIB3149-026-Q1-K1-B3
cagaaaactgccccctttcctccatattccttttctgctagggttagaaaataacccatcattgccgccgtccgaccacctcgccaccatcacatcggtgacccgcgatgcaccaagatggggtcttttagccctcctttctcatgcttatcggagacatgctcccaaaggccgaaagacaaaggctcagtcccccttttgctcgaccacgccgaacggagaagaaagctccgacgacgcggtcacggggcggatctggctctgagggtcaacgaggcagaggtttgccattctggtgcaaacggtgtcaggggggaagagcatcgggcgttagacgtgtcgacggggcacgtgaggcgcgcgacgcttggaagatactagggtttttaggtctgccaaaattgg

SEQ ID NO: 40239 - DNA, 220 bp, Gossypium hirsutum
  Clone ID: LIB3149-026-Q1-K1-B5
acagatagagatcacaatcacccccctttttttctcttttgacgagaaaacaacccctcaaggacagatgttctttatatttgtcaccaccacatcattataccctcgatgcaccaaaataaatttttttatacctcattaaccaaccttatacaaaacatttcatccaacaacactaagacatacgcccaatcacatcttggcttctatacacacatcg

SEQ ID NO: 40240 - DNA, 219 bp, Gossypium hirsutum
  Clone ID: LIB3149-026-Q1-K1-B7
gacagactcacaatatggtgtgggggggattattggggcggatccatctttaagagaataaatgtatggctgacattgggtgcaaaggacgagcatgaagcccaaagtgcagttagcacttgggcggccaatctctaggatccaaactgtcatgcgcacgcatacgactacctatctctagtattgtgtcagatgaagtgcactgagcacgcggcatgg

SEQ ID NO: 40241 - DNA, 346 bp, Gossypium hirsutum
  Clone ID: LIB3149-026-Q1-K1-C4
ctccttcagcaccgtttttcttattttccattttctgccctcagcattttctcctacatttccctttttttttctattgattgcagaggtggacagacaagtatcaggtaacagacataaacaaatatctccgctgcaatgatgataacattactcttttctagtaatacgggaaagacaatatatatatgtcaaactacagttacatttcggatttaatctttttaccttaaacaagaacattttggttatatttaattttcgatatgtttttattttttgatatgtatcatttaaaactattttagtattttattattaaactatttttatttttgatgtcttt

SEQ ID NO: 40242 - DNA, 387 bp, Gossypium hirsutum
  Clone ID: LIB3149-026-Q1-K1-D1
gctgagtttaagcatctcaataaccggagttttgctctttgagatcttgtattgcttcaattctaactttgtcatccagcttccataataattggcagggttttggtttggggccgtcttaacaccggaagctcgaaatgttattgaggggaacgtgttccggcagtagttgaagttgctggtgtaacatatgtaactacttaagatgactagcatctttgctctgtaatttatgccatgtctacatgtttataaatctaatgttagtggtagtgatgacattgtatcagcttaatgaatgtaactatgtttttatttaaccctttgggtttcttttttcggtaaaaactaagaattaaattggtattttgtccgctctactaaaaa

SEQ ID NO: 40243 - DNA, 436 bp, Gossypium hirsutum
  Clone ID: LIB3149-026-Q1-K1-D6
agcccttgtatagcagctgatgtctgtgccatagagttcacctaaatgacaggaaatgctgcttttgagggctgatgagatgatgatgcctgccttcggagatgttgtaaatgaggcaaggaccttgtccaggaagcttgcaggcctcgaactttgcatgaggcttcagggacattttctatggtaagatgctcaatcccattattgttgaatgatcgatgaaactttcggagtagatgtcccatggaccaagcttcgaagccgagtggttatgatcacaaccaagcagtggaggttctcagtgcaagttatcaaggtcagtgcaatgacacttctagcattaatccaatgcttggcggtgttaggcgatctcttttcagcttccaccattcatttatagtattttcttcagcaccagagagcggatgtgggacat

SEQ ID NO: 40244 - DNA, 160 bp, Gossypium hirsutum
  Clone ID: LIB3149-026-Q1-K1-F4
ccggttgattactggttcattgttgtaagctatgacagtagttacctattgagttttattgattttggtatatgtacttttttagtgaagtggcactaagtagtttttcatttttgaaacgtatgtttgaaccttcttatatataacagtattctagagc

SEQ ID NO: 40245 - DNA, 362 bp, Gossypium hirsutum
  Clone ID: LIB3149-026-Q1-K1-G1
ggcatcgctgaattgaaaaagaaaagttcaaaacccaagcgaccttccatcaaagcccttttcgaggatgaatcggcagcagctgccagtcaacctgtccaagggagctttataaacctcttgcctccacaaatagaagaagccccagagaaccgttcgagaaaatgaatgctgccatatcctcgtgataaccttgtgttccccggtgcttagcgtttgctttttgccacattaacatttcaaagttttaggggcaaaggtccccaaaacaaagtggtttgagatatgggatttggctcttcctgagccagttaggaaattgttcttttctgtaaaaataatatctgaaagtaaatattttt

SEQ ID NO: 40246 - DNA, 267 bp, Gossypium hirsutum
  Clone ID: LIB3149-026-Q1-K1-G5
tttttcaagatgaggatgacccacttcttcttttgtacttttacaaagattcttgtactcatgctaaatacattttcaaatagctagttaaactactgtacaagctacacaaaagctctgctttttcttggctgaaaatcattttccatttctgtgctttcaacatatgtaatgctttaatgctaatgtactccacaagaaagagcttgtctgttatagagacagtcatgatctttgtccttatagaaatttcatgttcatttaaac

SEQ ID NO: 40247 - DNA, 427 bp, Gossypium hirsutum
  Clone ID: LIB3149-026-Q1-K1-H2
ggcaaagcaagaaacagatggagacaaagagttagaatcagaacccaaatcttgtaggatacgaagacaacttttttcaagttctgggttgggggaaccagtaggtgatggtgaagatagtggtgctgtgatgcaaacactggttatgggcggtggagaagaaaatggtggtggtaaaatctgtggaggaggaggatcagggggcggcgttggtggtgtcgggtcggggttctttgagagtgatagcactgacgtttactatcagaagatggttgaagccaatcctggcaatccacttttgcttggcaattatgccaagttcttgaaagagattagaggagattatagcagagcagaggagttctgcggcagagcaattctggcgaaccctgatgatggggaaattgtggcactttatgctgatcta

SEQ ID NO: 40248 - DNA, 266 bp, Gossypium hirsutum
  Clone ID: LIB3149-026-Q1-K1-H6
atgttgttcttcaaatcactgaggtagaggcttataggccaaatgattcagcttgtcatggtagatttggagtcactgcaagaacagcccctgtttttggtcctggagggcatgcttatgtttatctttgctatggacttcatacgatgctcaatgttgttgctgccaaaaaagagctggggctgcagtgttaatacgtgcttcccttcggtgtgggggttggaaaactattccagaccgcgggggcaagaaaactgaaaagcctt

SEQ ID NO: 40249 - DNA, 347 bp, Gossypium hirsutum
  Clone ID: LIB3149-026-Q1-K1-H7
atctaatatagaaagagatatacgtattcagtatagagatcaatcagactttgaatacattgcacagcaatttggagtttttgaagaatggaaggacggtgtaccaaggacagcgtataaaggagtagtggttttcaggtaccacccaccaagacgtgtatttctggttggtcctgactctctacagcagcttgggattgaaaatgcttgaactgaaaaggttagcgaccatgtctggttttgattgtttccatttattttatgatcacacagtaactgaatttggtataatagcaaatttaggaggaattagtgacatacagagtttcagcatgttttagtttttg

SEQ ID NO: 40250 - DNA, 222 bp, Gossypium hirsutum
  Clone ID: LIB3149-027-Q1-K1-E1
agcaagcgtacgactgtttgactaagtctaggccatagtagagagtggaagactgatgggaagaatgaagaatgcccaatgcaatgcccaaggatattcacttggagcttcagacgaggtagatgacaaacctattctacctgcaaaagtccatgataagggcgaagcataatgagtctccattgttgtcgtcactgatgacgatgttgctgacaagtctaa

SEQ ID NO: 40251 - DNA, 204 bp, Gossypium hirsutum
  Clone ID: LIB3149-027-Q1-K1-F9
gaaaccgggacgaccagcgccgggcgacaaaccaccccaggaacggaaacagaaaaacaggggcgaaccgggcggaaaaaagagagcccgacacgagaaacggaaaaggacgcaacaagcacgcacccgcaggacaagagacgcaaaaccggggcaaaacgaaggaggagcagaggcgagacacaaaaagaaagacaaaccggg

SEQ ID NO: 40252 - DNA, 314 bp, Gossypium hirsutum
  Clone ID: LIB3149-027-Q1-K1-G4
gggagcgtatattgactcggctataaaactttcataccacaggaaggtgatgactctgggatgtctagagaagaagaaagcgaggaggacgaagatgaagagcttcctgacgctgcagacgctgctgcagcaaataggaaaagctaatccagaagcaaaaacagtcaaggctcaggctgataaaccaagatgctgctaaacaatctggcaagatagcagaacctaacactaacatggaaatttgaggatgaacatgaagatgacgattaccacgatgagagtggttgtgacgaggaaaatgatcctggagacta

SEQ ID NO: 40253 - DNA, 256 bp, Gossypium hirsutum
  Clone ID: LIB3149-027-Q1-K1-G9
gtgattcatctagggctttcaattgcaggaagcaaattttgattcttgattttaacatcgtgacgctgttagtgtaaacaataaaatcattttattctatgtaagtttgtcattacattgatgagttcaaaaaaaaaaaaaaaaaaaaaaaaaaaaaaaaaaaaaaaaaaataaaaaaaaagggaggataatttaaaggttcctgcgctgtacgaacgctctaatgcgacgtcataggattttcatatagggtcac

SEQ ID NO: 40254 - DNA, 164 bp, Gossypium hirsutum
  Clone ID: LIB3149-028-Q1-K1-A12
gaatgtttaactgccaaccattctttatatttttatattacattaaatcctccttgatgaggaatcatttaaagaatgtgccgtcctaataaactcaaagatttccaattcgatcccaaattattgttacaataagaagaatcaaccattcttcattaaaatta

SEQ ID NO: 40255 - DNA, 412 bp, Gossypium hirsutum
  Clone ID: LIB3149-028-Q1-K1-C5
cggaggcatgacaacggaagaatatcggtgccatttcagcatatgggcattagctaaagctccgttgttgattggctgtgatgtgaggtctatggataatgtgacatttgaattggtagccaataaagaggttattgatgtcaatcaagataaacttggtgttcaaggtaaaaaggtgaagaaagaaggggatcttgaggtctgggcaggcccattggctaacaatatggtagctgtggtgttatggaacagaggatcttcctcagcaaacatcacagcttattggtccgatataggccttaagccatcaacggttgtcgattctcgagacttgtgggcgcattcgacggagacgggtgttgaagatgagatatcagcggaagtggattctcatgcatgcaaaatgtacact

SEQ ID NO: 40256 - DNA, 340 bp, Gossypium hirsutum
  Clone ID: LIB3149-028-Q1-K1-D11
tggttccccaatcaccatattccttgtatcctccccaatattcttcacaaatgggagggcaaatcgggttgaaggagacagacgaaattataggcatgaaagctaacaggagacgggtagatgattcctttacagttccttggatcagccctcaatccactagctccaagagatctaagcgtctctggtaggatcagattttcaaagtacaaaaacttcaacttctcttatacttggacaacatcattgccctttctttgcattttctcatttcttgctaatttagatttcagtgtgatgtttacctttcccccctactctaatagagccggtttcgttt

SEQ ID NO: 40257 - DNA, 246 bp, Gossypium hirsutum
  unsure (1)..(246): unsure at all n locations
  Clone ID: LIB3149-028-Q1-K1-D2
cgacccagacgaaccaagagcacgaacgcgagcaaacaacgccaaaggtttcagaaagcggcacgaacagccaagagaccggccgacgngaaacaacggcgggaccggaaaaaaccaagaggaacccaacacaaggggcggggagccaaaacaccnanaggaagcagacgcaagagcgaaaaggcccgcaccgaaaggccgcgccaacaggggagacaacaaaaaggcgaaagcgacccgcccaga

SEQ ID NO: 40258 - DNA, 325 bp, Gossypium hirsutum
  unsure (1)..(325): unsure at all n locations
  Clone ID: LIB3149-028-Q1-K1-D5
gttagactaaatagttttttggtatgatgatcaatgtctctttaatgtttgttttacagtccgtgaagagcaatccctttccttctgggtttatggttgtttctcctgacaatatcatttttaatgttcgaagttgtgttctttttagaactgcaatgtgcttttattactttacctannaaaaaaaaaaaaaaaaaaaaaaaaaaaaaaaaaaaaaaaaaaaaaaaaaaaaaaaaaaaaaaaaccccnnnnaaaaaaaaaaaaaaaaaaaaaaaaaaaaaaaaaaaaaaaaaaaaaaaagggggggggccgttttaaaggatcc

SEQ ID NO: 40259 - DNA, 330 bp, Gossypium hirsutum
  Clone ID: LIB3149-028-Q1-K1-E10
gtaaaacaatgaaatgggtgtgagagagagagagagagaggcaacccaagatgaaagtaaggctttgaatctggtggaaaaggaaaattgccagagtgagatgcacattacgatgagaatattagatgcttatttagatatctttaattgggggccaaccaccatgcaagatggaacttgtctgcgcctccatcagatatgtaatttacttgcaagacatgggttcaatttttgggcattgctcttgaaacctacgtctactttaagcttcttgcttgcccgaaatatttatatgaggagaatcctttgaaatgctcattttattattaa

SEQ ID NO: 40260 - DNA, 271 bp, Gossypium hirsutum
  Clone ID: LIB3149-028-Q1-K1-E12
agtttccaaggcgaaattcttgcaccaagtatcagcacgaaatgcttctctatctctggggtcaccaccaaaaggttgccgtcgaaattaccgctatccttatttcccagctaccccgcattatctgcggttgccgctgctgcccgattcccaagccttcctccttgttcaattctgatctctatttgcagggacaccttttggtagtctaggggaggtgtttctttatattagtggagaacggaactggttcaccatggctggtgctgat

SEQ ID NO: 40261 - DNA, 363 bp, Gossypium hirsutum
  Clone ID: LIB3149-028-Q1-K1-E2
gagagcactacctgttctgaagaaggcttatggtgacagcatgcataaggtactgcatgtaggcccagatacttgttcagtggtctctaagttattaaaagaagatgatactcaagcctggggtgtggagccatatgacttagatgatgctgatgctggttgcaaaagtcttgtgcataaaggcatcgtgcgtgtggcagatatcaagtttcctcttccataccgtgcaaaatccttttccctagtcattgtgtcagatgccttggattacttgtctcctaggtaccttaatagaactctttcagaactggcgagggtatcatctgatggtgttattataattttctggtatctaggtcagca

SEQ ID NO: 40262 - DNA, 171 bp, Gossypium hirsutum
  Clone ID: LIB3149-028-Q1-K1-E5
ccggaccggatcgccggcgttgtctgtctcatcattatttaagtctgttagcttatagtatcttgcaaagaagaataagtatttaaagatgtaaacgtttgttcgcttcttttacatggaaaatctactgttatcatatttcatacttacaagcaataaaattaattatat

SEQ ID NO: 40263 - DNA, 286 bp, Gossypium hirsutum
  Clone ID: LIB3149-028-Q1-K1-F10
gtcgcgctaatcatattattgctagaccatgcaggctgaacgagagggatacagttcactctctagatatggtacgctggcgttggccttgtaactctgaacgactggactcccgagtcggttcatgacgcatgagggccaagcttctatctatgcccatcgctttgctgataaagctcgaatgccccacggaataccgtagagaactcttgctctagaatctgttcgccaaactactgttattaattataagggtttcgcccgtggtctatcagcattgatgtat

SEQ ID NO: 40264 - DNA, 261 bp, Gossypium hirsutum
  Clone ID: LIB3149-028-Q1-K1-F11
cgtaaactaagcttattattgccattattttccagcctgaagagcatgattaactggaagctctcgatatggttgccgagcgtcaaccttccgatgttcagtagtccgcacctaccccttttttaatgccgctgacgttcctagcatctttctaaccctttctcttgactaaatacgaggcaacatccgcagtaaaccctaaaggactcctacgctaggtgcttgtatctatactcatgatactaacttgaacagtatcgc

SEQ ID NO: 40265 - DNA, 428 bp, Gossypium hirsutum
  Clone ID: LIB3149-028-Q1-K1-F12
caatgatctaaatagctgtgcacataaccattgttcacagtttgaaactgctactgcaatggccttcattagctggtttacttcattaccatcatttctcttgaacttttggtcgctggcatcccggtaaacaggtaacatggaaaaaaagaagtcgatgggagtattcagatcatttcagaatgccatccaaagcatttttttattattatcccaagtatattccttcatagctttctcagatgccttgaagatacaagaacttggttttgtgattttaaagttgtatagtttgtattctataaattggtcttgtgagaaaaatatctggggcattggacattatgaataccgccagttgcatcttttggagattgaatgattcgatcacattattgtaaaacatgtataatttttaatactagatg

SEQ ID NO: 40266 - DNA, 385 bp, Gossypium hirsutum
  unsure (1)..(385): unsure at all n locations
  Clone ID: LIB3149-028-Q1-K1-G11
caaagaaattactcttcgggttattatcagctttatttcgacacagataatgtgctttgccttgtctacaaaggtccagagttttcaagtgtttattggccaagtccatggctattgagatgggaagctggaagatccacattcaataacaccaaaatagctgttttagactctttgggtaatttcagttcaactgataatttcaccttcttgtcagctgattatggtttaaacatctcaaggatgttgaaaatggatttggatggtaatcttaggttatatagtctaagtgaagatacaaaagcttgggttgtttcatggcaagcctttcttcaccatgtaaggttcatggatgttgtggaccaaacagnatatgtatttattc

SEQ ID NO: 40267 - DNA, 423 bp, Gossypium hirsutum
  Clone ID: LIB3149-029-Q1-K1-B1
cgaaaaattcggcggtgatggaggctcgacgatggtggtgacgaaccaggtactgactgcacactgactttcggcgctgatggagggttgctggaacgatgggaactgaagtggcgtgactcttgggctgactgcgatgctgcggcgcgagggtttcccaagaaaccctaagtctcctgattcttcaagtttgggctttgttgggctactgcttattgggtttgggtgtaaacaggttttgggtagtttagctgggtcatgggtgtaacgggttattgggttagtttagtgtgtcttgggtaggactagtctactaggctttgggttaatgtggttgggcctgtaaatggactataataaaataaacatttggttttttattttttggttttgggggtatttaattatgggcccggacaaaaa

SEQ ID NO: 40268 - DNA, 198 bp, Gossypium hirsutum
  Clone ID: LIB3149-029-Q1-K1-B12
tcgcctacgcgtgcgtgattgtcaaatttattctatatgattagaatgatattttaagtatgtgataatggacaaagaaggatgaattttttgaatgtcaacaagccttgttatacatggagagataatcctatcttataggagaattttttaaatacactatctggctatataagataatgacagtatattcaaaat

SEQ ID NO: 40269 - DNA, 260 bp, Gossypium hirsutum
  Clone ID: LIB3149-029-Q1-K1-C1
aagaaaactttaccaatgaggctattttgaccaaggtagtcaatattgtttcggattatattttcagtgctattggtatgcatagataacaatatgttttggtgtactatttcgtatttaccgttgtttttattatataattactggttaaactttatatgtaatagtaaatatatcatattatgtttcatattattttttaggaaaaaaaatattaatttaataatataaaaaaattataattataattttattttttt

SEQ ID NO: 40270 - DNA, 184 bp, Gossypium hirsutum
  Clone ID: LIB3149-029-Q1-K1-C10
atggataagcgcacactaacccgacaatagtggatccaattcgggattttccttggggggctggcatcaatgcattgaaatgtaccgatactgattcgcacatgaagaaaaggaagtgcagagattcaaatgacggacgtatgggacagggataaagaaagaggaaagctcgtaaaggcgacat

SEQ ID NO: 40271 - DNA, 181 bp, Gossypium hirsutum
  Clone ID: LIB3149-029-Q1-K1-C2
gtgaaatcccagaatctggttggtgatttataaagtcatacatatatgtgtttcttcccttaaaagggcattctttttttaggtcatgttataggagggagtattcatttgtaaatctcattttccagcatctctggatgaatgcttgattttatcttcttaaaggaattcatattcattg

SEQ ID NO: 40272 - DNA, 419 bp, Gossypium hirsutum
  Clone ID: LIB3149-029-Q1-K1-C9
gagaaaactcttattttttgcatcaagacattaacaaagcttgtccatcggctttctcaagaggaacttctggctcagctaccttcatttttaccggttcttttttgcgcattcagcaatcaaagcgctgaagttcgcaagactgttgttttctgcttggtcgacatttacgtcatgctcgggaaggcgttccggccatacctgcaggatctcaatgggacccagttgcgtctggtgactctttatgccaacagaatttctcaagccagaactggaacttgtgttgaagctattaatttgccagcagtctgaatctgtgaatttaggggttcttttatgtaattctttatttaattaattttcctttttcatatatttgtctttggtgttcttgtgattttgagtttggaatagaaagg

SEQ ID NO: 40273 - DNA, 442 bp, Gossypium hirsutum
  Clone ID: LIB3149-029-Q1-K1-D12
gactaaaggaggaaaaatcaagttgactgtttattacgtggatgatgacgtagacgtcgacggtgggatgacggtaacggaatggagtgacggtggtgaagggaggtgctgcggggagtggtgggagagttgggaaagagtgttgaggtttatgaatggtgaagcagttttgtattgtttttatgattttgattgggtttatattgtaattttgttatgttatagtttggattatgtttgttgttttgttgttattttttttgattttgtttttttattttttattattttttttgtttatgtttatatttatattatttttttatttttttttttttattatttttttttttttgttatttatttttttatttttttattctttaagttatgattttatagttatgttgttttttttttgttttatttttatagtcttttt

SEQ ID NO: 40274 - DNA, 431 bp, Gossypium hirsutum
  Clone ID: LIB3149-029-Q1-K1-D6
ataataataatcccatggaaaaaagtgggaaagaggacacccagaccaagcaaaccactaaacctgtcaaacatctcatcaagaaaattattaaaaagtttcatgcttcttcagggaaagaagaaactaattccttttcaacaaagaaaaagctccaaaaggtcataaaactgttccacagaaaaatccaccctgaaaactctatagctcaaagagagtctaagatgaatactgctccttatagtgacaatgactatactggtggagacaacatgcggtttcctcagggatcaagatctaaggcaggattaggaaacaacaagaagaagaccatctctaaactgcctcaatacgggcttactggctgtactgctgcaacttgaaatggggagcactggattaaaacagatgcagactatttggtgttggag

SEQ ID NO: 40275 - DNA, 330 bp, Gossypium hirsutum
  Clone ID: LIB3149-029-Q1-K1-D7
acctgtatggtgaccattaattgtttgaatttctcttctactggaaaacccttggatgctggtccgctaccttgaacgctggagtctgtcatgctgccggctgagcccaaggccacaaccagtcctatcgatgctatgatgtgacacgcgaagaggacgatcgattatcgtacttacgtaacagacgggccgtctcttactctctatgatatgggatccggatcctgctcacgattgcttcaaccacccctggccggcataccggatgcgtctgcttgcgaactgcctgtgaggctcttccaaaacaaggcaatttgcctgagacgctat

SEQ ID NO: 40276 - DNA, 220 bp, Gossypium hirsutum
  Clone ID: LIB3149-029-Q1-K1-E2
catgtagattagaaagcagattccattaggtaaaatttgattcttttggtacaaaacctgaaacaggaaagtccttttttttttttttttctataaagttctaaagtttggttttattcataatgagaaggaattttggacccacgcatccccaccaaattgtaataaaagtaagtgtaggttagttttcctcgtaaaaaaaaagctcttcttttatttt

SEQ ID NO: 40277 - DNA, 355 bp, Gossypium hirsutum
  unsure (1)..(355): unsure at all n locations
  Clone ID: LIB3149-029-Q1-K1-F2
cttatctctctggttctgcatttcggttccgctcactctcttaggaggatacttcggtacccgagctgaacctatccaataccctgtacgaaccaaccaaatcccacgagaaatccctgcacgcaaatatccatcatggctacttgttctcggtgctggtacccttccatttggaaccctcttcatcgaactcttcttcatcctttcaagcatttggctcggcaggttttactatgtcttcggtttcttgcttatcgtccttctactcctcatcatcgnttgtgctgaagtatctgttgtcctcacttacatgcatctttgtgtcgaggattggcgatggtggtggaacgcattc

SEQ ID NO: 40278 - DNA, 150 bp, Gossypium hirsutum
  Clone ID: LIB3149-029-Q1-K1-F4
tggaatcccggccgacccacgcgccgcggaactggatgaagcttaagtgcggtattgcattcgaggaggatgacctgctgaacggggcggagaatgcacgaacgaggtgcaactgcactataccgtagtacaacatgccacagataggcc

SEQ ID NO: 40279 - DNA, 373 bp, Gossypium hirsutum
  unsure (1)..(373): unsure at all n locations
  Clone ID: LIB3149-029-Q1-K1-G1
gcttgcagcagcttggaatattcttacacctgttctgcaatggatagaccagaataatatagcaccagagctgtacgagctcggaggtagaggaccagttggctcatactatctttgggctaaacatggggtttggtgggcagatgactaaaagggaatagcctgttgttgttcgagtttgagataacaaaacaggtaatttggctcgttacgatgtaaatcatgtaaaacaagagtatgttatgtatctgttttttggttttgctgctatacgaaaatggcaactgtgtatgattggatacatgccagaaagggaacaatgctcttttgcttgtgcatggctacaacaattccacattccanattgattaac

SEQ ID NO: 40280 - DNA, 104 bp, Gossypium hirsutum
  unsure (1)..(104): unsure at all n locations
  Clone ID: LIB3149-029-Q1-K1-G10
gacccacgcgnccggaagaaggcacaaagcaggagccaacggacgccaaagaaggcaaaggaaccaggggaaaaggcgccaaagaagagcgggacacgagccag

SEQ ID NO: 40281 - DNA, 234 bp, Gossypium hirsutum
  Clone ID: LIB3149-029-Q1-K1-G6
ggttgggtcggcatgatgtcttcctccatcggaccgccttcaggcggcggtccgcagatttgttttgtgttggttcggatcaggggcggcgcgcgccggtaacggcgcgtcggcgctgtatcagtacttcatgacgacgaggcgcgtctgcgtgaattcgagcatcccgtgcttgccgtcgtcgccgccgaagcccgagcgttttcagccggcgtggaagccctggtacgggtc

SEQ ID NO: 40282 - DNA, 250 bp, Gossypium hirsutum
  Clone ID: LIB3149-029-Q1-K1-H11
accaaacgtatgaaactcatctttgagatacatgattatgagtttagcaggactgcccgcgatactaagcaaaccacctttacatcctgagagaaacacactgccgaaggcaagactgtacctggggcggaggccaatcatgctgattccgatactgcgggtgccgggactaccttcatccctaattcatcattaaatgaatgggttgctgaagaaccacctgttgctcccgacggtgctgatgcataaa

SEQ ID NO: 40283 - DNA, 208 bp, Gossypium hirsutum
  Clone ID: LIB3149-029-Q1-K1-H5
gctactcgttagtgtggttgttactgatgaagccaatgaaggagctcaactaatggagagagctgttaagaactaactggtagacaaactggaagcgatgcatgctgaggcggatcctcaaccacataggataacactgacattgaagatgacatatggcatgctccatagtgacatccataaggaaatcgccgaagtggtggcaaag

SEQ ID NO: 40284 - DNA, 287 bp, Gossypium hirsutum
  unsure (1)..(287): unsure at all n locations
  Clone ID: LIB3149-030-Q1-K1-A9
tttgcttagctagaaaagaaaagaaaagaaaaagaaaatgaaaaagatgattagagataagaaaagatggattgattggattagataggttgtggggagggagtggggggcaaagtgcatgtgcaagtgcaagtgcatgtgcaagttcaagttcaatgcttaaatgcaaatgcaaatgggtagggtgtgggtgggggtggggtgcanaagcatgtgtgggatgtcagttgcttttgaatacatgtgatactggcataactatatatattttgctttctaaacagcac

SEQ ID NO: 40285 - DNA, 359 bp, Gossypium hirsutum
  Clone ID: LIB3149-030-Q1-K1-C1
gtatacattttgtagttacattggttttttaaatgcaaataataaaatgatttttgttggtatgtttacctttactagtgaggttaggctggttgtagggattgcccaaccggtgacttggaacccttatagaatcatcctcttttcattcacccttgtctggttacagctcaagttgtcatatacacattgttagtgagatatgaagtacagccgaattagccatcgcagaccacaaatgagggtgcaaaaatattgtttttggtggttggttggcaggtttagggatggaatgcttctgagattcatattgtatgacaatgacagacaatgttaaggcttccatttatagggatgga

SEQ ID NO: 40286 - DNA, 283 bp, Gossypium hirsutum
  Clone ID: LIB3149-030-Q1-K1-C3
gccggaaaggagagcaagaattagacccgtttcatccaagaaataacaaaaaactgggggacgaaattacagcaaaccatctcagaggcttaagccaaaaactaggattaggagatcaagagttctgaaaattacagagaactttctggaggcgatgatacggcttggaggaagacccgaaaggcgggagaaaaaccagtagccatccgcttgaaaaagagaaaatcaccagaaacaggagaatcattccaaccaaaacaaatccagaagaacgatggaaggt

SEQ ID NO: 40287 - DNA, 414 bp, Gossypium hirsutum
  unsure (1)..(414): unsure at all n locations
  Clone ID: LIB3149-030-Q1-K1-D8
gaaagtcttcactccctaggatctagcagtcattccatatagaaattttattccctcttccaattctccaccacaacccacttcggaggagaccttttgctgcccagatgctcttttaggtaaaagaaggtaaattttccaattctgcacttagaaaattcgaattcgaaaaatattttgctttaagaactctggccagtaaagaatttaggtaattaaaaatacaccaaccttgtttggctaataatgcaatattgaattggctaaaaatttggaaacccaaacctccattctcttttcaaaaacaaatatttttccacgagcactagtgaatacctttttttccccttgcccttgtgccacanatacttagcaataatatcttccactttatcatataaaggttttggtaat

SEQ ID NO: 40288 - DNA, 358 bp, Gossypium hirsutum
  Clone ID: LIB3149-030-Q1-K1-E1
agcagcgtacgagtgattgaatcagtcgatgtcaatgtacatattctcatactgagtggaagaatgaacaataccttctacaatgcccaaggatatgcagttggatcttcactcgtactagatgacacaccatatctacctgcaacagtccttgagaaaggcaacgctaaatgagtctctatttagctccccactgatgacaaggttgctgacaaggctgatactgatgctaacaccacggtagtgacaccataagggatcatagactggtatatgggatcggatatcatacctgactccatcgaaacctttaacgcgacttaggacactatctagaacattatcttgaatggaccaa

SEQ ID NO: 40289 - DNA, 239 bp, Gossypium hirsutum
  Clone ID: LIB3149-030-Q1-K1-E2
agcagcgttcgagtgatggatttagtcgttgcctttgtacagagtgtcagactgagtggaggcgggatcaatgcccactgcaaggcccaaggatatgcacttggatcataacacgaacatgaacacacaccttaactatctgcaaagcccctggagaaaggaaacgctaaatgagtctctattgtgctccccaatgatgacgaggttgctgacaattctgacactaatgcgaacaccaa

SEQ ID NO: 40290 - DNA, 163 bp, Gossypium hirsutum
  Clone ID: LIB3149-030-Q1-K1-F10
gtgaaagtgacgttgaaattgcaatgttaagggaaaccattgcaaatagtttaatgaatcaatatttgtaaaaacaattttgtatcataacctaatttctagtaataatgaaacttgttatgtcttatgttactattttttattaaaaatcattcgtttagat

SEQ ID NO: 40291 - DNA, 247 bp, Gossypium hirsutum
  Clone ID: LIB3149-030-Q1-K1-F9
gggcgagcgttaccacctatactaaactgttatcaggaatcatctggggcttccccggagctcctttattaatagattcctgaacactgaaaacggcattatatgtcttcaacgttttatgcattcacctggtacatgacacccttgaaccgtcttcaaatttcaagtcagtagtttgtggcggctcacagaaagaatcactttgtttggattattataagacgactagaggcctatccggcatcat

SEQ ID NO: 40292 - DNA, 291 bp, Gossypium hirsutum
  Clone ID: LIB3149-030-Q1-K1-H1
aaaaaaataaaaaaatttttttttgtctagcatttattatgggtccttcaaataatctcggtgcgggtattgagattttagatacctttcattatcctccagatatatccatttaaaccacccctggttgcattcaagacaaaggtattttaaccctaatattaacagctacggattcatttgccttgaatttttaatggaacagtggagctcctgcccttactatattcaatgtgtttctgtcaaattgctcactccttgactgatccaaatcctgattgaccccttttg

SEQ ID NO: 40293 - DNA, 160 bp, Gossypium hirsutum
  Clone ID: LIB3149-031-Q1-K1-A2
acgcatacagttggggctcttaaagtctctggattagaaaaaaggacatgttcccgtcttcgttgcagtgggagaccaaagtataactcctccgatttatgcgtgtctccggtgggacaggttcctggcaagagggcactttagcagtgacccaatgggc

SEQ ID NO: 40294 - DNA, 251 bp, Gossypium hirsutum
  Clone ID: LIB3149-031-Q1-K1-A4
gcctgtgtgctatactcaacttgttccacttaaaagctagttaccctggtatggttttgcgtgcctgttagatggcgtcaaatagaacggcttcacttgccctcttttttcgactcagcatcctgtaattctccctggtgagtgcatcgtggttcctgtgcttcacataaccgcttacctatgcctgtgccaatgccaaacgcctctccctgccgaccttttatggcgtgggccctatagatgctcttaaa

SEQ ID NO: 40295 - DNA, 388 bp, Gossypium hirsutum
  Clone ID: LIB3149-031-Q1-K1-A9
gaatatttcaactaaggttccatcaccctaaaagagacctctgtttcctgtgccattgacgaacgaagcaaaaatgaagaaagtttgtctttttctagctattttagtgctggtgttctgcaattcaatggctacatcaatcgaaaccaacagcaccgtctttgtcatcacggactttgacgatttggagttcttgatggattcgcacttcggtcgtatccttcaaagcaatggaagcgtgagccgtatgtccctcaatgctggtcaggcagtggcaaattgtggaagaggtcggccttacgatagctgcctcccgaacccaaaccgcccggttacgccgcaaaattgtgggtcttacaaccgtgcctgcggcaggtgaaaggccgtg

SEQ ID NO: 40296 - DNA, 362 bp, Gossypium hirsutum
  Clone ID: LIB3149-031-Q1-K1-B5
ctctctctactatgctcgacttctttcacttaaatgcaagtcttcttgctcgggctttgtgagccagagagatgggttcaaaaagaacggcttcactagccctgtcgtttgcactcaacatcctgtctttttacccggtgagtgctcgtggcttctgccctttcctcaaccccaaacctttacctaatccaatgccaaaccccactccctccccatattcttctggcaagcgccctagcagatgctcttagacattgggtctctgcctgtttcgtcgcattgcttgctcaacgtctccattgttacgccctctgttcaaccatgctgctctatcattcaaggtcccgctgattttgaagctt

SEQ ID NO: 40297 - DNA, 220 bp, Gossypium hirsutum
  Clone ID: LIB3149-031-Q1-K1-B7
gcacgcgccacgcgtgacggaatgtgggtaagacggttcgtgcgtgggttctaacaaaccgccgctattgctgcggagatttaatgctacttggctgagaccctccctgccaaatgtagtttctacatctccttacatgatcattactttcactatcctcaaatatcttaagtgtgatggacgaagagagggcattgctgctgctggtaggagatttaat

SEQ ID NO: 40298 - DNA, 299 bp, Gossypium hirsutum
  Clone ID: LIB3149-031-Q1-K1-C1
cttcgatattttttttcttcacctccattgacaaacaaactgagatctctgtttatatttcgaaactgttagtaacaaagcaatggatcaagatattgatcgtgtgaagggaccttggggacccgaggaggatgagtcattgcgtaagctggttcagctccatggtccgagaaactggtcgttgatatcgaggccaatccccggccgatcggggaaatcatgcatgctgcggtggtgcaaccagttgtctcctgaagtcgcgcaccgtcctttcacggcggaggaagatgagatcatta

SEQ ID NO: 40299 - DNA, 382 bp, Gossypium hirsutum
  Clone ID: LIB3149-031-Q1-K1-C11
ggcaaagctaagttcagccaaggatggtatgaattcacagtggagaacaatttaggggaaggagatgtttgtgtcttcgagctgcttagatcgagggagttcgtgcttaaagtgactgtattccgtgtaatggacggcgcctgactaatgcaccgatctcaatacaatgccaactaagttaaaaccggctgcttgagtggaccatccgatacgcaactctttttcaggtgacatgttgactgagcctatgaaagtgaaatacaaaaaattttgtggcttgattaactttgtaaatagattgttcattgaaattgacgttgaactggatttgaaaaatggggttttaagcttgattatcatctggttgattgggttaaaattt

SEQ ID NO: 40300 - DNA, 171 bp, Gossypium hirsutum
  Clone ID: LIB3149-031-Q1-K1-C6
gacctttctacctgtacttttgactcacatcgctcttctctcactgcacatttgccatccagcaggttcgttgagacataccgagatcctctacattaatactgtgtattctcatacaagcttggcttaagcatttacttgctaccctttggtagtatgctatttttctcg

SEQ ID NO: 40301 - DNA, 193 bp, Gossypium hirsutum
  Clone ID: LIB3149-031-Q1-K1-D10
gtaaatggcgatcttagcttatggtcagcaactgcaacacaggttgggactggtcgtgtagggctcatgtagctgactgtatcggtactgtgcgttctatgcaaaggctgccaatgatcatctagagtttctggcaagctaaacgctgatgcagcagtagaccaactacatcgttgttgcgattgaatacacc

SEQ ID NO: 40302 - DNA, 217 bp, Gossypium hirsutum
  Clone ID: LIB3149-031-Q1-K1-D11
gtggctcaaatcaccatacttaccgtcatgttttactttaccgcccagctacttagatccacggctgggttgcttttcactgaaggcgtggacatggtcgtctcgacagttatacatccacggtcttggatctacagaacgagctcttcaaggactgtgttttctgatcaccatcacatttacattggtttacacagtttattcaaccactcttgac

SEQ ID NO: 40303 - DNA, 118 bp, Gossypium hirsutum
  Clone ID: LIB3149-031-Q1-K1-D12
acgctagctacaccaccatggtgagagacagttaaacatgtaccccacaaaaactgtgatccatggtaggcgctccctctctcatgagcacaaatcgtctctcgaccacttacatcaa

SEQ ID NO: 40304 - DNA, 386 bp, Gossypium hirsutum
  Clone ID: LIB3149-031-Q1-K1-D5
cggagtcgaactcgtcactgatcagaagctcaagactccagcaaagcttgaaactattcatgtaatggatcagatgaaagaacttggggtactggtcgggaaaggtggattctatggcaatgtgtttagaattacccctcctctctgtttcactaaggaagatgcagatttccttgtagatgcgatggattacaccatggagaagatgtgaagcacccgacttaaaacgtggatgaatgaagatacgatgtttattcataaagttgctttaattagtgctccctatcgtaagtgaaaaaaagaatcatcggtgcacacagattttcagattgaataagtttcaaaaaattggtagctatggttttgaaaaagctgtttgatgagtc

SEQ ID NO: 40305 - DNA, 239 bp, Gossypium hirsutum
  Clone ID: LIB3149-031-Q1-K1-D6
gtggccaaatcaccatacttactggcatgttctactggatcgcccagcttcttggatccactgctgcttgctatctagctcaaggctgtgactggtgcggcgacaagtatccatccacggtctcggagctgcagttcgagctcttcaaggagtggtgttggtgatgatcatcacatctgcatcggtttacacagtgtgttcgaccacacctgaccgattatatggatcacgccacacca

SEQ ID NO: 40306 - DNA, 363 bp, Gossypium hirsutum
  Clone ID: LIB3149-031-Q1-K1-D9
gactaatcggacgtagaatctgcctaaaccatcatttccagagtgaatattcaaatatcatctcttggatactgacatcttgttgttaacgagtaaaatgcagctgcggcattggtgttggttgtttaacagttttgtctggatttcaggttactgaagtcttgagtgtttcattgactggtattattctgcaattattgcactagattttgatatatgttttaatatgtttgcctttttaagtgcttacctctgtaaaatcttatgttatagtatttaatctacatttgactagcgggatatatgaaattgcatccttattaaatggttaaaaaaaattatacttattttaaatttaatatt

SEQ ID NO: 40307 - DNA, 346 bp, Gossypium hirsutum
  Clone ID: LIB3149-031-Q1-K1-E5
ctgagacttagccagatgactcttcagagaggatggaataacaaatcaaagcttctcgtgtgttgaattgtcatcgctgtctggtaaaaatttcaccttaaattctatcctggcaaaatggttgaggatttgttctgccagacaggtgtatgagaaacttctagaagctgctcaaccttgatgcattttggtaatatctttgtgttcagattctgtggcaaatcatataatccattgtttctcgagtcctttcacttgtatcataggtgtacactggattttttcttggatgaattgtcttaacttcagactatagtttatttttttcagaccattatatcttttt

SEQ ID NO: 40308 - DNA, 313 bp, Gossypium hirsutum
  Clone ID: LIB3149-031-Q1-K1-G10
gttttagttctaaagacaaaggtttgtatgaccggatctctgatcctgttaagaagacaagtatagcgtgtttttacgggaacagctatgctatatagtggacatgacaaaactacatggtgcatttacagacgacgttgattcggaatatgaaaatgtgaaaaagaattggaagatcaggtaatgtgagggatatgaatacggaattcaccgattatcgattgccaactcgatattcggatcaagaagcaatgggacgcgaccacttacatatttatctacagagcattgtcagtggtattcgctcgaattg

SEQ ID NO: 40309 - DNA, 391 bp, Gossypium hirsutum
  Clone ID: LIB3149-031-Q1-K1-G5
gggccacccgcatatatgcgaatgtctcggctatgagctcgagatggcgttcctatacgctgcaggcgctgcgggttataccagcataataccggagcggtggaagcctgtggcatttgatattgcagggcacagccaccagatctttcatgtgtttgttgttctcgcggcacttgctcattgtgttgctacccttgtgattatggattttcgtcgggaatctgcaacctgtgcgtattagcattctactgttaggtaaacaatgttttgatgatcagggggatttcctagttctcccagtttttggcttaataaattctatcacttccaacaacatttttcttaacaaactggcactggtgaccttcaaaaatatatttgattggccatc

SEQ ID NO: 40310 - DNA, 386 bp, Gossypium hirsutum
  unsure (1)..(386): unsure at all n locations
  Clone ID: LIB3149-031-Q1-K1-G9
cacaagtcgagatcacaagattggctaaatatggaagagatggatccagagggagttccactaaatggttaattgatttcagagggaataaacttctgacactaaactgttttagtgcttgcagcaagagccattctcttgtaaaaacaatgacagaaatatagcttttaggtctttttttgattcaggaaatatagttcagagctccttgatattgtctttttgagctttcataatttttttaccttatgttgttctggaaacaacttgcaactaaaatggctatgaaaattgaaaatccaaattgtaagaataagacaatttataattacaagttgcatctcgttccattttaccccnnnnnaaaaataaaaatatttttaaaa

SEQ ID NO: 40311 - DNA, 241 bp, Gossypium hirsutum
  Clone ID: LIB3149-032-Q1-K1-A8
gatgaaggtggagataattaacaggatcgttaacaatattgatgctactatcgcaatggggggtattttgaagaggatgggttgaccctgtgagggtatcctgttcttttattatttgggtgaggtttatcaaattatgcctatggaataaatgcagtcatgtttgtttgtcattttatcgttgttagaaatgcttgtcttgtatttatgatgctgcattagaacatgaatagtcttactt

SEQ ID NO: 40312 - DNA, 420 bp, Gossypium hirsutum
  Clone ID: LIB3149-032-Q1-K1-C1
aaacaactttccttctaaattgggttctatagaatatcaatttataaacgaaaccaaagaggtgaagttggcggagaaatagtggtggatggcaagaaccaacaaatatacctccattaatttcaaccatgtcctcgagaaaaatctgactccttcttcctcatctggttacaacaagaatccccaattcaatcaccaaacccagtcctattttgcttcttattcatacgtaggcaatgtgaaaacccatggccgtatgctcgtgctgacccgtccttcccctaagcctatttccactcctcctgtcgtttccccaacaccgcccaaacaccccctacctcaacctcgttctgttttagtcccagatcaaccaccttcgtctgatcagatttctttacgacccggttctgggacataaat

SEQ ID NO: 40313 - DNA, 316 bp, Gossypium hirsutum
  Clone ID: LIB3149-032-Q1-K1-C7
aaaagactataagaatggccactggatccgccacaggattcatcaaagcagatctcatacggagccaataaaaaatgacctttaggctgcgggcggcccttatggaggatctaaggttacaacacgaacaccgaatccataacacattctatcatgcaaaccaaatgcaatcgaccgaacccctgttgacaaccaacattactgggaaaacaatggcgcctcccacattaataaattagcattaaatgcggtttagccaacatgggaaaaaagcgaagaggccatttcgcatacactttacaaaaagtttctcatt

SEQ ID NO: 40314 - DNA, 284 bp, Gossypium hirsutum
  Clone ID: LIB3149-032-Q1-K1-D11
ttctctaaaagattttatactgctgttcttatataacagttacaaaacaaccggtcacgaagaggttgcagaaccagcgaagaggacctaattccagcaaccggtgggctaaggtccgatcgacgaggaaagacaagcttgataatcttctgctccaagagcaagctttaactgctgcaatcttgttcacgctacattaacagcaaaacgggggagctaaattgccgtttgacaggtcgactacgttgattaacccgaattaatcttactggtctaagaaagct

SEQ ID NO: 40315 - DNA, 399 bp, Gossypium hirsutum
  Clone ID: LIB3149-032-Q1-K1-D6
ggcttataatgctcgtacttttggacagacattttcaacaggatcctcaagcaaagaaaaaaattctaacaaaccaaatagtgaatggaagccatcacaaagacctgaggctgtgagtgatgaatttgggcaacgacaaaataacccaaataagcagcctcgcagatactccgagatgagctttagcaagtgatttactcatttaagatggagcctgtcgcaataaactgataaaggcctttctttcgggccctttgtggtctccagcttttgacctggaccactttgggccacaatttgttccaggatattgtaggtaatcagacttcacccctaggtagtgctgcttattctgttttggatttaaaagttcattctctttagaagaaagtcattagt

SEQ ID NO: 40316 - DNA, 374 bp, Gossypium hirsutum
  Clone ID: LIB3149-032-Q1-K1-D8
gctttccgtcgcttaatcaaccgtcttcagcaccaatccaaactcttaatttccattgacatttttcaaaattaaatttatttaattattaattttccttctgtgtgtgatttgggaggctgtttctgaagatggaaatcgaggaaaaacaagcagaggtaattgatcatttcgtgaagcaagtatcagctcagaagggctcggctcttggctccgttttcgttgaagcgacgtcgcatccttcacttttcgccttctctgagattcttgctgtgcccactgtcgctgagctagaaggaactgacaactcggtgcaccttgagatgcttcgattgtttgcacatggaacatggagcgattataagagaaatagc

SEQ ID NO: 40317 - DNA, 304 bp, Gossypium hirsutum
  Clone ID: LIB3149-032-Q1-K1-F11
aaaaaaaaaaaaaaaaaataaaaaaaaaaaaataaaaaaagaaaaaaaaaaaaaaaaaaaaaaaaaaaaaaaaaaaaaaaataaaaaaaaaaaaaaaataataaaaaaaaaaaaaaaaaaaaataaaatggggggggtttttttaaggtgttcgcaatgtttataaacccctgggcgttgcgcaaattataattttttttttagggcatcctaatttcatttgctgggccgatttttaaaaaggccggaccgggaaaaattctggggtttcccaaattattagtgttgaaggaaatcccctttt

SEQ ID NO: 40318 - DNA, 361 bp, Gossypium hirsutum
  Clone ID: LIB3149-032-Q1-K1-F12
catcgacaagctatttgcacttcccgtgggttatgacttggtaggaatattggattcgatctttcaaatagccatcttgaggacttttaggagctacttaatgacatcctgttttagttgcatgaattcaaatcgtcatatttgagagttttttgcaggtgtggaggaattgtatggatgactacacaactccagtgtctatttggtatccaagagctcctgaaggattcatcagtctcggttgtgttgctgtaccaggttttgaggagccagaacccgatttagtacaatgtgtggccgaagtaatattggaagaaactacatttgaagagcaaaaaatatggtctgcaccagaatcata

SEQ ID NO: 40319 - DNA, 412 bp, Gossypium hirsutum
  Clone ID: LIB3149-032-Q1-K1-F3
ggcaggttacaggtacaactaggagtgaacatgcccgcacaagctaaccaaaagctttcccgggatgaagcagattcagctgaagttgaacttttcgaggtttatgatgtggttatctatatgggaattattgacattttacaggaatacaatgcaaagaaaaaggccgagcatgcatgcaaatcggtgaaatttgatcccttgtcaatatctgttgttgaacctgaactttatgctcaacgtttcatcaatttcttaaagcagaaagttttcccggaacaaccatgaaaaaaaaacagatatatctatctgtttctaccattgcttctatattttggctcactttgacaaaatcgataagccaataactatctgtacctactgtattgttgcaagtgatattgagatatct

SEQ ID NO: 40320 - DNA, 414 bp, Gossypium hirsutum
  Clone ID: LIB3149-032-Q1-K1-F4
gccgaataggaataattcatgggaacgtagctatgttcagcataatgcaggttgtgatggaaattcatggggtcggaaagcagggggtaatcatgatgttggatcaagaaagttggactacaaaagtagcagcagcgggggagcatggcattctggttcccggaagagggaaggttctcaccattatacacctggctacaaaagctccaggtttcaacaggatgataatcaagtaaatcattactggaggaacacaaaatctaacaagagggttagctttgtgcgcgagtagccgattttgctggctaattttttttttttttgtttgaagattctgcatccatcaagccatgaacatcttttacttcacttattgtctcataagtaggggatggtggtttctttttgtgcaat

SEQ ID NO: 40321 - DNA, 367 bp, Gossypium hirsutum
  Clone ID: LIB3149-032-Q1-K1-H11
gacgctgctcgggtggtcccgccgatgccgacgacgaacgggcggcggtgttgatcgaatgcagtcaaggggcgctcctcgggatggcttgcccggctaagcacaggcttaaaacgccatggtaacgagcgcgccgccactctgaaaacgacttttcgttctatcgatatgccgtgcggcgggggcaatcgtgtgcgcagccccgcagatcgatagcagaaatgcttggttggggcggtgtgcgacggtcgataagatgggctcgtctcctccatgatgtctctactgacatgggttggccccgccgcgcggatgcaagcggggctttttttcgtcctggtcaagaaacggggcgcgacacccggag

SEQ ID NO: 40322 - DNA, 170 bp, Gossypium hirsutum
  Clone ID: LIB3149-032-Q1-K1-H12
tatttgcaccttccccacacagggggttccatgggggcccggtgggctctttgagagaaaagggccttactttgggtgggccgatgggtgcctatcttttcgaggtcggcgcctttttattatttctttgagaaaacaatcagataattctgtggatcttttggaatttt

SEQ ID NO: 40323 - DNA, 269 bp, Gossypium hirsutum
  unsure (1)..(269): unsure at all n locations
  Clone ID: LIB3149-032-Q1-K1-H3
gttcaattgataaacgatattcttaaatttcagtcancggaaaaaaaaaaaaaaaaaaaaaaaaaaaaaaaaaaaaaaaaaaaaaaaaaaaaaaaaaaaaaaaaaaaaaaaaaaaaaaaaaaaaaaaaaaaaaaaaaaaaaaaaaaacgggcggccaaatataaggatcttgttttgggtgggcgtttatgaaaggccaaggtttttatttagggacctctaaaataaaattatttgtcggttttttaaaactgttgggatttggaaaa

SEQ ID NO: 40324 - DNA, 250 bp, Gossypium hirsutum
  Clone ID: LIB3149-032-Q1-K1-H8
aaactaatagattaatcatacataacggattatttacaactatcaaaagagacaaaaacttgggaggacatacatatctaataaagaaaaaaaaaaagggcaagacggtctaaaggataaaatctttaagggcgggcgcattcaaaggcctaactcttctttaggggcacctaaatgtaattcactgtccttacgttgtacaaaatcgaaacttggctggaccctgtttttaacctacttaatgggcaaa

SEQ ID NO: 40325 - DNA, 163 bp, Gossypium hirsutum
  Clone ID: LIB3149-033-Q1-K1-A11
accccgtggctcaagaaccctaggggaggcttattatattacgtcaaggtgattggaattagggttggaagatggattgtggatatcctaccaagggccattgctttaaatcctttcactgttgctggccccattattgattctggtcctggtttcacccggc

SEQ ID NO: 40326 - DNA, 333 bp, Gossypium hirsutum
  Clone ID: LIB3149-033-Q1-K1-C7
gttatttattactttctggcctttccctttttgacagcatgaaactggatccttatttgtattatatatatatatgtgcgtgtatgcaaataagatgtgtattttccctttcaagttttgggtgggaaaaaaaatgatattttcaacttatataaaaaaaagaaaattcttagaaacgaaaaagacaatcacaatttacgaacagctgcaagattaacttgctatgaaatatggattgagttcaatcagaaaggatagttgaagcataattttcgaagcaacgcaaacgggggggagcggggaataagggaccccaagtggattatcgagatt

SEQ ID NO: 40327 - DNA, 388 bp, Gossypium hirsutum
  Clone ID: LIB3149-033-Q1-K1-C8
aaatgaaagtgtggagatagcggtattcttgtcataaagtcaccacttcatgcattggggggaagctttgataaaagatgctaaactagtagtttcaactgaaagcatcaaatatggtctgaacattttgcaaggcattcaaagcgaaagcaaaagcttgaagaaatcacttaaggatgtggtcactgagaatgaattcgaaaagaaacttcttgcggatgttattcccccaagtgatattggggttagctttgatgatattggagcccttgagaatgtcaaatacaccttaaaggaattggtgatgcttccccttcaaaggcctgaattgttttgcaagggacagttgacaaagtcttgcaaaggaatattgatatttgggccttct

SEQ ID NO: 40328 - DNA, 306 bp, Gossypium hirsutum
  Clone ID: LIB3149-033-Q1-K1-D7
ccgagggaaaaaaggaaggggaaaagggaggtggttgctaaaatgcaccgggggcaattcctatcatgcacactgtagtggaggtaagtctaggttacgctgaaaaaatgatgaaaccttttgtattaattattagtcgtaatgaaaaatctttttggtttttctatttaggcagtttttctttcattggtgggatttgacggtggtaaaaaatttgaccactggagaaaaagaaaaaggataattgtatatttggctctaacctctaatttctatacttcatttacagggtttttttttattatt

SEQ ID NO: 40329 - DNA, 270 bp, Gossypium hirsutum
  Clone ID: LIB3149-033-Q1-K1-E12
cccagccgcctgcctgcggcgtgctacctcatatatagtgtatcctgaaaccaatatacaggccactggccgacaacgtacagactgggaaaaccgagaaccctcccaactcactactcaatcagcacataccacattcgccagttggcagctgacctaataggcacgaagcgatcacccatcgcaacagctaaccagtctgcatggtgaatgggaaacgccacgcaccctgtcattaagcactaagcgcgtggggtgtactcgcaacgc

SEQ ID NO: 40330 - DNA, 282 bp, Gossypium hirsutum
  Clone ID: LIB3149-033-Q1-K1-E5
gaaacaagatgccagacgttactacagcctgatatgcgatcaccacctgcgcagaacgcgtggatgatgaacaataaactctgacttatggtgccataacacgggaacatgaaacggacttgaaggaggccgaagatgataacaaacacgttcgatcaaacaggagctataagaacatgaattagactaatgtgatgatgtgatctagacaaaatcaacacagtgtgcacaagtgatgactcctaagagacgtcatacaatgagagaaaaggggggattgaa

SEQ ID NO: 40331 - DNA, 381 bp, Gossypium hirsutum
  Clone ID: LIB3149-033-Q1-K1-E6
ggctgttcgggctaggggtttatgaatttgggttgaaattgtatttgggctggtataagctctttatctgggcctaaaaatttgtaaaaggacattggtatgtagattttttttatttgtgtgttttttttttattttttatttatttttgatttttaatttctattttttaatgggcccaggtgaatgggcctattaaaaaatagaaattaaaaaaaaaaaaaaaaaaaaaaaaaaaaaaaaaaaaaaaaaaaaaaaaaaaaaaataaaaaaaaaaaataaaaaaaaaaaaaaaaataaaaaaaaaaaaaaaaaaaaaggggggccctttttaaaggatcaaatttatattccccgtgtttgcaaagattaatttttttt

SEQ ID NO: 40332 - DNA, 158 bp, Gossypium hirsutum
  Clone ID: LIB3149-033-Q1-K1-E7
atcatttgctatgcaattccaataaaatatcacacgatattatgttcttccattcttgtagataaatccgatcgaattttgaattattgatttttccaaattataactcaccctacgtcattgtattaaatgtaaaataatactgctgatcttcatgt

SEQ ID NO: 40333 - DNA, 201 bp, Gossypium hirsutum
  Clone ID: LIB3149-033-Q1-K1-G12
catcttgtgaggaaagcgggggctttatttacccatatcaaacacataacactggtgttttttacaatcacattaatgaactcaaaatacttatagctgattgccatttcctatctatggaatcacttaaccacattcaaaatctttttgtttatatcctgctcatcagaacatatttaaattaggcattaatatattaaa

SEQ ID NO: 40334 - DNA, 385 bp, Gossypium hirsutum
  Clone ID: LIB3149-033-Q1-K1-G8
gggattaccattcttttattttggctgctttcatttatgagcctttgggttttgggactactggtgggtaacatatgcaaatgaaaggaggtgccggttttcttgctcatgttcgcgccaaaacctcttgtggagatggggtcataaaccggggaccgttggcttggggtctttgcttcaagagagaaatgagtcctagccaggattactgtgatgattactacaaatacatgtattcatgtgcccctggagctcaatactacggccgcggtgctttgccaatttactggaactacaactatggagctgctggcgaaggtataaaaagtgatttgttgcaccacccctgatttttttgagcataaccccactattgtctttcaag

SEQ ID NO: 40335 - DNA, 308 bp, Gossypium hirsutum
  Clone ID: LIB3149-033-Q1-K1-H12
cccacccgtccgaaacccgggtaccttttggcttcattaccaaccccaaacctcctgttaccagttaccaaaaggttgaaatattaggggttggttaggggatggaacctttgttggggccactgtagcctacctttttaatggcaaacctgttgtatttttttatttaaaaatcaaagggctgaaaaggccctgaaaaaaccaaaagggttattgtcctttaaggagaaattaaatattgtgttttaaggaaaagggttttgaaaccctttaattattattattaggatgtattttttaatgccttg

SEQ ID NO: 40336 - DNA, 425 bp, Gossypium hirsutum
  Clone ID: LIB3149-033-Q1-K1-H9
gtccaactgcaatggatgtagatggttataatcctggtcttcaggattttcaggcagtgctaactacatttacacgatacaggtacataacttctccactggttttgcctttgctaaaagtaatattttctttcttcaggaaattttgtctatctaactccaactgttctttccttctatgtaacatttgtaattgttgttcacattagtcggttgagggtcattgctgaacttaggcatggtgatattttccactctgctaacattgtctcaagtatagaatttgatcgtgatgatgagatgtttgctattgctggagtgtcaaggcgcatcaaggtttttgagttttctgcgattgtgaatgaaccagcagatgtgcattgtcctattgttgaaatgtccaccagatctaagcttaattgctt

SEQ ID NO: 40337 - DNA, 320 bp, Gossypium hirsutum
  unsure (1)..(320): unsure at all n locations
  Clone ID: LIB3149-034-Q1-K1-A2
ctctattttacttttaatcaaaaagatgaaaatatcatttttgttatgctttaatgctagcccagggcattgttttttatggcatgcttgtaggttctttctcatttccccttttgttttatgtagcaactacagtaagctctcgttctgtaaactaatgtcatgggaaataaaggaaaattgaactaacttatgcttaagaacttgcttttagcgatatggaatatatatttttttttgaggttnagaaaaaaaaaaagaaaaaaataagaaaagaacagaaaaaaatatgaaaaaaaaataaattaaaattataaaaa

SEQ ID NO: 40338 - DNA, 244 bp, Gossypium hirsutum
  Clone ID: LIB3149-034-Q1-K1-A5
gaaatgctcatagttatgaaatcgttggacaaaaattctgctctggttcggatcatcggaagaacagcactaagcggcatatgctttgtcccttgtcccgattgtttttgctgtataaaggtccatctttacgaagtatactataattcgtctgttcaggtactctgtcttttgttgcagtattgcatgtggattgtataacttgttttggttattaggtattagcttgctaaaaattcttaat

SEQ ID NO: 40339 - DNA, 441 bp, Gossypium hirsutum
  Clone ID: LIB3149-034-Q1-K1-A8
cagataatgaaactgaaaaggggatttatatttcacttcaatgaagtgagcgaagactttgacctaaaaaaaaaaaaaaaaaaaaaaaaaaaaaaaaaaaaaaaaaaaaaaaaaaaaaaaaaaaaaaaaaaaaaaaaaaaaaaaaaaaaaaaaaaaaaaaaaaaagggggggagattgtgaaagaagaaaaaggaagagtaaggggagaaggaaaaaaaaagaaaaaaaaaaagggggggggaataagaagggaaaaagggcgaagtaagagcggggggaggagaataagaaaaaaatttaaggggtgccagcaaaaaaaaaaaaatagagggagggggtgttttaaaaaaaaggaatggggtgggaaaaaaaaaataatgggagacaaaatagtaaaaggttttggtgaaaaaatgagacaatatgaaaaagggggggag

SEQ ID NO: 40340 - DNA, 227 bp, Gossypium hirsutum
  Clone ID: LIB3149-034-Q1-K1-B6
tccgatcgggggaggttaccgagacaagctttttccggtttgtttgctctaaactcacattccccagggtggggttcgaagctgctgagatttggtttttgggttttgggctccatatatatggctggcgaatgcaggcgtctaaagaaaactttagtgctgaaacttgttatccgattgtgggaattgttttgcggtgctttaaattatatggatacaccacttgt

SEQ ID NO: 40341 - DNA, 358 bp, Gossypium hirsutum
  Clone ID: LIB3149-034-Q1-K1-B8
cgagaatggcggcagttagcctgatgttttataagtttgagatctgtcctctgtattttgtgggtctaaatttttagaagaggggaggcacagctaggcacagcctacaggtgacacctgtattatggaggtgatggatgcattgggaggaagaatccttatgcccattgctgtgccatctttctgaggcgaaggttttgcaattgcgttttggctgagactctactctgatttgatcagtctgtgattttcttttaaaagaagacaaaaaaaaagagtttacaatgaatggtagggaaagtctaaatgtttacgtaaaaaaagagcttgaaaaattagcacatgctggctttttttt

SEQ ID NO: 40342 - DNA, 354 bp, Gossypium hirsutum
  Clone ID: LIB3149-034-Q1-K1-C12
cccaaacccaacgctgaagatgaatctgcaacagaccgtgaagagtcagatgttagtggttctgatggagatgacacgtcttggattacatggatttgcaacctacatggaaatgaattctttcgtgaagctgatgatgactacattcaacatgattttaacactttgtgggctaagcagacaagttacttattatgattacgcacttgatttgattttggatgtcgaatcatcccatggtaagctgacagatagtttttcctgatgataagtcgaaaggatgtgcgaaattttgtaccatcttcttcttagtggagccgtatgatccattctgcttttagtttttggagactt

SEQ ID NO: 40343 - DNA, 384 bp, Gossypium hirsutum
  Clone ID: LIB3149-034-Q1-K1-D1
atggacggcatgaatccgaatgcagaatcagcatcaagttcagcaacttacgaggatgcaacaaagggagctgatctccatccgtacgataacgattcttttgcttacagtggagccttccctcactcagctgccaagatagagccccattaaatgtgggtttcttttaccatgttttgttagcaatgaacttagtaacagtgagagctgcttctgttttttttcccttccactgaatggtgacttacaaactcaatcatgtgggatcttattcttatttgttggatattattatgatgtaacttttattagaaagaattctttttatgtaaataggtaatgcgactgttgattcaattgctttagcatataattattatatcc

SEQ ID NO: 40344 - DNA, 241 bp, Gossypium hirsutum
  unsure (1)..(241): unsure at all n locations
  Clone ID: LIB3149-034-Q1-K1-D4
ctcaacaactgcagcaaccgtgagtttctcaagcccctcttcctatcttttaaaaggttgcagatagtgccttttattattattttttgactaaaaatccctcatgtttgtagtttatatcgtatatgtatgccttttttttttcaaatttcttcaatttgttgtggaaagggaacggaatcaattaattaaattgataaaagagtgtatgaagtgcacaanaaaaaaaataaatattaat

SEQ ID NO: 40345 - DNA, 232 bp, Gossypium hirsutum
  Clone ID: LIB3149-034-Q1-K1-E10
cgcaaaaaaaaaaaaaaaaaaaaaaaaaaattaaaaaaaaaataaaaaaaaaaaatcgaactagtataattacaatataaataacacatatctaacaacaataaaaatggttctttgggggggccgctatggaggtccctgtcctacgtccttacaccggtatttctttgataatccttatcgggtccacttattataatatttggccatagtttcccatcgttatatctgg

SEQ ID NO: 40346 - DNA, 418 bp, Gossypium hirsutum
  Clone ID: LIB3149-034-Q1-K1-E4
gtggcttcaatatctctctcatttctcactctggattatctctttaccaccatcctttgcttcaaatccattgcttattggtccaaatttccatctcttcactgctctcaaaccaaaattcaaaaaagaagaaaaaaaaacgtaacgtcttctcgaattcgaaacccgaatgagacaatcctcgaatctatttcttttctatcagctcctccatccggcaattacctctctctccttttctctttctgtttttttttctttttgatgtgtttgatcattgagttattgtttaatgcttagttcgatttcaatgagattactctgctattgtagaaatggcttctgcttctttcttatccggtgagtttcactttaaaaatatatatatatttttattaaatttctaagctctccgatt

SEQ ID NO: 40347 - DNA, 192 bp, Gossypium hirsutum
  Clone ID: LIB3149-034-Q1-K1-E5
acccacgcgtccggttctatgttagagttaaattgccatctaatatttgcttagtccacacgaaaatcttccttagcaaatggctggcaattggcatccttgttaggcgtcatggattttgactgctgattgtaaccatgtggcagaaatcctggaatgatactggccttggttttgatgtgaacttttgct

SEQ ID NO: 40348 - DNA, 232 bp, Gossypium hirsutum
  Clone ID: LIB3149-034-Q1-K1-E6
tcatccctataatggggatggtttgaggaggtgtgggacgccaactcctacaacacattgtttcctgcagatcactttacgcctagcaaggatttcatttactagttgtgggagtatctgatattaaatcactaatcattgcatcatatgtttaacaaaaagagttggatgattacatttcagctgaagtttgtatggtaaaatcatatggttcttcattgtccaaaattac

SEQ ID NO: 40349 - DNA, 278 bp, Gossypium hirsutum
  Clone ID: LIB3149-034-Q1-K1-E7
atcatcatccctctcgcctcagccgctcctagcgctgttgaggccttcacgatggctagggcatacgatgaggaaaggggggatggtgtctctaccctggttgtgggtagggctaacactttttacgctgctaacgctaccgtgtttgcctctgatggtaatgttgctttcgacggtggccattctcgaacaaccattctcgcactattttccctagccacaccaaaaggcaatttgactgacgagcgacttaatgcatctaacatcagcgaacacac

SEQ ID NO: 40350 - DNA, 351 bp, Gossypium hirsutum
  Clone ID: LIB3149-034-Q1-K1-F3
gttcaagttaataaatgttaagctggtaataggtttttgtaaatgtaaccccgaaatagctcttatttcttccttatgctagtgaaatttctagtttattttctagagtgtgtgtttttaattttagtagttgcttcattaacagggttatgatatcagtttccttatcacgaactaccactgtgaagagctgcagaaacagaagctcattgattttattgtgcaattcatggaggtaagaacattcttaaccgtatctgtttatctttgtcttctaattatatatagtggatccctatttaatcttaagtaatcaactataaaaaatattgataaacccatgatttcttt

SEQ ID NO: 40351 - DNA, 156 bp, Gossypium hirsutum
  Clone ID: LIB3149-034-Q1-K1-F4
ctccattttattttcccattgaggccgaacctaaacctgtgctcgagagatagctgtccatacactgataagggatgtatggattatcgagaagagaggagccgtggtggtcccccccggaccgcccagatcccacgagtgaatagaaagtcgcga

SEQ ID NO: 40352 - DNA, 427 bp, Gossypium hirsutum
  unsure (1)..(427): unsure at all n locations
  Clone ID: LIB3149-034-Q1-K1-G11
atcataatggcactagccaaggaccctatttgctcacttcaaacctcagctttcaataatggaaactttgatgaaggtggtgatgatcacttgaaaaagcttggcggtggtgtcaacaactttccgatgactagctcttcctcattttcctctccgcgtagtattgattccgacagtttcgtattccggccaccgcatgaggaagttcattcattgataaacttcaaaggcagttcaatgtacgacaacttcattcatcaatatcatcatgggactaattatggatctcttcttagctttgaacaaaacgagaaggctccacgaagcggtacttacttaaaaagagcaagtcacaaagataattattctatgntggatcctcgcttggtggaagattttagttgctttgaaacagctagcaatttta

SEQ ID NO: 40353 - DNA, 369 bp, Gossypium hirsutum
  unsure (1)..(369): unsure at all n locations
  Clone ID: LIB3149-034-Q1-K1-G12
cccacgcgtccgcccacgcgtccgctttcggcaatatattctttgtttcttgttaaggaccttagtgcttggaaactaagacctaatatagggcttgtcgctattctatactcggtaagcacactatagttacaatggatcatttaaaagaattgaagtcgcacacaaatgacaacatggtgctattgattcaggcaatagtggcaacaaccttccggatcagcttgtgttcatggtgcctatggaaagtaggacctctatacgtttccatgttcaaacccttggccattatctttgcagncgntatgggtatcgtcttcttaggagatgatctttctcttggaaagtatttgagcttttaagcataac

SEQ ID NO: 40354 - DNA, 431 bp, Gossypium hirsutum
  Clone ID: LIB3149-034-Q1-K1-G2
gttcgatcatcagcagagggtactgttgaagagaaccgacacggaggaggcggcgacacccagagtgtggaaagtgaagctagtgataagtccggacaagttggcggagatcatggcgcaggaggctcgaacggaggcgttgatagagagtgtgagggcggtggctaagtgtggggatggggtgtcatcgtcgtcggtggctaagtctgatcagtggtgtgtgtcttgtggtgggaaaggatcgttgagaaatcatgctcaagatagatcgtgacctcgttattactgtacaaattaaagggataatatttttatgtttaattaaatttggggtatttattttatgtgtaattatgtaattttcaaaaattatataaggggattaattgtcaagttagcccttggaagttaatcaaatttgcaatatttta

SEQ ID NO: 40355 - DNA, 433 bp, Gossypium hirsutum
  Clone ID: LIB3149-034-Q1-K1-G6
agcaatattgacctgactccaattgaatttccgagtttgcagcaggctatacaaaataaacttccagacaaaagtgatcatagcaactcagaacctgaagcatcaagcgtagaatcaactgttactgttggcaattgtgagaatagtcagaagtctcatgtggatgaaccttgtccaatgatttcctttgaagaatcagaaaccgctccggttcatataaatgttaccagacagccatctcctcctcctgtacttgcagaagtacaggatttggttcatacaatatctcctcaggtgaaggagacagattgtagaatagataacccctcaacggaagctcttgttccttctgaatctcctctacagttgcacatttcaacaacaatgatggaaagcttcatgaagctggctaaatcaaatacaaatagggaat

SEQ ID NO: 40356 - DNA, 346 bp, Gossypium hirsutum
  Clone ID: LIB3149-034-Q1-K1-G7
ggggttcatgtaacatcaacacctttagatctctcttactctcagctcactgttgccaccggaacgatgcggaaattttaccaatcaagaaagagccaaagggcattaactgtagtgatgttaggtagtcaaattccattgtatggaggaggggctagcttgggtagcctgaacggtgaaccgactcagccggtgccattgacactaaacttcattgttcgttccagggcttatgttttaggtaagttggtgaagcccaagttctacaagaagattgaatgttcagtcaccatgaacccaatgaagatgagttgggctatttcactgaaaaacaagtgcatttaca

SEQ ID NO: 40357 - DNA, 284 bp, Gossypium hirsutum
  Clone ID: LIB3149-034-Q1-K1-H11
gaaataggtaatgacaactgaacaagctttacttgaaactaggccctcaaagggagtgaaatttagtttcaagggccttttcattaggaaggagatgtcaaacctctgcactgccatctaaggatgcaatgaagaactcatagtcatatttccttctagtttgcaacttttcatgttggagtgaaacaatgaactttgagaaagccagtgatttgatttttgttccaaaaaaaaaaaaaaaaaaaaaaaaaaaaaaaaaaagatattataataaaaaataaaaa

SEQ ID NO: 40358 - DNA, 310 bp, Gossypium hirsutum
  Clone ID: LIB3149-034-Q1-K1-H2
ctaatgcctcggatactgttttgggaatggagatagaatttaggctagtaagaaaggctttgtggttatgggacaaatttttgtaagacaaaaataagtacaagggatgttttgtacaggctctaatcccttttctaatagcaatgggaaattcatctaaatttttagtagtttcagtagtaggttcagcaattgcctcaggttgtataggaggagaagatgattgatcttgcaccggtgccttcttccttgagtaaaccagtaaaggacgagtagtgtcctgaatccctctttgtgatttgggtgtatt

SEQ ID NO: 40359 - DNA, 382 bp, Gossypium hirsutum
  Clone ID: LIB3149-034-Q1-K1-H6
gacccctcctgtgcaggtaaaattctgctacagcccttgcgttgagtcctaacctgttcaatcgtgagggcttcaaagcggattttgaaagaactcatggatttgcacaaagatccaaccacttatctcgtagctggtccaatatctaacgacatgtttcattggcaacgcaacaatcatgggaccctcagatagcccttatgctggcggtgtgcttttagttactatccatttgcctccagattatccttacaagcctcctaaggttgcattgatgaccaaggtcttccatcccaacatcaacagcaatggaagcatttgtcttgatattctcaaagaacaatggagcccctgcacttaaccattttccaaggttctgctc

SEQ ID NO: 40360 - DNA, 412 bp, Gossypium hirsutum
  Clone ID: LIB3149-035-Q1-K1-B10
gaaaaagctgctgaaaatgtttacatcaagaaaactgagaaagagaaattggagaaacttgcacgcaagggaccgaaaccagaggagaaaccagctgttggttcagggggttctgtgactgatgctaagcctagtagctctacatcaacatcaagagcttcatcgaccgagaaagtatcgaccgataagtatcaaaactatgcagtttttactggtgttgtaacctttgcaagtgctttgggatggtatatgatatctgcagataagaagaaagaagcccaggactgaggttaacacgaaaccgatcggattttagaaccaaaacatggcacggatagttgaaaataaaccaaacttttttgagaccagttggttatgttccttccatggcataaatagtacaatttcatgc

SEQ ID NO: 40361 - DNA, 425 bp, Gossypium hirsutum
  Clone ID: LIB3149-035-Q1-K1-B5
gagagtctgaggctcccaattccataggggttcattctaaagatccatcaaatcctgaacacatggttaagatagctgtttccaataacaccagtggaagcttatttagtaaaactgcaacaagctctaggagtagtcatagcagtgcaacacaaaagtctcatgtaactgaggctggaaacttgatgatttctgttcaagtacttcggaaagggaccaacgattttgctgaagaaaacgagcttggccgtggtgggtttgggactgtttacaagggtgtactaggcgatggaacggaactagcagttaagaggatggaggcctgggtcataagcaataaagcgttggatgaatttcagtccgaaatcgcttgtctatctaaggtccggcatcggcatctggtttctcttttgggttatttcatt

SEQ ID NO: 40362 - DNA, 281 bp, Gossypium hirsutum
  Clone ID: LIB3149-035-Q1-K1-B9
tggtaaacgatcaagttcctggcttctgattacgtatcttgatgaagatcttcggatatctaaaggagatggtggtctttttgtgcttgctagacaggggagtcctcttctggagcagtatccatacagtatctatgaaggggatgtaccatatatattgttgttgtcgacctttccactgatagccaattgtaatttttgctgttgtataattttttttgttaatgtttatgtttcttttatttattttattttttgaccctttataaaattttttattt

SEQ ID NO: 40363 - DNA, 128 bp, Gossypium hirsutum
  Clone ID: LIB3149-035-Q1-K1-D3
cggatttcccggttcgcccaacccgtccggtttggtggtatggaaaaatctggttaatttttgggaccataaccatcttaggtaatgaaggttccccgttttaaaaataatatcagcttctctatatt

SEQ ID NO: 40364 - DNA, 285 bp, Gossypium hirsutum
  Clone ID: LIB3149-035-Q1-K1-E3
agtggatacctactccaatctctataccatcataaccgttgatcaacctgcactcggactggaagcaatctttagcattagagtccctgatcagaagtttggcaaggatgaactccattatttgcattaatacgcatggataatctcaagcataggattaactgcaaatcctataattaacctttcaggtgattgtaactaatgtacttgcactgggaactgatctcttgtttgacacataaactgggaatttctcaaaatatcaatgcctggttgagctttttc

SEQ ID NO: 40365 - DNA, 278 bp, Gossypium hirsutum
  Clone ID: LIB3149-035-Q1-K1-E8
atttcgagccgcgatcgatacgatattctccaaccaattttggctgaaaaaatgttttgtaaaggtaaccacccaaaaaggaggaaaggtggtgggtttggtccaaaaaacctgttggataatgaccatgtattgacgtattggtcaccgaaagaaaataaaaaccagcattggatcgaaataaaagtacccaatggcgaagaaagaatgaaattcaatgtggtgaggattcaagaaccaattggacttggacaaaagatcattaagcatgaaatata

SEQ ID NO: 40366 - DNA, 412 bp, Gossypium hirsutum
  Clone ID: LIB3149-035-Q1-K1-F12
ggatcattggccgcacaaacacagcagccattaagatggcataaggcttattttgatgcacccgagggtgacgagccgttggctttggacatggaaagtatgggaaaaggtcaaatatggattaacgggcagagcatcggtagatattggaccgcatatgctcatggtgattgcagtggctgtagttattctggaacgtttcgaccaacgaaatgtcagctcggttgtggccaaccgacccaaaaatggtaccatgttcctcggtcttggttgaaaccgacacaaaatctattagttctatttgaggagctcggaggagatcccttgaaaatctcacttgtaaaaagatccatgtccactgtttgtgctgagatgtcggagtaccacccaaatatcaagaactggcaaatcg

SEQ ID NO: 40367 - DNA, 433 bp, Gossypium hirsutum
  Clone ID: LIB3149-035-Q1-K1-F6
agaaaataaaaaaatatataaaaaaagtctacacaatagtcaattataaatgattagagaagaatgtttttttatatgaaatctttgcttataatatttatgaaaaaaagatttcatataaaaaaataaaataagtcgacattgttttgaatatcacttatccgaatatgattgtaaaataaataacaaaacttgtaattatataaaaaaataattaaaatcaaacaaattagtaatcaaatttgaaaaaaataacttgattttagaatttcctccttgtcattatataaaaaaaaataactgggaaaaatgagattttaagcatcaattaaaaggtatatatttgccctctttactgtttacaaattaatgcgacatgattatgtgaaatgactaagattactctcaacctccatttatactctacttctct

SEQ ID NO: 40368 - DNA, 178 bp, Gossypium hirsutum
  Clone ID: LIB3149-035-Q1-K1-G12
atgaatttccatttccatgatatctgggagaataactggaaggtgtcccaataccaccagggctgaatctagccgttgtgtttacttccaagtttatgtattttcatctctgtttgtgataataaaattgtaccttcgtccaaaaaaaaaaaaataatttttaataattttattattt

SEQ ID NO: 40369 - DNA, 135 bp, Gossypium hirsutum
  Clone ID: LIB3149-035-Q1-K1-G4
ctttagatgtggcaataactttctcaacctggattttgtttgtatcacgggaattatgactacaggtacaacctatgtttcatgatattctcatacctataagcacacgttatgcatttgtgcgaatttgcatgc

SEQ ID NO: 40370 - DNA, 244 bp, Gossypium hirsutum
  Clone ID: LIB3149-035-Q1-K1-G9
attctggtgcctgatgttgattacaagatcataagcggtgaccaccctactatgactgcaccgcttttgcaaatgtacgctcttacaaaacctccatcagagatcaaatgtaatatgatgtggaaggtgatacctaccctttcttttacgctaactacatgtgccttaatgaggcctgtgatatcaatattcttaaagtggatcttcttggtgacaatggaaattacacggatgctgtcattga

SEQ ID NO: 40371 - DNA, 391 bp, Gossypium hirsutum
  Clone ID: LIB3149-035-Q1-K1-H2
gttcaaaaaaattctggcaaaccggcattcagctcaaagatcaagagtgagaaagctgcaatatatttcatagcttgaaagaagcgttacaacattacagactgaagtatcaacattatcaccaagagttgcatttctggatcattaaagagtggttcttactgttgaaaatagtgctttaaagcaaaggattgcagctctggctcaagacaagatttttaaagatgctcaccaagaaacattgaagaaggaaattgagagacttacacaagtttatcaacaacaacaaagccttaagaatatgaacgacaaccattctttaccaccaccgcaacagcagcaaccattgttggcaccgccaccgaacgaaggacaacttattagttgattt

SEQ ID NO: 40372 - DNA, 380 bp, Gossypium hirsutum
  Clone ID: LIB3149-035-Q1-K1-H8
attctttcttcttccagagctgggacaagataaagcctacattagtgagacagtgttcatgtttgtctttctatcatttttcttgtggactttccatccttttgttgtcaaggtcaaaaagttctatacggttcaaatttggtgcagggtgctagcatatttagttgtttctcagactctccgaattttcactttctattctactcagcttcctggtccaaattaccattgccgaccggtatatttgttctctgggggttaatgtaacaaatgaaaacagattggttttatcgttttagtaaataacttttgtgcaaggttcaaaacttgctagattgccagaaccggatggtttggctagaattccttgtaattaaatt

SEQ ID NO: 40373 - DNA, 266 bp, Gossypium hirsutum
  Clone ID: LIB3149-036-Q1-K1-A8
attatcagcgtctggcactttttgtattgacccccccccatgtcttctgagtgaaaggaaaaaaaaaaggaaaagagaaggatgcaaatgccttccacccaccagcccaaacatttttatttccccaacgaacaaacatgatctttttcaaagtcttgctgttccctctttataaaaatttgcataaaacctatgtactaattttatgtattcttttttgttgctagaaaaattttttttttgggggggggagataaagagagaaa

SEQ ID NO: 40374 - DNA, 392 bp, Gossypium hirsutum
  Clone ID: LIB3149-036-Q1-K1-B1
aattgatgcactttcttccgcaggctaaagtaattttcatcacatctaaggtaacggttggaatcatcatgcagaatccttgaaaaactctggctcggttaaggttctgattgcagcccataaactcgttgctgtgaagaaaaattaccaaaattttccatgttttgtgtttacctttcacaattaggttcatgtttagtgaaaaccaactgatacaatctagcgccaagcttttttttaaagaaaatccagtattgaacagacaagtaagaaatttgtatgcactaaaaagtgtgacaattgtaatcttaagacagtgacttaagcctcctatcggttagcaatttttaattgttgtaaacttgtaagccccgttaaaaaaatatatattt

SEQ ID NO: 40375 - DNA, 399 bp, Gossypium hirsutum
  unsure (1)..(399): unsure at all n locations
  Clone ID: LIB3149-036-Q1-K1-B4
gncacgnnnaaaccaacattccaagtaacttaacaaagcacacagtctacataagcgacaggattttttatcaacatcagcacacccccaaaacaaaatcctaagccaccccattgaaagcacccaaaaagtaatctgcaaatgaaaaacaaaaaccatctcaatctcaaactgaaaatactactacctaattaataatcttgtaagatggcaaatcaacgtaagctcttctaatgtgcattactgttaactaactctacatgtagaaatcaattattttcaattctattttaataacgatctaatattattaatatgtataacgctttgaactgaaacatataaattacccaccaataatagccttgcctattgtctaaactaacatacaattttcat

SEQ ID NO: 40376 - DNA, 384 bp, Gossypium hirsutum
  Clone ID: LIB3149-036-Q1-K1-B7
gcgcaatgtctgacccggttcaaacctcccttgccgatttaccttccgatccgcttctgggaccgggtgctttcatcgacgtcaacggtgaacgaaaaccggccgagccaaccaaagctcgcaacggttcgatcccgaacggttcccaaccggagacaccttcgcggggctcggtcaactcttcatcgtcggcagattctaaggtcaaaccgcgcgtattggccccggaaacttggttgccgcctggatggttgatcgaagatagggttcggacctccggcgccactgctggactagttgataagtattacgttgatccaacgtcaggccgaaaatttagatccaaaatagaagtgctttactttttagaaaacggatctcccc

SEQ ID NO: 40377 - DNA, 394 bp, Gossypium hirsutum
  Clone ID: LIB3149-036-Q1-K1-C11
gtaaaaagaaaataagtactctgttattctttgctattttgttttcctcggactccgtagggccgtttttgcagataatcgtgaagaaacggcgcgcgtggagagggccatctccgagtcttgcggcgactgggcactcgctggaggtgtggaaggtggaggaagttgcggcgctcccctgttgtcactagggttttttctttttttagttttggggtttggtttagttttgggcctgtaaggccgttgggcttgtaactggactgtttttaattgtttgggcctgggtcgattgggccctattacaaaaataaaacaaataatgttgtggatttccaaaagaaaaatcaaaggaaaccatgtaagaaagggacatgaaagatttctttctttt

SEQ ID NO: 40378 - DNA, 378 bp, Gossypium hirsutum
  Clone ID: LIB3149-036-Q1-K1-C8
gtcaatactgtggtccgtatgtaaacttgcccctgatgaatgctcctcagttgctgtaggggccggtttggcagcaaagctgcttctcgtgattcagagcggttgcaatcctctgttgaagcaaaaatcttcggagctcttgaagttatgtagcctaaattatacagacaccatctttatttcaaagtgcaagctcacaaggacaatcctatgacaagttaaagggcctgccatgattggttcttgaaatcttccaagaatgaacgatcatatacttatgagatagggggtttgaggtatgaattagctctcctgtatatatttaagcacttcaattcctgcaatttgattcaactttacttaaagaacactcataat

SEQ ID NO: 40379 - DNA, 382 bp, Gossypium hirsutum
  Clone ID: LIB3149-036-Q1-K1-D12
cacccacatcacgcaaaggttacccctaagttttgcaagcagtttgctcgtgtcggagacgtcataaacaaagctctcctagagtacaaagaagaagtaacaaatggttcgttccctggtccttcacacaccccatacaaaatgaatcccaaagacgtgaatggattctcgaaggagttgcagagattgggtttagatgatgcagcatcggcggcaaacgaagcagcagttgagcccgagaagatgaacatggtgaacaccggaagtaactaaattaaggccagatttcttcaccttttttttttacttcaatcaaattcatttaagaagcaaataatgccattctttttcggtattgcaaatttttggttaaaagcaattg

SEQ ID NO: 40380 - DNA, 382 bp, Gossypium hirsutum
  Clone ID: LIB3149-036-Q1-K1-D3
ctcgacataaaacaatgatcagctcatcttggggtgctcctgcagccttcaccaaaggttgcaaccttcagcatgtagcagatggtctatacggtagacatttgtttgtgtacagttggcctgatggcgaattgaagcaaacaatggatcttggaaacactggtctcgtacccttagagataagattcctacatgatccctccaaagatacagggtatgtggggtgtgccttgtcaagtaacatggtccggtttttcaaaacccaagatggttcatggaatcacgaggtggcaatctcagtgcaaccattgaaggtacaaaactggattcttcctgaaatgcctgggctaataacagactttctaatctctcttgatgatcg

SEQ ID NO: 40381 - DNA, 399 bp, Gossypium hirsutum
  Clone ID: LIB3149-036-Q1-K1-D6
ggaaaatgtgaatcccaagcaaatctacactaatgcatcctgtgatggtaacggtgattgaggggctaatcttgaaacatttgcggagacaaaaactggagaggcaaaatttggatccaacatttcacatttaggccattattctgacgtagcagagaaatccatggaaagatttgtttcagtaatatcatcatttagattttcatcacccgggtctcgtgctagtggtcttcgagcccctttgaaagatgctcggaacacatgtaacaacaggtcatctgctgctgtggattttagccagtttgcttatgttccaaaaaacaagaatgccaaattagcttcgcctagattttgagttctggtcatatttttagcagaagtaccaaactttgcaatggc

SEQ ID NO: 40382 - DNA, 314 bp, Gossypium hirsutum
  Clone ID: LIB3149-036-Q1-K1-D7
gtttgttctttaaactgttatatccctggtattggccgtcttcatgttggaactttatagggtcgtgcatgaaggctgtgttctattccctgttgagggtgatccattccaggtgggggaagcttagagaggctaaaacggcttaaacccatcctttcgtcctctccgtttcaataaatttaggtttgtatgatttcatgtattaggtatattgttttccttttttcttgtatgtgtttgccttttagatagagtcctgatcctcgtgtaaactcaaaaagggttttttggtaatgagaatgtgttttgagatt

SEQ ID NO: 40383 - DNA, 260 bp, Gossypium hirsutum
  Clone ID: LIB3149-036-Q1-K1-F10
aacttagattacccaaacttacggtctctttcatacaacgtcatacattttctatagtgcggcctaatttcaattaactggccaatcttttacatcttacatactgttataaccaataactaatcccaactaaatcacttatacataaatacaactttcgacatctgtcatgataactaaaatgcccagaccgatcatcctttccatctaccacgcagcctaaatgacaaatgctacgcacactatatcccatcattttt

SEQ ID NO: 40384 - DNA, 331 bp, Gossypium hirsutum
  Clone ID: LIB3149-036-Q1-K1-F4
cggattgtaaccaacaatcctacccgatttttgacccgtcggagtcgtcgactcacagtgcggggacttgctactcaaggcagtgttctcttctacgacaatcggtttgccgtggcggcaaatgtctttaccagatgtcctacggggatggatcttacacaatcagggattacatgactgaaacagtgtcatttgggaactccagtgatatcaaaggcgctgctatgggttgtggccataccaactaatgcttatttgttgcaactaccgctttggttggactcgatggaggctccttgtctctaacatctcacattatagcgacgtcatt

SEQ ID NO: 40385 - DNA, 389 bp, Gossypium hirsutum
  Clone ID: LIB3149-036-Q1-K1-F5
aaagagacaaggaatcttggggggattgatctcagagaaggtaataaagaaaatgggtgggaaaagcagcatggccatggctgcagtttttgtagttttggcttcaaccctaaccacgtatgcttctacaacttacactgtaggagactccactggttggcaagtccctaccagtaattctaatttatacgatgactgggctgacaataaaaccttcgttgtcggggatgatctcttgttcaactttattactggggaacatgatgttgcagaggtgaccgaacctggttacgacgcctgtaccaacaccgacaccatctcaaccgacaacaaaggacccgtaaaaattacgcttaaaaagacttgtgaccactacttcatttgcactt

SEQ ID NO: 40386 - DNA, 427 bp, Gossypium hirsutum
  Clone ID: LIB3149-036-Q1-K1-F8
tcccggtcgaccacgcgtccgccctcacctgtgaagtaaaaaaacccggccctgattggcaagaggtgactgaagtggttggtgcggtgactgatgaagtcaaagatgctttggtgaaaaacattaggagaagaatgaccccacaacctttgaagattcgggctgatattgaaatgaaatgtttccagtttgatggcgttcttcacatcaaggaggccatgcgcaaagctgaggctgctgggaatgatgattgtcctgttaaaatcaagcttgttgctcctccactttatgttcttaccactcaaactcttgacaaggagcaaggtataactatcctcagtaaagcaattgcagcttgcactgaagcaatagagcatcacaagggtaaacttgttgtcaaggagcagcctatagccgtgagcgaacg

SEQ ID NO: 40387 - DNA, 328 bp, Gossypium hirsutum
  Clone ID: LIB3149-036-Q1-K1-H1
tcgatcgaagcctacccgtggaaggaagctcattgctagcatattgaagaccattctttcttcagagacaatggacatccccgacggggttgatattaaagcgaatgccaatatgatcgatgttgaaggtgccagaggtaagcttatccgcaacttcaagcacctcaacctggattttaatgttatcaatgacgaagagagcggcaaactcaatctcaagatcgacgctcgctttggctctacaaaaactaccgccggcatgcgtactgctctcagccacaccgataatcttatcagcggcgtaaccaacggctaccgttacaagatg

SEQ ID NO: 40388 - DNA, 304 bp, Gossypium hirsutum
  unsure (1)..(304): unsure at all n locations
  Clone ID: LIB3149-036-Q1-K1-H11
cccaggcgtacgantaaaacccaccctnnttaanttctnnatttttttttctattcaaaccaataaactatgaagaaaagcctttttatcaaaagccactcacccacacataaacctcacattcagttcacttctaacttccctaactctatcaccctctaccattccatcacactatatcctgtacttcctcccaatacatcttttcaacttactaacatatatcttaattaataccattaaacatcccctcataatactaacacatcaaaatttattcctaataaacaaacttaatctcaac

SEQ ID NO: 40389 - DNA, 227 bp, Gossypium hirsutum
  Clone ID: LIB3149-036-Q1-K1-H12
cccacgcgtccgcaacattcagttctaagtttctgggtactcaaaactcactatcctgtgggagagagcttcaaatattggaccctctaatggttcaagaactcaatgctggttcaagtttggcaagaatggtgttgatgctgaaggtgctggcatttatggtagtcaaaaaagagatgattttgacaaagatgatgttgaacagtacttcaactacattgggatgc

SEQ ID NO: 40390 - DNA, 124 bp, Gossypium hirsutum
  Clone ID: LIB3149-036-Q1-K1-H5
caacacgaaagcttgcgatagagatttaattttgatccacagctaactgaagtggcgcagggttctttcgattcaacgctgcattcattaaaactgatcattattcacactcctatcttccctc

SEQ ID NO: 40391 - DNA, 307 bp, Gossypium hirsutum
  Clone ID: LIB3149-036-Q1-K1-H6
ggtgttccactataggttggcatattcattccctcactgctgcttccccttggcgcgccggatctgatggcacggctgatttcccatcataggatactctccatcagtcatcctaatggcagggcaggctaatagtaaataaaatagctacaactaacacctcgcgtggaatgtggggtgcatgtggttactttagggaagatttttaactctattacagcattaatccatgttatctgcactgagagtctacttcacgagaaatctggtactaagattttgcaatatgtttcacctattttcttgc

SEQ ID NO: 40392 - DNA, 390 bp, Gossypium hirsutum
  Clone ID: LIB3149-036-Q1-K1-H7
tacttacaatgatatcatgtgtctttacacatattttggacagcacgagaaagtacctgatgtagtgagggagatgaaagagaacaacgtatccccggacaacttcagttacagaatctgcatcaattctctaggtgtgaggtctgatcttgagggaattgaagaaattttaacagaaatggaggatcaacctcatatcaagatggattggaacacgtatgctgttgttgccagtttctacataaaagcaggccttactgaaaaagccattgatgcactaaaaaaatccgaacagaagctagataataaagatggaacgggctacaatcatctaatatcgctctatacgagtttgggaaataaagccgaggtcttgagattatggggtct

SEQ ID NO: 40393 - DNA, 404 bp, Gossypium hirsutum
  Clone ID: LIB3149-037-Q1-K1-A3
acctggctggcctacggaccactttatttataaaggagagctccttaagctcaacctgggggacggttagagggctacctctccatcaaaaagcaagaatgtatggggcaaagtgaccatgcaaagtaagcctagttaaggcgactgtgctgggactgttactgcttactatatagtatcggacggtccaaattacaacggagccaacatgggagttcctagagattaccacaggggaaccttacctgattcagaccaaggagcacgtaaatggtgtcagcgacagagagcaaaggatgaaccttcgaggtgagcctaccacagactctgactcttattccatcctctggaaccagagccaagttgtgtttactagagtacgagaccccatttgattgcacacc

SEQ ID NO: 40394 - DNA, 269 bp, Gossypium hirsutum
  unsure (1)..(269): unsure at all n locations
  Clone ID: LIB3149-037-Q1-K1-A5
cggaatnncccgggtccgacgccacgcagtccggaatggttggagagttctaggagaagatttttcatgtgttatggataatagaggatcccaaatacggagcaagattgggaatagcactgtccatggaactaggtgtagccaatttggcatgagatttaaagctaatctaaactggtcagaagcttatctgttcagggattcaaagctagtaataggctaggattcagatatagctcattaatagtggttgccattcacaatttggc

SEQ ID NO: 40395 - DNA, 212 bp, Gossypium hirsutum
  unsure (1)..(212): unsure at all n locations
  Clone ID: LIB3149-037-Q1-K1-A8
ctcgttctacattataacaggcttgatggaactctcccttattttggtggaaacattccctcattaagctgtaacattgctcatatacatgcattgcccctaaacttggagttgcaaaacatgngtctatttacttaagaaattgttcatattatgcacttatcgttcttgacgggtgactcatcactcttgtaaaaaattctattgtttct

SEQ ID NO: 40396 - DNA, 296 bp, Gossypium hirsutum
  Clone ID: LIB3149-037-Q1-K1-B2
acgatctaaaaggagataaatcatcatcttttgttttttattttgaacccagacctaacattgggagttacgatatctattatgcttctcttaaaagacaaaaaaaatcattcactaaagatttctaaccacaaccaaatatcttctctttacaaaactaatttaaaacctaacccaactaccatttagattttacccacattctttcaattaatttctttaatcagatatatgtagtaaacttttatgttttataattttttaaaaaaaaaaaaaagtcttttttttaatttttt

SEQ ID NO: 40397 - DNA, 397 bp, Gossypium hirsutum
  Clone ID: LIB3149-037-Q1-K1-B4
cttgtgcttggttacctcaacaatctggttattgtaatggcatttttgatacaggcaaatacagaagaggagctaccagagtatcttcttggaacatgccggctgaaccatcttgacgcatcaaaatctattacagtaaaagtatgaataattatttattctcaacctgatgtttactaggctacactaggctggttaagaagcttgggtgatgattgatgaaattgaagaataccaaaaatcatattattgcattatggcattgctgctgccgctgctgcttccacagatagaattgcattctttctttttcttttttttttttttaattatttttatcaaatggtcattatctacctaaccttttgtgctctgtacgtatcatcgtagtatttaa

SEQ ID NO: 40398 - DNA, 393 bp, Gossypium hirsutum
  Clone ID: LIB3149-037-Q1-K1-B5
cttttgcttaactaccttatcaattttactatttaactagcatgtttgatacagagaaagactttttataacctacccgactttcttcttaaaacacgccaactaaaccatctatacgcatcaaaatctattacaagaaaaaaaaaaataattattttttcttaaccaagaattttctaaattacactcagcttgtccagaagcaaatccaacgattaaaaaaattgaagaattcctaaaataatattatttcctcattacataactaataacactactacttccacagatataataacattctttctttttctcactataaacaataaattatgcacataaaattttaattatctacctaaccaaaaaaaataaaaacatattatcttttat

SEQ ID NO: 40399 - DNA, 399 bp, Gossypium hirsutum
  unsure (1)..(399): unsure at all n locations
  Clone ID: LIB3149-037-Q1-K1-C6
tcggatacttatatcaagaaggcattggataaaaaatggagagattataaaagcactttggagaaagaatattttaagaaatatataagtctcgaagagaaatttcgaaatgtccctccgggaatgctgagataccaatgagaagatgtggttaaattttagaatttaaagaaaagagaggatcgtgagcgagttggaacaagtagcagacaaaaacaaaaatttacgcacacagcacggtcgaaaagttttgcttgtgtagctgaggccgaggtattttgaatttattaattactttctattaaataatatttttactactatataataggaactctcgtctggtcaaaaagttaaacgccttcagctntttgatattacacataggaagaaagatgg

SEQ ID NO: 40400 - DNA, 353 bp, Gossypium hirsutum
  unsure (1)..(353): unsure at all n locations
  Clone ID: LIB3149-037-Q1-K1-C7
agaaagaccggcccgagcgaggcgtggggggggtnccaaaatggttttgtcattttatgttttccgagccaagccaaccttgggaagaggatgcatcataaaggccttctttcaatactacctcctgaggtggaaatttgcctctaccgggatgaaataggaagcatttgaggctcacacctgcggactgattcccgnaagggtgaactggaaattgaaccacgggatgctttattttgaggttggaaagcaactcttgtcatcggttatgggctaccattacaagactgtctttttgagaacattgatgacaggcgatttcttaacatttcttttggatgcccccttcttga

SEQ ID NO: 40401 - DNA, 412 bp, Gossypium hirsutum
  Clone ID: LIB3149-037-Q1-K1-D1
gttggtattttggtgtttctgattaaaaattaatttaaaaaaaaagaaaaaaaaaaaagaggagaggaaaaaaaaaaaaaaaaaaaaaaaaaaaaaaaaaaaaaaaaaaaaaaaaaaaaaaaaaaaaaaaaaaaaaaaaaaaaaaaaaaaaaaaaaaaaaaaaggggcgccccttttaaagaaccaaattttacttccccttgcttccaactttttattttttttttagggcccccaaaattaatttcattgcccgtggtttaacaactccggaattggaaaaaccctgcttttcccaaattaaatccctttaaaaaaaatccccttttccccagttgggttaatagaaaaaagcccccaaccattcccctttccaaacatttgcccaccctaaatgccaattggacccccc

SEQ ID NO: 40402 - DNA, 248 bp, Gossypium hirsutum
  Clone ID: LIB3149-037-Q1-K1-D10
ttttaaaccaagcctccacctcaagcatactgtgaacttaacggagcccatgcaccccaaactaataacggttcatcagatagcatgggctactttttatgctaggttatgcatacgtataaatgctaatcctacattaatctttcttcgtcagatggtgacttcgtatttgttcgaaaggtgactaacaacatgttgaccgatatataatgctatgtgaaagctattttgttcccttttagatacat

SEQ ID NO: 40403 - DNA, 393 bp, Gossypium hirsutum
  Clone ID: LIB3149-037-Q1-K1-D12
ccctatctccctctcctcaacaacagtcgctatgccaacaccctccgttttcgctatctgggaaccctgcgtctccaatcatgaatcgtaggagtcggtccttagccaggcatcccctgcctcgatccgaacccttcctgaaattcctcaaaccagtcgccctagctcgcctacgggactcgagaatcagcgccagatcgcaccgctccacctccctctttcagatctctccgtcctttcagccttctaacggcggtcaggctttctccacagccatggacggctttccttgctttgtgccaacaccgacagtctacgggccccgttgtccccaaaagaagaagctaatcgcgaccaagggaatgctatttctgggttcaacacaatcagctc

SEQ ID NO: 40404 - DNA, 378 bp, Gossypium hirsutum
  unsure (1)..(378): unsure at all n locations
  Clone ID: LIB3149-037-Q1-K1-D4
cccacacctgccattatttatgctaccttttttattttaaagcaccaccaaaccatctgggacgataagctcaactacacaaactataaaaaaagtaaaaaataaactcccaaaattatctactttgcaaacaataaagacccacacccaacattttaagccgttcctgcttctaaaagccngcgagccacatacacaccattgcaaatttcactaactaaataaattatgaatcttatgtaatttaaaataatttgcatatccaatgatgttagtatttttatcttcattttaatatctttgagaatagagtcaaattagaaataaatgtgttccttcctaaaaaacaaaaaaaacccccaaaagcttctttttaca

SEQ ID NO: 40405 - DNA, 397 bp, Gossypium hirsutum
  Clone ID: LIB3149-037-Q1-K1-D6
gctgattccatgagctctagatagaccatttagtacagtaaaaagtttgacactgtgtccgtggtaccctctttgaaaacccagggcattgtcaaaagacatggtggttgtcctcttctccgacaaaacaatgaggacatctgacatttgtggtcgcttgtgtctaaagttgactgtgtaaggataaaattccatgagatctaccatactgataatgtaattttttatggtagttttaaatcccataattttctgcagaagtctttaatttcggcctgtattaaataactattaggaatcaagctagcatcttgtaatagtttataagcacttcatactgaatattctccggaaggttctcctttccacacttgaaaatcttcatgatttgcttctg

SEQ ID NO: 40406 - DNA, 410 bp, Gossypium hirsutum
  unsure (1)..(410): unsure at all n locations
  Clone ID: LIB3149-037-Q1-K1-D7
aaanccgacccaacccacgcgttcggattattccattatctatagattttttattattccagcaacaacaaatacactggccagtgaaactttttttcaaaacccacttcataggcaaaagacatcttccataacatcttcttttacaaaccaatgaccacaacccacatttttaaacccttccctctaataataactgcgaaccaaaaaccccccatgacaactaccatacttaaaaaaaaaattaatattatagaattaaaaaccataatccaatccaaaaatcttaaaattctgactttcataattaacttttaggaaacaaactaacatcttaaattaatttattccctcttcaaacaaaatattctccagaaggttctcctttccacacttgaaaaacttcataa

SEQ ID NO: 40407 - DNA, 423 bp, Gossypium hirsutum
  unsure (1)..(423): unsure at all n locations
  Clone ID: LIB3149-037-Q1-K1-D9
cgaacgacaacgaattgaagcacctcctcttccaagtatggaaaccatgcctccacctccgacatacgaggaagttaacggagtttatgcttcccaaacaaataacggttcaacagatagcatgggctactttttaggcgaggtaatgcatacgtataatggcgaatccgacgtggagctttctttgtcagttggtgacttcgtagttgttcgaaaggtgacgaacaacgggtgggccgagggagaatgcaaggggaaagcaggttggttcccttttggatacatcgaaagaagggaacgtgttcttgcaagcaaagtggcagaagttttctaagacatttctgcgtatcggtgtcggagaagacgattttgtacgttcatctttctcttccatatttgnttggtttgggcttatgtgtattt

SEQ ID NO: 40408 - DNA, 200 bp, Gossypium hirsutum
  Clone ID: LIB3149-037-Q1-K1-E12
aaatgatcataccatacttccaacaattttttctaacttttaacacagctccatcctcatagacaattgagaccttctcaaatgcaccatcaatttccacgaagaatttatccccaactctttcaaaccccatccactcctacaaacatacaaacatatattacctcctcaccatcacaatccatataaacccaatccaa

SEQ ID NO: 40409 - DNA, 237 bp, Gossypium hirsutum
  unsure (1)..(237): unsure at all n locations
  Clone ID: LIB3149-037-Q1-K1-F1
tccaagtacaatcttcctagaatctccatcttacttaccaaaatgaaaaaacccatggttgataagcttatttttctcaagaaatcaagaaagctcaagaaggttaagcttctgaagcattaccaccatggcgttctatgagaagtttagactgattcccccttaaacactcatcttattcacttctctaacacaaaacacgtgggggggaacacacatatntactccatgctgttt

SEQ ID NO: 40410 - DNA, 403 bp, Gossypium hirsutum
  Clone ID: LIB3149-037-Q1-K1-F11
atcattacatatttaaatttgagactcaatttttatttttaaaaaaaaaaacataaaaaaggaaaaatggataaatttaaaaaaaaaaaaaaaaaacaaaactaaaataaaaaacaataaaaaaaaaaaaaaaaaaataaataaaaaaactggctggccgttttaaaaaacccaattttacttccccttccatgcaacaaataagtttttttttagggccccctaaattaaattaattgcccgtggttttaaaacgttggaactggaaaaaccctgcctttacccaatttaatgcctttgaaaaaaatccccttttcgcaagttggggtatttacaaaaaagcccccaccgatcgcctttcccaaaatttacccaacctaaatgggaaatgaaaccccccttt

SEQ ID NO: 40411 - DNA, 283 bp, Gossypium hirsutum
  Clone ID: LIB3149-037-Q1-K1-F3
gagaaaacactagcgtatttgttatcttcaaaagcctgtctatatagtggatgactgataatgacctgaaacccatagctattgccccagtggtttaccataaaactgtatggcttgaagttgcacttgaaagatggttgttggaatctgcaatggcaacaacttgatgcccaaagatggttactgaacagccagcggttatgccataaccgattgtgagggtgcctgaaggaggacacagaccacgctcagagatttaaactctagtcgggatgaaaagctg

SEQ ID NO: 40412 - DNA, 369 bp, Gossypium hirsutum
  Clone ID: LIB3149-037-Q1-K1-F4
atgaaaaacactcaacttatctctattaattcttctattaaaactctcctcctatcatattggactagctcatatatcacttcaaacccatcatctacagcccccatttttttaccaaaaaactatattccttaaaattacacttgaaaaattattcatgaaatctgaaattccaacaacttaattcccaaatattgttaatgaacaaccacctcttattccataaccaattttaatagtcacagaatcagcacacagaccaccctcagatatttaaactctatccacaattaaaacctaatctttttagttcattatatagcatccatctctgactaaatatccaaaatttatttaaacaataataaa

SEQ ID NO: 40413 - DNA, 240 bp, Gossypium hirsutum
  Clone ID: LIB3149-037-Q1-K1-F5
taaaggttctatttacggaagaggttttgttttttgggggaagaggtaggggttccggcgcggaaattcgacccacctggttggcacctgggattgggttccatttggtagaaccaaactctttcccagaatgtgtgaacgtgcaagaccaaattaaaagattggcctttgaatgtactcctataatgggttgctgcttttaggattcacactcatgtactctataaaataaaacccatc

SEQ ID NO: 40414 - DNA, 392 bp, Gossypium hirsutum
  Clone ID: LIB3149-037-Q1-K1-G11
cttcagcaccttgcttttttatgcaagtctgaagttaattcaatgggtcgtatggctgcaggagtcttgcagctgctcaagcttgaaaactcgctcggcaaggatgccatatataaacttagcaacctaggaattgagggatttgacaagattttctcatcggataagctcaaccgagggaacagtgctggaagtattgggcagtctccattatcaaaagtgattattgaagaccagcgctcaactatcgctttgctcgaggaggcagttttggattcacaagccaagtgtgccacgctcgttactgaattatctaatgcagagtcttctgaggagaatcttacggctattaaagaactgagacagaaattagatacaatgcagattttggt

SEQ ID NO: 40415 - DNA, 202 bp, Gossypium hirsutum
  unsure (1)..(202): unsure at all n locations
  Clone ID: LIB3149-037-Q1-K1-G8
acccacgcgtccgacccgcnattaccacactacaacacatccttattttaccgaaaacgagaaaccgagggggcggccttccaaaangatgggaccccacccaagcaacactatcccataactgatacagatgaagatcattctctgctttggacgatgctcgatctccacatcaaaggaagcaactaaagctatccaacca

SEQ ID NO: 40416 - DNA, 151 bp, Gossypium hirsutum
  Clone ID: LIB3149-037-Q1-K1-H12
attaaaggagaagctggaacataagttttgtaactattgggaagcccccattttggtgctactatacttttaatacactttgatttgaaatataatttaattctttatttgtattgctttcctaatagagtattggataattgaaaataaa

SEQ ID NO: 40417 - DNA, 386 bp, Gossypium hirsutum
  Clone ID: LIB3149-038-Q1-K1-A2
cagcaaataatagatatggcgaaagctgaggttgtaattgttatgactatgatgatggtgataacagtggttgatgggttgggagggatgatgaggataaacgatgttaataacaacaaaaaggtgcaagagcttgagaggacttctggggatgattataacatgcggagcctatggccggtgcataaaagtttgggcaatggtgggccgtcgacggagtacatttgctcttatgtggatggagctaagaaacacgtggtgtgtggaatcaaggattatatcaagattaacggcatgcgaggtggagtcatcaacacattcgagttagctgttttgaattaactttggaatcactctaaggactggcttaattcaatggcttatac

SEQ ID NO: 40418 - DNA, 413 bp, Gossypium hirsutum
  Clone ID: LIB3149-038-Q1-K1-A7
cagccggcttgcttcaacccctgccagtcccagaaaggccatgggagagtttatccatgggttttattattggtttgcctaagtctgacgggtttgctagtattcttgtggtggtggacaggttttcaaagtatgcgacttttattccggcgaccaaagagtgccctgctgaggaagcagctcggttattccttagacacgtggtgaaatattggggagtgccactatctattatcagcgatcgagatggtcgatttactggtcggttctggacggagttgttcaagtcaatgggctcagaattgaacttctccacaagcatgcatccacaaaccgatgggcaaactgaacgagtaaatgcactgttggagacgtatcttcgacactatgtgagtgccacacaaaggaattgg

SEQ ID NO: 40419 - DNA, 275 bp, Gossypium hirsutum
  unsure (1)..(275): unsure at all n locations
  Clone ID: LIB3149-038-Q1-K1-A8
aaattacaacttttnttttctaccccaaaggaaacaaaactgggccggtcgttttaaaaacagggctgtcccacactatggctctttcatcaaccanaaatgtcggaccagtcgtgatgcaaaaaggcacttaacttcaacggctggtattttgtcaagattcgatgcattaatgaaagagtttggggctgcttctgccgaccagaaaaaaatattcttctccaaaaatgaaaaagaaattgagaaacttaagggttctactgccaggcatggaa

SEQ ID NO: 40420 - DNA, 408 bp, Gossypium hirsutum
  Clone ID: LIB3149-038-Q1-K1-B4
gtaagatttagtgaaatgtgtggggtccagtatgataagagttcctcctcctccttctcagggtcagtgtttacattgactaataaatatctgctatcttcttcacttaaaaaaaaaaaaaaaaaaaaaaaaaaaaaaaaaaaaaaaaaaaaaaaaaaaaaaaaaaaaaaaaaaaaaaaaaaaaaaaaaaaaaacaaaaacaaaaaaaaaataaaaaaaaaaaaaaaaaaaaaaaaaaaaaccgggcccccccttttaaaaaaacaaattttactaccccttcattccaacataaaatttttttttatgtgcaaccaaaataaaaaacactgcccccggtttaaaaaccgggaacctgaaaaaacccgggttacccaaattaatatcccttgaaaaaaatcccctttt

SEQ ID NO: 40421 - DNA, 337 bp, Gossypium hirsutum
  Clone ID: LIB3149-038-Q1-K1-D6
aaaacgggccgaccgacgcgtacggacgaatataaaatcatcatactcttttttttttatgtccaaggacaccacaagatgggtcgtttgtttatacattacttccaaaatacacagactctcatattcttgattgacagcaatcacagagaccgacttgttgaggccagggatgaattgcatataatgttcaataaagataaactgctacatgctctgttgcttacttatgcaaacaaacaggatcttgcaaatgcactctatgctgctaaaataactcacattcttgccctccattcccttcgacaacattactagtatatccataatacttgtg

SEQ ID NO: 40422 - DNA, 253 bp, Gossypium hirsutum
  unsure (1)..(253): unsure at all n locations
  Clone ID: LIB3149-038-Q1-K1-E10
gagtgaccattgcagactgtagagatgttttagccagcacacggtaactagaagaagctgcagagagagccatttatgagagcacacataagcacagcaagctgtataacttgagtcgcaggataccagagtggactcttaatgtggtggctcagattaagttgataattngtgagcatgtgcacttgatgggtgctttagtattgtgttgagtgggtgaagaataggaaatatctctatcgcttgttgctct

SEQ ID NO: 40423 - DNA, 333 bp, Gossypium hirsutum
  Clone ID: LIB3149-038-Q1-K1-E4
ctctcttaccctcctttcgtttcatttcatttcatttatctggttttcttttctcttcgcgggggtggatgctaaggattccacaaagacagtgtcctaactcccaactcatgtttctaaattctagtcttgtttaggtgggtttggcttggtttagagctttcttttcccgttttaagttgtgttgtttattactataatttgtcgacgagacaaaaagacttttgtttcgagttttttggtctggtttgattttttaagaatggcaaatgaagaagagaaaaacaatgatttctatgctgttttggggttgaataacgaatgcactcaaac

SEQ ID NO: 40424 - DNA, 277 bp, Gossypium hirsutum
  unsure (1)..(277): unsure at all n locations
  Clone ID: LIB3149-038-Q1-K1-E7
aacattgngaactttgcctctgtatcataaaaccattccctaaggctaatcatgccgtatatcatagtcattactatacaaattttcgctacattatctttattagcatattgtattttgatagcggaaacccactcaatttttacaaatactgattttgttgatttacacaatcatctttatcaatttttgaactcaatcacttatttacctttaaaactattaaccatctcccaataatatccaaaactgtcaaccacattttacccattctcat

SEQ ID NO: 40425 - DNA, 211 bp, Gossypium hirsutum
  unsure (1)..(211): unsure at all n locations
  Clone ID: LIB3149-038-Q1-K1-F12
ataccgtagttagctatatagcgaganagaactaccagatcctatacgcgacgaccggaagccactgaatcgcgcatcgctcgatgattgaaactctacacgccgccaatcctgaaggggcgaaggtaaccctctgccgcctgcgacagagcctgtacatcggtgtaggatcagctatcgcgtatcgcagtatcgcaagcgtcacagcgag

SEQ ID NO: 40426 - DNA, 418 bp, Gossypium hirsutum
  Clone ID: LIB3149-038-Q1-K1-F3
gtcaagatccaagaacagggttcaattctgcctcggctgctttagatttcctagaggatgagaaatgtgcaaatactcatgtgacaataggtgggcagaaactcattttatcaacatggtctcaaaaagtacagctaaagtttctgaagcattttctaggaaatgatggattcgtgaagcatatgatggaaaatgaaaacttccatagtgttttcgacttccttccggaaagaaagaatgcttggggcaatgtactatatgtgcccgaaagagaagaggttactatttcgcttttccaacctatggttgctagacacaatgattgctctctgctaccattgctaaccagagacaagcagttagcaaagaaaaagaccatgtctcccaattcccacttgagcaaggcaaggactcaatt

SEQ ID NO: 40427 - DNA, 210 bp, Gossypium hirsutum
  Clone ID: LIB3149-038-Q1-K1-F4
ctgatttaaagacgcttgtgttgagagttagatgtttcccatgcctcaggacattgttcttaatttggttacctgttaaccttgatcatcatgtatgtatgattaatgcttttgtggccaccctgagggatagaggttagaagagtttgtgagacagttgtctgaatttgtagctcaacaaaactaattacttagttcgaggtaacagtt

SEQ ID NO: 40428 - DNA, 344 bp, Gossypium hirsutum
  Clone ID: LIB3149-038-Q1-K1-H3
agcgaatatcattatattctgcagtataggactcgatgtaggatttattggctcgagcgacgggcgtagctgctgatattatgctaacatgcggaaagtcagtgaccgagtaaaggaaagcattcactattgatgatatgctcaataaaaaagaaaggcattcttcatctttcttgtaaggaaagcctccactattgtaattgtactcgataagaaagaaaggtatgctgcatccactgggataatatgaatcagagactctattgtcatgaccgtattctaagtctaacctagaaacactgaactcctaacacgaatgctgaacccctttttctttggtcggc

SEQ ID NO: 40429 - DNA, 398 bp, Gossypium hirsutum
  Clone ID: LIB3149-038-Q1-K1-H4
caaatattcaaaaaaatatggataagacatcaattatttaatttgcttagatttgtatatcttgtgttgctttaagggttctttgtgccttttgaattttcaccattttaatttagttaactatttttggtggaaaagatgcagttcatttcttattgtttgaaaggaaatatatgcttatgtaattatgctactttgaatcaaattctaatatccttaaaatagttgcaaaatcattcttatttacttcatgaacctctaagctatatttacatgacgttcgttcaagtttattataatgcaatatgctaaacctagtatacaaaaatgttttgatgtgatgtatggaaattgtttactattttttctctaatttgaaaactttatatgagtaagtc

SEQ ID NO: 40430 - DNA, 369 bp, Gossypium hirsutum
  Clone ID: LIB3149-038-Q1-K1-H6
gaggtggtggaattggacaccactaaactactaagctcacgttgcatggatgcatggattgctgtcattagtccaaaatgagagcataatcggaatgatttgttgaaacattatatattagtaataaattactaaaaagtcaaaaaaccgattccaattacaaaatctaccctaaattaaagctacttttatttgcattattaccttctttttttaattatttgtcatacgtatatattgctaaaagaaaaaacctttttgttatcaattagggtaatatttgatatatcgtaattgaaaatcgaagattcaataccatgaataaatattttctttatttcctatctcaacacgttcgacggctttacc

SEQ ID NO: 40431 - DNA, 412 bp, Gossypium hirsutum
  Clone ID: LIB3149-038-Q1-K1-H8
gatttataccattttttcaatcaaaaatgatttgtacgggtataatcattttgacactggcgggccttgattcaattaaagcacatcgaatcctggaattaaccacaagaatgtattggatcaataaaaacagcaatttgtttttacacaatcgagattaccgatcaaattttatactcttagaaacactatcccgatgctttcgagatacatgcatattgttcttaatactgaaacgggaaacttgtggctaaaagagttactttgttttaaaaagaatggggtgcaaaaggagtacacacaagtcgtgtttaaccccataattctttttatgggtcttgaaaacacataatgttttatatgagacctcttaactattattatcttggcgagaataatgctcatcaagcta

SEQ ID NO: 40432 - DNA, 337 bp, Gossypium hirsutum
  Clone ID: LIB3149-039-Q1-K1-A10
ccttgatttacttttattcttgaggttattataaagagagatttttacaaaaaaaagaaaggaaaaaaaaaaaaaaaaaaaaaaaaaaaaaaaaaaaaaaaaaaaaaaaaaaaaaaaaaaaaaaaaaaaaaaaaaaaaaaaaaaaaaaaaaaaaaaaaaaaaaaaaaaaaaaaaaaaaaaaaaaaaggggggggccgttttaaagaataaaactttactgacggttaaatccaaggttttactttttttattgggcaaccaaaataaattcaattgcccgagttttaaaaacggggaaattggaaaaaccttgggtttcccaaattaattgccttgg

SEQ ID NO: 40433 - DNA, 383 bp, Gossypium hirsutum
  Clone ID: LIB3149-039-Q1-K1-A12
cccacgcgtccgcttatctcctaacctttcttttcgctcggagaatcggcttgggggggcctaaattgcaatccctttcagggggaaagggaaaatgtcatcatacgaaaacgccgcaggcgggaagctgaagctgcagggaaaagccttggttgttcaggctgctggaatcaacatgaaaaagaatcctctcaagcaaattcaacatgatgaccaaattacccagaacgatccctctgatgccgattctgctggtgaaaccacggaagtttctgttgatcccactgaagaagatatcaacaacgcagagagatcaagcggggagaaagccgctcctcattatgatgatcatcttaccccagcacatagacgatacattgagc

SEQ ID NO: 40434 - DNA, 170 bp, Gossypium hirsutum
  Clone ID: LIB3149-039-Q1-K1-A6
gccaagcgtactgaacatcataatgaatgtttttatgcttatgtcacacatgaccagtggggaattggttaattcagttgtttgaactcttaattaacagatgactctgtttggcatgttgttcttccaatggaaaaatataacctttgacagcttgggctgatggcggt

SEQ ID NO: 40435 - DNA, 410 bp, Gossypium hirsutum
  Clone ID: LIB3149-039-Q1-K1-A7
ggaaaccatgccttttaagagcataagaatggaagcgcaagatcattttaagcaggggggaggtgtttctatgtacaaaatagatggtaacaaattggacgatctagtatgcgtgagacattctgtaaactccaagggctaagaaatattacaggttgatgcccttctgtattctctttggtggtatgagtgggagaaaccgttccttatcaccaacaaatcatcaatgagatgatgagtggccgtttgggaatagcaatctgtcattttgagtttggtgaaatgttgtatggtacttctgaatgctgtcctgtgtgtgaagcattgcccatgcttccaatgtggaaaaggccatagaagacattttgctctgtggtcgcaaactatgattacttgctacagggtttctc

SEQ ID NO: 40436 - DNA, 293 bp, Gossypium hirsutum
  unsure (1)..(293): unsure at all n locations
  Clone ID: LIB3149-039-Q1-K1-B5
cgggcggggggaaaggatgaaataacttaanaggttatattgtctctcaacaaagcatgcaacggggggggctaatctagtttaaccttatctaatttctaatcctgaatcctacaactaggatattggaacctttccaaccttattatacgttaaaaaaaaaagtcattacttctaatggtggggctgccataatcacaaattcctttaaaaaaccaaactttcttctattctggaaaaatcatcaattgcaaaaactatttcaaataaatcatcttttttcttcaataaat

SEQ ID NO: 40437 - DNA, 319 bp, Gossypium hirsutum
  Clone ID: LIB3149-039-Q1-K1-B9
cccacacatacacaatttgtgtggtatcttttctactttctttcaacttcgcatgtatggggtaaatcttaagtacggctaaattttgccattagcccctatattctacaaaagttagaacatctaacccttatgtgctaattcggtcattaataaacattccacttcttgcaaaaaaaaacataagatgaacatcggaattacaaaatagaatacaagcataacacataaactgaatatcttaattaaaataaacaataaatgggcaggcgctttcaatattccaatttatacacccgttggttgaaaccattaacct

SEQ ID NO: 40438 - DNA, 410 bp, Gossypium hirsutum
  Clone ID: LIB3149-039-Q1-K1-D4
gcgtgcgaagagcattatttaaattttattcatggtttatttttttcacaaagccagaaaatcatcggtggggaccaaaacatgttaattcttcaacattcaactaacaactgttccacaaaaacccaaataaaagcccatacggtagttggttctaaacttataacacaaggtgttcttcttaaacccaagaatggcttattttttttttccaacgctccggttcaaccaccaccttaaatatttacaaggttaaataacctttatgaaatttttttacatccacatatatttcaaatttaataccaacattttatactaatatttttttataaaatattggattccgatgcacacacatatttactattcttcaacaaaaaaatatcctttttttttacacattttaa

SEQ ID NO: 40439 - DNA, 208 bp, Gossypium hirsutum
  Clone ID: LIB3149-039-Q1-K1-D7
aattctctaccaattacttaaaaacatttccacaaaaacccaattaaaaccccatacgttaccttgttctaaacttataacacaaggtgtttttttcatacccctcaattgctcacttctttgtcccaatgcttccctataaccaccacctttaatatatacaaagccaaatcgcctttattaatctttctacaccatcaatattttt

SEQ ID NO: 40440 - DNA, 224 bp, Gossypium hirsutum
  Clone ID: LIB3149-039-Q1-K1-E1
ggagaacaatgtactgcatactcaacgggaccgtgcacaacctactgcctttgcaagggtggagcttgcaatgccttcatgtgagttaccagatgagatgctatcattaccacattctgtgttgatcagaacgaatatacgcctgccctgaatacagcatccaaagctagctgtactaccaacttaataggtacaacgaatgcagccattcatgacaaaacatt

SEQ ID NO: 40441 - DNA, 213 bp, Gossypium hirsutum
  Clone ID: LIB3149-039-Q1-K1-F5
ttaaaaaactcctccatggactcaagggtggttcagccggtccatctcacttagagcacccgcctgatcatccctactgacggcgatactctccttgccttaatagaccgggtcgttcctcccgcacttttacttttaaaaaaataaagtgctctaaacaggcctacgcttgtatacattaacatcggataacaatataagatttcgatccta

SEQ ID NO: 40442 - DNA, 383 bp, Gossypium hirsutum
  Clone ID: LIB3149-039-Q1-K1-G1
gctcagggagaaccaagtctcactggtcattaaatcattatggacaccaaaagccgctcgggcgcccatgaatgcagtgctgattctggaaaggaccctaccaaggtggacaggcaagcaccttacataagcaggcaggctatcaagagcaatctggctaaggggcatgaccaaaggtgaattctgcagggttcttatactaacggtgtgcctgagcacttgtgtgtctttgtagacagctatggaactggaaagattactgacaaagaaatcctccaaaatgtgaaggagaacttccacttcaggcccagtatgatcaccatcaacctggatctcaagaggggtggcaatggccggttttttgagacagctgcctacggaca

SEQ ID NO: 40443 - DNA, 269 bp, Gossypium hirsutum
  Clone ID: LIB3149-039-Q1-K1-G10
acccgatacagacattgtttcggtgattagcatatctccaaaggtacttatatgcagattgatccaatcaagtgttgactgttgtgcataactacttagttatgtatcaaagtttctatgtcccaaggtatgagcatggtaactttattggcccaacaatcttatccaatgttaatgtcactcatggatttgtccaagaagaaatttgtgaccctattcatcctgtgcattgatgctgacatccctttttatgctatatacattgatta

SEQ ID NO: 40444 - DNA, 147 bp, Gossypium hirsutum
  Clone ID: LIB3149-039-Q1-K1-G11
cttttcttagcccaaaatgttctttcatatccagtctcaactgattcttactcgtcaaatgctactatatgactatcatgtttgaaattaaatactactcaaactcacgcttattcttgttctaaattaaacacattcatatccacc

SEQ ID NO: 40445 - DNA, 406 bp, Gossypium hirsutum
  Clone ID: LIB3149-039-Q1-K1-G2
gagaaatgcaagagcagagcctaaaaacattatcctgtaattgagcaaaaggctaggagagggagccttcttattgggatgtgttttatgtttttttaatgtttatatatatatatttatatttatatttggtatatatagatatgcaaaaagaagaaatcatggggacgtctttgtaatgtacaagaagcaataaacttaaccttatatattgctggcttgttttgttgctgatgatgggggctttgttttaataatttcaccatgtttttttttttttttttgctattgtctttgttgccatagcttattgattatgtgtgtgtgtgtgttttataattattattcctttttcttctacccccactcaaattttaatgctaatggtactttttttccccttccc

SEQ ID NO: 40446 - DNA, 401 bp, Gossypium hirsutum
  Clone ID: LIB3149-039-Q1-K1-G9
agcgcatgtcactaagtacagttgtctttgttggaggcttgactccatgggaagagaaagtggtggagcgtgcgaaagcacttagagtacaacccggaacagaacccgatacagacattggtccggtgattagcaagcaggcaaaggaactcatatgcagattgatccaatcaagtgttgacagtggtgcaaaactagtagttgatggaagaaatattctggttccagggtatgagcatggtaacttcattggcccaacaatcttatccaatgtcaaggtcagcatggaatgttacaagaggaaacttgtggcccggttctcctgtgcatggaggcagacaacatagaagaggctatagacattgttaacaggaataaatatggcaatggagcttcaatat

SEQ ID NO: 40447 - DNA, 289 bp, Gossypium hirsutum
  Clone ID: LIB3149-039-Q1-K1-H10
ggaagagtattattgtctatatagcttgttttctcgagggttttttcttttttaccaacggtaagcttgctgctttgatttgcagtttctgtaacttgatcagttgtggtatccggtatacggattcattgtcatattcggatgcataattggaattatcccaaattgcttcttcttaaaaaaaaaaaaatgaaaaaaaaaaaaaaaaaaaaaaataaaaaaagaaaacaaaaaagataaaaaacacaaaaaaaaaaaatgcaataaaaaaaaaaaacaaattattaag

SEQ ID NO: 40448 - DNA, 395 bp, Gossypium hirsutum
  Clone ID: LIB3149-039-Q1-K1-H11
gctgcccaaaaacgccattaaatcattcttatgtttttcatattcaaaacatctggtattgtttttctgattgaaattacattgaaataaaaacagtttctcagcttaaaaaaaaaaaaaaaaaaaaaaaaaaaaaaaaaaaaaaaaaaaaaaaaaaaaaaaaaaaaaaaaaaaaaaaaaaaaaaaaaaaaaaaaaaaaaaaaaaaaaaaattatttttttttaaaaaaaaaaatataaaaaaaggggggggcccctttaaaaaaaccaaacttaacccccccggcttagaaattttttttttttttttttgggcccccaaatttaaatctctgggcgcggtttaaaaaagtcggggatggaaaaaacccggggttccccaacttattttctttt

SEQ ID NO: 40449 - DNA, 271 bp, Gossypium hirsutum
  unsure (1)..(271): unsure at all n locations
  Clone ID: LIB3149-039-Q1-K1-H12
catacacaaaacatcaagaaacgtaccctttttaaagcaaagcagacccaccaaatccccnggtgacaataaaaaaaagaaatacccttacccctcaaaccatcttccccttaactgttccgtcccgatcatctcaacgaaagctattcttttaatttccctaatctcttctttctacctgctttttgctgttagatagtgtaaagatcttcaagcctatgaatctttaattgccatttgttttatataaatgggcccctcttcaataatt

SEQ ID NO: 40450 - DNA, 367 bp, Gossypium hirsutum
  Clone ID: LIB3149-039-Q1-K1-H2
gttgctatatagcgagcgcgcgctctataggagacacacttacacacgcgcgcgtgcgaggcgatatatcttttatatagtgacctaaatacaaaatactgtgcgcggttttacaccacgtcgactgtgaaaacactgtggtgacacaactcaatatcgttgcggaacatatccctttttccagatgtggtaatatcgaaaaggcgcgcaccgatctcgcttttcaacacatgtgcacactctatgtggaatgtgacacgccctgtatcggcgcatataacgcgccgggtgtgttgggtacacgcacagtgacacctatacttttgagagcgctatagcgcgctccttttgctttctttcctttctt

SEQ ID NO: 40451 - DNA, 199 bp, Gossypium hirsutum
  Clone ID: LIB3149-039-Q1-K1-H3
cgggcgacccacgcgtccggttgaaagactgttcgttgcaaaagagaaatttcctatttctttttctggccagattccggaggccaaaagggatgccaatgtccaaatggaactagccagtcttttaaaccttggggaaggtaaagcaccttcatggggtttgatattccaactggtggaaaggatttaacctattcac

SEQ ID NO: 40452 - DNA, 223 bp, Gossypium hirsutum
  Clone ID: LIB3149-039-Q1-K1-H6
gcgctacccgtccaggactctttcattcctcttttgaaaaaaatttataaaagcccacaaaaaaaaaagagggggggtatacttgttaatgacaaaaaacaaagaaacaaattacaatgaaggtgaatggaggaaaagacggtaccataactccaattaaaggggcgggcctttttaaagggccaaaatttgcttccgctgtattggaagcaatagacttttt

SEQ ID NO: 40453 - DNA, 403 bp, Gossypium hirsutum
  Clone ID: LIB3149-039-Q1-K1-H9
gaagaacccaagaagtcaagcaaaaagggctcttcaaaaaaggttgcaacagagagtccggagtcaaaaagcaaagataaatccgaatctggaaagaatctcacccctgcaaaatctagcaaaaaatcttctggatcaacttcaaaacaagatgctagtgatggtggtgggacttctggctctaaatcaaagggttctgcatcaaagaagcctaaggttgaaaaggaaaactctaaggatggatccaccaaagagaagcttgcagtcaagaagcaaacaaataagtcatcagcaaaggtttctgctaaatcacaaggtaaaagcaaaagtggcaagaaacctgagcctagtagggaagagattcatgaagttgtcgtagatattctaaaaaaagtggacttca

SEQ ID NO: 40454 - DNA, 377 bp, Gossypium hirsutum
  Clone ID: LIB3149-040-Q1-K1-A10
cccacgcgtccggtgaaggcaattcttcgcttgtttagttataattttgttgagcgacgaagcttagataatctttggtttgagcttatgatgcgtcgctctgcttatgcatccaaaaaaacgggtcaacccaattcaaccaacccgatttcctgttctccctccgatatctttcgcaccgcttcaagtaaggcatcttcaaaagagatggagcggattgacaacctattttattcttttgccaataggtcttctgggatgattggcccagaaaggattgagactctatgttcagacatgggaagtgatcacacagatgttatgatcttgatgcttgcttggaaaatgaaagcccgaaaacaagggtactttaccct

SEQ ID NO: 40455 - DNA, 407 bp, Gossypium hirsutum
  unsure (1)..(407): unsure at all n locations
  Clone ID: LIB3149-040-Q1-K1-A12
gctgaggttctaatagagttgaaaccatatgtcgagcttgctgaaaaacttgggaggctggctgtccaattggtagcaggtgtaagtggtgtaaaaaatgtgaaagtgtcgnatgcttcctctagagctcctgatgaccttgacacaaggctgctccgtgcgatgatcaccaaggggcttattgagcctatttccagtgtttatgtgaacctagttaatgctgattacaccgctaaacaaaaatgactgcggattacggaggaacgcattgttatagatggttcacctgagtgtccactagagtccatccaagttcagattgccaacgtggaatcaaaatttgccggcgcgatatcagagttgggtgagattaaagtcgaaggacaagtgaaagatggaattcccca

SEQ ID NO: 40456 - DNA, 406 bp, Gossypium hirsutum
  Clone ID: LIB3149-040-Q1-K1-A5
gggatgggaactgtgttagaaatcattgtttttgctgagtccgctagtcagtttggtgaggtggttgttgacccgatcacaaaacagctattgcactacaccgaaaagcccgagacttttgtaagcgatttaattaactgtggagtttacgtctttactcctgatatctttactgccattcaagaagtctccacacaccgagaagaccaagctaatttacgccatttgacaagctttgaaacgctgcagtctccaacaagggctcttccccaagattttgttagattggatcaagatatcttgtccccttttgctggaaagaagcaattatatacgtacgaaactatggatttctgggaacagatcaagactccagggatgtctctaaaatgttctggtctttatc

SEQ ID NO: 40457 - DNA, 306 bp, Gossypium hirsutum
  Clone ID: LIB3149-040-Q1-K1-B10
gttagggagcatgcgtactatttacagtactagaatggtagaccagattacctgaagaacgtatggaaagtcatcaattggaaatatgccagtgaagtgtacgagaaagaatgtgcttgagattgggcccttttcttagtgaatgaaagttaataatctcccttgtgacgaccttggatttgggtttttgcttgttcgattcaagcttctttcatgtgtagcaaaaaatgatacgtcattgcgtgagatgaatttcaatttaggaaatgcgataacgtcagtctcttgaaatatggtttaattttt

SEQ ID NO: 40458 - DNA, 138 bp, Gossypium hirsutum
  unsure (1)..(138): unsure at all n locations
  Clone ID: LIB3149-040-Q1-K1-B11
gtgggttctgnnnggatggagtataaagttttgaaattggatttttagatagcatgtagtgctttaaagttcatatgtttgtatgtaagnaagtatgaaattaagtaatacctctatataacctggtgataaaatctg

SEQ ID NO: 40459 - DNA, 288 bp, Gossypium hirsutum
  Clone ID: LIB3149-040-Q1-K1-B5
gttttataggaaccaagctaacctgctcttttctccaacgttgtacctcttctagagtgtgacccaaaaacaattgactggccagcgaaccacatcctcgggactgactaaaccctgacattccccaacttaatccccttgctgcacattctgctttacacagctatcgtatgagcgaataggtccgcgcccttcgctctttccaacaagtgctcaacctgcatggcaagtgatacccaccctgtagcgacgcatacatcacagaggaagatgtgtatacactcacca

SEQ ID NO: 40460 - DNA, 355 bp, Gossypium hirsutum
  Clone ID: LIB3149-040-Q1-K1-C12
gcatttgggatgcttattgtatctggacttttataagtaaacatttattcattgttgttggttgtgattttaaggcccgggttaatttgggttattacaattattggtcaaaatatactcttattatgtattaattaataattacatcattttttaaatgataaacaaccattttttcatattgaacctatttacagagtctatgtgaacctagataatgctgattacaccgttaaacaaaaaagactgcggattacggatgaacgccttgtttttgatggttcacctgagtgttcactagattccatccaagttcacattgtcaacgtggaatcaaaatttgtcagcgcgatat

SEQ ID NO: 40461 - DNA, 401 bp, Gossypium hirsutum
  Clone ID: LIB3149-040-Q1-K1-C6
gcaatttccggccacagggctggtcaccgttcgatcgccggaccgccgtgcaccgccgtcgccggccaccgcgtgagggcgagtgggtggtgctgacatgggcggtggagcaggtggagcaagtggctggtatgaggcgatggacgtcagcggcgctaggggttgattaaggttttagctttttgaaaccctaatctagctagttgggttaagaattcgggctatgtgggtttgggtcagggtctgtttgtaattgggttgttggattaaaatttggacttaagtgtgggtgaatttaaatgggtatttggggttgggatttaaggtttaatgggcccgggtaatttgggctcttacaattcctaaaagtattgtccagtggaaagttgacataggggatc

SEQ ID NO: 40462 - DNA, 297 bp, Gossypium hirsutum
  unsure (1)..(297): unsure at all n locations
  Clone ID: LIB3149-040-Q1-K1-D10
gcctattccttacagactcactttattattctcactacgagacnngcttccggtgggtttgagtgtctgataatgtacataggacgtccctaaccttacacacaacactcctgtgaagaaacttaatgcttttgaagttttctcaaaggcactttataccattccgacaactattgatgacaatacggtgcttgaacagccaaatattccctcccactttccttcttatctccacatttaaggactcaatccattgattgttatcatcaatttatctttatgagatattgctgatct

SEQ ID NO: 40463 - DNA, 192 bp, Gossypium hirsutum
  Clone ID: LIB3149-040-Q1-K1-E10
aaaaaaggccgaccacgcgtccgagacataccttaatcttcccttttagatttatcctgctactccgaagaagggagactaattccggttttatacgtcccatggatccttcttataaccatccacatgttccttcacgctttgtcgactgtgagaggcgattcggtaacattgatagataccgaggaggtc

SEQ ID NO: 40464 - DNA, 270 bp, Gossypium hirsutum
  unsure (1)..(270): unsure at all n locations
  Clone ID: LIB3149-040-Q1-K1-F11
gcaagggtgacgccggngagcttttacaatttagctgtttctccattaaagggcgttttggtatccatcttaaactaaagaacatgagccaacttgtatcatttccaatggaaatgaatttcttttctttatttcatgctgtcattaggatccaatttggataaacatggttttttaggattctttaaacaagttttccttcttgctttaatttattaagtagtttcagttggtgttaaaaaaaacaacttaaaaaaccaaggcaaaata

SEQ ID NO: 40465 - DNA, 286 bp, Gossypium hirsutum
  Clone ID: LIB3149-040-Q1-K1-F12
gagacttagtcgcctctcaacatcaggagtacgaagggaaaagacctaaaccgaggctcggatcgatgaaccaaaagttcattcgagcacgtctctgatgtggcctagtagaggagcgcacgacgcggagggacgcgcgacgtgcgatgcttgggaacatccatggttgcggcggctgagggtgttagctgctagagttttcatttttctttaattttgctgggctgatagggttgttttgggtttaagtctgatgggtttagggtttgggtaatgatttgtattg

SEQ ID NO: 40466 - DNA, 298 bp, Gossypium hirsutum
  Clone ID: LIB3149-040-Q1-K1-G3
cgagcactagctgacaacataggtaagttaggagccctctagtttctagcccttggtgaatgaaaacttttatgtccaatgggataagaaaaagggaaaagaaacctactgcattagattggaataactagcagattggaggaagagtggattgtaaagttatatgttgatattatcatctgaatgtcaaacttcaaaaactttttcctattagcatattctaatctatttctttcttttaaccttgtttcattgtctgccatgttaagcatagtgacgtatctccgcagtttcttct

SEQ ID NO: 40467 - DNA, 279 bp, Gossypium hirsutum
  unsure (1)..(279): unsure at all n locations
  Clone ID: LIB3149-040-Q1-K1-H10
tgagatcagcagctacttcttcttctcatcccctctcgtaaggcaccctaccacgtatgtgccgaaaagggcnaaagataaagggagaagcctggaacatacggtattgaaactatttgggaaagcccccatatttggtgctactatacatttcatagcattttggttgggacttaggattaatgtcttgagttggtgtgtttagttatggatatgggataatgaaataggaacattatcttctttttggttaataaatttgtggatttgctcttcaat

SEQ ID NO: 40468 - DNA, 204 bp, Gossypium hirsutum
  Clone ID: LIB3149-040-Q1-K1-H12
cttgagaatcgggataggtcgaatgctcgttcatactatccgaagccctaaattggtaaagtggcttgtatattttgagtgtggcatgtatagcactatactcactttgtgtaaatgatctaatgatatggttatggtttggtaagaaaagggtttgtaaatgattagccattgaaatgaccaatctaaatcatgtttgatgtc

SEQ ID NO: 40469 - DNA, 274 bp, Gossypium hirsutum
  unsure (1)..(274): unsure at all n locations
  Clone ID: LIB3149-040-Q1-K1-H7
cgacaactaaaacaaaagattaaacatttccattatacccccacactnanaaaacagggggagcgcaaattaaaacacagatctacccccacataaaaaagccccactcgtacacataaaccaacaatcagacttctaatcaaactctacactcctaaaacccctgcatacatacacaaggactatggtatactgtttgataactgatccacaaccccacaaatgtgatcaataaactatcccacaactatctattacaaccatactaaaaacc

SEQ ID NO: 40470 - DNA, 358 bp, Gossypium hirsutum
  Clone ID: LIB3149-040-Q1-K1-H9
ctgatactgaaacattgagatctaatgggggacgaaaacaatcccaaaaagcctgatgtgggaatcttcccttacccagctcagggtcacatcaaccccatactccagttcgctaaacgcttgctatccaaaggcgtcaaatgccgccttgttaccactgtcttcctctccaacttctcattttccgacccatcttccacctctattgatatccacaccatcttcgaaggctttgaccaagggaggtattaacaagcttgtagctccgacgcctaccttgcaactttctggttcgttggccccaacagtttaacagcattaatcaaaaaacttactgaaattcacccttgtgatgccc

SEQ ID NO: 40471 - DNA, 109 bp, Gossypium hirsutum
  Clone ID: LIB3149-041-Q1-K1-A1
ggcagctgatcgtgtgctgttgcataatacaatctatggtgttacactgtggcctctataaaagatgagctcaacgctgactactgttgatggaatactctggtctttt

SEQ ID NO: 40472 - DNA, 124 bp, Gossypium hirsutum
  Clone ID: LIB3149-041-Q1-K1-B5
tgtatgatatatatgatatggacactatcatacagagaagcaagactgcgtgtcgagaatctactgtacattttacactcaatcattaagatgcatttttctgtttcgtacaatggactggtgt

SEQ ID NO: 40473 - DNA, 156 bp, Gossypium hirsutum
  unsure (1)..(156): unsure at all n locations
  Clone ID: LIB3149-041-Q1-K1-C4
aagatctataagacatgcgcacggactttgtactaagcttgacttagtcacagaganacgctacattaacgtcagcccgtatgtgacatcttatccatatggacttgtttagatgagatgataaggcacagacatgaagtctctctagactttctg

SEQ ID NO: 40474 - DNA, 116 bp, Gossypium hirsutum
  Clone ID: LIB3149-041-Q1-K1-C6
cttactgacaataattgaccattgtctcactgttacagtgtgatggtctgctcatgtacagaagtggatattatccaccaccatcatcaatgtattgaattatggaggatgtacat

SEQ ID NO: 40475 - DNA, 217 bp, Gossypium hirsutum
  unsure (1)..(217): unsure at all n locations
  Clone ID: LIB3149-041-Q1-K1-E4
gcgctgcggngaactgtgctgcgtctgctgaggtgcagtgctggagatgcagatgtaccaacctgacgtgccaatacacactgatattgtctgtgacacccaaagacacttagactaatgatcgctaacgtgattgacacactcactcatgatatacaacaatctgacacctgttaaaattttggttgttaaaaactgtgcagttctgtcccgtctg

SEQ ID NO: 40476 - DNA, 292 bp, Gossypium hirsutum
  unsure (1)..(292): unsure at all n locations
  Clone ID: LIB3149-041-Q1-K1-E9
agcgtcgagctgttgctgatgaaccttctacaagcagagctggtgtgtcattaagtacacgctatctacatcgacacattgagagcctgtgttgacatcgctgactatttcactttgtagctcaacgaagtatgaaaacatctcnctttatctgatgctttgatagatgtactacactacaaatgttgagtagtaccactgcattggagtctgatcaaacgcaatatgagaagatatgtgtaaaaaaagcgcgtaagtcactatcctctcagatattttagactatatatgc

SEQ ID NO: 40477 - DNA, 222 bp, Gossypium hirsutum
  Clone ID: LIB3149-041-Q1-K1-F12
acagcgtcggtgatcactagacttacatcacaagaagtagtgacaatggatctctatctagaagaagacaagtatcggactgtggggattaaaagccaacttgtattgtggatgaagtgaagtgtataaattctgcttctcgctgcatgcagaacaaataagttaaaatatattgaactgcatctgagtgatgatattatctagcttttgtacttatggata

SEQ ID NO: 40478 - DNA, 249 bp, Gossypium hirsutum
  unsure (1)..(249): unsure at all n locations
  Clone ID: LIB3149-041-Q1-K1-F6
gcatgcttgcatctcttgctaagcatatatggccgagtcttggccgccttggacatgttgttgtctatgtgtcgattcatcactgtttgggtgttgtggtagagcgantaatcttaacacaatcagcatcaacagtgtttacccttttttacgaatctctcgactgtatactttattactacgtacacaccattctgtgatataccaatgcaaactgctgtctcattcgaaatggggaaattaacgttg

SEQ ID NO: 40479 - DNA, 129 bp, Gossypium hirsutum
  Clone ID: LIB3149-041-Q1-K1-G3
cgcgggtaaaggctagaaccgtaggcctcgcttcaccaaatacaaccttctgtggttatagctaacgcgtagcttcgctatcagcaaatacagtttgtgattatagctagtaactaaccatggcttagc

SEQ ID NO: 40480 - DNA, 217 bp, Gossypium hirsutum
  Clone ID: LIB3149-042-Q1-K1-A2
ctcttaaaaaaaaaaaacctttcttggttcttaatgcaaagaaaaacaaccggggcctgtcaaattataacactcaaagatccccccaccgaaaaacaccgtattgacctttacaaaacatacttagcatattaccagacaccagaaatcaccataattccttttggtgctcaaataatcactaaaaaggattacccacaccatgttctactcaacc

SEQ ID NO: 40481 - DNA, 222 bp, Gossypium hirsutum
  Clone ID: LIB3149-042-Q1-K1-A3
gttatgcagggttcaactttacgaacatttttatgcttcgcaaaagctatgtgataaagtggacggggtgacataaattgcccttccagtgataacaattggactagctgatgctgccaccttctatgtttacatgctcttgtgagatatgagagtaatcattgatagatttataacatacagagcctgaaaagatgaggactccaaacttatgtacactct

SEQ ID NO: 40482 - DNA, 351 bp, Gossypium hirsutum
  Clone ID: LIB3149-042-Q1-K1-A6
ccagaggatactctagaggaagcctacatttatgctgacaggcagatacatcggcatagtgggggttagattcgaatgactaatcaaacggactaatgacttgtctaatacatagtatgcttcatgattgctgcatcgattagcgagtcatatagagagtagtcgatgtttatacctataatttgcgctactgggtcaacctattattatacttataatgaatcggacagtggtgctactctgaacgccctggactaatactagtgagagcctttctagtttgttagttgacagactatttaatagctttgtatgcagactgggggtttgcatggattaaaagtataggtt

SEQ ID NO: 40483 - DNA, 433 bp, Gossypium hirsutum
  Clone ID: LIB3149-042-Q1-K1-A8
aaaaaaaaaaaaaaaaaaaaaaataaaaatttaaaaaaaaaaaaaaaaaaaagggggcccggtttttattaaacaaaatttcatacacatacatactaaaaaaatattttttttatattgtaacctaaatttaattaactcgccgtggttttaaaaaaccttgagtgtgaaaaaactgtggttacccaaattaatctccttttacaacatattcttttttccaaatgtcgtaaaaaaaaaaaaatccccaccaattgccctttttaaaaatttagcacactttatattgaataggaccctctctctttaggggcattataagcgcggggtgtggtgtttatacacaaaagaaaccctttactttccagagccctaatgcccccgcttttttctttttttcctttttttttttccacaatacaactgtttttcc

SEQ ID NO: 40484 - DNA, 223 bp, Gossypium hirsutum
  Clone ID: LIB3149-042-Q1-K1-B11
aaccaagtacatggttcattaagaggcacgtgtaagccattctttgctgcagttttcttgcaagttggttatgtaagcatggatatattatctaagactgcattaaacctggggatgagcaattacgtactcgttgtttaccgccatgccattgccaccctagttatggctcctttcgctgctttattcgacaagaaagtgaggcctaagatgaccatgacaa

SEQ ID NO: 40485 - DNA, 209 bp, Gossypium hirsutum
  Clone ID: LIB3149-042-Q1-K1-C2
ggagatagagcttggaacaataattattgtatatttagtagtcagttgatggtttgggtgtaggggcaagggtcaattttgttctttggggaagtctaaagtgaagagaagaaaaaaaaaatacagtcaagtggtctaaactctaaaagcttgatcctttgaatagatgtatgtatatataatgaaatacatattattcttttcttgtg

SEQ ID NO: 40486 - DNA, 247 bp, Gossypium hirsutum
  unsure (1)..(247): unsure at all n locations
  Clone ID: LIB3149-042-Q1-K1-D9
gnngcagaggaaggngaaagancgaaaccaagggagaagggcgccncnccncaccgcncaaccnncngcgcnccnccganccaaaacncncaaaggcaaggcnnncnncncncaanccccgaagcccaccgcncncnccgnccccnnnncaaggaaaccccacaaaccccncagnngcncgncnnncaaaacccnggccagcgcacgaaccgaccctacgcccgaanccgannccgacccagaaacc

SEQ ID NO: 40487 - DNA, 260 bp, Gossypium hirsutum
  Clone ID: LIB3149-042-Q1-K1-E1
ggaagtataaacaaggtgagtctaatgctatagacatgaaggtgaaagatgacttgtgcgcgattgagaactatcacgaaccaccgcgggctgaggcactattggggtctacacgtgcgtggttatcacaccatgaccactggctgcagaggaatgactgcaggtgtgtgtatgaagcgagggacgtgttcatatatgatgccaagcagagagattattgccttgggctataaacattctgcgcagcatcagatgtgaca

SEQ ID NO: 40488 - DNA, 267 bp, Gossypium hirsutum
  Clone ID: LIB3149-042-Q1-K1-E11
gaccggaacgggagggccgggccaacccacccgtccgaggaacacagctgaacactcaagaacaagccagaggggaccaacacctgcaagcaacccaacagcgaagaaaccaggtgacgaaaagaaaacggacggggcgaaagcccacaacgagaagaagccaaaaagccgcgaaaagccccaaaaggaaggcggagcagcggacggagacaagaacaggaagagggccaacaagagggccgagaccgacaagacctacataacaaa

SEQ ID NO: 40489 - DNA, 398 bp, Gossypium hirsutum
  unsure (1)..(398): unsure at all n locations
  Clone ID: LIB3149-042-Q1-K1-E2
cggaaaannggaaggacccacgcgtccgagaagtataaaaaagtttattctaatgcttttaactttaagaagaaagatgacttaaacgggattctgtgactatcaacaaccaccgcgggctaacacactattgcaatcttcacttccatgcttataacaccatgaccaatgactgtataggaatgactctaactatctctatgaagcgtttaacgtttcatatatattgccaagcagagagattatttctttggtttataaacattcttctcaacatcagatgtgacattctgttattagttgacctaactatctctcacatgtaacgcgaaaaacaaactaaactttcgcatacctctgtgaatactaaaaaaaaaaaataaaacggcgttccttat

SEQ ID NO: 40490 - DNA, 419 bp, Gossypium hirsutum
  Clone ID: LIB3149-042-Q1-K1-E3
acacagtataatagaatcttactagtgaaataacaccatatgctgtggaagtataatagagattcttgtactagaagccggattgtattttgctcctctactcaaaaaatgagcaaagtagtctttattgttacatcaaaaagcaaattgatcattcttttaaaaattccatccatttatactattataaaccgatccctttacattagcatgaggtttacgtgacatgctacgtggcactacctagttattcagccagccacgttagtatttaatagtacaaatagatgaaacttttaacaaaaatgaccaatttgctttttttatttaaaatataaaaactaatttgctcatttatttagtaaaagagactaaatacaatctgacttctaacaaaaggcctctatgatacttttatt

SEQ ID NO: 40491 - DNA, 413 bp, Gossypium hirsutum
  unsure (1)..(413): unsure at all n locations
  Clone ID: LIB3149-042-Q1-K1-E8
cacgaattggtcggctgcttgacttcacacaggatgtacgtgctgcaatggaggcttcaggaaaatctctaacatgtttcatggctgctacttcatccctggaagcagcacaaaatatcgagtgtattacttcagctagaaaggtgatggatttcagctaccaggatgtggatgaacatgcatgtttggttgagcaggcaatgcacgccataagtcgttctgatttatgcaatcccagaaattaagctaccttgtatatatattcgagttttatcagactataacccctcaacatgcattggagatgaaaggtggatggcttatacctgcattcgggaacgaacaaatatgtgagtggcccaataacctattgcctcagtggacatgtgtataaagngcgattgatttgcaaa

SEQ ID NO: 40492 - DNA, 266 bp, Gossypium hirsutum
  unsure (1)..(266): unsure at all n locations
  Clone ID: LIB3149-042-Q1-K1-G11
cagggaccggaccggaaggcccgggccaacccacgcgcccgaccaaactcaggggggaggaccaacaanggcggcaaacatggatatggacggnaaactaccccccattatggtgggatctcaaacagggataatactcctataggctatggaggcggaagtggaagaaatgattctaatttaagctctagtactcgggatatctggggaaatggaagccttagcaatgccaaatgccaccagccctggaggattcttggggactg

SEQ ID NO: 40493 - DNA, 418 bp, Gossypium hirsutum
  unsure (1)..(418): unsure at all n locations
  Clone ID: LIB3149-042-Q1-K1-G3
cttggtagtgtcagctttgaaacttcctgacaaaaattcgaactttgcccaagtttccgaattttggctatctgcatccgctttcattcaaagccttcaacctgaaccccaacactgctttgagttactgaatcttctgtttggaatattcttatggggggaaaagacaaatactagtgaacctgattggggcccttttgacacgtgaattgttatgagataatttgtgaatgaatagctgagatcgagagatgatctatgaaatgattggtttgaagttcacagcaaaaatccaatctaatgcccaagttttagtttgattttcgacggtgttagaatatgcatgtaagtggcattattatacgttacttaagacatgagtgttgaatatatatcttaaatggaaatntggaataca

SEQ ID NO: 40494 - DNA, 187 bp, Gossypium hirsutum
  Clone ID: LIB3149-042-Q1-K1-H4
gtttgacatagagagtgtatcggtttatagagcttgtatcaggcatatacatactgatgatgaagtgctgagcaaaatatatatttgttttagttctctagtttcacaaaaatacgaagggctgaaaacatggaattacacacaaaatggaccaacatttgatccaaatgatataactggtaaatgg

SEQ ID NO: 40495 - DNA, 386 bp, Gossypium hirsutum
  Clone ID: LIB3149-042-Q1-K1-H6
gaaaacccggcccgacgccacgcgtccggtctgacataaaaaatttatcttttcatcgaacatgtataacacatatacccggtgatcgtcaaattctaaacaaaatatctaaaaattatactaccatagacgaatttaaatgctatacggaaggcagacaagcgtaacacaagagagcaaagaccgacaatgtcaatataaacaataaggctgaagagttgactgcacacgaacttgacaatctcatgaccattgttgccaaccaccagcagttcaaaatctcagactggtttctaaataagcaaaaggatcacaacgatggaaagaattcccaagttgcttctaatgctctcaacatgaaaatgagaaaagacttggagcgtgtg

SEQ ID NO: 40496 - DNA, 252 bp, Gossypium hirsutum
  Clone ID: LIB3149-042-Q1-K1-H9
aaaaaaatctgttgtctacttcatcctctctatagagtgagtaggcatttggggtaagcactttcgcctattttctcctttctttgatgcttcttttaatatgttccattagcctttgttggggatcgaatttctacttctaatctcttgttctgtcgtatgatttcaatttttttatgacaatgaattttgaagaatgtagggtagggaatgttcaagcactgcattttataacatatatatatgtataat

SEQ ID NO: 40497 - DNA, 358 bp, Gossypium hirsutum
  Clone ID: LIB3149-043-Q1-K1-A11
ggggaaggggcgagttgcatatctgaagattaaaaggttttgaaaattacctctaattatggcattgatatttccatggccgctcataaagagcatgctccacggatttatgctaatgttcacagaaagatttcaccagagatgaatgatgaatttttctgtcattttcgacctgaggaagtttaggctgtagttaaatctatggaacctcttaaagcattaggtattgatagtttccctgctctcttttataaaaaaaatattagcatgttgtaaggaatgatgttatgagatactgtttggtggtttttcgtggggaggttgttgttgaggagataaataagactcatattatctt

SEQ ID NO: 40498 - DNA, 392 bp, Gossypium hirsutum
  unsure (1)..(392): unsure at all n locations
  Clone ID: LIB3149-043-Q1-K1-A4
cgaacaaaaataccttaaatntctttcttttancattttttttattccaanaccnacaccaacactgtgcggtcttatcttaaaaagggcccgaccatccacaaaaacctttacatcttcatcaaaaatcccccctccatacttcttcaaatttccacctccaacacctcaaatcatattcattcaaactttcactttattttaatcaatatcttcactcccaanaatctcaaatatatttttccttctttccacaattattaattttcccatttcaatcatacttactaccatttaatttacatttctaaacattaattttttattttcttactaatttttcaacactaaaaattttcttaaccttccaactttttataaccttttttaaa

SEQ ID NO: 40499 - DNA, 349 bp, Gossypium hirsutum
  Clone ID: LIB3149-043-Q1-K1-A7
taggattgagtttggctaggaattacagaccatgaaatgtgaaactctgaaggaagattcttaaacaaggatttcccttgtattagattctgtagttgaatctgattgtgcttgatcaaattgttatgctatttggtaatagtggtgagcttatctggactgcatcaacagacggacacgcggaatatgtgttagggataaagttgtgttagagtctaggaatatgatttgaagcataagagaaaactacattacttttgcactgttacttggagcgcaccatacatgcatcggcgagtagggatggaattgcaggctcacatggagaaatgaagcatagaataagcaa

SEQ ID NO: 40500 - DNA, 388 bp, Gossypium hirsutum
  unsure (1)..(388): unsure at all n locations
  Clone ID: LIB3149-043-Q1-K1-A8
cgtacgcccactcattctacccatttatttccncattttttttctactctgaaatgcccaaatcaaggaatggcacaaattacaaccgatcttgccaagctcacaaaaatttaatcaacaaacccaaaaagcacctccacacttccaccaaagggatggatcctaacttcttgaggaaccaaatgtatgcaaggaaacacaacaagaataatgtataatcatccaatcaataagagtaagcttttattgttgtaaaagaaaattctaacctcatttaaggttttctaattatccttagttttgtttgtttcaatgtaaaattatgttttgtttttttcaacattatcactattttgattaatatctttgttataaaatattttaaact

SEQ ID NO: 40501 - DNA, 261 bp, Gossypium hirsutum
  Clone ID: LIB3149-043-Q1-K1-B10
tgaagtttgtgtttaatgattgttttcctttttgtaagttcttgataaatgttaaaaatgatgattgagttggggtttaggttttagagataattaccgtttaatgattttgcaccggtatttatactctatgattgagccatggatgctctttctagctttgaatgttttcatgaatgtgtttattgcctatagaatagcaatggattctcaatgttcatcatttccattgtggaatccctagccttaaatttgaattaa

SEQ ID NO: 40502 - DNA, 399 bp, Gossypium hirsutum
  Clone ID: LIB3149-043-Q1-K1-B3
atctgcgtccatgcatatcttgtgagaagatcgctcaattagttctcctatggtgggttttcgcataaactttgaagatcgccatacagaagcgaccaaaggtggttgaaacttggtcttgagtcgtcgagaattttttcctttcgggaaaagggattgtgtgtgtcgaacaagatcgatcgactttgagagcgaaatcttctcgagattcttgaaattttggaaatttatagtatcttttaaaaagattttcaagctttgatttctaatcttttaaaactgtgtagaatggtgtagaggatgtgtttatatggtgccaatgagttgaaaggatatcctaatttgtggaacttctaatacaattgacttttttaaataaaaaagggatttatttttatt

SEQ ID NO: 40503 - DNA, 231 bp, Gossypium hirsutum
  unsure (1)..(231): unsure at all n locations
  Clone ID: LIB3149-043-Q1-K1-B6
gacccgcgcgtccgacctttctacanactaatttcatataaacttttttttatgaattctctacatccccactggctcgtttataaataaaaaccggccgcctacccatccaaaactatcaaacacaacatcttccacaacttccatttctctctttctnaatacttatttttaacacaatctctcaaaatcttaaataattctatattaaaaaaaatcaaaaaataaatt

SEQ ID NO: 40504 - DNA, 318 bp, Gossypium hirsutum
  Clone ID: LIB3149-043-Q1-K1-B7
ggcgcaccggaatattgccacgccaacttcacaaaatatttcacgagcagtttctggtcggccgaacggttttcagggacattcaaagggaggaagccgtgctatttcaatacgggggtgatggtgatagatctggtgaaatggaggagggtgggatacacgaagcggatcgaaaggtggatggaaatccaaaaaaaccgatcggatctacgagctgggttcgttgccgccgttcctgttggtttttgcgggacgcgtggcacccatcgagcatagatggaaccagcatgggttgggtggtgacaacgtgaggggaag

SEQ ID NO: 40505 - DNA, 358 bp, Gossypium hirsutum
  Clone ID: LIB3149-043-Q1-K1-C3
accatatgctcattggctggaaattttgatccttgggattccatcttttcttgggcctgcaattgctccgggacatatgatcacattttggctttggatagctttacggcaaatcgaagcaatagagacacacagtggatatgatttcccctgggcacccacaaggtttatcccattttatggtggtgctgattaccatgattaccatcattatgttggagaacaaagccagagcaactttgcttcagtttttacttattgtgattatatctatggcactgacaagggctatcgataccataagaaggtcctaaggaagttgaaagagcaatctaaagctaatggtgctcagaatggg

SEQ ID NO: 40506 - DNA, 380 bp, Gossypium hirsutum
  Clone ID: LIB3149-043-Q1-K1-C6
atacacttactttggttgcagtcaagagaccattccagaatttgtcaagaaccccattatccctaagtatccagatattatgattgctaaacttggccctggacaggaaattgaactggaagcacatgctgttaaaggcattgggaaaacacatgcaaagtggtccccagtggccactgcttggtatcggatgcttcctgaggttgtattattggaagatatcgaagatgaccttgctgaagaactcaaaagcaaatgcccagttaatgtgtttgatatagaagatcttggaaaaagtaggagaagggcaactgtagcaaggccacgtgcgtgcacactttgcagagaatgcataagaagtgacgattgggaaaaacgtg

SEQ ID NO: 40507 - DNA, 207 bp, Gossypium hirsutum
  unsure (1)..(207): unsure at all n locations
  Clone ID: LIB3149-043-Q1-K1-C7
cccacgcgtccgatcaaagttcaatatctatagaagacaaattagagtgacacttaaaattgtctcatccgtacataattgacatattcttttaccattaaacacttctttgagattttagttnaaaaaaaaaaaaaaaaaaaaaaaaaaaaaaaaaaaaaaaaaaaaaaaaaaaaaaaaaaaaaaaaaaaaaaaaaaannnaaaaa

SEQ ID NO: 40508 - DNA, 379 bp, Gossypium hirsutum
  unsure (1)..(379): unsure at all n locations
  Clone ID: LIB3149-043-Q1-K1-D10
cgggccgaccgcacgcgtacgcactgacaaagtttttaatcttatcttttttttgatcgacgctcaaaangaattagggggtgtaaatctataagagagggacgtcatcacacaacagaacatgtatgcacatttgctacctcattcctttgcctcaccttctatgccaggcttgtgatgttcccctacattaccatcaccaccacccatgagacgaatgttaattccttcaatgccaactattaatattccaccaatgggcacctattaagtcataacatgtctgttcaatttaaacattttaactttcagttcaatgccactctatatttctgctatttataacgcttatattccttttcccctttttcttttttat

SEQ ID NO: 40509 - DNA, 243 bp, Gossypium hirsutum
  Clone ID: LIB3149-043-Q1-K1-D12
attcttttaactactgccttttctaagtttgaaacgcactttctcctggagtggccttctttcaactcagggcgggactaccaaaatttcttacctatcacatttatccatttgtttatcacatcttttctcactattgctctttcttctcttctgtttaaacataatttaatccattactttatattctttatcacttacttccttatgttcaattttttgttctcttaaccaaaaaattta

SEQ ID NO: 40510 - DNA, 348 bp, Gossypium hirsutum
  Clone ID: LIB3149-043-Q1-K1-D2
gtgagctctcaccaatggctttcaaagctctgctgctgttactattggccacttttctggttgtgcaacaacagttgcttgcaatgaagtgggagtgaagactgagattaaatatgctgctcctgttccagtgaaggcacctatccctgctccacccgttaagcctcccaccactccggtgccgccgtacaaggctccaactccagcacccccaactaagggccccactccatataaaccccctaccaaggcccccactccaccatataaaccaccaaccaaggcttcaactccaccatttaagcccccagcaccagcaccaccaaccaaagcttctacttccccata

SEQ ID NO: 40511 - DNA, 386 bp, Gossypium hirsutum
  Clone ID: LIB3149-043-Q1-K1-D4
gaatatgatgatatagcaatgaaatatctatcctatgtgctcttcttccttgttgcatgtgtttgtgtttactctcttatgtatgagcgccataagagctggtattcctggattctctcttcactcactagctgtgtatacatgtttggttttattatgatgtgccctcaacttttcataaactataagcttaagtctgtagctcatttaccctggaggcaaatgacttacaagttcctcaacaccatcattgatgatctctttgcattcgtcataaaaatgccaacacttcatcggctttctgtcttccgtgatgatcttatatttttaatctacctgtaccagagatgggtatatcctgtggataagaaacgtataaatgaatt

SEQ ID NO: 40512 - DNA, 317 bp, Gossypium hirsutum
  Clone ID: LIB3149-043-Q1-K1-D5
aataaactcaagtacaaaagaagccattgaacttcctgtgtcttcatcaggagttgaatggagtgcagaaattgtgtattcctgtgtggatggtgaacaacatcgtgatagggatgctgagctggaagttggtgaggaccttattagccacaacacgcatgatgagcgcatgaatgaagttgagttgtggcaacaactagagcatgagctttacgataaagccgaagatgatgagggtgatgttgttaaccaaataaggaaagaagaagcggcagccattgcaaaggttggaggtgagggacagtcggatacttcag

SEQ ID NO: 40513 - DNA, 360 bp, Gossypium hirsutum
  Clone ID: LIB3149-043-Q1-K1-E1
gaaaacaacaagctacctcatgactttgacagaaggggaaaatgggtgaatgcttctcacttctgtaagctccttgtcgaaccattggacatcgcggattattaccgaactggtatgcaccgcgagcgtgggcactacattgagcacggaagggaaaggaggtatgaagttttcgacaagtggtggagaagtgttccagaggaagaaaacaagaggagcaaatttgccagcttgacacaagattcatgcttctgggccagggtagaagaagcaaaagaatgtctagataatgtgagaagtgagaaggatgcaacgaaacgacagcagttgtggcacaagatcgacaactttgaagcatat

SEQ ID NO: 40514 - DNA, 309 bp, Gossypium hirsutum
  Clone ID: LIB3149-043-Q1-K1-G3
ctcaggaaaagatcgatccatcagaccatttctcttacaaaaggttttgaatttctaatcggtcggaatatatacaagctagctcggaccaaccactaactcaatacctctcaccttataaaccaaaacaccatctgaagccatatcaatcctctaccgtgtactataaaattctgcatatactacacatgctatacctattaaatagcatgccataacaaatctatctgatcttcttatacaagagaaccgaacagaagaactcagaatccttcttacccaacttatgccctattttgcactaattcc

SEQ ID NO: 40515 - DNA, 148 bp, Gossypium hirsutum
  Clone ID: LIB3149-043-Q1-K1-G4
ggaaaaaaaacaggaacctgatttatgttccttggctttactatttgcgtgttaagatgtgatcggtcatataattatgtcggctggtatgatggattggttttctttttgctcaatttgtgttaatatagcacttgttttcctattt

SEQ ID NO: 40516 - DNA, 358 bp, Gossypium hirsutum
  Clone ID: LIB3149-043-Q1-K1-H12
gttgtactctggtgaacctttgggtgataccaagcttcctctggtttatggtggtgattgtggtgacaggtattgccatatgggaagcctaaattcatcaaaagttgaaggcaaaatcgttgtttgtgataggggagggaatgctagagttgaaaaaggaggtgcagtgaagcttgccggtgggttaggaatgatactagaaaacactgccgacaatggtgaagaactcatttccgatgctcatcttatcccagctacaatggtgggtgaggcagctggtaataagatcctggaatacattaaaacaactcagtttcctacagctacaatttcgttccgaggaaccgtgattggccct

SEQ ID NO: 40517 - DNA, 381 bp, Gossypium hirsutum
  Clone ID: LIB3149-043-Q1-K1-H4
ctattgctccccagttgaaaaggtaatccatccaattcatgaccaatcgttttacctcaccatggagcacaaaaggaaattgaaggaagaatttggagttgagccatggacattcgaacaaaaccttggagaggcagtttttattcctgctggatgtccgcaccaagttaggaatctgaagtcatgcaccaaagtcgctgtggactttgtatctccccagagtatcaaggaatgcctccgattaactgaggagttccgccaactaccaaagaaccatagagccagagaagacaaactcgagatcaacaaaatgataatttatggagtagaacgggcaattcgagagttatcagatctaatatcaaccccaaattgagcccc

SEQ ID NO: 40518 - DNA, 231 bp, Gossypium hirsutum
  Clone ID: LIB3149-044-Q1-K1-A5
gccggccaaccctttattcccgatccaaaattctgtctttccgcagccgttttcgtttatggcgcgactgttccggctccagggcgtaacagaatacggacaatgccaatctattaggaggatggcaacaatccaaacacatcgttttcattttaccaaggatcatgaatgcagtttggatcagatgggttcgcggcagatattctggatactggtgtagggttatagata

SEQ ID NO: 40519 - DNA, 286 bp, Gossypium hirsutum
  unsure (1)..(286): unsure at all n locations
  Clone ID: LIB3149-044-Q1-K1-C4
ncttcatacatcttatttttttaccttaattataacaaccncanacaaaccaaggggacgcgaacatataaaaatggcgtcgcaccaaacaaaataaatctttttatttaaaaaaaactcaacattaaaaatcctatcatcaatgcctccctctctaaaatatccaatcttacttccccgttcattcaactttatctctcttctataatatcacctaaaattcatttcactctccctttctttacaacttcttaactttaaaaacccttccatttcccaacctaat

SEQ ID NO: 40520 - DNA, 219 bp, Gossypium hirsutum
  unsure (1)..(219): unsure at all n locations
  Clone ID: LIB3149-044-Q1-K1-C8
ggggccgaccacgcgtccacatttaaattccgccttttttttatacgtcntactcacaacacaacncangggcnaattgaaaatctatctcggtcttagaaaaacacatacattcctcattctcacaaaaccataccatctttaaacctaatatttcctctaacattaatccctaccaaaaactttttcatcattacattctatacttcttcattaaat

SEQ ID NO: 40521 - DNA, 421 bp, Gossypium hirsutum
  Clone ID: LIB3149-044-Q1-K1-D8
gccgccgatttgcttttgttaccatgaaaaccgtggaggatgctaatgcggcaatcgagaaactaaatggcactcaaattggagggcgggagatcaaggtaaacatcaccgaaaagcctctggcacaagtggatttgtctctccttcaggcggaggattcccagttcattgatagcccgcataaagtttatgtgggaaaccttgcgaagacagtaacttcagagacactaaagaagtttttttctgagaaagggaaggtaatgagcgccaaggtttcacgggtcccggggtcctccaaatcaaggggatttgggtttgtatcattctctttagatgaggaagttgaagctgccatcaattcttttaacaatgctatgttggagggggaagaaattcgtgtaaacaaggcataaaatgcgga

SEQ ID NO: 40522 - DNA, 287 bp, Gossypium hirsutum
  Clone ID: LIB3149-044-Q1-K1-D9
ttttaatcctttcttctctttctcctgtgaacattgattggagattttaaaaaaaaaatggtgtataactcttcagtcctgcaaatattcttgattcatgtaaattgaaaaagaaaaaaaaccataggttcagaattcagatatggggtttactttaatttagtgtaggggggatccaatgatgatattaatagatgttttgtcagttcaacttcatttgtattttggaagacatagaaaatttcaatctgatgttcctactatatatatatatatttatttttacc

SEQ ID NO: 40523 - DNA, 340 bp, Gossypium hirsutum
  Clone ID: LIB3149-044-Q1-K1-E12
aaaaccggccgacccacgcgtcctctcactcataattattttctcctttttatttaacccatctacaatatctccccaggatgtcttaatataaaaaatcccgcgcacactaatctcaacaatcttatctctctctttatttcttcctttacttcatcttttaaatattactatactttcaatctttatctcaatcactttcaaaccaatttactcccatcccctataatccatttcatattttcttcatatccaccatttatttcatcttaaaattcttaccataatcaactatcactttcataaatcacaatcaattcattacatccatcttcaatca

SEQ ID NO: 40524 - DNA, 271 bp, Gossypium hirsutum
  Clone ID: LIB3149-044-Q1-K1-E2
attttattatgttcaatacttctttcagattttcgcacaacacaccagcggcatgggattcatattactacattattatttttgagaggtttttccctcataactcttcaagattgactgtccctgcaggaactattttttcatgcatcacatctaaaactttttagtgttacacttccttgaaaaacaacctttacccttcaagccagactgccttgatggttcatctctcaacttattacgcaaatactcccctcaacaacaaaccatc

SEQ ID NO: 40525 - DNA, 338 bp, Gossypium hirsutum
  Clone ID: LIB3149-044-Q1-K1-F11
cccacgcgtccgggcaaagaagcagaatggctggcgtgtctaagcagcgatcaggcagtgttgttattttttttttcaaaaaaagaaaaaaaaggaaaagaaaagagtttgacataaagaaatgtgtaaaggatattaaatatgatggaataaaatagagtaggaaaaagacatttggttctggtgctgctgattttctgaagaagttttggttgagagtttggatccttgtagcattctgaaccaaaactcagcaccaccagaacccgagaacctaatccctaaaaaatgcgttttgtccctgtagtatgaaataaagcattttgatccttcatagt

SEQ ID NO: 40526 - DNA, 252 bp, Gossypium hirsutum
  Clone ID: LIB3149-044-Q1-K1-G11
gacgaagttcgatttcactcacagctgcaccagagcatttaagtcaaggttggttgtttgtcaaagggaaatctttatacctcccaaaagcaaagtttgtttcgagtgtttttcatgaaatttaatgacatatgaactgggagatggatggtacatgatattatttatgtatggtattgtttattcagtacattttcattcctttaagggactaaaccttaaacataaaagccaaacatgacttaaaagacg

SEQ ID NO: 40527 - DNA, 350 bp, Gossypium hirsutum
  Clone ID: LIB3149-044-Q1-K1-G5
gcaaagtggattgcacgccttgtctatagtggcaaaaacaccgtctgaagttgaagcaaaatgaagggatgtgtttgtcattgttgtgtgactccaaagccttgcttgttaatcatgataaattaagtgaagattatgtcttgagccttgtggtagacagtttatgagtgaacattgagggactgcaaagtgtcttgtaggtaaagaaagaaaacccattatgttaaatcgcatttagcattcatcttttcactctattgtaaaagttatgttgctcccacttgttactatttctacccttgatttttcctcaccattaaatcagaggttaagacatacttaagctctcg

SEQ ID NO: 40528 - DNA, 294 bp, Gossypium hirsutum
  unsure (1)..(294): unsure at all n locations
  Clone ID: LIB3149-044-Q1-K1-G7
cctattcaaataacacttttaatttctagttataaaaccacaccctcaanttaaggccctgcgaatatataagagggccaggggctcaaaaactaaaaaaccttactatttaataataaaacactaaactctttatccctttattcatcccttcatatcaaaatattatttatctaatatttctatcttcttaatatatctcttttaatctctaaataaacataaacccaattattttcaaaatccaacttaaccattcatttcatttcttatctaaatctaaaaaacttatct

SEQ ID NO: 40529 - DNA, 371 bp, Gossypium hirsutum
  Clone ID: LIB3149-046-Q1-K1-A10
tttaatcttctcttcctacacttttaatccttatcttcgctaacacccttacgggcaataccataaacctcgaggtccaaagactcaacccgacctactacgttaagccgaaaatcctatactaccacgggataccaccaaaccaacatcttctcatgtttgcctcaaaacaactgaacgacctccgcaccttgaaccattacaacatacaaaaccattccacccttcatcttattatgcgtctacttgcatatcttcaaatcttcacctaaacgctaaacctctagtccataactctaaaactctaacgctattaaacccttgacagcctaaatgccataatccgacaccatgaatgcatcccaccatac

SEQ ID NO: 40530 - DNA, 254 bp, Gossypium hirsutum
  Clone ID: LIB3149-046-Q1-K1-A11
tggcatttcatgtatcagcttttcggatgccaatggcactactgacgtttagggtctttagctaagacgtcggatgattatgttcttacctgttcaatgtcataattgtcacttttcggctcccggaagggatcccaccaaaccaacaacgtctcatcttcgccggaaaacagctcgaaaagggccgccccttagacgatcacaacttacatacggaggcctccctccatctagctcttcttttacgtgaccta

SEQ ID NO: 40531 - DNA, 413 bp, Gossypium hirsutum
  unsure (1)..(413): unsure at all n locations
  Clone ID: LIB3149-046-Q1-K1-A6
tcgcaaaatgtagtagttgaggggcttttttagtatagcctattttttaaacaaaatattatgtggagaactaagggaacaccatgggagtgttcaatgctctgttgttcagactccataataggtagagcacttgtgtcaacacaactcaaaacagatatttgtacgggatctgtgttggatnctctagggagatggcaaaaaaagatggattaaagagaataaaaataacatgagaaggaagattggaaaagcattgaaatgcacacaaaaagaggcaaaaatattaaaaaattttgggttggaaattgcattgaaaagtcaaaaactttaaggctcaaatacatgaatactggttatcttgtttcttacacccatgaacttgtcgntttctattatccattttggtttat

SEQ ID NO: 40532 - DNA, 283 bp, Gossypium hirsutum
  Clone ID: LIB3149-046-Q1-K1-A7
aaaccatatatatcctgtagtttatttctggtctgtagaactagccttgggttcatttgttcttgagaacaggatttatttatgggctggtaatcggcttcgaaagttcttaggcttcattgattcactttaagtatacagtttactcgagaatggagtgtttgaaagttaatttagaatttgtgttgattaaaaaaaaaaaaataaaagaatctataataataatcatcatatacaagtcaaaatgataataattaataggtcggctcttttggaggaccct

SEQ ID NO: 40533 - DNA, 224 bp, Gossypium hirsutum
  Clone ID: LIB3149-046-Q1-K1-B10
ggataaggtacaagaatctttttaattattttagggaaagaaagaatacaaggatgacagggggctattgagaggaaaatggaacataatataatcgatgttgtctataaagctgaagaattataagagggaatgaaagaaaggaatatagacaaagaggcacaggatattattatcaaattaccaaagccgtattgtcatattgcttaaatacaaattggcaa

SEQ ID NO: 40534 - DNA, 304 bp, Gossypium hirsutum
  unsure (1)..(304): unsure at all n locations
  Clone ID: LIB3149-046-Q1-K1-B7
aaggcaagcctgaagacaanaaaaaattttcttcgcggtttttgtcacggtagtgtgggaggtttacatgggttgttttgcttgtacaatggaaatcaataaacttattcaaagaatgaaaggggtggaatcagcttaaccggatctaaagagctcataggtgacactgaaaggagtgtttgaacctccaaaactggtgtaattcgtctacagaagaacctgtaagactgccgtgatagacaaactatacgcggacacacctaacactgaagaagaaaaagccaaagatgccaactacgaccag

SEQ ID NO: 40535 - DNA, 387 bp, Gossypium hirsutum
  Clone ID: LIB3149-046-Q1-K1-C11
gcgtcttcaaaaatttcagagctttctttgttgtatgattggcggagttagtgaaagactatttatgaaaaaaaaaaaaaaaaaaaaaaaaaaaaaaaaaaaaaaaaaaaaaaaaaaaaaaaaaaaaaaaaaaaaaaaaaaaaaaaaaaaaaaaaaaaaaaacaaaaaaaaaaaaaaaaaaggggggggccttttaaaaaaacaaaatttaactacccgtgcattgaaaggaaaaattttttttaaggggccccaaaattaaattccagggccggggttttaaaaacgtggaaatggaaaaaacctggggttaacaaaattaaacggtttgaaaaaaaatccctttttgccaatttgggtaaaaacaaaaaagcccccaccaaatcc

SEQ ID NO: 40536 - DNA, 314 bp, Gossypium hirsutum
  unsure (1)..(314): unsure at all n locations
  Clone ID: LIB3149-046-Q1-K1-C8
gcccgagaaaacnggaacggcccacgcgtccgcaaagccaancctctgttttaagacccggtttataaccaacataccaaggtcaaaactatggggggcacggggaacataccaaggagatnaccaatgacttatacaatctttcaacaaatatggtgaagttgatcaaacaacaataatcgccgatcgagatacagccaggtctacaagatacgtatatgacccctacacaactactgacgatgcttcaattgcacttcatgcctaggataaacacactcttcacgtccttcaagtaacagttaactatacaa

SEQ ID NO: 40537 - DNA, 233 bp, Gossypium hirsutum
  Clone ID: LIB3149-046-Q1-K1-E9
gtcgccgcggcgacatggccgtgcaggtcgcacgcgaccgctccgaccgtgccgtgcttgcggtccggatcgagcggttcggccggctgcgagtgcgcttgcgatttgccgaacgcgaacgccgccgcatcgtggtcgagcatcgtgccggccgtcgcgcgcgccttgacccactgcgcgtgacgcgtttcggtgtcgaagtagccgggctccgcgagttcgagcccctgcgc

SEQ ID NO: 40538 - DNA, 370 bp, Gossypium hirsutum
  Clone ID: LIB3149-046-Q1-K1-F11
caaatctattgattatcggggctcgaacctgcccagcggagggacaaatgatggtgcattgtggatagatttgccaggagataataatggaagagataatgttaagaaaggaaacttggagagtgcagagctatatgttcatgtcaaaccagcagtgggtggaacatttacggatattgtgatgtggatattttgtcccttcaatggaccggccaatctcaagatcgggttaatgaacatacagatgaacaaacttgggcaacatgtaagtgactgggaacacttcactctccggataagcaacttcacaggggaactgtggcaagtttacttctcacagcatagcggtggtgagtgggttgatgctttc

SEQ ID NO: 40539 - DNA, 307 bp, Gossypium hirsutum
  unsure (1)..(307): unsure at all n locations
  Clone ID: LIB3149-046-Q1-K1-F12
aatttattgtttttaaattttagcaaaaagggacaaatatgtgtncatgaaactattcctaaggcacttgccctaaattatcaaattatcttcctaaacaaacactactgccttcaaaaatcatattgaacagctccacatccaatacccttacaaccttatatcattaaccaaattcaatgtcccattgtcccatatcattatttctaatgattattacatttttctccctattaaattcaaaccatcccctctcattcaacttcatactattcaatatccaacacttccaattactacctctact

SEQ ID NO: 40540 - DNA, 363 bp, Gossypium hirsutum
  unsure (1)..(363): unsure at all n locations
  Clone ID: LIB3149-046-Q1-K1-F3
ccgggncgagccacgcgtacgggaaagacgaaccaaccgaacgnacncccgctttcaaccgcagattcaacatataatgtcaggtaaacataattggaccgccgcgatattacaaagtctacaactctaaaaccccagcgctacccactggaatcatccaggaaacattcttctctagctatgctcctgaatagctaatcacaaatggcccagccctctcatcaaacccaactcacactgaacggagaataataatcaccacttatcgtgacactaacaactacaagagctcgctctacgcccactgtcacagctacaaaaaccaacgcgccaactctctatccaagggagctcgagctaaca

SEQ ID NO: 40541 - DNA, 412 bp, Gossypium hirsutum
  Clone ID: LIB3149-046-Q1-K1-F5
aaaaaagcatggcaaagagtgatgggaaggtgaaagtaatgggaagatggcagtgcccatttgcgatgagggcaaggatcgcccttaacatcaagtctgtcaactatgagttggttgaggcgaggccatgggatggccaaagccaggtccttcacgaatcaaagtcaaacccagtcatggttcatggtgataagtccatctgtgagtctctcaatattgtcgaatacatcgacgagatttggccttatgctccctccattgttccttctgatcctcttgaacgtgtcactgctcggttctgggctggctatcttaaagaccagtggtttccttccttgaaagctattggtactgctgaaggagaggatacaaggaaagcagcaataaggcaagtggagaaagggttagtact

SEQ ID NO: 40542 - DNA, 374 bp, Gossypium hirsutum
  Clone ID: LIB3149-046-Q1-K1-F7
aaaaagagccttctctacttttatgctaaccttttccataacgaaatatggggttaaatatgtgggaagacgggaaagatcaaacgtccatataatactttaaatctgattgaggaggggcaataacataatattgccaatgccatcgcctttatgagtgtaaacataaccactgcacagtttatcaaacttgactcttacgataatgtctcaatatagaggaatacctctaccctaaacctccttaatcatcctacatttgaacttattatcacttctaacatagctctcactactgcagaatactttacatatgaatccactaatcacgtacttgtgatcctatcatacatgataactatgctaatcctcta

SEQ ID NO: 40543 - DNA, 268 bp, Gossypium hirsutum
  Clone ID: LIB3149-046-Q1-K1-F9
gagacttgacacaactcaaaattatgatcctttttagaacaagaccactcagacaatcaggacaaatagctgtgggacctgagaatataaacatgcttgaatgcattacactaatgaacttaattgttcagataaacaaacagaacagcgggaccccgatctgatgaaaccagacaatcagacgcgaccctgctacgctatacggctaatatgacaaaatcaacatccattccaccttccaactctatacatcacgcgaacagggaaa

SEQ ID NO: 40544 - DNA, 406 bp, Gossypium hirsutum
  Clone ID: LIB3149-046-Q1-K1-G5
ggaaaacacccaagattcttaaatttaatcgtctgtattgataaccaaaagaatgaggcatcggggactggaatcaaagccattgtcagcactgtgttgcttggagtcgaacaggggaaaactagttcaacagggcctaatcgacgccctggtaacatatattttaaactcagaaaggagcttggcagcaatggcaatggcgatactagagcaagttttggggatagaaagagcaaaagaagcactgataaagaacccaaacggtgtgaaagcagtggtgaagatggtattcagggtatcagatcacgaaggaagtgaaagtgcggttaactcattgatgatggtgtgtcgggaatcattggaagcaagggaaaaagctatagcagctggagtttaacacagttgc

SEQ ID NO: 40545 - DNA, 365 bp, Gossypium hirsutum
  Clone ID: LIB3149-046-Q1-K1-G9
aagaaatgttactttagtgaaattataggcttcaattatttatttaaaaaaaaaaaaaaaaaaaaaaaaaaaaaaaaaaaaaaaaaaaaaaaaaaaaaaaaaaaaaaaaaaaaaaaaaaaaaaaaaaaaagaccaaagcataaaaaaaaaaaaaaaaaaaaaaaaaaaattaaaaaaaaacaaaactaaattggacggtggtaaaaaaaaccacaataccgaaaaaactaaaaatactgaaattaagaaaacttaagcgtgtttcacaataaaaaggttggcacaaatcgccctattcaaaaaaggcgcacacttaataaattttgcaacacacgcttatataaagagacaatcaatccaggtgt

SEQ ID NO: 40546 - DNA, 325 bp, Gossypium hirsutum
  Clone ID: LIB3149-046-Q1-K1-H2
ctcaaccattttatttataaaaaaaaacacaatgattaaaggtttacttgtcgctcccatacgtaaggggactaacatgtgattactcgtctgaagagttggtgattcttatcgtttgcgactagatgggcgcattctccagataccaaaccacattcccgatttgaacatgtacgcatgcatacatactatatccgatcatcgtggagctcgtatatgtactagattacatcttccgcatggcttaagttcatgaacataacgactagttttaacgatgtagactttctttagacattgcatatcacatggactgtttccgata

SEQ ID NO: 40547 - DNA, 313 bp, Gossypium hirsutum
  unsure (1)..(313): unsure at all n locations
  Clone ID: LIB3149-046-Q1-K1-H6
acaccgnggaacacctgctgactcaccaagatgatgttgcgaggttgatgaaaatggagaggagatcgggaatggatatccatagcaagcggtggtttccttacttggataggtttaagtgtgggagtgagtccctaaacagcagggaggttatagaggcagtcgcacctgtcttgatggaggaaaggaaagaaaggttgaagagggtggttagaaataggagctattcagtttgcttggtggtggaagggctgtgcgatttcggcaatgtttcagccacgttcaggtctgctgatgctcttggcttgcagtc

SEQ ID NO: 40548 - DNA, 421 bp, Gossypium hirsutum
  Clone ID: LIB3149-047-Q1-K1-A2
gtgagttcaaatttaagcatgtgaaaaaggcagtagcatcttcatgtcaaattttctataggattttcccccccttttttaaacagatgaattcaagtaatggaaatggatccatgtcgactgctagctcaagcggtgcttggaacggtagagatcaattccctgctggtttgcgtgttctcgttgttgacgatgatcaaacatgtcttatggtctttgaaaaaatgctaaaaacctgcttatatcaagttacgaaatgcaacaaagctgagactgcattgtcggtgctacgtgagcacaaaaacgagtttgatatcgttatcagtgatgtccatatgccagacatggacggattcgaacttctcaagcatattaattcggagatggatctccctgttatcctgatatcggcagatgctag

SEQ ID NO: 40549 - DNA, 245 bp, Gossypium hirsutum
  Clone ID: LIB3149-047-Q1-K1-A7
ggaaaacccgaatatggttatatctgcataaacaggttggatgttatggaattcctggagggttttctattatataggtctgtatggtggagaattaccatgtttaggctggttgcttcttactgtcttttctgatgacctaatgtatgtcattggtactctctgcattcttagatatataattaaaatgctaaaagtttgtgttgaagtttgatcgatttctgtaattccatgtctctgtgttc

SEQ ID NO: 40550 - DNA, 215 bp, Gossypium hirsutum
  Clone ID: LIB3149-047-Q1-K1-A9
actacatctaaatctatgacggcctacctattttttttcgatgtacaaaaaaacgtgtgcttttctatcccacttcatcgtaacaacttcctacatcaccccctcaaataccaccctacccattgtccttcaaaacatctccataaaatagtctacatgacctccattatatcttcttctctttcatctgctttccaacttatcacctagattct

SEQ ID NO: 40551 - DNA, 285 bp, Gossypium hirsutum
  Clone ID: LIB3149-047-Q1-K1-B10
gctttctggaattgccaattccatggaaactgttttgaagggcttgaaagatgggttgtcggctttgcatgttccttacgcttatggttttgcaattatacttctgactgtgcttgttaaggctgctacttttcctttgactaggaagcaggtagagtctgcaatggccatgcgatcattacagcctcaaataaaggctattcagcagcggtatgctggagatcaggagagaattcagcttgaaactgctcgactatataaactggcagggataaacccattagc

SEQ ID NO: 40552 - DNA, 178 bp, Gossypium hirsutum
  Clone ID: LIB3149-047-Q1-K1-B11
gccacctattcgttaacataaagacgctactgaccctaaaggacttttggagtctgcggcgtttcataacattacgtaaatagatcgtgttactgatactgacaaagacaatatccacttcgaaggtacccatgaacattaacacgaggcctgatgaaagcatataaggtgccgacga

SEQ ID NO: 40553 - DNA, 341 bp, Gossypium hirsutum
  Clone ID: LIB3149-047-Q1-K1-B4
gtgaaaagagaaagcttatagttgaaatactagtcagaatgtgttgattttttatgtataagagtagaaaaactcgttagtgttcatagacattggacatttatttgatatcttttcataagcttcgatacgaagtaagttttcctaaaaaaaaaaagaatctgaccaaaatacaacacaaaaataataagagaatggaaaaataaatgcaaaaccctattgagtacgaaaagaaaagagaaaaaggttaataacaaaaggggggggcccttttaaagaccccaggtttacctaccggccatctcgaagtattagctcttattagggacacctaagtccat

SEQ ID NO: 40554 - DNA, 379 bp, Gossypium hirsutum
  unsure (1)..(379): unsure at all n locations
  Clone ID: LIB3149-047-Q1-K1-B8
gtaaaatatacttatattttgacctttttttatctaaattcggatccgatcctgtacatgggcatttgtttaatggtgaggaggcctctaataancaaatggtcttacttctcgttgacatgagtaaacaaacttgtaatataactgatgcaactcatatcccttgtaatgccatcttagtggctaataaagagcttgtttctcaaaataagttatttgttaccaatgcacagttctgctataattatcgaattcatgatctgataattgaatgtgactcgttcttatttgaactatccttgccttataattcatgtcgatggaaattcttttatacaactgaatctgttgcttattaagtccaaatttaaccttacca

SEQ ID NO: 40555 - DNA, 210 bp, Gossypium hirsutum
  unsure (1)..(210): unsure at all n locations
  Clone ID: LIB3149-047-Q1-K1-C10
gtttattgctattctataggcaataaacacattcatnagggggggcaaatctagaaagaggatccatnnccaaagatttgaaggaaccttgaaggaaattttgggaacttgtgtgtgcctcggtgttcggttgatgggaaagaccctaaagacctgcaggaggaaatctctgaaagggaaatcgatgttcccttggaatgaaaaacaaag

SEQ ID NO: 40556 - DNA, 286 bp, Gossypium hirsutum
  unsure (1)..(286): unsure at all n locations
  Clone ID: LIB3149-047-Q1-K1-C12
ctaaaacaatattgtacttcagcagtagactaactttngggagtcaccatagaggttggaggtctaattacaanatcaaaaaaatatcgaattaaattttattgagtctactttctcatagaagaaatggtgtaagcaatggatttgtaaatttcgagatataatgaattttgtgagacaaggtcagaatgatttctggttcccctgttctgactttgaaaaatcataaaaaattgaagaaaaataattatgggattaaatttatatttataaaatcctgaatgag

SEQ ID NO: 40557 - DNA, 322 bp, Gossypium hirsutum
  unsure (1)..(322): unsure at all n locations
  Clone ID: LIB3149-047-Q1-K1-C6
aatatccaaactttcttacccgttttttctacaacataactcctctcttntaccgaagaatttctattaatctaaaagagagctttacaacantctaacttttaaaaccctttcatcacccaacttaattccctttcaacacatccccctttctccaactttcttaatatcaaagaaacccccaccaatcacccttcccaacaattacacaaccttaataaccaataatacacccccttttatctctcattaaactcatctaatagttataattacacacatcttaaccactacactttccacctccctaacaccccctcct

SEQ ID NO: 40558 - DNA, 256 bp, Gossypium hirsutum
  Clone ID: LIB3149-047-Q1-K1-C7
gctaaacaggcccctagctggccctctctttcttgcaacttgctgcccttcctaagccggcgcatggattttatgcccgggccgtctctaaacaacatcccgactcactcctccggggcctcaccccaccatcttgaactacatccgattccccttatacctcctggcctgcctgctaatataccaagaccgatcatgcttcataacacgatgcgcattgctatccgctgaacagtactcccagtttcatccatct

SEQ ID NO: 40559 - DNA, 181 bp, Gossypium hirsutum
  unsure (1)..(181): unsure at all n locations
  Clone ID: LIB3149-047-Q1-K1-D10
tgcctattcttatcttattatcttccatttctatnataaaggtgaggaatccaaggtaggtgtcttcttcccttgatcctnctattccatacaaataacattttttctcatttgcccacatttttgcatattttaatgacactttcattcatatcacttttttatctggaagataaacttt

SEQ ID NO: 40560 - DNA, 371 bp, Gossypium hirsutum
  unsure (1)..(371): unsure at all n locations
  Clone ID: LIB3149-047-Q1-K1-D2
aaagcagactgtcatgaagctaaccttgagttttttgagtccatggatggtaatgaacaagagtctntctttcaccatgaagagagagtcttnctcatcacttcacaccattaaatggaatattcttacaatcaacaacctattactatcagaagaacagatacattttattttcctgattattataatgtacacagcatggaactgatggaactgttaaccatgagaaatgtgtctactcttcttcatacaggtttccatgagagccttgaccatatgtttcattcatacgtggaaatacaaaatcatgctcctgtttactagaagtttaaaagaacatctacttctactgcatctcttgaacaaaacct

SEQ ID NO: 40561 - DNA, 392 bp, Gossypium hirsutum
  Clone ID: LIB3149-047-Q1-K1-D4
aaaagaaacttaccaggattcccctagtaacgacgacgctccggcgacaccaggtaagcccgctttctctccctgctcgttgattttggctgtttggttaaaaaagaagcagatgaaatgaacagggtacatgaaataaaaacagtataagaacagagaaagaaaacaatatcccaccttcaaaaatgtttcttttcgcctattatctttttgatttcggtataaaaattctgctaaccccatttactaaaatccaattggctgtaatagccgagataagggaatcaaaactcccaaatactactgtcttttttcctttgttcccttgtatttactgctattatctgtgttcgtggtcacgatctgttgcatgtgtgggcgttggagatcgt

SEQ ID NO: 40562 - DNA, 422 bp, Gossypium hirsutum
  Clone ID: LIB3149-047-Q1-K1-D6
acgatggtcaatctgggaagccctgttcaaatagctctatccgttctagaagttcaggtcaaaatggggatagctatgctgggaattcgcctgatctgcttccacccacaaatcggttatctggtcaaactgctgttaaagatgactcatggtctaacagggtgaaaaagagagagttattgttggaggatgtagttggtggtacttctttgtcaagcaatgcaaaaggtaagaggagtgagagagacagagaaggaaagggacatggtagagaggttttatctagaaatgggactaataagattgggcgaccagtgtccaatgttaaggggggaaggaaatcaaaagcaaagcctaagcagaaaactactcaactatctgtttctgtaaatggccttcttgagaagatgcctgagcaaccc

SEQ ID NO: 40563 - DNA, 204 bp, Gossypium hirsutum
  unsure (1)..(204): unsure at all n locations
  Clone ID: LIB3149-047-Q1-K1-E11
gcaggnnaccggnnccggaagtgtcgcgggtgcagacccatcgccgtccgagccttctctagttgttctcncatttcctgtttgattttagcctctggtagggttcctcgagatggtacggctgcgtccncnncttcctcatcnnnttcgtttcttcggtagagtgtagtgtgttttccataaaacccgaagaagcggtaattt

SEQ ID NO: 40564 - DNA, 288 bp, Gossypium hirsutum
  Clone ID: LIB3149-047-Q1-K1-E12
ctctcttgataaacttattacccaatattcatcacatcgtgggggtctatggggggaagtggctaaaacttcattaaacatcatctcccatggttaggtttgatctaaaccacgtttcatcaatattattcatcgcaatgggtacaagaaagctacactgctgctcagaagccaggtcaaaacttcttcaagcatgttttctgccaatgctattggatttacattttctgctaagatgcatataagtactcgacatgaatgcatctgacgaagcaacagatcaatccc

SEQ ID NO: 40565 - DNA, 182 bp, Gossypium hirsutum
  Clone ID: LIB3149-047-Q1-K1-E3
gttggtgttgctttgcatgtcagctgtgggagatcatctctatctggtgctctgtattgtgtgggtgagatgttgatgtagatacagtactttgcaggattaggatttccatgctgctaaaccaaattgttccatgttaaccattatgttaaggacataataaaaccataatgatttaattt

SEQ ID NO: 40566 - DNA, 109 bp, Gossypium hirsutum
  Clone ID: LIB3149-047-Q1-K1-E5
gtgggatacccttgcttaagaagcggcttttaaagcatacagactctgacgaaatataggaggcttttcccaatgatggagggattaaactatttctaaaaagtgcaac

SEQ ID NO: 40567 - DNA, 378 bp, Gossypium hirsutum
  Clone ID: LIB3149-047-Q1-K1-E7
aaacagcattggcatcttctgtaggcttgtaattgtaacttcccatatgtcaatatagaagaagctttttcaaagattggaggggatcacaatacacaatgcgcacagattttcaatgtatttgaggattcatacaaatcacccttgatcatcattatccttgatgacatagaaagactactggagtatgttactattgagccccgtttttcaaatttaatttctcacacattgttgtttcttctcaaacgtcttccacctaatgggaaaaaacttcttgtgataaatacaactaattatgtaagttttttaaattcaatttacacttattatactttttatttcacctaccatcttccttcatttaatacatataat

SEQ ID NO: 40568 - DNA, 208 bp, Gossypium hirsutum
  Clone ID: LIB3149-047-Q1-K1-E9
ctttaaaccaatgtttacttttacgatctatcttaatctggtggctttaagggagcggacgtgccttgaactctacatttaatcattacaaaatcttctacaacacaatttcttagtaatcatatcaatttctaattacaatttcaaacatgttcattacacaccgcgaccactatttgactctatcctaataactctctaaatatta

SEQ ID NO: 40569 - DNA, 286 bp, Gossypium hirsutum
  unsure (1)..(286): unsure at all n locations
  Clone ID: LIB3149-047-Q1-K1-F10
cgtatctggttttaattttctttgcatcttccctctcaggtggcttcactgatagggggggtctggatcnttgtactttacatcctaataacagacgaactgaacttaaatttgagcatcattttgattaaaacaaaccaaatgaagaggaaaagatgcattcttttgggtacagattaaatgatttgctaacatttgccgttactattctagcgctaatgttcgccatcacatgtctctcggacaacttcaacactccctctccctctgcagagatcaagattat

SEQ ID NO: 40570 - DNA, 286 bp, Gossypium hirsutum
  Clone ID: LIB3149-047-Q1-K1-F6
ctcccttcatctcatctaaaccctttttataccacacaaccatcctcatttctaaaagacctctttaaacaggacgagaacctcctatccccacctaaccattactatccgaaagatcaactttatcaccattcaatacccctcctccatcacctaacaagtttccaccttccaatacctataaacacaatcattccaacaatcactttcatttcaaccacatcctcactaacaataatttaatcaatactgttcactcctaccataactttattatttcctcata

SEQ ID NO: 40571 - DNA, 246 bp, Gossypium hirsutum
  Clone ID: LIB3149-047-Q1-K1-G10
gtttgctttgtatattgaagtttcctttctccattttctgtggatccaaacaagaggggggtcttcattaatactcttaccgtcctgacgatcactctccaggtctaaagctccaatacgatcgacatcgtgacagccaaaatccaaaataatgaatgcatccctccagaccaacatcgtctgatcttctcccgttaacagctagtatactggcggaccttggccgattacaacatccataaggag

SEQ ID NO: 40572 - DNA, 422 bp, Gossypium hirsutum
  Clone ID: LIB3149-047-Q1-K1-G3
gtggactccagtcgtaactgccggctacttgtacatcccgcatcgtaacctccatggctgcgatttctgtgcaataagctttgacaaagctcactacttcattgacttgttcgcgggccccttcatggtaaattttgttccgattataccaaatagcccaataggcaataactctaattttacattcttcattgttcagactattgaactccatatctaaccactttttccaatttggttcactattgtgtgatgatactgtcccccccaaccccttcaagacctgctgtgaaaagagacaatctttgaataggtggctaacagtttcctcctctgcttgacaaaccggacataaagttttgctgccaactttcgaagttttagattatataaagtagggatgtagttattagctattttcc

SEQ ID NO: 40573 - DNA, 223 bp, Gossypium hirsutum
  Clone ID: LIB3149-047-Q1-K1-H11
atctaattaaactttttttgactttctattaaatttatggtggtcaatggatgcagggagggcattgatattattccttcaagaatgacgttatctatcatattaaataactgtgatcaaagctgccaaaactataaattcttccaatttgcaatcaaaattcgtacttaatcctgttctctttactaattctatattttactaaacatccacctataaacat

SEQ ID NO: 40574 - DNA, 287 bp, Gossypium hirsutum
  Clone ID: LIB3149-047-Q1-K1-H2
acacatatgtcatcactcttttaagaaccaaactttctatttattgaaagtacactgttcataagccattctttatacggcataagatccctaaattctctcttaaatttgatcacgtcttcatatctattgatctttcttatactcaaaacttgaaacttaaactacatccccaattaaaatccttcttctttaccaaaactgtcacgtacaaaatcccctataaaaatgattttgatctacatgacataatttacatttttcgtaccaacactattgcttaaaat

SEQ ID NO: 40575 - DNA, 360 bp, Gossypium hirsutum
  unsure (1)..(360): unsure at all n locations
  Clone ID: LIB3149-047-Q1-K1-H5
tcctaaaaatcatcaaatcccatttctcttccttactttttttctttccttttcaacaattgcatcaaagactttttatcccaaattataaagatttcctcttctctccatcaatcaattcatactanttactctaaatcgttaattttaagtttaaaaaaaatagaccctcttattttatgttaatcaagttacaaataactattttctcatcttacttactatacctccatacattatcctcaccctatatcctaccctccacaaagatatcctcctcaattatatcccccaacaaaatacccaccatcttaatatcctccaccatcaatatatcctcctcatatcatatacccacct

SEQ ID NO: 40576 - DNA, 417 bp, Gossypium hirsutum
  Clone ID: LIB3149-047-Q1-K1-H7
gaaaaggatgagatttctgcaattaaagctggtctaagaaaagtgaaaatttttagagagagtgtttctaccaggggagcgaaaaaagcctgtcgtgaggatgaaggcagtgaaggaaggtgttctgccaggagtgatgatggcgagtatccattggacacagattcacttgacgattccgaggaaggagaatcggatgaggtaaaagatgactctgttgtcaggaagtcatttagttatggtactcttgcggatgcaaattatgctggaggatcagtttactctagcatgagggtcagtgagggagatgaggattgggtgtactacagtaatcgtaagtcggatgttggctgctcaaatgtcgaggattctgctaaactggtgtcagagccatccctactgcagagttccaagcgc

SEQ ID NO: 40577 - DNA, 252 bp, Gossypium hirsutum
  Clone ID: LIB3149-048-Q1-K1-A11
ggtttctcttttctcaccaaatggaaagggtgtccttagaaattgggtggtccataaaggcgttgcctttatttgtttgtttggtctcaaagccttaatcctgcagctttgtctctattatggccttcatttacatcttacttattggctaatttgtgggttttagtaaccaattgtcccaataacttttttatttttaatattcattcatacaatcattttaataaaagccttaaaagataatatttcgtg

SEQ ID NO: 40578 - DNA, 388 bp, Gossypium hirsutum
  Clone ID: LIB3149-048-Q1-K1-A5
ctcaagcatacggtgagccatggtactgggataaccgctatgcccatgaatcagctccttttgattggtaccaaaaataccgtgccttagcatctcttattcacctttatgtgccccaccgccatgaacgcattctcgttgtcggctgtggcaactcagtgtttagtgaagacatggtgaacgatgggtacgaggatgttgttaacgttgatatatcatctgtggttattgaagctatgcaaaccaagtactctaattgtcagcagctaaaatatattaaattggatgtacgagatatgagtccttttcaagctggttcctttgcagcagttattgataaagggacccttgattctatcttgtgtgggaataattctagacagaatgc

SEQ ID NO: 40579 - DNA, 172 bp, Gossypium hirsutum
  Clone ID: LIB3149-048-Q1-K1-A8
tctaaatgcagcattgtgtgaatcttctcgcttctacacactttcacactttgagggttacgaatgcaccacatgctgtaaagataccagatgccatgaatcccctatatgagacgaagactaattctcatatatcaccactcgtgagaagctctctcgccatccccaaggt

SEQ ID NO: 40580 - DNA, 253 bp, Gossypium hirsutum
  Clone ID: LIB3149-048-Q1-K1-B11
ggggctcgcctgatagctcttctatagaccgctctgttgtcacccttcgttcctacaatggcgacgtgtgtcagaatctaaaggcaacatatctcacgcttgggcttcctggatcacagcctgctgaaagaaatactagagctatgcttgttaagctctgctcaactagatgagaaacccactttccctttgcatacttcaagtgactgacactgcttttcatctcaaaagactgtgggttcaagccacaaaa

SEQ ID NO: 40581 - DNA, 429 bp, Gossypium hirsutum
  Clone ID: LIB3149-048-Q1-K1-B12
gtttgtgagtgctggagttgagtcacaagccgatggtgggttgaaaacaacagcaaatcttgaagacattgatttgccagatgaaagtgattcggatgaagaaaaagttgaaattgcacaaaaggatgtcccgtctgctgtgtttggaggtattcggaagagggaagatggcgatgacattcaggatggagatgatgcctcggctgccaaagaaaaaggcggtaagagcctactgggtgcacttgagcgaattaaaaggcagaaacaagcttagaaatattacacatccaactcgtactactgagatatatctttgacaattctatgaactaactgtgtaatgtgtacactataagcgaaatttgagtgccgtctattggatcattttgtatatttggatcaaaatcatatccatttcaagttttggaa

SEQ ID NO: 40582 - DNA, 311 bp, Gossypium hirsutum
  Clone ID: LIB3149-048-Q1-K1-B9
actaaatgaaaaatcttactgatctttaattttccttcaccaccacaccctaaccgttacaggtgcggggccttctggaaaagtggcagctcatttccctccactataaacacgaactacagtacctcataaccacctcatcaagataagaaccactaccattcacctgatcgtcaagttattaccatccgcgctcaacgtctaacatgcccagaagcgcatttccaaccatcacacatctatatggaaacttccaacatccatgagactacataccctgctataattatagtgcaacgatgatatcataa

SEQ ID NO: 40583 - DNA, 323 bp, Gossypium hirsutum
  Clone ID: LIB3149-048-Q1-K1-C12
acggacacattagctttaaatgggctttccattccttttttatcactatctctgctacccaggacactaggcagatttacaacagggtgtgctactccaacttcaatgacattatccactctatcatcgacatgtatgccaatatgatcaccatctagaactaacgttcctatgagaaactactgtctgacttacacgaatgggtgaaatatgcacccagaattgcccctagtgttcatgatatccactcttcaataataccatctacccaaaagatcttctataagatcaacatgatgcttgcggttctcgaaaccaacatc

SEQ ID NO: 40584 - DNA, 214 bp, Gossypium hirsutum
  Clone ID: LIB3149-048-Q1-K1-C9
gatatatatgatccatccttacacacccttttatacctcatggctgctgttttattttgctgccttagggtaattgattcacagggtgtgctcatctttaagacttttaaaaccatgacattcctcaacttattctcctccatttacatacccttgtttgcatctgtctatatatctaataggcccgcatctatcggccttaccaaattttgac

SEQ ID NO: 40585 - DNA, 391 bp, Gossypium hirsutum
  Clone ID: LIB3149-048-Q1-K1-D12
gtctgagatgggcaggacttggcctaatccagtctacccaacaaccatgccctgaaatcctagagcaaagaggatcctatctcgaggcaggtacaccatttatattttataatgcagacaccaaccattctgtactccgcctatccaccgctgtaaacataaacttcactcccatcaagaccaaactctgccgaacaacatccgtgtagaagattgacaattataatgattcacccgataaatggtgcatgacaaccgacggggctagagggaaccctgtctccaacactttgaccagttggtttaaaataaagaatgttggcattatgggttataagtctaagaattgtccttcagtatgtgaatcatgcacaacattatgcagaaaaat

SEQ ID NO: 40586 - DNA, 327 bp, Gossypium hirsutum
  Clone ID: LIB3149-048-Q1-K1-D7
gcaaccatggtactcctgggagatccaaattgaggccaaataaatgctatgaaaggcctgataaacctgctgctggggcaaaattctttaactggcattataatatcccttcattcgctgatggctacactcacatttttaatcaggttgcgagaagagcggaacaatggatgcaaggtaccatgcattcctggtcagcattctccatacaacactggccgcattcggaaacccactaacaacagtgcataagtctgttgcttcccattttggacgaaataagatctgtaaatcctcaaattccttaatcagtttccatggatcact

SEQ ID NO: 40587 - DNA, 285 bp, Gossypium hirsutum
  Clone ID: LIB3149-048-Q1-K1-E10
gacagtccctccttttttttttctcccacctttctaaggatggaatttgttgctacacattggcattgggcattcctttataaagttttattaaaaaaaaaacagcaataggtatttctttaaatcgggttctgctatttgaaacttgatttttttttttttatggatgaaagtatttgaagttatacactgctattattaaattaaagacatgaatcaacaatcaaaaaactatagaatacacctcgtaacagaaatgtaccataaagattttaagctcatggg

SEQ ID NO: 40588 - DNA, 171 bp, Gossypium hirsutum
  Clone ID: LIB3149-048-Q1-K1-E7
gcagccatggctctcctgatagactcatatcgaggcccaataaaggctatgactgtcctggtaaagctgctgctggtgcaagattcggctactgtgctcagaataaccacttctccggtgctgctacactactattttatatccatgacgataaaagccgaacaatatacg

SEQ ID NO: 40589 - DNA, 345 bp, Gossypium hirsutum
  Clone ID: LIB3149-048-Q1-K1-F12
gagcttctaacttcacgccgggcatgatctatatcaatctcgcctttaatagatcaggacagtgtaggtgccaaatgactgcggcgtatggtcattcctgacgtgatgatcctgatttcacttctgagattgttaagcatcttaatcccaaatcctacaatactacttactaccatggccataatgtcatgacagtacgcatctaccaattcgttgtattctacattctttacttattagggggtaatatattttcccacccatgtattgcttgtcatgtatatattctcgtaagagatttctgcctactcattcaactcataatattctcctccattattgacg

SEQ ID NO: 40590 - DNA, 270 bp, Gossypium hirsutum
  Clone ID: LIB3149-048-Q1-K1-F6
gagatgctggtatgattaaaatgttttcctccaagcccatggttgccgataccttgtttgagtccccacccttgggccgggttgctgtgatggacatactttaaacctgagccgttggcgttataaagaatgttgagaaaaaggacccatccagtaccaagagtaccaatctttgctgataagaagaaatgaaccgtgctatgtgaaatactcttgattgttccgcaaatggaatattttactatcagtttaataggttgacagacttta

SEQ ID NO: 40591 - DNA, 296 bp, Gossypium hirsutum
  Clone ID: LIB3149-048-Q1-K1-F7
gcagccgttgcttggtttatgaactcattccaaatggcagtgttgaatcgcacttgcatggagttgataaggaatctgcaccccttgactgggatgcccggatcaagatagccctcggtgctgctcgtggactagcttatctccatgaagattcaagcccacgtgtcatacatcgggattttaagtcaagcaacattttgttggagcatgatttcacgccaaaagtgtctgactttggtttggctcgaactgctatggatgaggaaggcaggcatatatcggccccgtgtcatggg

SEQ ID NO: 40592 - DNA, 304 bp, Gossypium hirsutum
  Clone ID: LIB3149-048-Q1-K1-G6
gcaacctcaagtgaatgagagtttttgcagttgcagggaaaggaaaatcgaaggagcaagcaaagcagctgaaaggctaaaccgatttaccgaaacttactttccagtgacaagtttttgaagccactatggagtatacaaatctccattctcaatctaaggttgaagaacagtatgttaagtatacttctctattaactcaaactggccatcgagtatccaccgtggatgaatggaagcccgacctgttaccgaatattggtagcagataccataagaatccggttcataccttcctgaaatc

SEQ ID NO: 40593 - DNA, 261 bp, Gossypium hirsutum
  Clone ID: LIB3149-048-Q1-K1-G9
aaaaaaaaaaaaaaaaaaaaaaaaaaaaaaattaaaaattaaaaaaaaaaaaaaaaaaaaaaaagggaaagggtcctcttgactgggcgctcttatctaccctttcttgcctcatcttgatttcttctatattgtatccttttttccaattcactactccgtttttttctggcattactttttgaaatacccatttcgttaccctcccttttttcctacctttacatccttttttaactacctcctttgccaactttagat

SEQ ID NO: 40594 - DNA, 251 bp, Gossypium hirsutum
  Clone ID: LIB3149-048-Q1-K1-H4
gaggatcgttgcccatactatcttcctacttaagctggcaacctagcacactgagaccaggtgctggatgctttgactgcttttgataaggcatattcatcagagaatgctgattatataacaagtcagaatttctgtatatgaagctagtttctctttgctccatgtgtaatattttcatgcttgggagcacttaaataatagccagattcagtttcattcttacgcaaaaaaataacttttttataagg

SEQ ID NO: 40595 - DNA, 379 bp, Gossypium hirsutum
  Clone ID: LIB3149-048-Q1-K1-H7
gcagaaaggtgttgttgatggtgttgaagccaatttccctacagcttttcatggattttgcatgcgtcacttgagtgaaagttttagaaaagagttcaataataccatgcttgtcaaccttttatgggaagccgctcatgccttgactgtaattgaatttgaggcaaagattcttgagattgaagagatatcacaagatgctgcatattggatccggcgaatcccacctcgtttgtgggcaacagcctatttcgaaggcacgagatttgggcatctaacagcaaacatagttgaatcactgaattcttggattttagaagcttcagggcttccaataattcagatgatggaatgcattaggagacagcttatgacatgg

SEQ ID NO: 40596 - DNA, 401 bp, Gossypium hirsutum
  unsure (1)..(401): unsure at all n locations
  Clone ID: LIB3149-049-Q1-K1-A2
aaaccctgcattttcaaccaaaaaattcaattaaaaaattctaaataagtaatattgtttggggcaggtggctcatctgacgggccagtgaanaacctaatctacggtctaaccggttggataggcggtctgttagtcaaactctgacaaaacattgaataagatctactagtactattgcacacattatgagaaatctatcccagttgatttcgacataaaaaactacacttcggccctattgctttgaattattcaagcatgttgtgttgcggaaaaattggaacttgatgatgatgattgtagagccatcaactgatactgaactgagcaacagaattccatgaantttgataaacgtattgctccccttgaataaaaatgctacagggtgtatcttt

SEQ ID NO: 40597 - DNA, 387 bp, Gossypium hirsutum
  Clone ID: LIB3149-049-Q1-K1-A5
ggcaattgatgcttttcctaccctggttgattttgtcatggaaatcctatccaaacttgtgagtaaacagatctggagaatgccgaaattgtgggttggattcttgaagtgtgtggttcagacacaacctcattcctttcctgttttattacagttgcctccgccacagcttgaaagtacactgaataaatatggtagtctcagaagttcccttgctgcttacgcaagccagccaactataaaaggttcactgcctagagcaacgcttgcggttctcggtcttgcgaatgagtcgcatatgcagcagcagcaaccacatatgtcaaatttgcattcttcggacacttcttcagttcagggggcaacatcaacataagaattcaaaga

SEQ ID NO: 40598 - DNA, 210 bp, Gossypium hirsutum
  unsure (1)..(210): unsure at all n locations
  Clone ID: LIB3149-049-Q1-K1-B3
gngggcaaaaccaggaataaacaccagactttaacattgtctccaccgctagtcacacgggcgagtgtcttgacccagtgggtgaggtgaacaacaagatctttcgcattattcatgtgattatgaccaccaccaaatgtattactagaacacaaaagactatacaaaatcctttcaacaaggaatagatacagtctgataattattaca

SEQ ID NO: 40599 - DNA, 398 bp, Gossypium hirsutum
  Clone ID: LIB3149-049-Q1-K1-B7
tgcagctcctgattatgtagcaacaggtcatctgactgcgagaagtgacgtgtacagttttggtgttgttcttcttgaaatgttaaccggcaagcgagcagtagacaagaaccgaccatctagagaacataatttagttgactgggctaagccttaccttactagcaaacgtaagtttttccaaattatggatgttcgtatcaaaggccaatacacacctgaagcggcattaaaagctgcgtatcttgcggtgcaatgcctatctacggaaccgaaggttagaccgaaaatgaccgcggtagtgaaagcactagagcaacttcaagactccggtgtcgacaaaggggtccatcataatgcagcagctcatagttctcgtccgaattcgaagtatgctc

SEQ ID NO: 40600 - DNA, 394 bp, Gossypium hirsutum
  unsure (1)..(394): unsure at all n locations
  Clone ID: LIB3149-049-Q1-K1-C11
gacccactcgtactccaaaaacttacttcgtttcaaggactgcatatcaaatttctctgaatttgatgatntccgagtcctcggtaatttttatagacaatgaaccacatttaatcaacttataaaatatcataatatgcactcctacctttaagattgtatcatacgattgttacttttttccaaaaatgtatactattaacctttttattaacgaaataaaaacaattctacctacatttctatttttcgtttgtaacaacttttcccattcccttattacctaatccaactagagcttaatctatattcaaactcatatattttttttttccattaaaaaccgattaacatggttttcatacaacttacatctccccctcattttccaatt

SEQ ID NO: 40601 - DNA, 302 bp, Gossypium hirsutum
  Clone ID: LIB3149-049-Q1-K1-C2
ctctgtctaagctacaatttacatgaccatatctctgctgcatagatctgactattgagcacccagatttttcagcactaacaagaccattgtgagacctgaattgactgattgctcctcttgtaggtgaaacgcatagcaaactcaagttcaacatgcggaatgatgtgttgaactgtagaggatcagaatgtatatggaagagagcttgatactagttatggaggaagagagcttagacggacgtaataaatggaaagcttatggatgctatggtgccaaatattggggaagaactggtg

SEQ ID NO: 40602 - DNA, 296 bp, Gossypium hirsutum
  Clone ID: LIB3149-049-Q1-K1-D1
caatgacaatgttcacgattaatataaatttgttcttagcagctcttctcaatacactggggtacgtttaaggggaaagggcagcaggcttcatttttaaacacataaataatataaacatagctcatgaattgctcaaccttaacgatattaactttaactacaaaaaactgttgattcaactcaaacattacaacaaagctgactctcagttttatgaagcatacatccctactaattatgatagattgaagcatcatgaactacattataacacttaattaaccaacttatta

SEQ ID NO: 40603 - DNA, 297 bp, Gossypium hirsutum
  Clone ID: LIB3149-049-Q1-K1-D11
gaaaaaaaaaaaatggaaggcagtgtgggttatgacaatgatctgaatctcaaggcaactgaactcagattagggttgcctggaacagaaccagtttccattgttagacgcaacaagagatcattgcaacaagtagctgatgatgattgtggagtaaatggctgcaaatctgatgatcaaaatgaaactggtcctcctccttccaaagcacaaatcgtgggttggccaccgatccggtcttatagaaagaaccatattcagaccaagaaaaatgagtctgagggtggtgggatttat

SEQ ID NO: 40604 - DNA, 388 bp, Gossypium hirsutum
  Clone ID: LIB3149-049-Q1-K1-D12
gaaaaaaaataatgctaatacaatgtaggcttataacattaaatctgaatctaaatgcaactggtctcatattagggttgccgagaacataaccattttacattgttatactcatcaagacatcattgcaacatgtagattattattattgtggagtaaatctctgcaaatctgattatcaaaatgaaactggatctcctcctaccaaaacacatatcgatggtttgccacctgatccgctcttatccatagaacaatattcagacaaataaaattgattctgttgatgctgggattctatataaatatgccataaatggaacaccatatctatgacataatcgacttaatgcttactcttgataccctgaattattacatgctattg

SEQ ID NO: 40605 - DNA, 347 bp, Gossypium hirsutum
  Clone ID: LIB3149-049-Q1-K1-D3
ctctgttatccttcatgctcattacaaattttcccttacccaacaatcaaacatcaatgacaaaattaaaaacaacatggggtcctgttctcatatcaaatttattcaatactttgtaccacaactcataaatttaactttttcattattttacttttaattattatagattatatatatataactcacattacttctctacctctactgccttcatatcttagttcactaaatgaacacattttctactgaaacaattaatataacaatattatactattcatataatttctttacatgtgcaacccttaatatacaactagacttgcttctttacataacttaaa

SEQ ID NO: 40606 - DNA, 396 bp, Gossypium hirsutum
  Clone ID: LIB3149-049-Q1-K1-D8
gtcggatgctcttcaggaggcaatgttggcagtggcatccagcattcggcggctggctgaggcaatggatcaaagtaaaagtacaatcaatccctctgaattgctacaggctgttttggagattgatggtctggaagaagctaaacagatgtatgcattcgagtatttgaatgccgaccctatcaaagctagggcattcatgacatataatgttcggatgaggaagatgtatttgtttcgtcagttttggtggtggaaatgaatgacaggtgctgaatttcgaaaaccttttggtatatgatctatattagatgttgacaaattgaaccttatttcattgatcattagaaatgaatgtacagatttcatatgtaaagaaacaatctgggagctatg

SEQ ID NO: 40607 - DNA, 312 bp, Gossypium hirsutum
  Clone ID: LIB3149-049-Q1-K1-E2
caatcggatcaagagtggaacgtactaatcaatccactctgtaattgactagcagtgctgtttctggacgatttgatggatctggaatgaaagctaaacagcatgtactgcatgtcgagtatttagaatgaccggaccctatcacaagctagggcaattatgaccatataatcgttcaggatgaggcaagatgtatcttgtttcgtcagtgtatggaggtggaaatgaatgacaagtgctgaatttcgaaaaccttctggtatatgatctatattacatgttgacaagacgaaccttatatcattgatcatt

SEQ ID NO: 40608 - DNA, 191 bp, Gossypium hirsutum
  Clone ID: LIB3149-049-Q1-K1-E3
gctgtttatctttcatatcgtctaaaacttttcttatcccaccaacacacatttcgggcaaggtaatcgaccgggggctggataatgacgaatcgttacatactatcttatccgtccattcattgaccgctttacactcttctacaacagaattagattgttgcaatcctaccagagactttcagaactcg

SEQ ID NO: 40609 - DNA, 291 bp, Gossypium hirsutum
  unsure (1)..(291): unsure at all n locations
  Clone ID: LIB3149-049-Q1-K1-E7
aacacgcatcaaganccaccccctaccacttaccaacccaaacacaaacacaggggcagggcgaaaaagcatgtgggaacggcgacaaaaaccaatcacataacccaaaaacaacaaggtatatccatgccggtctatataacgctcgacccgaaaagataaaagctcagtacaaccaatatcaatggaaaacagaaccatatacatgagtcagaacgaagagcagaccaaactcagatacaaaagcactacacaacatccggccgcaaactagaccaatccactctcgca

SEQ ID NO: 40610 - DNA, 147 bp, Gossypium hirsutum
  Clone ID: LIB3149-049-Q1-K1-F12
gagactttccataagccataattatcatccactttagagcagtgaggctctgctcatcatggttaatgctatggtccctgaatgtataggctggctgaatgcattaatcaaaggaagattatgcttcatcataaaaaaaaaattaac

SEQ ID NO: 40611 - DNA, 198 bp, Gossypium hirsutum
  Clone ID: LIB3149-049-Q1-K1-F3
ctccaccttacgtcaagagaatgcactgaaattttaggtttttaaattttgcacttttgctctttgcgtaataatatatatgtagaattttcctgaatcatttcaaagaaagtaatcgttcttgaattttcgaaatgctctttgctttccttatgtttatgtttctggttgggtttatctgagaaaagaattttgatt

SEQ ID NO: 40612 - DNA, 360 bp, Gossypium hirsutum
  unsure (1)..(360): unsure at all n locations
  Clone ID: LIB3149-049-Q1-K1-F9
ggcattttgggtaccagagcttcttcccctccccaaagagaaaaggaattttcctggaaaatcatatattgagcaagttgtacctctcaaatttgggagcagtaataagcaccacagtcaaagaagcaaatatggtgggagacactccgggttaggcaatagatgaaagaattcaactgttggaaacacatttttcatatgctgaaaatctttcaacttgcatcgcatcgggtacaatcaaattttaatttgacaaaaagaatacagatgcctgagaattataaattaagttactagtgaaaaaaacaattggataactataaaatatatcttttttaatttanaanannnnnnnnnnna

SEQ ID NO: 40613 - DNA, 399 bp, Gossypium hirsutum
  Clone ID: LIB3149-049-Q1-K1-G12
ctcaaaagttacattgaagtagagctattccttttgcaatgggaggaattgcatattatcgggtgccagacactttttcaaagatagttgctccaaattccattattatgtcgcctaatccaaatagatgccctggtgaacctgattcatgcactgtacatccaatacgtcacctacttgtatacatgttccaagtggattgtgcaacttgaccatatgactattgctacagatgatcacattaaaacacctattgtattactaccatgcaccttaattcaaatgcatgctatgccatatgtaacaattcctatattatgctatactgctggacctggtgacacattctaagaatgattcacagggcaccaaaatgtaccttccaataaagaatgaaat

SEQ ID NO: 40614 - DNA, 226 bp, Gossypium hirsutum
  unsure (1)..(226): unsure at all n locations
  Clone ID: LIB3149-049-Q1-K1-G8
caagaggagaacctgcttttggaagcagtattaccttttaagcactaggacngttatatggatacacttaatgctatataggtgcaagaatcttacaacaaccttcatttactaacacaatttgctcattactagaaactttacaagatcataacatcttaatatcttgttctggctattggggttcaacgatgaaaaataaaaacccagaatggtacatccacta

SEQ ID NO: 40615 - DNA, 391 bp, Gossypium hirsutum
  Clone ID: LIB3149-049-Q1-K1-G9
gaccttttgaataccagatcttctaccgcttcccaaatttaaatggtattttcctggaaaatcatatatgtgtcatgttggggctctcagatttatgaacaatattaagcaccacagtcaaataagcaaatatggtgggagacactcctggttaggcaatagatgaaagaaattctactgttgtaaacacattttttatatgctgaaaatctttcaacttgcattgcatctgttacaatcaaatttatatttgacaaataaaaatacagatgccctgagaattataaaattaaatttacttattgaaaaaaaacaatttggataacctattaaaaatataatctttgtttaattatctaaaaatatttatatatttattctatattttatt

SEQ ID NO: 40616 - DNA, 222 bp, Gossypium hirsutum
  Clone ID: LIB3149-049-Q1-K1-H2
gagaagttcatgaggccatgggattactatttcgatacctgccctcccggtttaaaaacaggacctctatatggagaaccgaggggaatttccaagggccggaaatttcggcacactcggagacacacacaagggtcccctttgcgtatacccttatggatgattgaacaaagagtgggtgaacattgatccaaagaagcacacacaattatcaccacatgc

SEQ ID NO: 40617 - DNA, 279 bp, Gossypium hirsutum
  Clone ID: LIB3149-049-Q1-K1-H8
acgggaacatagccttgcaatcactagcgcgcttttacacaaatcatctgcttcaagtcctcgggcgtactgaaacacgtggaggatagctacctctagattctaacagaaccaccaatcacccctatatcagtctatccccacgattgaaaatcgattacatcgcttactgccaatcggcttaaatgtgagggcatttaactacattctttcaccacatttaacacaggatactccctttcattctacttggtactatccgcataaatgtgcacacaa

SEQ ID NO: 40618 - DNA, 297 bp, Gossypium hirsutum
  unsure (1)..(297): unsure at all n locations
  Clone ID: LIB3149-050-Q1-K1-A10
tcccgaatcgacccactcctccgaaaatatggattgtttattcgacagggatttctaaagaggtctttaaaacgggaagtgccacacaantcccaacccatgctcaaaaatactttctccgactaatcaatctcaaccgtcatcatttcacatctagcctctttcatatcaccaccgatactgttcacgctattcctatggaacaatatcgaattgatctacaaaaaaactcaactcatccatctgaaaccaatttttttcccattataccatctatttttcccatggcctttaacc

SEQ ID NO: 40619 - DNA, 285 bp, Gossypium hirsutum
  Clone ID: LIB3149-050-Q1-K1-A12
tgaagttgagggaccaggtggttttgtttggaatgggggaccaaacgcgatgtgggaggcagtgaaatatatgcaaagttgggagagcttagaaagtttattaaagaagcaggttatgttactgacactagctttgctttgcaagatacggatgaagaacaaaaggagcataatctttggaaccacagtgagagacttgcccttgcatttggattaattaatactccaaatggttcaactattaaagttttcaagaaccttcgtgtttgtggtgattgtcattct

SEQ ID NO: 40620 - DNA, 371 bp, Gossypium hirsutum
  Clone ID: LIB3149-050-Q1-K1-A4
tcgaatatatcaattctctgagatcacatacccttttttttgatccctcaagcatgatggctaactgcgatccaatgcatggcaagtgggtggcttgcttcctgatgtatcgaggagatgtggtgcccaaggatgtgaatgctgctgtcgctaccatcaaaacgaataggaccgtgcagtttgttgactggggcccaactggttttaaatgcggtattaactatcatcccccatcttgttgccctggaggagatcttgctaaagcccaacgagcttgttgtatgataagcaataacacatattggcagaagtgtttgcacgcattggccacaagtttgatctgatgtacttcaagagagcttttgtgcatt

SEQ ID NO: 40621 - DNA, 284 bp, Gossypium hirsutum
  Clone ID: LIB3149-050-Q1-K1-B10
gcaaaagccatgggttggcggccaactctacgtgatgggggcgaaggtgctgacggagggtacaggatcttgacatgtgacaagcgtcatggttgaacaaattggaactataagtattatctgtgatgtttggtaatgcaagttggaaagataattcgacaagcgcagtcatttgcaagcgaaagaaagaagcttgtgtatcgaaatttgaactgcagataagaggattgaaggatgcaagtcatgggacggggggatgctgatgagtttcagctcttataatt

SEQ ID NO: 40622 - DNA, 288 bp, Gossypium hirsutum
  unsure (1)..(288): unsure at all n locations
  Clone ID: LIB3149-050-Q1-K1-B2
aaaaagcatcaaggttatcgacatttccttttgtgcagtcataacatccacatggtatgtgtatttaattgcagtacatccatgtaagtatcattgatttctcacaatgaccaaaacttcttcctggtggcggtaacactagcacaggtctcagctggttgagaaagtcatcctgttgaatgaagtcgtacacatgttattttgagtgatttttttcccaattggatacttttcttaatcttcattaaattctatagaaatgttggagctagtttttctaannnaaaa

SEQ ID NO: 40623 - DNA, 214 bp, Gossypium hirsutum
  Clone ID: LIB3149-050-Q1-K1-C11
agaccggccgaagccggtccccacctcgatcttccttaccccctcctctcggggcactgggaccgacgcttaaatttcccctatcccatacagaattttctcctactaccaacaaccatcccttctcaaacatctatacaagcaaccccttcccctactacacatactctcatccctatctaatacacacaaagcttttatattcatctatttt

SEQ ID NO: 40624 - DNA, 284 bp, Gossypium hirsutum
  Clone ID: LIB3149-050-Q1-K1-C12
ttaagaacttgcatgccaatgggatagaggtcttcctgggagtggtttttacccatagtgctgaaggtggagccctgcaaggacttgatgatttatcctattatcacaatagtgttgaagatttagaagctagaaatgctttgaattgtaactatcccgttgttcaacagtttattttagatagccttcggcagtgggtgactgaattccacattgatggtttctgtttcatcaatgcttcatgtctgttgagaggggttcgtggtgaacgcttgtctcgtcct

SEQ ID NO: 40625 - DNA, 387 bp, Gossypium hirsutum
  Clone ID: LIB3149-050-Q1-K1-C6
ggtttccccccaggcttcctgagttgcatgcctctgattattttgatgctacagcatatgactcaaattttaattctgttgattcttttgttccgttaggaagcaggtcttgatgcccagactcgggggctactcatcacgtgtgccaaaatgcttcagatttacagggctctgctccgtatacaggtaattcttcttttttaatggggaatggagtctctactaaaatttcatttgtttggagtacaactattcctacgaaggcaaaattattacatctatcgaatgtgctatgtgtgccgagtattcgaaaaaatttattatctgtgtctaattttgctacagataacaatgtgttttttgaatttcacccctcgtattgtgtga

SEQ ID NO: 40626 - DNA, 279 bp, Gossypium hirsutum
  Clone ID: LIB3149-050-Q1-K1-C9
gtttttatacattttaaaaaccaaatcggatggtgcggggtctggattctgatggctggcatttgtggatctatttggctttgtcaagctttctttggcttcagctattatgttatgcttggagttttggtacttaatgatgcttatagtcataacaggtcacctgtcaaaccctttggtacctgttgatgccatctccatttgcatgaacataaatggatgggatgcaatgattgcaatcgggttcaatgctgctataagtgtgagagtatcaaacga

SEQ ID NO: 40627 - DNA, 134 bp, Gossypium hirsutum
  Clone ID: LIB3149-050-Q1-K1-D12
tatatacttactttttcatcttctcttgtaccaaatgatgttttattagcgcgtagtgggaagccaatcttccggatttagtctctattgatctacctaaccttcctttacaagatattcagttcttcttctat

SEQ ID NO: 40628 - DNA, 131 bp, Gossypium hirsutum
  Clone ID: LIB3149-050-Q1-K1-D2
taggcttcaaattggagttaatctttcccttctcctcgggaccgcttgcatgtctgttttggccaaatgggcttaaattttgcttacccagcctttcagtttttaattaatagagactcttttctttttgc

SEQ ID NO: 40629 - DNA, 389 bp, Gossypium hirsutum
  Clone ID: LIB3149-050-Q1-K1-D4
gttattttggttttaagaagccagcaactgatgatccagtgaaaactaataaaatcccaaggcaaattccagaacaggcttggtacatgaacccagccttctccatcctaattgggggtatacttcaattcggggctgttttcattgagctctttttcatcctcacttcaatatggttgcatcagttctattacatattggcttcctcttcattgtctttgtcattcttattatcacttgtgccgagatcacagtcgtactctgctacttccagctatgcagtgaggattacctatggtggtggagatcatacttgacttcgggttcttcagcattttacttattccactatgctgccttctacttctttacaaagcttgagatcacaa

SEQ ID NO: 40630 - DNA, 281 bp, Gossypium hirsutum
  unsure (1)..(281): unsure at all n locations
  Clone ID: LIB3149-050-Q1-K1-E11
cgccaccgctcctccacctcctcccggtgtgaaacgggggcgcggtcgaggtccgaaggtgttaccgtcnntgggttttcagtaaagtaggcaagttaataaatcaaagagaatggagaaaatgactcattccgtcactactcctacccctgccgcgttaggtgtaataattttttaaccttaattttttaggtgtcgtttagttatctgctaattgacgttttagctttttcgtttttttcttttagttaactttgggtggagtactgtaatgaatttag

SEQ ID NO: 40631 - DNA, 400 bp, Gossypium hirsutum
  Clone ID: LIB3149-050-Q1-K1-E7
ctaaacacccctacaagtacaagtctccacccccaccacctccagtttacaagtataagtctgcaccacctccacctccgtcaggacccaagcacccttacaagtacaagtccccaccacctccaccaccatcaccaccaaagcatccttacaaatacaagtccccaccacctccaccaccatcaccaccaaagcatccttacaaatacaagtctccaccaccaccaccatcaccacctaagcatccctacaagtacaagtccccaccaccaccaccaccatcaccacctaagcatccttacaagtacaagtccccacccccaccgtcaccacccaagcacccctacaagtacaagtcacccccaccacccccaccatcaccccccaagcacccttacaa

SEQ ID NO: 40632 - DNA, 236 bp, Gossypium hirsutum
  Clone ID: LIB3149-050-Q1-K1-F2
gatgcaccaagttaaacctcataaaccctttcttttcatacacccaccaacaaataaagatgaggatcaacctctaagaaaagttatgatcaatccacctaaataagttattgatttgcatcaacttattcaagaacgaggcacttatccttaatacactaaaacaaaaaaaatacttcaattatcaatctttcataatcattttaagcaacaaagcttgctattaatggaaccaa

SEQ ID NO: 40633 - DNA, 399 bp, Gossypium hirsutum
  Clone ID: LIB3149-050-Q1-K1-F3
ggaaaaagcatggccgcaaagcccggttcagctccggtaacgtattcgccgaatcttggccaaaaaactcgcccccctattttcaaagacaacgatctcgattgggtccgacctgatggccgtggcttccaccagtgccgaccagcatttttcaggacaggtgcagtaaattctgcttccggatctgcttatgcagagcttgggagtaccaaggtcattttatctgtatttgggccaagagaaagtaagaaagcaatgatgtacagtgatactgggagattaaattgtaatttcagctatacaacatttgccactccagttcgaggacagggatcggatcacaaagagttttcgtcaatgcttcataaagctttggaaggtgcaataatgttggaaaca

SEQ ID NO: 40634 - DNA, 392 bp, Gossypium hirsutum
  Clone ID: LIB3149-050-Q1-K1-F5
actggttccatcctctatccgcattttattttaatcaaatcatgacaaatatttatgaggtgctttatccatgtttagcctgccacaaagcccgatactatactcatcaactccaagccatggctccagccactttcttgtgcctaaatcataatccaaaatcactacacccgatgacaaacatactcagaattcttgaatgacgagataccaacattcctttgagtttaaacctaaactctatcagcaatcataaccaccatttacgtgaattgaaaactcaaacacaaccataatctactagacagttttctctaaaactttcgcattgaccaaatcgtttctaaagacctacacctatacttgtataaattgacagtatcatcacattc

SEQ ID NO: 40635 - DNA, 212 bp, Gossypium hirsutum
  unsure (1)..(212): unsure at all n locations
  Clone ID: LIB3149-050-Q1-K1-G7
ccggggcgggccacgcgtacacaagggatccaacccnnaaaaggcaaattttttaaccggaggtacatttctcnaaaaggtccgtttattatttatggaacgtggggcccaaaactttttaaaaccttccgtaacatccctcgattccaggttgccaatgtctaaattctcaatctgcttaaactctctccttttgttcactctttactttt

SEQ ID NO: 40636 - DNA, 257 bp, Gossypium hirsutum
  Clone ID: LIB3149-050-Q1-K1-G9
cccacgctccatttcaaaagatttgaaaatggggattttaccccggaaggcactcattttttttctgcaacaattccaaaaaacgtcgtcttatctcacttatttaataggaacatctttattgatacattggatctatgctggtagaaactcataaaggttaaccaatctattcttgttgcaccacatgaattgcattttcagatagatcatcatcttttaaaaaacatatatctgtaacacccgaatacaaagga

SEQ ID NO: 40637 - DNA, 275 bp, Gossypium hirsutum
  unsure (1)..(275): unsure at all n locations
  Clone ID: LIB3149-050-Q1-K1-H1
cacgcgtcacaaagatccttgcccaaattataatccaactatattttgcaaccaaacacactaatatcaagggctggattcttagacaactttggatgacacatattcatcanaaaatgctnattatataacaagtcaaaatttctgtatataaancttgtttctctttgctccatgtgtaatattttcatgctttttaacacttaaataatatcctaaattcctttcattcttacacaaaaaaaaaacttttttaaaaaataactctcttccaa

SEQ ID NO: 40638 - DNA, 392 bp, Gossypium hirsutum
  unsure (1)..(392): unsure at all n locations
  Clone ID: LIB3149-050-Q1-K1-H3
gacaggtctatgctcgaactcgaatttttttttttatcagattgatacatgatttgtatttggcatccaacaacccgggagggcgggatagaactttaatttcttttgttttatattactaccatgaacattttatttgacccaatcagttcatcatcttattggtgcctaagggctaagattatatgtagatataaatgcatttgtcagatcaaggtttagcttctagtctttggtttcaagttccctccattcattcactttatttgttgtctgttaccactttttgactcttcatatttatacataaatgtattttagttgtaccgattgttatcaatcatgttcttgttctttgtatcgncaataacaaacatcaaatgtatggtttt

SEQ ID NO: 40639 - DNA, 282 bp, Gossypium hirsutum
  unsure (1)..(282): unsure at all n locations
  Clone ID: LIB3149-050-Q1-K1-H9
atttgatcgtatatatggcggaggattcaaaatcctgaggtataaaaccggggcggggcgtatattgtttttgtaaatctcnaaaataactccatacaaaaaagctcgttgacgttgacggtcctccatccgtggagctcctccgtcgacgagttgtctcatattccatcgccttgtggagcagcgtcactgcttttacctcttgggactggccatgagacgaacatttattatttacgctttctttagatctcgtagttttttttttctgatctaattaat

SEQ ID NO: 40640 - DNA, 226 bp, Gossypium hirsutum
  Clone ID: LIB3149-051-Q1-K1-A1
ggggaagcagtggaatgaaatcaatggctgccaaagtccttgcccagttgaatgttctaggtgagcagtcttcatatttctaaatctgagatatgatccaatgcctgtaattttcaaataaatatctatttttacactggtgaaaaaaaaaaaaaaaaagaaaaagaaaacaaaaccaaaaaaaactacgtgtaaaaaccaaaaaaaaaattttaaatttaaaact

SEQ ID NO: 40641 - DNA, 202 bp, Gossypium hirsutum
  unsure (1)..(202): unsure at all n locations
  Clone ID: LIB3149-051-Q1-K1-A2
cactcctcanaaaattttttaaaaaaaaaaaaaattcctaccgctctaaaaaaaaacaagcgggccgccctcattcattcaactaccatacatcttctatacccccacctaaaattcacatcactctcctatcatttcacaccattttaaactcgtaaaaccctgacataacccaacttaatcacctttaacacatccccct

SEQ ID NO: 40642 - DNA, 268 bp, Gossypium hirsutum
  Clone ID: LIB3149-051-Q1-K1-B1
cttgaatccttgatgatttcatcaagaagggtgtctgaaaggaagctaagacgactgggagagaatctggaattcttgtgtattattggtaagtctcttgcatccatatacatgaagtaattaatgactcaacaaactgttaaccgaatgcacaaacattcttgttagaaatagcttagtcaatatgtcagccacttgttctatggctggtacatagttaaagctctacatgctttgatcttgcatggaagactgtatttcttgacat

SEQ ID NO: 40643 - DNA, 222 bp, Gossypium hirsutum
  unsure (1)..(222): unsure at all n locations
  Clone ID: LIB3149-051-Q1-K1-B2
cccgggatattncccctatccgtaaaaanctnggaaaagggtaancaattantgcanaangcaatataaaaaatttggaggagaggaaaaaaaatcactgttgaggttagaaatgcaatagtctatgaaggattcggcatttgcatactaattttgtagttatggaatcaaactacataagttgcactcaataggcatcgttttgtccgttcctgtcaatgc

SEQ ID NO: 40644 - DNA, 189 bp, Gossypium hirsutum
  unsure (1)..(189): unsure at all n locations
  Clone ID: LIB3149-051-Q1-K1-B4
ctactaattcattatcgttttaaaccgagctgntacccgtcgagagcttatttacgcggaaagggaaagtacangcttgcgttaacggggtttcccgatgagttttacgatactgagtgggatttgataattattttttctacttgaggatacataccggaggctttatggtagatttctaaatttttc

SEQ ID NO: 40645 - DNA, 318 bp, Gossypium hirsutum
  Clone ID: LIB3149-051-Q1-K1-C11
cattctactcgattaggaagaagtccaatttctctggaatcatggattgttgctctcaattacaacattcaaaaagtgagatgaagagtcacttagccttggcaatgctaggagtttcagagtttgaggatgacaatcacctttattgtcggtgaaacatggaatcgattttcatccatggaaattttcacccacacccttttctttgttgcttgcttgaccagaaagttttaggcattagaagaaaaagaaaaagaaaaagtgttgaagtgtaaataggaaaaaggggtctgatgaaagctggtttgtatgtacata

SEQ ID NO: 40646 - DNA, 284 bp, Gossypium hirsutum
  Clone ID: LIB3149-051-Q1-K1-C3
aaaaattttaaaaaaattttttaaaaacaaaaaaaaaaaaaacccgccatttttacgcccgccggcctaaaaaatccaaacttacttacacttccattcaaccttataactcttttataacctcacctaaattaaattcactcaccctttttttacaaccctttaacttcaaaaaccctttctttacccaatttaattcccttccaaaaaatccccttttctccaactatcttaataacaaaaaatcccccaccaatcgcccttcccaacatatctccaaccta

SEQ ID NO: 40647 - DNA, 171 bp, Gossypium hirsutum
  unsure (1)..(171): unsure at all n locations
  Clone ID: LIB3149-051-Q1-K1-D4
taacatttnnccaatttttcttanaaaataatattctgttttgtaatttcaattggagaacctcttttttatttcatcttctcttttccttttccttttttccccaacattgtttcaacattncgttntacacccntcaattccacttaaatatcgtgacttttgtttttc

SEQ ID NO: 40648 - DNA, 345 bp, Gossypium hirsutum
  unsure (1)..(345): unsure at all n locations
  Clone ID: LIB3149-051-Q1-K1-D5
atcgccgggtcgacccacacattcnactcttatttaccgcattttttctcaatcacttccattaccacgggggtttatttaagctggcgggtaacattaaacctttttttcttcaacaataatattctgttttgtaatttcaattgcagaacctcttttttatttcatcttatcttttccttttccttttttcacctccattgttttaacatcgtattgtgctcccttcaattccatttaaatatcgtgacttttgtttttcaaaaaaaaaaaaaaaattgccgcctctctaaataatccaatcttacttactctttcattctacttcatacctcttttattttc

SEQ ID NO: 40649 - DNA, 303 bp, Gossypium hirsutum
  Clone ID: LIB3149-051-Q1-K1-D7
aactacatctatttcaattaaactttcacctaccattagcatgggaaactaacatcgcagggggaacaactcccatcaatgtcttcaaacaaatttacacaagcttaaaacttattaacccaaacttgctgcttttccaaaacaagctctcatcttttaggctagctattcaatatctaaccagcttgccactaccacccaagtgcagggataatacatccctatttattttgagaatcctctaacagagcttttatagatcacaaatgtcatcaactcattcaaagcctatcacactcttcc

SEQ ID NO: 40650 - DNA, 250 bp, Gossypium hirsutum
  Clone ID: LIB3149-051-Q1-K1-D9
gtgagaaagctggtgagttgatggatcgagtttcttcatttcggaatctttgaagctttgaaacttgaaattccccaaggatcaaattgtaaaatggtcaacttttagagccagcattgttgaaataaaagcgccattagtaggatttcttctgtgtgtttttattattggctaaatcctgctattagtctttatactttgtgaaagttgtggatttggtcccattactttaatttgatcaattttagtc

SEQ ID NO: 40651 - DNA, 294 bp, Gossypium hirsutum
  Clone ID: LIB3149-051-Q1-K1-E3
cttccgtttaagtaacctctattcttaatattaaaataggggcttttagttcttagagaatcatctctgggcttgggattcctacttctacttggaatagaaatactctctttttcccttttcaaaaaaaaaaaaaaaaaaaaaaaaaaaaaaaaaaaaaaaaaaaaaaaaaaaaaaaaaaaaaaaaaaaaaaaaatgcaaaaaaaaaaaaaaaaaaaaaaagagacctaaattaaatagagctggccgacttttaacaacgggggcgactggtaaaaaaatgcacgcacccaa

SEQ ID NO: 40652 - DNA, 312 bp, Gossypium hirsutum
  Clone ID: LIB3149-051-Q1-K1-F5
ccacgctttaatttaatttttcatctctccttttatttctcgaacagtaatttcacgggcgggggagactataaaatccaaaacctttaataatgcaacatcaatgaacatcaagactgcacatcatttatctttttgtcgaattgcttagatccttaaaactttaaaatattcttatcgaattacaacttgatctcctctctatctaaccttctttcttcaatatctttccacttactatcttgatctatccaggaattcaatcattatcatcaagaaaaccctcatccttccactttacattcaactttt

SEQ ID NO: 40653 - DNA, 312 bp, Gossypium hirsutum
  Clone ID: LIB3149-051-Q1-K1-F9
cccatattcatcttgttttcgtaaagaagcttgttcacatgggggggatactcagggaagggggccgaatcatcaatttcaaaaagtgcaacaattatccattaccattccaaatggtcatgaatcctgtgacattcatcaggaaatgattaaaaactctaatgcttattatcacatactaaaacttccatatcaacacttgatgcttgcttctggtgctcttaatgatgctactgccaacaaatatgacttctaaacattgattccagcctctcaaacttacacagagttagtgtcatgctcaaattgtac

SEQ ID NO: 40654 - DNA, 296 bp, Gossypium hirsutum
  Clone ID: LIB3149-051-Q1-K1-G3
acaggcagaaaaacacaatttttagactttttgagcattctaaaggctataaatactaattaggagaagaaataagggggccaccagagaagatcgaagaaaacactcgaagaacactaacgaaatcaactcggaagtggatctctatcaagatcaaagacctccgtttaatttcttctaaagtttttatgagtttttatgaatttttttgcttcttgtcatttttctaactttgagatgtttttatttacgattatgaaacctatgatgaatcttattatatgatttttgattta

SEQ ID NO: 40655 - DNA, 331 bp, Gossypium hirsutum
  Clone ID: LIB3149-051-Q1-K1-G6
aaggacatcatcaaggtgaactcggaggccttattggtcgtttcatgtgccaccgagcttttccttcgattcctcgccgagagaacagcccaagtcgccgccgagaagaagaaaaagacggtgaagctcgatcacctaagaaccgccgtcaaaaggcatagaccaacgagcgattttcttctcgactcacttcctattccagccgagtctactcaatccgttgctcgcttcgcgacggatcgagatcgttcccggtccgttggtgataaatccgcccccgctggaacccgccgcatagaccactttttttcgtaagccagaaaatgaagct

SEQ ID NO: 40656 - DNA, 309 bp, Gossypium hirsutum
  Clone ID: LIB3149-051-Q1-K1-H11
cacggctagggaggtcatgaacatggtcacgagggcgaaaagaaaaagaagaaccagaatggtgggaggaagaaaaagagtaaaaagtcaaaggctttgtccagtcaacaatccatggatatctaagtacattgactttccgaaagttagcattttgttcgtatatcttctcctcattgaaagctttttaagccaattgaacccttcatgaggtataatgtgtagttcaccattccccttttttgttaacaatgtcatcttgtctctttatcgaccgaaatatcgaaatgcaaaatgaaaattttggtg

SEQ ID NO: 40657 - DNA, 312 bp, Gossypium hirsutum
  Clone ID: LIB3149-051-Q1-K1-H7
aaaaaaggcaatcatgctatccttactgccattgaagtctttcaggttatagttgctgaatccgaaacttcttctgaagaagttagggctttgcagtcattgaagaaatcattggggctgcctaatcgttttgggtggaatggagacccatgtgttcccaaggagcatccatggagtggagcagactgtcattttgataaatctggcagaaagtggttcattgacggccttggtctcgacaatcaaggtctgaggggttccttgactaatgaaatatccaaactacatcacctgcagagcataaacttgagc

SEQ ID NO: 40658 - DNA, 391 bp, Gossypium hirsutum
  Clone ID: LIB3149-053-Q1-K1-A5
tgaaaataaaaaagaccaagaatatattcaaataaaaggaccaaaaaaaaatgaaatgaagaggaaaatgctaaagagggggggcggttgtttgggttccaaacttgcttccgctggcgtgcaaggagatgttttttatatcgggtcagcctaaattcaattgattggcctatgaattacaacgaaatcgactgtggtaaaacctctgctgttgccaaatttaatttccatgaccaacattccccttgcttcggatggattaatagctaataggccattgcagactgcctttcctaacatttatggcataacagaatggtaaatgggacgcaaccctatagaggggcattaagagcagcgggagtagcggttactctcactaagaccatta

SEQ ID NO: 40659 - DNA, 161 bp, Gossypium hirsutum
  Clone ID: LIB3149-053-Q1-K1-A6
ggtggataagcacgaccgtgtttatgttctaatcaaaggacccctacacaggagagggtgatgtacagctagcgctttgcttacattactgctgttaccaattgattccgttggagaacaacgataggtttgttatagacaaagcactgtattcattgatc

SEQ ID NO: 40660 - DNA, 405 bp, Gossypium hirsutum
  unsure (1)..(405): unsure at all n locations
  Clone ID: LIB3149-053-Q1-K1-A7
gaaggccccccacgacccacgcgtgcgcgaatatttaatgtatcnttttttttttaaaataaaaacaaactnnacgggtatggttttttttctcctcatacccactttatatttcatacattccacatatattatattgtatattgagttagataaaatttcatgttattcactaaacataataaaaattcaattccatcattattatatccattcttacgattccattaaaaattaaaaaaaaatttgattttttttacaaattctaaattcaaaattctttctgattaaaaaagggaaatttctacaatacctttgttgaatcaaatacaattttaaagatttttttggttcattgatctgtgcttaacacaagaactttattatttttcaaaaaattaaaat

SEQ ID NO: 40661 - DNA, 236 bp, Gossypium hirsutum
  Clone ID: LIB3149-053-Q1-K1-B11
ggggggcggacgcgttgggaatgatcaactttgagacagggttttttttttttcatccccagaagaccatcaaaggcacaggtttttcttattttccccaccactctcattccaagtctaaaattattttcatgtccccagaaaatcatatttttcttttccaacttacaccccagagttataaccattttttcagccatattttatggcgagaccattatgtttccaaaagaaac

SEQ ID NO: 40662 - DNA, 357 bp, Gossypium hirsutum
  Clone ID: LIB3149-053-Q1-K1-B4
ataaaaataaaaaaaacaaaaaaaaatttttaatttaaaaaacaaaaaaaaaaaataaggagaaaggataataaacaaaaaacacaaccataccaacaaaaaacatgtcaggtgttctctactgcaatctgataaccagtcttcttgtagtttcaatgtgcttcaatgtctgcgttaaatggcttctaacaacatgcttttgtgtgcgttttacttggtatgcattttccctgcttctcccggttttcttaatattgaagttacattccacatttatccccatggttttgtcactccttcggcctaggataaggccacccctttataacacctatttactattcgttccttttgttt

SEQ ID NO: 40663 - DNA, 188 bp, Gossypium hirsutum
  Clone ID: LIB3149-053-Q1-K1-B6
acgccaactcctccggactccgttcgcattttaactaaatgcaaacataagggggctgggtgaacttgcgatcactcaccttatacaaaacgttcattgaatacatgtgctaattaatctgatcaacacataaatacctgtatctacatactatatcgaaaacttcttatacataggactttaagact

SEQ ID NO: 40664 - DNA, 179 bp, Gossypium hirsutum
  unsure (1)..(179): unsure at all n locations
  Clone ID: LIB3149-053-Q1-K1-C10
cggaancccggccgacccacgcgtccgaaaaaaaaaatacataaaaaaaaaaaaatatatccatttttatacaacaaaagatgataaaatcggagtgtgtctggggttgacaaattcaaggtcccctatttataaccaggttcctgaaaaacttgacttctttctagctgttacccttt

SEQ ID NO: 40665 - DNA, 219 bp, Gossypium hirsutum
  Clone ID: LIB3149-053-Q1-K1-C11
gctctatgcatactattatccctaggaatttttcatttttaacaagtgtatgtacaaagaagaactgtgtcaacaagcttcttatcaagatttccacaccacaacctctcttaagagtatagattaatttcccatacacatacaatattatggtatttgcaaattgtgaaaataactctactcttttaacaccaaatattaaagaaaaaccaatatgcg

SEQ ID NO: 40666 - DNA, 388 bp, Gossypium hirsutum
  Clone ID: LIB3149-053-Q1-K1-C7
gttggatataagtggggtacaaacttatgtgataaatagtgccagggttctattcttgaatgaaaggcctcaaccaaaatctgggaaattaggagtttctcatttatgtgaaatctgtggaagaacactcttggacccttttcgtttttgctcattgggttgtaagcttgtaggaataaagaggaatattgggaatgcaagttttaacatagaagaagaaggcataataatatcgaaggaagaagaagaagaagaaatgcgtgaagggtcacaacgagacattaacccttcgacgcctcccccacctccttcaaatgcaaggcgaagaaaaggaattcctcaccgagcaccgtttgggtcctagaacccaactactatcaactatttt

SEQ ID NO: 40667 - DNA, 405 bp, Gossypium hirsutum
  Clone ID: LIB3149-053-Q1-K1-C9
gcggaagagataccttttcagcttggattgtctaaaatggatctccggaagatgttaaaatccagtttgtctggggttgacaaatcaattactgcaatgtataagaagttgcagaagaacttgacatctgaggagctgttaccctctttgtgggacaagtgcaagaaagagtttctggacaagtatgatagctttgcccaacttgttgccaaaatttaccccacggaaaccatcccatcggttagtgaaatgagagacctgcttgcttccatgtaaaagggacagattttgccttctgtataatctttctttattttccatttggagtggagagccgtattagctggctctaattattaaaattgtaatataatagacaatcgccctccaaaacccatatttcaa

SEQ ID NO: 40668 - DNA, 396 bp, Gossypium hirsutum
  Clone ID: LIB3149-053-Q1-K1-D1
gctttacagaagctaaagaaatcttggttggtgggaagacagacgcctggaagatggcatcatctgaatcagattctctcaacagatgggctgaaaaatcccgtttccgcatcggcgactctctcgtgtggaaatatgatggtggcaaagactcagtgctgcaagtgactaaggaggcttatgcaagctgcaatacctcaaactcaattgcagagtacaaggatgggaacaccaaggttaagcttgataggtcagggccattttacttcagtggagcaaagggtcactgcgagcaaggccaaaagttgcacgttgttgtattgtctcaaaagcataggtacactggaatctccccagcaccttctccggcagaaattgagggtcctgccattgctc

SEQ ID NO: 40669 - DNA, 399 bp, Gossypium hirsutum
  Clone ID: LIB3149-053-Q1-K1-D4
ccacaaaatatctttataaccaagcattttgcgaaatttgcgaggatactttgcagggggggagcatgatcgaacagtgaccatgcatcactggcttttcaaaccaaagcatccccagaagcagccactccctcacataaaactgcgggagcaaaggtaacgctgaatttacacgagacgttctagcgaatcgttcaaaaactaaacattgaggatcaaagctatgatgcacaaatgctaatctgaagccctactataacaacaatactcaacttgatcaaataagctgatctttagttgaagatatattatcagatctatggcacttaacccacgcttggatgttcctattatcgataaaatttgcaaaaattggtggaaagttgctatcataaatgt

SEQ ID NO: 40670 - DNA, 371 bp, Gossypium hirsutum
  Clone ID: LIB3149-053-Q1-K1-D8
gttgctgataatgaatggcttgccaattaactagctaaagaaacatgggggaagcggaaggatgctgaaaaggcatcatttgaggaggcggagaaaaagagagaggcggaggaattatacgatgtccctctttacttcactgctgcagatgaagacaattcctcacatgctgactggaacgagtctttatcaccatactaacatctacgatcaggacctggaacaagcacataatgagctctaggcactgtaatatgtcgatgacaaatcgatttgaagataaatacatctaaatattttactacagtttatttaaaaaacaaacctagtacataggagatgtcagttacagaaaaaatgaattgaatgct

SEQ ID NO: 40671 - DNA, 170 bp, Gossypium hirsutum
  Clone ID: LIB3149-053-Q1-K1-E8
gttcataagcttgtaaaaagctgccttttgcggcaaagatactatgaccctcaacgtatactacctgaagtagaaacttttactgttttctttgttagctaagtaataaacttgtcacttactgttttcatgctataaaattgtccactcagattttttaaaaaaaaaca

SEQ ID NO: 40672 - DNA, 274 bp, Gossypium hirsutum
  Clone ID: LIB3149-053-Q1-K1-F1
acggtctccgattccatcttacatgctttagctttccacccaaccgctcgtatagggcgcggtgtctattcaatagaatctccgctcttaaataaacatccttcccccaaaccactgctgaattccaaataactcctctttcaacacattcctcttaaccagtctggcctaaactctaaaggtcctgtccaaacgcccaggccaacaattgcgcaacctctatgcagaatcgtactcacaatggaacatctcattcaacgcccatccaaacata

SEQ ID NO: 40673 - DNA, 285 bp, Gossypium hirsutum
  unsure (1)..(285): unsure at all n locations
  Clone ID: LIB3149-053-Q1-K1-F11
gcacagttgagcaatatcatgaccaatttgtaagtcttctgaaccaattgcatctacctgagagttatgtgttgagtatatttgttcataaccttaagtccgagattggttagtagttgtagttgtttaaaccaaccaacttggaagaagggttaattctagctttgcaaatagaggacattattagcacaggttcttccaaaactgtttctataacagggaattcaaattattccaaaactttgtttcctcaaaananaaaaaaaanaaaaaaatttttttttt

SEQ ID NO: 40674 - DNA, 319 bp, Gossypium hirsutum
  Clone ID: LIB3149-053-Q1-K1-F2
gaaattggctgcacaataaagaagtttccccttttgacacccagagagtatgttcttgcttggagattgtgggagggaaaagatagaacattctactgttttatcaaggaatgtgaacatccatctgcaccaagacggaagaagtacgtccgcgtaggatattttagatccggttggcaaatcaggaaagtacccggtagagatgcctctgagatcagaatgtttcaccaagaagatgctggtctgaatgtggaaatggcaaaactagcatttgcaaagggcatatggagttatgtatgtaagatggataatgcattac

SEQ ID NO: 40675 - DNA, 273 bp, Gossypium hirsutum
  Clone ID: LIB3149-053-Q1-K1-F4
gggggacccacgcgtcccgtaaatcgctagcgattattatagtgtatccattcttacccacacgaaaatgcgagggcgtggctattttataacgtcacctaacttcaattcacctgccgtctctctacaacttcacaactcacaaaaccctgtctgtacccaacttaatagatttgatacacatccaccttttgacagctgacgaaatagcccccaatcctgaacctatcgttcttcccaacacaagaacaaactttatggctaatgggacac

SEQ ID NO: 40676 - DNA, 357 bp, Gossypium hirsutum
  Clone ID: LIB3149-053-Q1-K1-F5
cattatgctgatgttcctcacaaaagtctaacagatgagaacgctggctagaactggggtccgttcaaaagaaatgggttcaaatttcccggaggaggaactatgttccctcaaagttccaattcctttattgattagcttgcctctgtcattccaattacagaccgttttgtcataacaacatttgattcttgttgtggagttgccaattggggtgcctacattcttaacagaaatgttctggctatttcttttgcacctctggacaatcattaagcacaagttcagtttgcactggaaccaggtgtgccttctgtaattggtgttcttggatccaataatgtttcatatccaaca

SEQ ID NO: 40677 - DNA, 390 bp, Gossypium hirsutum
  Clone ID: LIB3149-053-Q1-K1-G7
ctttctcatttctatcttattgtttggtcacccaaccaagaaaagcaatgatgtgggaaaccccaaacagccatgaatcaagccaacatggccaagccttagacccccatgagccccaaggttaccctgaagactatgatagcacctgttccacaccctatgttagtgctccttcaagccctggccgggcacctggaccaggatccatcaatggcgggttcttttatagtgcaccagctagccctatgcacttcgcaatgacctcagtagcttcaattgtgtcctcaacccgaccatcctcccctgataacttagtgcctctaggttttgagtttgagttctctgggagatttgggtcttcagggttgggtcaaacagggtccatgagct

SEQ ID NO: 40678 - DNA, 346 bp, Gossypium hirsutum
  Clone ID: LIB3149-053-Q1-K1-H1
ctttaatatgatccaatcttactaacctttttattcgccggtataaaacatgtatagggtggcctatgtaaaatatactcatcgctgccgtacgacgggaaacttggcattacgactaagattcgaacatattcgtgtgtatacgcatgcaccccgcggagtacttttggtattttatgatcttggaacggacaatgctacattttactttgaaacgcaacctgatgattgaattaatggcgccgacacctttctcactaaacgaggtaggagcatattctacatgctgcaaaacggttacactttgcagcgcaaaaaattattgtgcgttgattgtaaagccttc

SEQ ID NO: 40679 - DNA, 262 bp, Gossypium hirsutum
  Clone ID: LIB3149-053-Q1-K1-H10
ccaaaatttccagattgaattaaaatgcataatttctataatatggattataagagatcaaattcatgcttcatggttatttctacggttaaaaaaaaaaaaaaaaaaaaaaaaaaaaaaaaaaaaaaaaaaaaaaaaaaaaaaaaaaaaaaaaaaattaaatatctataaaaaaaaaaaaataattaaaaaaaaaaaacgggggcggactttttaaagattcaaagttaactacacgttctttgaaagtggttatattttt

SEQ ID NO: 40680 - DNA, 414 bp, Gossypium hirsutum
  Clone ID: LIB3149-053-Q1-K1-H12
gctgagtgtcatattccgtttcaaattgattcatccaccaacgatgaagagacctgcctggagggtggcgtttattctgtcgatggagatgggaccgtaccagttctaagtgccggttttatgtgcgccaaagcttggcacggtaaaaccaaattcaatccttctggaatccgaacataccttatggaataccgtcactctcctccgacaaccttactggaaggacgcggcactctaagctgtgctcacgtcgatataatgagaaattttgcattaatcgaggatgttataaggatcgcggctggggcttcgggtgaagaactgggaggaaatcgagttcattcaaatatcttcaaatggtccgagaagatcaacttgcaattataagcctgcactgatacatacatactctcc

SEQ ID NO: 40681 - DNA, 261 bp, Gossypium hirsutum
  Clone ID: LIB3149-053-Q1-K1-H2
ctttaatattataaaatcttactaatttttttatttgccggcctaaaacatgcgtgggtggggcgatataaaattttctcatacctcccataaaacgtccactctttcactattcaaaccttcctcacccttaaaaccacatcctaacacctccttattttcttcttaaatcaaatcaacttgtcacgcactattacatttttaaattgaaaacccatccttacccctaaataaattgcttcccccccatttccattttac

SEQ ID NO: 40682 - DNA, 385 bp, Gossypium hirsutum
  unsure (1)..(385): unsure at all n locations
  Clone ID: LIB3149-053-Q1-K1-H3
tggttctagtttagcatcttctatttttatcctctctgttttttctttttttcttggttggggggtcacacaaaaagggaaaggtggatcactctggccaccaaaagggccgtggttgctataaaaaaaaccaaaatcttttttagcaaacagggaaaaccatgaagtctaatggatagagacaaccacacacgcacgccccaagagagagagagggggtggctacttttgttgggttgtagtaggtgtgaattaatgaaggcacgaggttcacgcgaggatgctttgcttaagatcctcttttatctactaaaaatttcctcnnnnnaaaagaaaaaggccaaaaatangnggggtnncaacccatggaaactctttccccaat

SEQ ID NO: 40683 - DNA, 395 bp, Gossypium hirsutum
  Clone ID: LIB3149-054-Q1-K1-A2
cccacgcgtccgattacaaatatgttatttcccagtatgtggaagggtctagtagccatttttatggccggaattctcgccggatcagtgtcggtaaaggctcaaatggtggctgatatagtaacagacgagttctttgatgggattttgaatcaagcagatgccagttgcgaagggaggaatttttattcaagggctgcatttcttgaagctctcagttcttttactcaatttggtacagctgatgatactaggcgtgaggttgctgctttctttgctcatgtcacccatgaaactggacatttttgctacatagaagagataaatggtgcaaccagggactactgtgatgagaccaacacccagtatccatgcaaccctgataaaggctacta

SEQ ID NO: 40684 - DNA, 230 bp, Gossypium hirsutum
  Clone ID: LIB3149-054-Q1-K1-A5
aatagaatcttatttgtgaagtagcagtggaagaggacttgcctttcttcttcaaagatacaccttttgatctttgttccttcaaggtgatgagtatggttgacaattctaacggtgataaaagtgatgatgaaagggaaaagaaagaaatattacaatgcatggaatgttttaaccgattatttgttgttgcatattattctgtacaattatattatgagaagtatata

SEQ ID NO: 40685 - DNA, 308 bp, Gossypium hirsutum
  Clone ID: LIB3149-054-Q1-K1-A6
cggaatcagtgctcttatgaccgggttttacttgtacaagatcgctactggcggcaatcatttcccagccaagactgaatgatgaacactggtacattgacattaccagttgcaacagatctctcaagatcattgaagtttagctgcttgaattggaaaagtttagttacacaacatgtgctgtactttctttattttttggacaatacatgtgttgtactttgatgcgtgcatgaagttaaaatatagcctgtcttgtataccaaagaacctcggtttattcttttaccaaagttatgctgttccgt

SEQ ID NO: 40686 - DNA, 359 bp, Gossypium hirsutum
  Clone ID: LIB3149-054-Q1-K1-A8
catcattcaatccagttacagctctcaatcttctcatttcaatcaacttgtacggaaaaggaggcaaccaagaaatcaactgagattcatgagaaaccggtgtttgttgcatcgaggctaaaggaagaagctattgcacaattaaggttggcgatggcagaaaaagcttatgctgaagaggcaagaaagcaagcaagaaggcaggttgagttagcttagcacgagttggccaaggcaaagagaatcatgcaacaagcacaagctgaatcagcaaaggctcaagctttaaagaaccatgcagtcaagcaaatcaactccactattttttaagtcacttgccatgcttgtagacaccgatt

SEQ ID NO: 40687 - DNA, 213 bp, Gossypium hirsutum
  Clone ID: LIB3149-054-Q1-K1-B2
gttttacttgagtaacaacttgtaatcctgccatgttgatagctaccttcaatccgctaaataactggtttttttttttaattattacttttgaacaggggtataattgagatagttatgctctcaagtcattcaagtttagcttaaaaagaaaaatgaattcaatttaatcgttatcgagttgagcttgaacagcttgagctcattcatctg

SEQ ID NO: 40688 - DNA, 355 bp, Gossypium hirsutum
  Clone ID: LIB3149-054-Q1-K1-B4
gccacgctttcgtatcaatctatcattgctttttatggataaaaacaaaaaaaaaccaaaccgtgcttttgtttgattggaattatgacgatctcacatctgtgtgtttgtggcaaatagaaaccaagattatgtctctaggacttgacaatgctcacgagaccactctacttgacatgtagaaagactagagcttagttcaacattagccatcccagcacccaacatatgtggaattgagtataggcaaagaaaaatacaaagcttttgatttgagacggcacctattcagtaaccaagattggaaggattactatgctaaggttggtgcttttatatatttcctggatgcata

SEQ ID NO: 40689 - DNA, 330 bp, Gossypium hirsutum
  Clone ID: LIB3149-054-Q1-K1-C11
ggcacttgacaacgtaggaatgtggaacttaaggtcggagttttgggcaagacagtatctgggacaacagttttatttgcgagtatacaccacctcaacttcgctaagggatgaatatccgatccctaagaatgcactactctgcggtagggcaagtggccgacacacccgacccctctaacccagcatataataaaatctccaggtttgggtttaggattgaatagcagagttttggcattaatgttgctagtgtgaattatggaggaacttttatgcttttaaccttaaattaatagacctcaactcgaggtcgcattttttttttct

SEQ ID NO: 40690 - DNA, 233 bp, Gossypium hirsutum
  unsure (1)..(233): unsure at all n locations
  Clone ID: LIB3149-054-Q1-K1-C12
gacagtttacaacctatgtatcttttactttacttcggagttntaggcaagacagtgtgtcgaacaacattaatatttgcgagtatacaccacctcaacttcactaagggataaatatccgatccctaataatgcactactctgcagtatggcaagttgcctacacacccgacccctataacccaccatataataaaatcttcacacttttttttcatgattgaatagcaaat

SEQ ID NO: 40691 - DNA, 375 bp, Gossypium hirsutum
  Clone ID: LIB3149-054-Q1-K1-C4
aaaagactcactgtgctttttgatgatgtttccttttaacttaaactatattctctgatctgcgttttcgtttatttctcatttagatcattgttttcgaggggcgggggccggggggggggggggaagcttatcttgttctttgttggcttcattctcgtaaaaccattgagaggaacacgtggtccattttcttctttcttcttggggttttagcaacttccttgactttcattatgagattctgaaaaatgggattttgtgtcaaagatgcagaatattggtgtgtgttttaaggaacctacttcagttgtttgagattgttttgtaactggttcttgtacaatgagaaaaggcagaggaaaagcaaagaag

SEQ ID NO: 40692 - DNA, 324 bp, Gossypium hirsutum
  Clone ID: LIB3149-054-Q1-K1-E4
gtttcttgttagttaatcagccaagtattctttcaaaatctcctctctctctctctctctggctgtctggctctctctctctctctctctctcactctctctgtctctctatctctatttaatcgggggatttgggcatagggtcgcgtctttgttaatgagcgatctgtgaagaggggtaagcgtcggtgtgaaaaaaaagcacggctaatgatcttgggagtacaatgaggatcgctatccctatgcatgagaaacatattcttcactcgtgctcgggcgaaatgcaatacagggtctatggagccccaaggactacctctt

SEQ ID NO: 40693 - DNA, 116 bp, Gossypium hirsutum
  Clone ID: LIB3149-054-Q1-K1-F4
ctgatgttcaattctcccttaacccactctatataaactttttcaacgcccacattgtcctgacattttgatacatttcttgagatcccttacacattcatctattccctcattga

SEQ ID NO: 40694 - DNA, 433 bp, Gossypium hirsutum
  unsure (1)..(433): unsure at all n locations
  Clone ID: LIB3149-054-Q1-K1-F8
aaaaaccaggccgacccacgcgtacgatgattttattaacccaattttttttacattctacaagcacnccaacngcctggatgttttggatattaatacgggctccacagatggtactcacaccatgcttgtattctttaatccacctcctgggcatttggctccacaaaaacagatagtggcctttgacaaaatgcattttccagcatggtcacaacgaccagtaggaatcaacattcatgttttcaagtttttaagtgttgctgataattcttgggttctaagaatcccaacttgtgttcacaatatccatatcggttgcgctaatcattctttatatcttcatcctgtaactttaggggtaaataagtcctatactttttcaatgcaaaataaaggatacatttttataaatgccaaattcaacaattac

SEQ ID NO: 40695 - DNA, 255 bp, Gossypium hirsutum
  Clone ID: LIB3149-054-Q1-K1-F9
cgttcgggacagatgttgaatttcattacctaaacgtttttcttttgaaccaactgcatttaccagagagtggtgttttgtttatatttagtcataaccttaaatccgagattggttacttgttttacttgtttaaaccaacccactttgaagaaaggtttatttctaactttccaaataaatgtcattattaacacaagctcttccaaaactgtttgtataacacggaattcaaatttttacaaaactttgttt

SEQ ID NO: 40696 - DNA, 172 bp, Gossypium hirsutum
  Clone ID: LIB3149-054-Q1-K1-G10
actacacaaaaaccaattctacatgttgatttcaaattcattcggaaaaaaatgtgcctggtgctgtcgtggaaactgtgatacgaaatgtacagagctcatctaatttttacagtcctgtatgaaagatgtctggggtcagcagcaggcaattttagaccaatccaatttg

SEQ ID NO: 40697 - DNA, 174 bp, Gossypium hirsutum
  Clone ID: LIB3149-054-Q1-K1-G4
gcgtgctatggaaggcaattcaaggaattctttttaaattcaacaagccctcaggcggtggtgaagttggcgatgttcatacggttatcaacgatggtgctcacgccatgctagaatgctataagccaccaaccgatcatagtgctccacagaaacaactggaagactctgtca

SEQ ID NO: 40698 - DNA, 255 bp, Gossypium hirsutum
  Clone ID: LIB3149-054-Q1-K1-G6
aagttttggtggcttgtttcaatttttactgaaaatggaagcaatcttcactccattaaaaatctaaaactagcgatttttcaatgctaaattttccatagcatgtattatccgattttcttcgtggttctacaaccgtttgtgtagatacccgattatcagatttccgagtctttagcatcccttttcatgaagttaggacttgttactgtaactcaaattctgttgtttatctgaatttacttcatttatagc

SEQ ID NO: 40699 - DNA, 190 bp, Gossypium hirsutum
  Clone ID: LIB3149-054-Q1-K1-G8
gaattatcctgacttgaatccatttgaactttataagaaggcactgggatctggcttgaggggcaaatcctcaggatcataccatcataaaacatggctagcatgtcatatgcgagtctgctagccgttatacagccattagagtaacacacacacatgttagacatctcagggattgggcatgttattt

SEQ ID NO: 40700 - DNA, 382 bp, Gossypium hirsutum
  unsure (1)..(382): unsure at all n locations
  Clone ID: LIB3149-054-Q1-K1-H3
acgaccgcgataagcgaaatcaaaagccagcagtttctgtatctttaagagcattcgtttgacaaggattcgccgggggttaggttcacagatctctaactcctgctggtaaggtgagaggccaaactcctaaagtggtctcacttgacaagaagaagaagccccgtggccgctcttacaagcggattcaatacttccggagcttcttcacagcagatgttggatgttgcaaaaagagtggacctaactcatcttagaaagaagagagcgatgnaagtgaattatattttttacgccttgaagaaagcaccgatggattttaagtcatcgcaatcttaagagaacgcttgtatgatactggtttcaaggcttggattgaact

SEQ ID NO: 40701 - DNA, 415 bp, Gossypium hirsutum
  unsure (1)..(415): unsure at all n locations
  Clone ID: LIB3149-054-Q1-K1-H4
cccacgcgtncgggaaaatnnnnnacctgttctgcacgctgatattttcagtagttgttttggggactaccatcaaaatgttgcgcagcatactcgaagtgctgatggagagtacgcctcgagagatcgatgcaacaaagctggaaacagggctattgcaaatgggggatgttgttgccattcatgagctgcatatatgggccattacagtggggaaagtcctcttggcttgccatgtcaaaatccgacccgaagctgatgcagacatcgtcttagacaacgtaatcgaatatatcagaagggagtataatatcagtcatgttaccattcagattgagcgttaaaatggtagacaataatttagagcatgcatggacctcattactctacatatatttatagttgccataaatac

SEQ ID NO: 40702 - DNA, 156 bp, Gossypium hirsutum
  Clone ID: LIB3149-055-Q1-K1-A10
tgtcgcagtgggtatacaaaggccgacgacgccttcaaagtgccacctgaggaaggacccctgacggcattaccgggtgggggacccagggcgtaatgaggctacgcgtcttgttttctctttgacttgcgttccgagttaatggtcttagtcata

SEQ ID NO: 40703 - DNA, 234 bp, Gossypium hirsutum
  Clone ID: LIB3149-055-Q1-K1-A12
tcgccacgcgtcgcagacagaggcaatgctggaataactgggcagagtctttgctgtgctatactggaaagggaatcattatgagaagatggaaaccatgcggtgatgccctcagaaagaatccgccctgagccatcattggatttgaccacccagcagagtggttctgcgcggagaagttatcaagttttagaagacagcgatatgtgcctgtgagtggaccatctgattcgt

SEQ ID NO: 40704 - DNA, 173 bp, Gossypium hirsutum
  unsure (1)..(173): unsure at all n locations
  Clone ID: LIB3149-055-Q1-K1-B1
gcgtccgttctcctctggtccttcatttcatagtttctaataagcacttaatatctntcaattnttattatagttcaattgttntatatataatggaacaactttcacatggtgttatctatatataaaattaatagaagcattattttattgcnnanananaannnnaanna

SEQ ID NO: 40705 - DNA, 376 bp, Gossypium hirsutum
  unsure (1)..(376): unsure at all n locations
  Clone ID: LIB3149-055-Q1-K1-B9
agcctaatgccaaaacttgggagatctntntggatntattatttgaaaatggagacaccaagctggctgttgattgtgtggccaatgaatttcactggcagaggagatggcagaaagtgggtcccatcatctgaaactattgggacagtgatgcgtcattttgagcaaggaaagatgttgatggggccaagttttgtgagatttaaagaagctgtgaccgtttgggaggaaggttgaatatgataactatcactgtgaagaaagtcatatcgtgcgtgaaataaagtaatataccagtacatgtgatattggtatatttttatgtgttaattatctgaatattatattatcttgttttttaaatcatgatatgtac

SEQ ID NO: 40706 - DNA, 146 bp, Gossypium hirsutum
  Clone ID: LIB3149-055-Q1-K1-E2
aaaggatcaaggttgctggcaaagctggtgctctaggtgactgcgtcactgtcacccgcgacaagacccatatcacgggtacctctgactccaacttcactaagcggtacctgaaataccacactaagaactacttgaagaagcac

SEQ ID NO: 40707 - DNA, 387 bp, Gossypium hirsutum
  unsure (1)..(387): unsure at all n locations
  Clone ID: LIB3149-055-Q1-K1-F2
gaccacgcgtccgccgacatcttcaatggccagtccttggtccgtaaccgccaacgcgacacctctttttgctttgccggagcgccgcgcggcgccgtgaagaacgatttccgaggcttgctgttgaaccaatgtatgaacgcttccggtttatgccgggtcgttgattgcgccggtacccgttgctccaacggcacatcggcgatcctcgaaaccattttggattctcgattttgcttgcaacccagaggcgacagtttcactcgtaggtcaattntcgactgcatggtcaccggttccatcctcgtcttcttctggcaccgaacggcttatctcagtaccaatggtttaccgaatgatccaaagtnactcgtttatcaccggaca

SEQ ID NO: 40708 - DNA, 174 bp, Gossypium hirsutum
  unsure (1)..(174): unsure at all n locations
  Clone ID: LIB3149-055-Q1-K1-G10
tntcagtctattctcaactcttccatngttattgtgatgcgatgcaatatgctgtcattttcagagttntctttgaaatggtgttcttatgtactaataatggcagaggctacttggaagcgtttangtgttgattgcctgatttggacgaaaggatcatgccgtcggtgatat

SEQ ID NO: 40709 - DNA, 339 bp, Gossypium hirsutum
  unsure (1)..(339): unsure at all n locations
  Clone ID: LIB3149-055-Q1-K1-G3
gaccacgcgtccgagccctaaatcctncctncctctcaatctcagtcgaaaccaccctaaatcacacacttaaactttcactcacacactatttctcttacgccggagtcgccgagtcagagtgtcggaccaccacaccaataggcaatacccagacccaaggccagaatgtcaaccgaaccaacatctattgagggtagtgttacacctcctacttcggtagcttctgaaaattcggggttgagctcaatcaaacaaggggctcgtcgggaagaaagccctctaaggcaagttggctactatattataatggggctgaggtatgatatggtagattgt

SEQ ID NO: 40710 - DNA, 244 bp, Gossypium hirsutum
  Clone ID: LIB3149-055-Q1-K1-G8
ctacgcgtgcgctcgatgtcgatctctctcataaccaacattctctaccctcaaatccgccattaacaaaccaacccttaaaccaaaacccgcctcttctctgcgtggttctcgcacttctcccacattttcaaggtctgtttctcaattgggttgtcttcaatctctgctgcctctccactcagccgtgtcttcagctcggttaacgtcgtgtctaggcatcgattcgaggagctctaggtcg

SEQ ID NO: 40711 - DNA, 374 bp, Gossypium hirsutum
  unsure (1)..(374): unsure at all n locations
  Clone ID: LIB3149-055-Q1-K1-H10
gtgctgcgagctaggngttgcggcgctggattgngggaaacctctaggtttctacttcggcaaagaaaggaaaggaaaaagttgacgaagagtgactcgngaaattacggttaggttaaagttcaaacattgaatcagcgtccaaggccgatcccgaactcattgtggtgaaattgctttgtggaacgtccaagctggatcaagtttnaagctacactatccatactatgtagatgacaacgttgaattggtggcatttcctgatgtgaatgattatttatatgttattattaaaagtaaccgtagttgactataattgaaatactatagtatgatagaactatgatttgatgtattatctagattgtataaaa

SEQ ID NO: 40712 - DNA, 250 bp, Gossypium hirsutum
  unsure (1)..(250): unsure at all n locations
  Clone ID: LIB3149-055-Q1-K1-H7
gaattataacanttgaagaatggagagatttccttctactctatcctcatgaagctactatggagaacatctatcatcattgggaaaaggaggaatagccggagcagcttctcgcactgcaactgctcctctcgatcgcctgaaggttgttttacaagtgcaaactacaaatgctgatattctgccagctgtaagaaaaatatgaaggaagatggtatttgggttttcgggtagggtaatgtgaagactc

SEQ ID NO: 40713 - DNA, 226 bp, Gossypium hirsutum
  unsure (1)..(226): unsure at all n locations
  Clone ID: LIB3149-056-Q1-K1-A12
ggaaactctagttggttttcgcttgtgatttccactattctcgtgtttatcccttgaggacgcgaggtctggcttttatttgtcgattatataataaaatcacaatttaatttactaataccaangagagctgagcaacctacaaccacgtgcatggggaaagaggaattgcgacgtagaatcatgtagcaaaggagccggcaagaggatgcgactgtagcagcac

SEQ ID NO: 40714 - DNA, 256 bp, Gossypium hirsutum
  Clone ID: LIB3149-056-Q1-K1-A4
atgaccctgctatctgtctgtctgtctagagaccttccaggccttacatgggtacccaacaatccagcaccgtaactggatgatggagcacaaatgatgcgcatatcatttacatctgtgacagaagtcacctcatatttcgttcaattctcagagaatcatactatataaagctttgagccattatgattcattaatattgagtattattattagtaattgcatatatatagtatatataataggattctcatat

SEQ ID NO: 40715 - DNA, 248 bp, Gossypium hirsutum
  unsure (1)..(248): unsure at all n locations
  Clone ID: LIB3149-056-Q1-K1-B7
attcacccgtagctatggcactccttctcgccagttccagacgcagatccctcgccaacccttcactctccgccttttctccacttcttcaaatgaccgaacaacgagtggcgcgtccacgaacggcaaccactccggcaataatccctcttcagactcttcttacttcggcgatgtcaaaactgaccaaccccaacanagacccagaaaccccacanatccttcgactcccaattccaaacccatgt

SEQ ID NO: 40716 - DNA, 257 bp, Gossypium hirsutum
  unsure (1)..(257): unsure at all n locations
  Clone ID: LIB3149-056-Q1-K1-B9
catacattaagtgcctttcttggaactctctcataccttacatnggctgtttccccttttgatagcattgctgtgtttngctgttaccgcatgtttccgttgctggatggtcaagattactggaatgctttatatacaggttgcaatgtcattcctattaagggaacagttctagtgccttttgtaattttggattgttaaaatgtctaaactatatggctcggatacgaagtgtcattctaatcacttactgggtt

SEQ ID NO: 40717 - DNA, 169 bp, Gossypium hirsutum
  unsure (1)..(169): unsure at all n locations
  Clone ID: LIB3149-056-Q1-K1-D7
ggaagaaggaaaacagaacctaggctatatatgaatccaacataataaagtatatacatatatatatatactaatatcagggagtatactagtgtgattntattacgtgtttgcgtattgtatttaatgaaagattatccttataaaaccttaattactggaataattt

SEQ ID NO: 40718 - DNA, 406 bp, Gossypium hirsutum
  unsure (1)..(406): unsure at all n locations
  Clone ID: LIB3149-056-Q1-K1-D9
atccggtcaccacgcgtcgccatgaacgggaagtgcaccctgctagctcaggaagttcatgcagttgaggaaatggtcatgagaatgtgcgggacatgctgcatcaactagaatatatatggaggttcgaaatggacaactgcaggaatggcgacaacccgtgttgatggctttggtggtgagcttcctaaacccgagttgtgatatcataaggccggatggtaaaaagaatagaagttgaaacaggaataaaggtaaacagaaacaacctttggaaacttaattttgtagttgaatctttcttgaacctaatgttgtgaaaattcccgatgaataagcaaattaactatgtgtttttttgcggggtgangatgatcctattcgacttcctgattactacaatgta

SEQ ID NO: 40719 - DNA, 200 bp, Gossypium hirsutum
  unsure (1)..(200): unsure at all n locations
  Clone ID: LIB3149-056-Q1-K1-E5
acagcaatggcatccattgtaaatgagacatcggactcatattcaacatatgangagctgattccctatacaaatgcaattgataggtgggatatcaaatgtatagatcaaattcccgtatcatcataccaactacaaagctcttatatgttataaaaatgtcatgtcctacatgaacaattccatcattcaaatcatat

SEQ ID NO: 40720 - DNA, 232 bp, Gossypium hirsutum
  unsure (1)..(232): unsure at all n locations
  Clone ID: LIB3149-056-Q1-K1-F12
gcagttnttaccctagagttaaaaacacaggtgagggagggtcgttttgattaaaaatgtacagttaaattggaattggataaatagatatgcatgcagttggggggtgaaatgaacacanaaganatccacccattttgtctatttttggtcttaagatggtgggataaatagcttgtaatcactaaattataaaaaccctttttattttaatttaatatattctttgctg

SEQ ID NO: 40721 - DNA, 374 bp, Gossypium hirsutum
  Clone ID: LIB3149-056-Q1-K1-F7
cagaaatccagaaacccaccctagcgcggcggcgttactttcaacaattgaggctaccctataaacataagtatgtcttcgtccattatgatcactaaacgagttttgtttatcaagtatctatttcttataaaaatccttaccctgatctaatataaaattgggaaataatcaaaataatatcgattggtctatgatctcaaaggctaacataataatctccttctgactcctcatatattttctactattttgtaaaaactcctggaagtctatctattggttactctacaaatttattgggttacccattaacaccccccccttagtataaactcataatggccacaccatcatttctactatattacata

SEQ ID NO: 40722 - DNA, 189 bp, Gossypium hirsutum
  Clone ID: LIB3149-056-Q1-K1-G10
gacataggtgattgttaggccgcaacattaacaggatcaggaacgagacggcaactcctgtggagatggatgatcagctcgacattcgtcgttcagagcatggaagaactgaatcaaagagctagcaatcggaacaggtactaaacgtgtcatataggtaatgtaatttcgcagtagacaagctaattc

SEQ ID NO: 40723 - DNA, 233 bp, Gossypium hirsutum
  Clone ID: LIB3149-056-Q1-K1-G11
tccggcgacacgcgtcgtagttgcagcggcttgtcactgtcgggtgaggttggaaaggaatttggagctcggaggacctgctgcactgaaggatatgaaaatcgtgctgataggcgagggatagaaggaaatgatctaataagtatgttgagggagctgcattgtaccaagatgttctttatgggtttgtattatgggacttactttaacttgtaaatttgacgataatgcag

SEQ ID NO: 40724 - DNA, 104 bp, Gossypium hirsutum
  unsure (1)..(104): unsure at all n locations
  Clone ID: LIB3149-056-Q1-K1-G5
cttctggcaaaggcaactgctggtgaatctggtgtgcctntcctctctatgtctggatcagantttatggaatatgttgttggagttgggccgtcaagagtgag

SEQ ID NO: 40725 - DNA, 275 bp, Gossypium hirsutum
  unsure (1)..(275): unsure at all n locations
  Clone ID: LIB3149-056-Q1-K1-G7
attcccgtcgaccacgcgtcgcactctcagctgattcactcgtgggttcttattaaccctcatcagctaggctgttatgattgattatgttcaattaaaaggtcgcatatctatgtaaggttgctagtggcaacgtcagctcaatttgatctgatgtatatatatatatatattctacagatgcccattttaacaaataaaactggnatatgtttaaactctactgntnggattatngcttagttctctgttngaacactggaaattctaaatct

SEQ ID NO: 40726 - DNA, 432 bp, Gossypium hirsutum
  unsure (1)..(432): unsure at all n locations
  Clone ID: LIB3149-056-Q1-K1-G9
caagatggtaggtcaagaatntaccaaaagtggctcggcgtttgcatttcctcgggactctccattggcaatcgatatgtcaactgcaattctagcactcgctgagaatggtgatctgcagcgaatacatgacaagtggctgatgcanagcacctgcagtttagagagtacagagatagaaacaaaccaacttaatctatccagcttctggggtctgttccttaattgtggcgttgcttgcatcattgcccttttcatatattttctgcagatattgcagcagctacctcctgctcctgaatctgcttcaattcctggtcaagatagctcacattctcgacggctgcggaggttnttgtcactaatggatgagaaagaagagcaatcaagtaagatggtactggatgactggaaaaggctntactctaacac

SEQ ID NO: 40727 - DNA, 286 bp, Gossypium hirsutum
  Clone ID: LIB3149-056-Q1-K1-H10
gatcaagcacagaagaagaggtcaagctcgctggctacattctacaggtggatgaatcggtaggttcagaggctgggaaagagtgccctaatgctgatgtgggctggaacttcatggctacattcgatggactatgcggagtggactactatttacagaggtgtgaataatggctcgcaaaatgatcttaggttcaattgttagttaaattagatgcgattgtaacatatttgtggtgaattttaactggctttattgattataaaaaaaaaaaaaagcgcgttaa

SEQ ID NO: 40728 - DNA, 305 bp, Gossypium hirsutum
  unsure (1)..(305): unsure at all n locations
  Clone ID: LIB3149-056-Q1-K1-H7
tcgatgattgaagtgcanaatctcagtgaanactgcaccaaagtcagcttctcacccttcgaataaggcctctatggatagtcagtacgagttcacattcactgcttcatattcctatcaacaggcacaacatccatacatttggacactctgcagtgcttgtggtatcaagtaccagttctanttggattgtttgaacagattgttagattgcaagagatgtgggtcttccttcatcgcctntgacttgngtccttacggccactcttggagtcagttctccaatcagaaagagattccaaatg

SEQ ID NO: 40729 - DNA, 258 bp, Gossypium hirsutum
  unsure (1)..(258): unsure at all n locations
  Clone ID: LIB3149-056-Q1-K1-H9
gaccacgcgtccgcaaggcggaaccaactccatcatcagcctataactcgaagatgcctacggcgggtccgtcgagatcagcaacctggaaacatggggtgggttaatggagccaggacacgactatttcgagaggggtaacttggacattntctccggtaggggtcgttgcttggatgctcctgtatgttccatgaactngacctcgatgggtgggtcggccatggaggactgaactactggagtacatgacagctc

SEQ ID NO: 40730 - DNA, 171 bp, Gossypium hirsutum
  Clone ID: LIB3149-057-Q1-K1-A12
aaccttcagaatatccgtttacttgagcctcctttttctgatcctgtgcaacttctaatgctactgtgtcaaggggttttttaaaaagtaaatggatctatctccttcactaactgccaaaaatcatatatgcatactttttaaaacataaaaaaaaaaaacaacccttct

SEQ ID NO: 40731 - DNA, 317 bp, Gossypium hirsutum
  Clone ID: LIB3149-057-Q1-K1-A4
gggcgaaccacagcgagttgatttttaaatatagcacccccaacccactcaacaaactcatcttcatccccattaacaacattattgctggatctgcattaagaagcataaaaatcagttccaactttcacactgtatgcaaaacataaaaattacaaatctactcaattgactgagaagtacatcatcgtatttcatgaactaattcaaacttacacatggaaatttctagttctctttatattcaatatatatcaaattatttttgttttaacattttaataaaaatcttgttaaaaaataacacaatttatttt

SEQ ID NO: 40732 - DNA, 281 bp, Gossypium hirsutum
  unsure (1)..(281): unsure at all n locations
  Clone ID: LIB3149-057-Q1-K1-B2
ccagtcttgatcctttacggncagaacccctgtgttgagggctactaaactcctgggggttattttggcaaagcaatcaatcctttggacctgctaaagggtaaccttgcaaaatggtaaatcgagttatggcaggatactacttcgcctggggggtgaacggggtatctctgatatttttgtcaaactgcagtgcggttatctgttgctgaaacttcactagtttaaccatcatataataaggtctagttcatacgttgcggcagaacaaagagttaaag

SEQ ID NO: 40733 - DNA, 271 bp, Gossypium hirsutum
  Clone ID: LIB3149-057-Q1-K1-C1
ctagaggtaccgcgtatgcgaggcacgagatgagttgtacaagatgttgaatgaggatgaactgagaggtgctgatttgctcgtatttgtcgacaaccaggaccgtcgcactgcagtgaatgctggcgtaataaccgatatgctagaacatcattctattcgctagcgccacgtggatattcagagtacgtgtgcaacctgtggagaaggtctctattagggcacagattggatatccaataacattgttcgtgacgcatgacaaaggatc

SEQ ID NO: 40734 - DNA, 270 bp, Gossypium hirsutum
  Clone ID: LIB3149-057-Q1-K1-C11
gattccccttttacttcttcaaataagtttataggcaccataaccatattagtgagaaatgtaattattgtattttatttctccattgttgttctcatatatgtatatatagtcgttagccatagtcatagatgatatgccatcaacgaggcctccaatcccccccccccaaagatttttgtattctgaagcaagagtaaaccatattcttattaacacttaatcaaatttcacgaggtagttttgtcctcgtagtagattgcaagaacc

SEQ ID NO: 40735 - DNA, 432 bp, Gossypium hirsutum
  unsure (1)..(432): unsure at all n locations
  Clone ID: LIB3149-057-Q1-K1-C12
taagcgctgccattaagacgccatgtccggtttgcttgccatttttgcttgaaagatcaaaaccagccgttaagttcaatctgtggaaaaggagaatttttcttctgttatttcatgtaagcaaatgaatgccagtggttgaaaatcttataacatatatcacgaacatcggcaaaatggtttcttagcctcgaacccggagataactcgtacaccgggcaatattcttactctccacattgaagaaatttcttttctaattatgcatatccatatatgtaaccgagtatagagtcgtactttgttatgatctttgctgatcgtgaggtcaataattgcgaaaatgtactgaaaaagaaggtaaaaattccatgtatcatgatcaatgctncgcaagaatatgtaaacactgattagtaatatatgcttttt

SEQ ID NO: 40736 - DNA, 280 bp, Gossypium hirsutum
  Clone ID: LIB3149-057-Q1-K1-C4
gcttatcaccttcaatttccaaattataatgtttgtgataagcacaagcagcaattgggaggggggcggacactttattattttatcatatcataacctataaataaaacaattaaaactcactggctctatgccttattttaaattccccactataaaaaacatagctgatatcttaaataatttttataaatacagtgattgctatactatcttttttaaaaaaaaaaaaaaagtgaggtcactctaaaagatccaaattttccaacccatacttaca

SEQ ID NO: 40737 - DNA, 247 bp, Gossypium hirsutum
  Clone ID: LIB3149-057-Q1-K1-C6
gacccacgcgtccgaaataaaaaaaaaaaattaaaaatttaatttttttatcatttaaccaaaaacaaaaaaaaaggaggccgcgccatcttaaaaagccaatcctccaaacacgggcaggcaaagagaaaccaacactattttcttctcccacacccaatacactgacctcccttttaaaacctcatcactacaaaaaccaagccctttccaaaccaaacccctttgcacaacatccccaataccc

SEQ ID NO: 40738 - DNA, 243 bp, Gossypium hirsutum
  unsure (1)..(243): unsure at all n locations
  Clone ID: LIB3149-057-Q1-K1-C8
aaaaaaaaaaaaaaaaataaaaatttaaaataaaaaaaaaaggaccaacaagcacgagagagccaaacataaaaacgcgaccatccaaaataccaanctctataacaataaaaaataaatgccattcacgccccttatacatacaacacctcaactggaaaaaccatatcttaacccaacttaattgatacaaagaacatcaatctttcgccagcaaaaaaaaaaacaaaaagccgcccccct

SEQ ID NO: 40739 - DNA, 274 bp, Gossypium hirsutum
  Clone ID: LIB3149-057-Q1-K1-D11
cttaaatatttcagaggccaatgttaattttcttgtatatgatcaatggactggaaggaaaagactgtacaggtaattttacattctttttaaagatgaataccatagccaaaattaagtgtttcataggagaatattggtttcctctattaaattacttgaatagtttagctaatgctagggtaactgataaattgcacaatcattgatgttaataggctgtcagccctatttttgtttttatactatctttggcattccactttcatgcttt

SEQ ID NO: 40740 - DNA, 273 bp, Gossypium hirsutum
  Clone ID: LIB3149-057-Q1-K1-D4
acatcccacctgaactcacggggagggtggcttttaaaagcaattccccccccattccaaaccaacttattcactgcaaaaaccctgtttacacccaacttaattgcctcacaaatcaccattcattcaatagatagaaaattaacaaacatgcaaatacctatttcccttataaacacttccataatcttaatgccgaaagagccgcccattgaagagtttcacaatgcacaccagataatctattaacccccactaaaacagtttcactag

SEQ ID NO: 40741 - DNA, 119 bp, Gossypium hirsutum
  Clone ID: LIB3149-057-Q1-K1-E10
tgccaatcccttcgcgtgctatacaaaggccgacatccccttcacagtccacctgagcaaggacccctgacggcattaaccgcgtgtgggtacccactgccgtcactgccagccctacg

SEQ ID NO: 40742 - DNA, 211 bp, Gossypium hirsutum
  Clone ID: LIB3149-057-Q1-K1-E5
aacttaaaacttaagggtgaataacaatttccgatcacacctgtttgtgaggggatttgttccacatttttttaccagacgccttctacgttggccttgtttggtcttggtgcaaatggtgtgcgtgtttttaatgcctgtatatattccatttcattttgatttttatattcagtgttttccggataccattacataaaagtttttatga

SEQ ID NO: 40743 - DNA, 241 bp, Gossypium hirsutum
  unsure (1)..(241): unsure at all n locations
  Clone ID: LIB3149-057-Q1-K1-E7
ggggccgacccacgcgggcgatatttcgactaattcttcaaatttattataataaccccgacgactccngaaccgagcggctgaattatcactctcactctcatcacacgagcatctgctttctcttttggactcattaatagtaacattaaactcaagtttcttaaggccaaagcaaagtctcaaatgaaagctcaagcaaaggcttaccactgaatcaagggagatttttgatcataat

SEQ ID NO: 40744 - DNA, 378 bp, Gossypium hirsutum
  Clone ID: LIB3149-057-Q1-K1-F7
gaaagaagctaggataatcatagtccaaatattccaaggccttgtatacttgaacaaaagagcacaaaagattattcattatgatctgaagcctggcaatgttctctttgatgagttaggtgtagcaaaagtgactgattttggtcttagcaaaatagtagaagatgatgttggatcccagggtatggaacttacatcccagggagctggaacatattggtacttgcccccggaatgctttgagctcagtagaacgcctctgatttcatcgaaggtggatgtttggtcagctggtgttctactttaccaaatgctttttggtaaacgcccctttgggcacgaccaaacgcaagaacgaatattgcgtgaggacacaat

SEQ ID NO: 40745 - DNA, 215 bp, Gossypium hirsutum
  Clone ID: LIB3149-057-Q1-K1-G1
tgcctgcaacaccggagggggtatattgttccacatccattcctttcactgcccgaagaatgacaacaacgtgactatgaaaacccgtgcgttccttaactgaatcgccaaggatcacaatcacattgctccagctggcaataacatcaaaattctatcaccaaccgcacttctcatcaaccacacatgccaaatgacgaacaagactctcacaa

SEQ ID NO: 40746 - DNA, 275 bp, Gossypium hirsutum
  Clone ID: LIB3149-057-Q1-K1-G5
tccggggtcgaccaagccgtcggttcaaacctccttccttccttcctcctccttcttcctcagccaagaaaacgaaaaaggaaagggctcccacaccatctttttcttcgaaattaagccaaacccatatgagaacaccccaatcgaagcagcgtttaaacttctcgtcaacacgaaacaacccccaacacccatctcctaacccaaactccattgcagccaaagaaaacccaccaggggaacacccagttgaagtcatcggcagaataagaaac

SEQ ID NO: 40747 - DNA, 309 bp, Gossypium hirsutum
  Clone ID: LIB3149-057-Q1-K1-G6
ttccaatctcagataaaagagccaatatttgggaagaaatctcgctcggagtttgcacttctatggaacaaagctgtggaccagatatttgtgccggtaattgagtccattagttcacttcgatggtagaaatttggagtaattttaaagtcaactattgatgcgtctattactacaaatcattgcgtgcattagcttgtactcagctgtatctctctaaatcttttgaacttaaaaaggaggaatgtatcctggggctatgctatgttgtattacataacataaaataatggtaaattctactttcat

SEQ ID NO: 40748 - DNA, 254 bp, Gossypium hirsutum
  unsure (1)..(254): unsure at all n locations
  Clone ID: LIB3149-057-Q1-K1-G7
cgacccacgcgtacgntccaaacttacaaaaaaaagcctttatgtgggaagaaaccnagcacgnaggcgcggccgcgatcttacaaacctgcgcaccacatcaccgtaccgacaaatgactccatgatgtcagcatgacggtagaaataagaagtaatagcaaagccaacgaccgaagcgcccaatacgacacatcagcgcaagcaccaactggtgctcagcaaaataactcgaaagccttcgaacgtaaacag

SEQ ID NO: 40749 - DNA, 271 bp, Gossypium hirsutum
  unsure (1)..(271): unsure at all n locations
  Clone ID: LIB3149-057-Q1-K1-G8
ntccaatcttatataaattaacttttttttggtaagaaatctaactcggagtgcgcaccgctatttatacaaacctgcccaccacatctctgtgccggtaattgactccattacttcactttgatggtacaaatttcaaattatttcaacgtcaactatttatgcaactattactacacatcataccgttcattagcatcgtctcaactatatctttttaacatctttcaacttataaaggaaaaatcgatccataggctatactattata

SEQ ID NO: 40750 - DNA, 268 bp, Gossypium hirsutum
  Clone ID: LIB3149-059-Q1-K1-B10
gtttgattgaatattaaaacacataaatattgcatacagaaacaattactacatggcgaagggctaaaactataattattgatctcaacatgaaaatttcataccatttatgctattaaggataaacagaacattaaaactataaacatgaagactataataactaatgatttaaatgcttacactttcattgttgactcaacatacttatcctccattgcttaacatattataggacgtatgaacatgccccgagaagtaatgaacc

SEQ ID NO: 40751 - DNA, 287 bp, Gossypium hirsutum
  unsure (1)..(287): unsure at all n locations
  Clone ID: LIB3149-059-Q1-K1-B8
ccaaagatctggtacaatattncctttatatgactctcctccnnacaacctccacccgcccgcttcattatcattacacactcacccatacactctnaacaaactcccaagcagcattaaagtaaaactctatcattacttatcgaaaaatctattactaaaaacatcccccatacattcatcgactctacatattactcaaatgaacatctaacatccataaccatattcaactctacattttactctcaactaaatatagatctggttattcttcttcaatttac

SEQ ID NO: 40752 - DNA, 236 bp, Gossypium hirsutum
  unsure (1)..(236): unsure at all n locations
  Clone ID: LIB3149-059-Q1-K1-C12
ataaaaaccaaanannncaaaccgggcgactgttttattaaaactcccgacccattttatacattnncttaaaccttccanaaaattnatccttctttanntttcaatatttaattnaaatttcataaccatatnttttaccaacaaaaccatctcatccatntcctccaantcatcttncaccttttatctcattattcttaacataaccccataatcttctctaactttcaccc

SEQ ID NO: 40753 - DNA, 394 bp, Gossypium hirsutum
  unsure (1)..(394): unsure at all n locations
  Clone ID: LIB3149-059-Q1-K1-D12
atccgtttcgactagtggtagtgtcggctctccttcgagccggagtgagctagctgtggcgacgcctgctagtgagaacacttttttaaggttgaaccatctcgatattcacggagatgatgctggatctcaaggtgctgttggtagtaaaaagaaaaagagaggtcaacgtgcagttggtggtgataagagtggcagaggactccgtcaatttagcatgaaagtttgtgaaaaagtggagagcaagggaagaaccacgtacaatgaggtggcagatgaacttgttgctgagtttactgatccaggcaataacatagcatcaccagatcagcggcagtatgatgagaaaaacnattcgcgaagggttatgatgcccctgatgtactaatggcga

SEQ ID NO: 40754 - DNA, 288 bp, Gossypium hirsutum
  Clone ID: LIB3149-059-Q1-K1-D3
agccttcgggggaaaggaatgggaggggctgatttcctttgttgtggttgcaccacggtggcgatcttgctggaaaaggttaaaacctaaaatccgaaatacaaatcatagattatatggtggctgttcgaaacattttcaaatatttattatattccaataactataactgaatgggtgtaattaattaaaagttatattatttgattttttgaaaaaaattataactatttaaataattatatttgaatagttataatattaaatgaataattatgtgtttatttt

SEQ ID NO: 40755 - DNA, 381 bp, Gossypium hirsutum
  Clone ID: LIB3149-059-Q1-K1-E11
agcgagctgtggaggaagaatgggcatctatgcagcgagagttaaaaattcaggctgaacgcgctcaaagattgcgaaaaaggaaaaaagctgaaagtatgcgtgtattggatatggagagacggcaaaagcaacgtctggatgaaatgagagagacacaaaagaaggatgaggaaaatatgaacctaaaggaacaactaagaatggaagtaaggaaggagcttagtaaattggaaatttcatgcatcgatatggcctcattgcttcgtagcttgggaatccctgttgatggtggttcttatcccttgtccaatgagattcacgcagcttataaaagagccttgctaagatttcatcctgaccgagcatcttaaactgata

SEQ ID NO: 40756 - DNA, 402 bp, Gossypium hirsutum
  unsure (1)..(402): unsure at all n locations
  Clone ID: LIB3149-059-Q1-K1-E8
ggtagaaaagcttgatgaagaggaataaaatgagaatcctttgaactatcatagtgagaagcttgccattgccttcggtttgttgaaaacaaaagcaggggacactttcaggataacgaaaaatcttcgagtttgcagagattgccaccatgctagcaaacttatctcaaaggtttttgatcgtgagatcgttgttagggaccggaatcggtttcaccatttcaaagatggggagtgttcctgcaaggattactggtagtactaggtggtgtgcttgtggctgttaacttangtgttaacagtgtgtgtatatatattgtatcaatctgattcgatctancccgatacttatatgttaaaaaaaactcatttgaattttatatggagtattatttatatatc

SEQ ID NO: 40757 - DNA, 309 bp, Gossypium hirsutum
  unsure (1)..(309): unsure at all n locations
  Clone ID: LIB3149-059-Q1-K1-F8
ccgggcccgacccacgcgntccgaaaaaaaaaaaaaaaaaataaaaaataaaataaaaaaaaaaaaacaaaaaaaaacttccccgcccaccttttaaaaacaacaacacaccacccaaacccacactcatatntactactccaacttcaattacatcatccattcaatcattaacatccatactactctgatcaccatccacaactcaccttcatattaaattctcctttctctatttctctaaatattaaaaaattcctctctaatccctcctcccatctattacatacactttaccacaataccatc

SEQ ID NO: 40758 - DNA, 359 bp, Gossypium hirsutum
  Clone ID: LIB3149-059-Q1-K1-G1
aaagaaagtattctctgagatgggttcttccttaatctacaaggtgggaacaatgattgagaacggagagcagccctagttgctgatgagattgcaaaggaagcagaattcttctcctttgggactaacgatcttacacaaatgacatttgggtatagtcgagatgatgttggcaaatttctccccatatacttgtccaaaggcattatacaaaatgacccatttgaggtacttgatcagaaaggtgtaggccaactcatcaaaatggccaccgaaaagggtcgccaagctaggcctagtttgaaggttggaatttgtggagagcatggaggggaaccttcttctgtagcattctttgc

SEQ ID NO: 40759 - DNA, 358 bp, Gossypium hirsutum
  Clone ID: LIB3149-059-Q1-K1-G5
gttgaatggtggcattgcttaaagaaaattttgagtgccagaagattgacatacttttttaggctgaattgaatgtgacatttcctagacccctaagtacacatgtaaacattttttttaattagagttttgtcaacagtaaaaaaggcccttacatctctaagctccccctccccctcccttaagaggaatatattgtgtcctcatttttcgaagctgcacaaggtcaaaggtgaaagtatcatgataaccaagcattaacggtgtagcttttctttggtactgctgtctgactcacatttctctttgaaatccttgggttgaattttatcctgcaggttgattatgcatgcacact

SEQ ID NO: 40760 - DNA, 222 bp, Gossypium hirsutum
  Clone ID: LIB3149-060-Q1-K1-A3
gtaatgaactctgtactgtccttattgacttgatgttttcaaacatcaacaaaaacaccgtgagggagtctttcatgtgctacatacatttgtctacgaactctgcgaaacgttacgttatacataacatcacattcattgtgctgatcttaagcccattatccacaatagagacattttactgttgtatgacttgaaacaattctactaatacaattcatt

SEQ ID NO: 40761 - DNA, 413 bp, Gossypium hirsutum
  Clone ID: LIB3149-060-Q1-K1-A4
ggagagaatacaaggttgatgcaactgttggaaagcctcgtgtgaatttcagggagactatgactcaacgtgctgagtttgattatctacataagaagcaatctggaggacagggtcaatatggacgagtgtgtgggtatgttgaaccacttccgcctgggtctccaattaagtttgaatttgagaacatgattgttggacaagctataccatcaaattttattcctgcgattgagaagggtttcaaagaagctgcaaattcaggttcattaattggacatccagttgaaaatatccgggttgttataactgacggtgcttctcatgcggtagattctagtgagcttgcatttaagttggcttctatctatgctttcagacagtgttatagtgctgctaggcctgtgatattg

SEQ ID NO: 40762 - DNA, 286 bp, Gossypium hirsutum
  unsure (1)..(286): unsure at all n locations
  Clone ID: LIB3149-060-Q1-K1-B10
gcacagtggaacaagaaatggttgaagtaggtggggcataaatgggatctactcaacctaggccaagttgataagatggatgaatgggatatcttcttatatacagtgaatacttggccttaaaagacaatgtgatgatgttgagtttgttatttgatgttgaaaattttaaggaatctcgggttttagtaaccccaacatttgaaatattcagtgttcatgtgtagggtcatttggcttgggaaatttggtaagaggggggnccagnnncaattnanttttattt

SEQ ID NO: 40763 - DNA, 414 bp, Gossypium hirsutum
  unsure (1)..(414): unsure at all n locations
  Clone ID: LIB3149-060-Q1-K1-D8
gatctacaggatgttttaatcgcagtaggagttaccattctgcatagaaaacccatgtcaggggatccgggagccccattattgggttcctctgcatttccaatcttcataatttatagcgtcgagttgcctgtcaagtgtgaccccagcaagaagcacatgattttaagccgcaggcaattaaatgcggaagctctggcaagttcaacaggagccaaagcagtaagcaattcttgggttttgagctccatatctgcatgcaaattgagtcttggcgaataatgatacagattatagaacgtccctttccttgtatgtctaagcagttctataatttgtatcttatgtttaaatatggcttattccagcaataggttttatattttatcgatagctntggctgcaagtatgatc

SEQ ID NO: 40764 - DNA, 337 bp, Gossypium hirsutum
  unsure (1)..(337): unsure at all n locations
  Clone ID: LIB3149-060-Q1-K1-D9
caagcgtacgcttagaccaaaaatctttttcctctttttttttttttcttccaaaaatccatttcccgaagatagtttttattaaattcaatcccccatcccattntccaccaatgataagtttccgaagcaaaaaaaagaatccccccaaaaatgactatcaatccaagagcaacaatcaatcatttcaattgctccttttccataccatcttcaataacaacacaaccttattctccaacacttatatgttcaaaccttcctttctattaaataccaaacatacttttcatcccattcaacatattcgaactcctttcaaaatacatttttttca

SEQ ID NO: 40765 - DNA, 392 bp, Gossypium hirsutum
  Clone ID: LIB3149-060-Q1-K1-E1
gacaacttttatccccttttccattactatttatactttctcaaccccaacccttaaacgcccaaatgtgtaaccctatatcattctctgcacaacttttcttaatccacaacctttagctgctctatgctattccatcacggatccaaataacttttcaacatgtacagttccatttcactgccccccctcttactgatcctgttacttcaactgaaattgcaaattttgatagtcatactgttaacagaagcctgcaactagaaagacaatgagcatgtcaatattctcatttcagtgactgtgcttctattagcaacaattatgaaaaatttataggtgcgttcagttcgccgttacaattgagaaaagactgatatctctagagtctt

SEQ ID NO: 40766 - DNA, 225 bp, Gossypium hirsutum
  Clone ID: LIB3149-060-Q1-K1-E10
acccaacggccgcaaaatcccaccacaatccaatcgattttgtttctacaattacctcatctaagaaagttttttttttcttactcaaacacccacattttcactctctacaccatataagtgtcccttatctctcttatatttaatctcttatcccacaaccatctaggatcctatacccaacttttactcacattcccacacaagaactcaaactacaataaa

SEQ ID NO: 40767 - DNA, 240 bp, Gossypium hirsutum
  Clone ID: LIB3149-060-Q1-K1-E4
caaaatattatcacctattatctaccctttttattatcccacacccaaaactgtatacgcaaatgtgtacatttaaacccttctatccaaatctattaaacccatacaaaacaacaacctttacacaaaatccacttactaaacaatccacataaaatcccttcttctttttattaaaaaaaataaaattccaaaataccctcaattcttaacaagacaactttattattacaaaatctt

SEQ ID NO: 40768 - DNA, 364 bp, Gossypium hirsutum
  Clone ID: LIB3149-060-Q1-K1-E5
acttaatggtggtgactttccatatgtttcttgtgatggtggcagattgttcgaagctaaagatgttgtatttgaatgtggtccaaattgtggctgtaggcctgagtgcgttaaccgttcatctcagcagggactaaaataccagcttgaggtctatcgcactaaagaaaaaggatgggcagttagatctttggactttatttcttctggcgcaccagtttgcgagtatgttggcatcctaaggaagaatgatgaattagaagatatttcagaaaatgactacatatttgagattgattgctggcacactatgaaagggattggaggaagagagagacgcctatgtgacgtttctctttctatg

SEQ ID NO: 40769 - DNA, 404 bp, Gossypium hirsutum
  Clone ID: LIB3149-060-Q1-K1-F1
tatttttcttctttctcttgtttccttttctcttcctcctttattgtcctttataacaaaccgctgccgctgccgctgcctctgcctctgcctccacaccttccagcgtcttgccttcgattgaaggtcagcttccttcccatcaaccttttcctgtcattcttttttagctttgggtatccacaggccaaacaaacacacgctacaggaggaagagagttttcgtgagagagaaaccctaaattttctctggcgtttctggtttttgtgatttttgaaatccgctgcttcatcggagactcatttcaggatttaagaacagatatatggttatggaagtactgttggatccaaataaagaaatgtcaggggatgattccattgtaattactcaatttaacatc

SEQ ID NO: 40770 - DNA, 402 bp, Gossypium hirsutum
  Clone ID: LIB3149-060-Q1-K1-F12
cccacgcgtccgggctgaccgagtagtcactgttagccatggatattcttgggagcttaaaactgcagaaggtggttggggtttgcacaggatcataaacgaaaatgattggaagttgaggggaatagtcaatggaatcgatacaaaggaatggaatccacaatacgatattcacctcaaatccgatggttatactaactactccttggaaacactgcaaaccggtaaacctaaatgcaaggccgcgctacaaaaggagctcgggttgccagttcgcgaagatgtcccactgctcggctttatcgggagactagatcaacaaaaaggtgttgatctaattgccgaggcaattccctggatgataggccaagatgtgcaattagtcatgttaggcaccggcag

SEQ ID NO: 40771 - DNA, 322 bp, Gossypium hirsutum
  Clone ID: LIB3149-060-Q1-K1-F3
gtgaagtgttcggatcgcggcgacgtgggcttttcgttgcccgcgacgtcgcgagaagtcgggtgaagcttatcatttagagggagagagagcgagagagagagagggagagagtttgactagaaaaaggaaccatacaacgggatggcttgtttttactaaaatttattgatgatttgtggttagatggttagattttgattttggtaggagtttgtgtgtggggtggatggaaagtttcggtggaagacaaatgacgtcagtgcttgaactaaaccaaatggggcttgaatagggaaatgatgattgattggaagatcat

SEQ ID NO: 40772 - DNA, 294 bp, Gossypium hirsutum
  unsure (1)..(294): unsure at all n locations
  Clone ID: LIB3149-060-Q1-K1-F4
gaccatgaactagaattgttggcctcttatttagcaaatataattcaagtgangagcaaagaagaaaagaaaaagaagaaattagtgttgatgagaactttaaagcaccttttttttagtgtggctgaacaaaggcgttcaagccccatttttattgtatcttcatttttgttgcaatgttaataatagtaaaaaaaaaaatataaactatcaaactncnnaaaaaaaaaaaaaaaaaaaaaaataaaaaaaaaaaaaaaaaaaaaaaaaaaaaaaaaaaaaaaaagataaaaa

SEQ ID NO: 40773 - DNA, 320 bp, Gossypium hirsutum
  Clone ID: LIB3149-060-Q1-K1-F6
ctctagcattttgactgcatgccttggtaccactccttccaggtaaaatcctctcatttgctgtagactttcaatggctatgatgtctgccaaagtgtttgctatttgatggacatgttgaaattttacgtcttcataacatgtgcatgtgcctctactgcgaaagtcaaattaacattctcgtgtatgatcgctctaaaggcaatcactcttccttttctgtttctggcaactatccccgagcttgatctaaaaagatcttgattaaaccctgcgtcaaattaatttttatgtcttctcagcaattggacccatgagtc

SEQ ID NO: 40774 - DNA, 300 bp, Gossypium hirsutum
  Clone ID: LIB3149-060-Q1-K1-G10
aagaaatgcttccaaccggataagttgttttctcactcgagctaccctcccacttcttattgttcacaatacaggaagactgccgccacctattattttaatctcttatctactcacactgctaaagatccaacttttggtcacttcaagtacccaaaacatactctttgattaataccctatccccaatttaatcccactcttatttatttgtctctatacacacctaacaattattcttctgttaccaaaaactttcaaatattgtatcatgaataattaccatatcttcctaattta

SEQ ID NO: 40775 - DNA, 393 bp, Gossypium hirsutum
  Clone ID: LIB3149-060-Q1-K1-G12
gaatcatataccacaaaatcttcgcactttttcctcaatgtgaaacttgcggtcatgctggaggagggaccttattatcctggatttatgtgagattctcattgactactaggctgcggtcccatgaatgtagacactcctgtactatcaatccacccttaaagaaaagaaacggtgctacctacttgtaacgcacataataattgaatatggtgttggggtgtacaaatcaaaaaccatcctgattgacgacactggtagacaagaccattgccaatgctaatgctatgtgacatgatcaacaggtgcatgtaactgatcctaaactcactcacagccacgagatctttgcttctttaccaccgatactaaccaaatatcttatgccatatt

SEQ ID NO: 40776 - DNA, 273 bp, Gossypium hirsutum
  Clone ID: LIB3149-060-Q1-K1-G4
attttaaacagcgactccaacatcattctgtataagcttaaacccctctttcaattttccatcgcacaggcatatgaacgtatataccagatccagatattcaacgtcttaagataattcgtgaaggaatatatggaatattatgcctaccctgaaattattttcataatttgcttaaaaaatttaattgggatttttattattcaaaacactttttttttttttttttggaattttaaacctaaaaatttattaaaccaattcttttacttt

SEQ ID NO: 40777 - DNA, 319 bp, Gossypium hirsutum
  unsure (1)..(319): unsure at all n locations
  Clone ID: LIB3149-060-Q1-K1-H1
gaaactaggctgttcaatttaagctatacagaagtgattgaggaagtgatctagagcaagaatgggaacttcaatcaagcacggggagcaacaaaccatagcagccctggacgctggtctttctattgatgaccaggctcattcaagtgttattatgggcatcattgatgtgtgtgttctttgttcctctattgtatattttacctgtgacacagttttctggaatggtggttgttcctttgaataaaaaaatagtttatttcttatagtaaaaaacaaagacnagagctacgacacgatcgacaacgttaaagaaaat

SEQ ID NO: 40778 - DNA, 389 bp, Gossypium hirsutum
  Clone ID: LIB3149-060-Q1-K1-H3
accaatttggcgcaagttcatgcagcagaaaatgcaaagagctttgatgaaattgagttagagacgatgctccgcaagaaatttgcacgccgtgatgaggaatatgattcaatgcttggggttgttcgtgagacacctcctgagcttatccttcctgataacattataccagataaagcgccaaaagctgcttaggagtggtaattcaatttttttttttgagattcaatgttactggatattttgtaatcagctgagaatggctgcattttagctgcaataattttggtggtgctggctgaggtgttgaaaagtgaattatagagcacacttattcgctaaccttatcatccgtttgggtattagaagtcgaacttcattttgcaact

SEQ ID NO: 40779 - DNA, 366 bp, Gossypium hirsutum
  Clone ID: LIB3149-061-Q1-K1-A7
atttgaaatgccattcccatgccttaatagtagtctaataaagatgttcgacacgaacacgtgaaagtcagagaaacttagttcaccatgtactaataaccaaaatggctggtcattttaatgatccttcgcttataacacattgtttattgacctctcaaaaaaaaaaaaaaaaaaagaaaacaaaaatagaaaaaaaaaaaaaatatataaaaataaaaaaataaaaaaaaaaataaaaaataataaatataaaaaaaaaaacaaggggggggccattttagaggatccaattttacttacccggctgtggaattaaatagtttttttttggtggaccttaaatttatttcactgtccggaggt

SEQ ID NO: 40780 - DNA, 405 bp, Gossypium hirsutum
  Clone ID: LIB3149-061-Q1-K1-B5
accaacgaatttttactttaattttacatttttaacacaatcccaaaatctacgcaatctggtcactggtctcactgcacttctcctttctagtccggaatccttagcggtctcccgcaccacaccttctcgaaagaaaaagcgccggcaaaacgcagcaagaagcttccatatggtggaaaatactgccattgaatatgaggctgacgaaacctttcaccagtacttgattacagttaagccttcacaaaacaatgcgaaaaaatatgtgattctgttatgatacccgatgaacttcacattggctggccccacacacactactgatttcagtgaccagtatgaagaatttacgaatctaaacaccaagacaataggtgtttataaagacagaggaacctgtca

SEQ ID NO: 40781 - DNA, 233 bp, Gossypium hirsutum
  Clone ID: LIB3149-061-Q1-K1-C1
aaaaaaaaaaaaaaaaaaaaaaaaaaaaaaattaaaatttaaaaaaaggtaaaaaataaaaggggaaggggaaattaataacgcatgcatgcaaaataatatactgtttcataaaatccaattaatttcaatgaaatgtcatgacgtttttcaacgtgaaagactgtaaaaaccgcgggggtttccaaaattaatggtcttacatcgtttccccttttcgacatatggctttt

SEQ ID NO: 40782 - DNA, 230 bp, Gossypium hirsutum
  Clone ID: LIB3149-061-Q1-K1-C12
tcgggcaaagttttagggttttgcctttaaaatttaacataggattttgtattttacggcaaagagttacctgggagtaagaatcttgcattgggacacagccctttagagggctacttatggtgccaacttggcagaatatgattcttctgtgctattggatttatgaaaaagaatattttcggatgatgtgaaaaagacaaaaaaaaagtcctgcgttctaaaagagg

SEQ ID NO: 40783 - DNA, 408 bp, Gossypium hirsutum
  Clone ID: LIB3149-061-Q1-K1-E9
aatccctccctctaggtcaaaagccgcatcaaaatagatagccaccttcgccctctacatgttctgtatgggtctcgtttttgcttccaagataagtactttgtcctctataccatccaactctgaaatgtaactggtaacttgttttgagatatcttgactggtgcttgatttgccttcatagattaacttgtttctatttgtccatattaaccagagtccgcaacaaaagattctacattgctcattcgtcccttgattgaaaaccaaagtaagccaagtccaaaaatctggattgctattattaagaacccatgagaagtttaaatgtctccacacttccttcgttgtagggtacaatcagaagacatggttactgtctccttcaccttgatggcatctaataca

SEQ ID NO: 40784 - DNA, 404 bp, Gossypium hirsutum
  Clone ID: LIB3149-061-Q1-K1-F9
gcaagacgaacagacctttcaactgatattttgatccacctaaagcaaacaaatgtgggagtgatttattacaagatattagcctctaaagaatgcaatgagacacgatgatgcttatccatcatttccgcatttgaatgatgaataccaacatgcactaccatctgatctcttgcatgtttctcttgaaaaattgtggtcaattttcagtgattataactgattctagtgttctttttgggcgggaattttctgcaatctatgatggaaatgaatcatcagacctgatctacctgtgatgattatataaataatcaccatctttcgactgagaatgcacatattctctaaaaaaggttcctttatgctaacattgatttagtacgtcaagcattcatgtattt

SEQ ID NO: 40785 - DNA, 419 bp, Gossypium hirsutum
  Clone ID: LIB3149-061-Q1-K1-H12
gaagtgtaaaaaccaatatcatgagggaagtcccttcgtgtctttcgagtttggcatttcaagttttgaagtcttcgggccttttgcagtcaccaaagaatggggttagctctcttattgatgcagcccttgccccacctgaagcctctggggtatacttttttggtggaaagggtaggactgtggattcatcagtgctatcacacaataccaaacttgcaaaagaactttgggacatatctgataatttgttcatggaagcaagccttgctttcaaagaaacagctagctccgagtcagataattggttgtaaaatgaaggaagtcaagaccatgagaaagaaatgtgaaggtgatttccaggaaaaagatttccccctcgtctacttcgactgatatttgaaccagaaaacatactt

SEQ ID NO: 40786 - DNA, 139 bp, Gossypium hirsutum
  Clone ID: LIB3149-062-Q1-K1-A1
ctttctttatttcttccttagatccattttttctactgttgtagtgttgggctatatgtgtaatgctttgtcacgtggaactgctgggttatatatataatattgatttgtgacactttgttgtggttcataaaacaaa

SEQ ID NO: 40787 - DNA, 228 bp, Gossypium hirsutum
  Clone ID: LIB3149-062-Q1-K1-A10
gaaaagacacacattaacaggtggtttttataccacgtttattcacataaaacaaccactactgtccaccagatttacacaccccagatatagacaatcgcaagattaaaaggttcgtaaaagaaacagatgatataaacatgaagtcatacaagtatgctttaattcttaacaaactcaatgcttaacattaacaatttatcaccatagatattgccttgatatatt

SEQ ID NO: 40788 - DNA, 274 bp, Gossypium hirsutum
  unsure (1)..(274): unsure at all n locations
  Clone ID: LIB3149-062-Q1-K1-A2
tatttagaagagaagtttagtcagaattcaaattaagaggtattggaagaaattcaaactcgaaaagagtanncctaccgtaggcattgaatagagaactttggtgagtcaaatttgtagtagtaatagtatgaagttggcatatagttaatcacttcagagattaaagagagactttgaagtaatntgggattggcgtcgagtcttctccttgatgaaatttgacgccattcctgtaccaaaggttttgagtgctattgtgccaaaaaacaaa

SEQ ID NO: 40789 - DNA, 421 bp, Gossypium hirsutum
  Clone ID: LIB3149-062-Q1-K1-B10
cttaagcactgtctgcctctatcaatagtgacgaacagattcgggcttcaagggacaacaagctcgaccacgagattccttctacgctccgatttcaacgaagaatacggaatctcttagcacattgcaaggtacaaacggagccaactagaggtggtgacacacatgggatgaggcgtgaagatgcatgtggggctgacccggagacaacagtagtgctggaggctactggaagttgctgcagcgcaggtgacctagggcttccaccgaaaattccataggtgttttgggcctggggtattttgggttatttgggttaattgggttaggtttaatttaggtttgggcttgtaatgggtttatttgtaaaatggaatataatttagactataatttgtataaagactgtatttggactttg

SEQ ID NO: 40790 - DNA, 423 bp, Gossypium hirsutum
  unsure (1)..(423): unsure at all n locations
  Clone ID: LIB3149-062-Q1-K1-B2
aaatatttccttctacatctcttgagcagtttgcctaactaggtagaaaagatgctggaaatcatggtgatccatatgactctgggaatgatgacattaatgaccacagtgatgatgaaaatgatggtcnnnnaatgaaaatgaagatagagaggatgatgaagatgacaaagaagaaccaagtgcataactgcgaagactgaataacttatgcaggataaggaatctgtgcgtaccccagaatctttaatagttttcgtcgacctctgctctagactagtttccagttatatgttttgcgatggtcgtatcttttaaccattctttttggtcgtaagctttgatggaaacacatgcccttaccctacagcttgtggtaaagatgttctgttggcttaacaagttcttacaattgtcttaaga

SEQ ID NO: 40791 - DNA, 343 bp, Gossypium hirsutum
  Clone ID: LIB3149-062-Q1-K1-C12
cccactcttagattcgtgggaattgtgttgttgactcctaggaatctcacaaaaagttacccgatttactagatgagtattgatctcagatccggatgtgaggccttttggattgttttttgttttgtttttgttgtgttaggtttggaataaattctggcttcatattgaaaaacaccatatataaaaaattatgatactgcagtgaatacttggtttgaactttcagattattttgaagtgacttgaaaagggcgcataacatatttggcatatatatatgtatctatttgttgagatcttaaatgaagaaaaaatttaagaatgtcattgatgagctcaa

SEQ ID NO: 40792 - DNA, 377 bp, Gossypium hirsutum
  Clone ID: LIB3149-062-Q1-K1-C6
gtcttattaccaaaggttttttaaccacttttgttttcgtcctaagctccctcccatggagtgggagctcctgttgcaccttaatgatcatcataatcaccatcaaattcttccggttccaagaaaccctttcttctccttctagatccttctccgtgcggaaacaagcgagcttcacagtggtcagatctgatggaagtgtaaacttcgatcttaattccaaaggttgaagagctcaacaattgattgctaatgcagttgcagtaatgattttctttttcttttttttttatttatcgtttgaattttaattagttttttttatgctaaatttgattgtatttttgtttatttcttttagactaaagctgatagct

SEQ ID NO: 40793 - DNA, 316 bp, Gossypium hirsutum
  Clone ID: LIB3149-062-Q1-K1-C8
agctcagaggtatctttgtgtataggcgttgcttcatcattcctttttcatttcattcttcattgtcgccattaaaggtggccaagttgagagtgaccctgtccatggtccatttcgttgcagggtcctcgactccctttgtattatagtatatataggttttctaaattttcacaatcttttttctttttccttctgttagcaattttacaatatatataaaatataaaatatatatttatattaaaaaaaaaaaaaaaaaaaaaaaaaaaaaaaaaaaaaaaaaaaaaagaaaaaaaaataaagaataaaattt

SEQ ID NO: 40794 - DNA, 229 bp, Gossypium hirsutum
  Clone ID: LIB3149-062-Q1-K1-D11
aaaaaaaaaaaaaaaaaaaaaaaaaaattatttaaaaaaaaagacaaccgctctcgatgaggggggcttaagttcacgtgcgtgcgcctacaataactcttctttttttttaccgtaaacctaattcaattcacgtgcgctttacaacgacaacgattgggaaaaccataaccttacccatccttatcttaatcggagttcatccccttttcgccttctgccgttatag

SEQ ID NO: 40795 - DNA, 247 bp, Gossypium hirsutum
  Clone ID: LIB3149-062-Q1-K1-D5
gatttggcctgagcctggagggcacatgcatttgactgctcctgattacgccgagccttccgtgaagattggagtgtcggaggtggatctggttgcgttgtcgatcttacatgtggctgctgacaagagatcgaacgcatggcgtcgcaagttggggaaaacttgatgaactgtatgcactagctctgtggagtcgatggggctaacgtggttgtccctctggacattccgtatagtatggttaaga

SEQ ID NO: 40796 - DNA, 300 bp, Gossypium hirsutum
  unsure (1)..(300): unsure at all n locations
  Clone ID: LIB3149-062-Q1-K1-E1
ggaaaattgctggaggcatgagatgggacatctatgatgaatgatcacgaggatcggcccctcgggccagagaagattctaggtgcagataaacagcactggggtggtaggctcaaaggaaacagnncatncaggctgaataagccaccatcaacaggtcgaggggatcaaggtaaaacttaattgctgaggtgaaaatctcggactgatgatgaagttggttcagactgaaggactagagagatgcgatcatcaaccctgacaaagataccgaagctgctacattgggttattcactat

SEQ ID NO: 40797 - DNA, 336 bp, Gossypium hirsutum
  Clone ID: LIB3149-062-Q1-K1-E5
gaccacgcgtccgctcctatactaactacttccactgaaaagcacgttagctagctagggatttttgagccagagagatggggtcgaaatgaacagcatacctagccctcctctttgcactcaacatcctcttatcttcccgctgagtgctggaggctcctgcccttaccccaaccccaaacctaaacctaaacctcaaccaaagccaaaccctactccctgcccatctacttctggcaagtgccctagagatgctcttaaactccgtgatgtgctgatttgctgcgcggctcgctcaacgacaccataggtacccgtactgatcaaccctgctgc

SEQ ID NO: 40798 - DNA, 322 bp, Gossypium hirsutum
  Clone ID: LIB3149-062-Q1-K1-E9
tttattcttagatgtttgataaaattctttcgttctcttttatttatttaacatctaagggtgagtcctttgaaccattagagaaaaaatgtaataaaatcatgtagcttttaattgattgcccatacttatgggttttttttttattttttttaaactagtactagattatctctcttaagttagcattattactacaaaaaaaaaaaaaaaaaaaaaaaaaaaaaaaaaagacaaacaattaaaaaaaaaaaaaaataacataaatgtgctatgcaattataatatattcataaataaaaaaatgggggttttgtttaaa

SEQ ID NO: 40799 - DNA, 437 bp, Gossypium hirsutum
  unsure (1)..(437): unsure at all n locations
  Clone ID: LIB3149-062-Q1-K1-F6
aatnnccggggcggaccaaggcgtccggaattttttttcgagggagaaagaactgcattttttggtgcttcaactgcaacagagtattgggaacctacttgaggaattgctgagacagaaaatgaggaacgctcagttagagaaacaattaaatgattggccaacaacaaagagtgaatgtgaaacagtggtgaagatgtttgatacttaaattgccagataatttcttgatcgatgttagggatcatatttttttttctttaggaaaatagaagtgtatttgttagcgtttttatttcccttggtgtacaccatatccatggcagtatcttaagctggaactcgagcaaattttgagatgccattgcttggatctcagtagactttgttgcattgattgacaccatattgtaatataattacactctctctctaag

SEQ ID NO: 40800 - DNA, 419 bp, Gossypium hirsutum
  Clone ID: LIB3149-062-Q1-K1-G11
aaaaggaacagcagaaaatgaaaagataattaaaagccaaaacatcgaaacccagaaataaagattttgaatttgcaatggcggtactcaactataagctcgttgtgatctgcgcgacgctcatggagcagctgcggcggcggtaatgactgttgatgcgagtggggaccaccacctgcaacacccgatcctggggaggataccgaccagatcgccatgcaagggctccatagccgaatgcttagccggggaagagttcgagctggattctgagagcatccggcgcattttagccaccaccaggtacatcagctacggcgcgcttcagaggaacaccgttccttgttcccggcgtggcgcttcctattataattgcaagcctggtgctcaggctaactcttacaaccgtgggtgcagcc

SEQ ID NO: 40801 - DNA, 370 bp, Gossypium hirsutum
  Clone ID: LIB3149-062-Q1-K1-G12
gtcaaataaaacgcgtaatcgttgaatattctcatttctcaggtactcataataattcttggttatttttcccatattctggctgtctagaaccttttatcatttgaaactcagtctaaatctctatttaatcatatccctttgacctaaaaaaaaaaaaaaaaaaaaaaaaaacaaaaaaacccaaaccaaaaaaaaaaacaaaaaaaaaaaacaaaacaaaaaaaaaaataaaaaaaaccataaaaaaaaaaaataaaaaacctaaaataaaaaaagaaacaaacaaaagggggggccccttttaaaagatccaatttttccgccccgtgtaggaaaaaatattttttttttttggggcgccctaaaa

SEQ ID NO: 40802 - DNA, 415 bp, Gossypium hirsutum
  Clone ID: LIB3149-062-Q1-K1-G5
cgatttggtacggggggattccgccattttgccgccggagtttatcgaggaaactaaagaccggtgtttcatggcaagctggtgcccgcaagaggaagtactgaaccatagcgcggtggccgggttctgacgcacagcgggtggaattcgactgtggaaagcatttcgagtggggtggcgatggtttcttggccgttcttcgcggagcaacaaacgaattgttggttcgcttgtaatgaatggggtatcggcatggaaatcgacaacgatgtgaaaagggagaaagtggagaagctggtgagggagttgatggaaggaaggaaaggggaggagatgagggaaaacgtcatggaatggaagagaaaagctgaaagagctgcgtgtttggatggaccgtccttgttgaatttggata

SEQ ID NO: 40803 - DNA, 422 bp, Gossypium hirsutum
  Clone ID: LIB3149-062-Q1-K1-G7
caagataggggtgactcagggcgtggtatgaaagggaagcttaacaatttgatgattcagcttcggaagaattgcaaccatccagatctcctagaagctgcctttgatggatcatatttttatccactgtagagcagattgtcgaacagtgtgggaaatttcaattgcttgaacggttgttgactcggttatttgagcgtaaacacaaggttctcatctttagccagtggacaaaggttctggatataatggattactattttagtgaaaagggatttaatgtttgtaggattgatggtagtgtgaaattagaagaaaggagaagacagatccaggagttcaatgatgtgaacagtgactataggatatttattctcagcacaagggcaggaggtctgggtatcaacctgactgcagctgat

SEQ ID NO: 40804 - DNA, 172 bp, Gossypium hirsutum
  Clone ID: LIB3149-062-Q1-K1-H4
aatcggactaagctggtccataaagcgggcttagttaaagaataaaacccacaatagctgcttgagctattggtgtatggatgatgcaaccttgaaacaaagaagctaggcgtgcccctgaatctgaattgaacactcttctccctttgaatcggcattcataccgacatat

SEQ ID NO: 40805 - DNA, 414 bp, Gossypium hirsutum
  Clone ID: LIB3149-062-Q1-K1-H5
gctgatggctataatggttttctagaacaacgtgcaggaaataatgttggtcaaaattggtttaggggtggtcaaactaattgtgtgtctggtcaaaatgtgtgtgctcatggctataattgtgcaggacgaatgttgggctacatggatggctcaggccaggtagtcttgagtttagaccacctactaatgggccgcatgatgttgggtcacctgatggaattaatggcagttttggtcccactgatattgggccaaatgctccccttggaccgaatgctcctattaggcccactaatcctatgttgaatcatgtgcagcttggttcatctacaccgaccagcaatgctgtagttccatggcgcactaagccgcgtgctcaggtgttttcagcgtcaaatccatgttttgggc

SEQ ID NO: 40806 - DNA, 224 bp, Gossypium hirsutum
  Clone ID: LIB3149-063-Q1-K1-A6
gaagtctcatcgattctgtctgtggaatgtctctttgttgacagtgtatactggcctgcatgattaactagtgtggaaggcctatcatggcggcttctttttaattttgatgactacactcggtttttgaagtaaaagaacctgcggttctacctgtgctagctctgctctagggatgcctattgcatgacgagtatcattcatgatctttgggttacatttgg

SEQ ID NO: 40807 - DNA, 172 bp, Gossypium hirsutum
  unsure (1)..(172): unsure at all n locations
  Clone ID: LIB3149-063-Q1-K1-A8
ntctcatnctcttaattttatcatattttatatctacccgacaatgaactacggggggccgggatgtaaagattaaattatgctataattatggcactttgattcttttctacaataatttaaaacctacaactaaaatcaaaaatcctattctgtacatcttctttgcctt

SEQ ID NO: 40808 - DNA, 408 bp, Gossypium hirsutum
  Clone ID: LIB3149-063-Q1-K1-B12
gagcaaccgagcagctggatgcagcacaagaagcaaacaccgaaatggaggcagagttgcggagactgaaggtgcagctggatcagtggagaaaggcagctgaggcagctactgccatgctttcatccgggaacaaagggaaacattcagacaagacaaaatctgttgacaacaactataaccctggaaatggctcgccgaactcggaagacatggatgatgattcaccaaagaagaagaatggaaacatgttaaaaaagattggtgtgttatggaagaaaggtcagaagtagcagcaaatgcatcagaggttgcaatgcatatataatataatatatatttctgctctaaaaagtaaacttgaaatggctgtggatggtttcaagttatgaaaaagtaccttccttt

SEQ ID NO: 40809 - DNA, 386 bp, Gossypium hirsutum
  Clone ID: LIB3149-063-Q1-K1-B6
aatgaaatagaccaagtggctgaaatatcccctgcagaggtggatctacttgaggaagctttgaatcatttttacgatcccatgatggagccactattttctccattacacaatcagattgaagcagagcaagcaccttggatgtttgatcatgtgggaaactgttacaatgtggaatttggacacggcacaaacgaaaatgatccttatatttctaacttcctggagtctatacttaaaaattcggatgactaccatggtgatgacactggtagtcagaagaattcagaatctgagacccatacaaccctgaccattggcaaggatggtggattttgcagtaaacctgattctgaagtggcccaagtgctgcttgggacagacac

SEQ ID NO: 40810 - DNA, 416 bp, Gossypium hirsutum
  Clone ID: LIB3149-063-Q1-K1-B9
cccacgcgtccgcttcccttttctaaaaaaatagagtaaaaaatttcaaagccattaccccattcggctaacccctaaaactttgagcaaatcaatcgccaccactgtaataggtggttatcgacatgcacggatcacacttagaaccttggttcaaagattaccaatctcagcccttgaaatctcatcttgacctttgatttcgacaaaggagatgaagattccaatggcctatttgcgaaggtaagcactccccttcccttttttgtttttaaatgcaaataaaaaaacaaaaatgcacataaaaatgaaggaagcagataaaaaaggcaaaagatccagagacttaaaaacagaaatcaccttttaaattgcttttgaatttttcttttcaatatgcttctctcagtgtgcat

SEQ ID NO: 40811 - DNA, 304 bp, Gossypium hirsutum
  Clone ID: LIB3149-063-Q1-K1-C4
agagaatccattcgactgatcatcttcgtgcaaattattagtatttcaagcgatcacagcgaagaagagcattcgagttaggttttttgtagctttccttcaggtcatatgattgataggacccttttgttttagcctgtattgttttatttattctgggtttttcacttttctgtttgctttgagatttcctggtatgttttttcacctgcaaagtttggaacttgttatccaaataaaataacctagaaacaaacatgatatgatacaaattaattcaatccattaaattggctggatcaat

SEQ ID NO: 40812 - DNA, 182 bp, Gossypium hirsutum
  unsure (1)..(182): unsure at all n locations
  Clone ID: LIB3149-063-Q1-K1-C6
cgacccacgcgtgcgnccaaacctaatgaactttctatacccatgttttttttaaccaaagccagcctaaataacggggcgcattcatcaaaagacgatgaccccaaactataataaacctatacatagcctgacacaaaagacagtgcacccaaatactactacgctattgcctcaaacct

SEQ ID NO: 40813 - DNA, 381 bp, Gossypium hirsutum
  Clone ID: LIB3149-063-Q1-K1-D10
gctttatttctggtgttcttcttctcttcttcctgtttcttatttcctcttcccatttaggtgctcgttccctagcaaacaaacaaggaaaagaagaggtagagcttactcaaacagcggatatggaagacaatgaactaatgaatcagctattgggggtagaagcttgtgatgctggagatgatgaatgcttgaagagaagaataatctcagaggctcacttggactacatttacacccagcatcataagccttgaggactattccttgtatatattcttgttaagttgttccatgtataattaagttgtctgggaacctccagaatggattatggttaaggttaatgaatatgtatgttagtataaacttaattatgat

SEQ ID NO: 40814 - DNA, 282 bp, Gossypium hirsutum
  Clone ID: LIB3149-063-Q1-K1-D4
actttcaataatccaatcttaatatcgctatcattcttccacacaccacattcctaaaaaagaccgattttttttaaccaatctcaaccatacaacaaccacaatcataacaccataacgtcaccccacctaattcacctattgcactcacccctatatttacttctaaaaacatctaatacaccattattcctacaccttacaaacaaacacccaccctcaatatataatccaatttaacctatccacccatacttaaatacttacctctttttcattatt

SEQ ID NO: 40815 - DNA, 327 bp, Gossypium hirsutum
  Clone ID: LIB3149-063-Q1-K1-D9
atctcaactggcatgacctccaaatttgtttatacacccctttcgccaggacggaggacgggccattttataaccaagaaggaactttttccacattcatctaacataaacggaaaaactaccacaagagtccattttgtgaccaacttgataaggcgaagttgctcattttgcaccttatgaaaagaggattacggaacttttcaaggttggtaatgacaaccaaaactctcaacgtatctaatagaaaatttgaaactcacaataaagccaaaaataaccctgaggatatgtccagtgttctcctcaagattaagtctcatcatc

SEQ ID NO: 40816 - DNA, 151 bp, Gossypium hirsutum
  unsure (1)..(151): unsure at all n locations
  Clone ID: LIB3149-063-Q1-K1-E10
acgcatgcatgcggcgncgttgcttttttatagtctcacctaaatacaaatcactggccgtcgcttaacaacgtcgcgactggtaaaaccctgccgttacccaactcaaccgccttactgcacatccccctctcaccagctgacctaataa

SEQ ID NO: 40817 - DNA, 378 bp, Gossypium hirsutum
  Clone ID: LIB3149-063-Q1-K1-E12
atctcgaagctgaatctagtgggatgactctataattctgactgtgtgcacttgaagctttaattgcttctcttatagagtaggaaataagtaacacaagaatgccaagtttaactttaattttgaatgccctttttagacttggtgcaaattttgatgtagtccatatctaatctcctaccgtaaaagtttatgatattataaatgcggcagtgcattttgctgataggattcaattactttcgaaatcagagatgctctttggatccccataattttgcacgttaaacaaaacgcaatatcctttgggcatttaaatttggagtattcaaattgtaaaacaaagctacttataatctactccattggttagcacgt

SEQ ID NO: 40818 - DNA, 348 bp, Gossypium hirsutum
  Clone ID: LIB3149-063-Q1-K1-E2
catcgtgatattaaaaagtgaaaacattctgtttgttttggatggaaagagagttgatgggagccctgttgtgaagctctgtgattttgatagagcagtacctcttaggtcttccctgcatacatgttgtattgctcatttagggatacctcctccagatgtttgtgttggaacacctcgttggatggctcctgaggttctaggcgcaatgcataagcgtagtccttatgggctggaggtggacatttggtcatttggatgcctgctttatgaattgttgactctcgaagttccgtattctgggttatctgagcttcacattcatgaacttattcagatgggtgagcg

SEQ ID NO: 40819 - DNA, 312 bp, Gossypium hirsutum
  Clone ID: LIB3149-063-Q1-K1-F12
ggccgaccgacgcgtacgatacacacacattgaaatcaaaaactatgatcttagcaccagcttctatgatctgggatggggtgaatcttatcatcttgctcccatatggaaaaggcagactctcaaacaaagcataacacaacctgaacatttacttgctctacaacttgggctgaagcctgtacacaatgtgttagatcttaaatatagaatatgtcgaccacttaaaaaaatttctctattcaacaacacaatcgtcaatgggattaacaaccatgaatttcatcattccactagggaaggaattaaacc

SEQ ID NO: 40820 - DNA, 194 bp, Gossypium hirsutum
  Clone ID: LIB3149-063-Q1-K1-F4
gaattacactattctggttcacatagccttttactattccacacgacaacccattctaccggacggatgttacaaactgcggcccatccttcttcacctcggatgcttttgatcaagctctttccctctttatcaaacgaaacaccatatcgcaatttatcatttcttctctactatcaaaagcaatgacaaat

SEQ ID NO: 40821 - DNA, 283 bp, Gossypium hirsutum
  Clone ID: LIB3149-063-Q1-K1-F7
accgtattcaccatctattaacattttctttgtcgcccccggcaaaagcaagaagaccccgagaacttttatcaagtctcagcctatatatctcaagctcctagtcaagctttaccgattactccaaataaggactggcagcaaattcaatacattaatctttaaattccttttgatcatcaaaaccaacacaaccatctttaattcatatctaagttgatttaatcccttttatggcaagcgtcgattaatatgttttttataatcctcaactatcacccct

SEQ ID NO: 40822 - DNA, 193 bp, Gossypium hirsutum
  Clone ID: LIB3149-063-Q1-K1-F9
aaaaaacgggccgaccgcacgcgtactatacatttccatcttaattaagattttttttctcaaacagacaaaccttccactgaggacgcgtcttataaattgacgaaagcctcaacaaatcttatctgaaggcctaatcctcatccaaacccacaacacaaaccaaaatgaatgtcccacataattcaaaccc

SEQ ID NO: 40823 - DNA, 248 bp, Gossypium hirsutum
  Clone ID: LIB3149-063-Q1-K1-H6
gccatttttgaagcatcaaggcgaaataaattttcatcctaaggcagtccaaattatgtatattaagtcatgatataattaattttaatttatatccaatttaatttggattacataaattattattaattaattatgaaaaaatggtctagttgagccgaaccgagtaaatcgaactggccaagaagtggacagcccaaaatcatccatatgttgacccaaatcagcttattagctgattatttagc

SEQ ID NO: 40824 - DNA, 261 bp, Gossypium hirsutum
  Clone ID: LIB3149-064-Q1-K1-A4
gcgtccgttaaataataaaaaacccattctcatacgttttgtttaatcaccaaatacattcttcatgggagtgataattaaaatcttggggagcataacaaccctatatatccacttttaaacttacctggtccgttcctacttctaaacgatcctattccaaccgactggcattataactacactcactgatggctgctcaatcttgaaaaatgtttactaaatcatatccatcgcctactagaacttgaagactagttt

SEQ ID NO: 40825 - DNA, 164 bp, Gossypium hirsutum
  Clone ID: LIB3149-064-Q1-K1-A9
tatgactgcaaggatgcagatatttttcttttacctggctgccaacaccataactgtcgaggttcatagcattacctcgaacttacaattcttaactcttgatacactataaataagggatttgaccacaacaacaaaatatcatattgcctacaaaaaagatc

SEQ ID NO: 40826 - DNA, 416 bp, Gossypium hirsutum
  Clone ID: LIB3149-064-Q1-K1-B1
gattcccggtcaccacgcgtccgggagagagaggatgaagattttggagaaggtcagatgaagcaaccatgtctggaactacgagtgtagcaggaagtgatacttatgaggttgataggaaggctggtgagtttatagccaagttcagagagcagattaggcttcaaagaacaacatcaattgatacactaaaagggttcaacgtgaattttttagagtgagtatttgctggctgtaaatttctaatagaagagttatatcactcgtcactcttaggaagttgaggattcttcattctcgtagtcctagcgtggtgaccttaatatttgtcattctataatgtctttctttatatggttgaagaaatgatttattaggattattcttttttgtttgaacaagttcatgaaaaacca

SEQ ID NO: 40827 - DNA, 194 bp, Gossypium hirsutum
  Clone ID: LIB3149-064-Q1-K1-B11
atagcactaataaccaactcatcgcttcggattatctggatccaaagaatcagtcaagatatgatatattggtcatatcattatagcaactgaattttttttgcattaagtaaaagacaaaaccaatctgattatgaatagatcgaaattgtgaagcaaaataaaaagtatgtggataaatagaaggatgagag

SEQ ID NO: 40828 - DNA, 291 bp, Gossypium hirsutum
  unsure (1)..(291): unsure at all n locations
  Clone ID: LIB3149-064-Q1-K1-D8
cggaanacccggggcgccccaagcatccggagaatggctcagcacgcggctgtgaaaattgtgcctcacaaggcgtggcttacgagctgatgtgctctgtcgggtggcatagcaaagggtccctgaacacagatcctcctgatgatacacagattggaaagaactcaaaatccgctcctgaaggtccgccttccacacaagattatattcatctatcgtacaatgcatgtgcgaaggaggaggctgtctattgctataagcctaaagataaatgcttcacgacatataaaa

SEQ ID NO: 40829 - DNA, 401 bp, Gossypium hirsutum
  Clone ID: LIB3149-064-Q1-K1-E2
gagatcccggtttgttttcccctgctttcagctgtttttagtaagttacctgttcctttgattttgtctgcaggagcaccgacaggcacgggagagagatactgttccaccctctgtgccgaaagctggtcatccgaagcgtttcggcaatgttgacatagagaaatcaagatggagataagttattgtttgttaaaaggcattacgattgatggttcctgaggtcagcttatgttgtagaataagttttatatgaaaagatcttacacacctgcgatgtgcatacgcatatacatatatataatctttcttacattgttgttgacacactgcagcgttttagaattcaaggagccttgtaaatatgtagttgccatttttaatatttgatattatagatt

SEQ ID NO: 40830 - DNA, 358 bp, Gossypium hirsutum
  Clone ID: LIB3149-064-Q1-K1-E4
agccttccgaaaggtttccgttccacatgttccctggtcttttgggcgcccggggccgtaattaatccaatgagtttttcaacaaaaaactgggtcggccccgtacaatatggttcaaggatgggctgagacttacatatttctggatcacaggaacacttggacaaataaatggctcaaggcattgatctatctgatgatggatcatctaaggtggccggaacccaagcaccgagtcagcactgggtcactatgtgctgctgacagctaagaatgaagatcacttgctattgaaccgagtcttattatgatatagctatgctaatggcatcgaatccaaaaagtgtcaacccatatc

SEQ ID NO: 40831 - DNA, 281 bp, Gossypium hirsutum
  Clone ID: LIB3149-064-Q1-K1-E9
cgacaacaagctaaccgttaaattataaggctttgtttgtattgctaggagccggacatcttgtatgcggtgcagataatttccatcatcttgctcaaatctatattttaatttcaagtttacccctgtattactaaaacctcaaatccacatcccaacacatattgcaagcttatttctctttgctcaaaacgggaacaagaatgacttaaccaaacatcccaacaagatgccacatggtgaataaaaacaatcttaagttcaacctgcttggtacttta

SEQ ID NO: 40832 - DNA, 226 bp, Gossypium hirsutum
  Clone ID: LIB3149-064-Q1-K1-F3
ccacgcgtccgcggacgcgtgggttagttttagccatggcatgtggaacatagattggtacagtctgtgttaagcacatgggtcctcttgtaaccaagatgaatattaaagtcattcggagtccatggtcagattctaacatctttgcacagtggggaccccatattcccacctcgcattgtcctaaccccgaaacctctactgggggtgaatgctcgaagaatcc

SEQ ID NO: 40833 - DNA, 253 bp, Gossypium hirsutum
  Clone ID: LIB3149-064-Q1-K1-F8
aaaaaaaatacatttctttttcatttttcttttgcgggccgggcctttctaatttgcgtgggctcttttcagatgggtcatctacaataaattgagtcattatcaaaatatatgatgccatgattaaaaacaccatgactgtaaaaaccaatgcgtaacccaattttaatttacttgcaacacattcccctttctccatctggcgtaatatctataaggcccttacctatctcccttaccaacagttttgcat

SEQ ID NO: 40834 - DNA, 425 bp, Gossypium hirsutum
  Clone ID: LIB3149-064-Q1-K1-G10
gttgctgggcattttcaacgattgcatttgttgaaggcataaataaaatcgccaccggcgaactaatctctttgtcagagcaagagctagtagattgtgaccgatcctacgacgctggttgcgatggaggcctaatggattatgccttccaattcattattgacaacggtggcattgactctgaacaagactatccttaccttggtgctgataataaccaatgcgatccaacgaggaagaatgctaaggttgtcagcattgatgggtacgaggatgttgttcaatatgatgagaaagcattgaagaaggctgtatcacatcaacctgtgagtgtcgccattgaagctagtggcagagctttccaactctacgaatcgggagttttcagcggtgaatgcgggtcagcattagaccacggcgtgatt

SEQ ID NO: 40835 - DNA, 457 bp, Gossypium hirsutum
  unsure (1)..(457): unsure at all n locations
  Clone ID: LIB3149-064-Q1-K1-G6
ccggnctggaanggccgggccgagccttccgaacgatttaacaataccttattatggccaatcattttatctaaaccaccttaccttccagccatggccaatttttaggaaaaattgggatttttcaaggccaaaatcctttttaaaaaaaaatcaaaacccctttttacattactgggaggttaaaacactgaagttttaccttagaaatcttaaaggtttcttaatttctccaggatggggtttctcttccaacacaagctcaagaattatatgagtggcgtaaaaaagaaatcttaaacattacttaactcctcgaagattgggtttctcttttcacacaagctcaagaattctatgggtggcataaaaaaatcagggttgctttaaactccacccactttgggtttttaccctagaattgcattcttctttttttatcgggcaccattttgag

SEQ ID NO: 40836 - DNA, 209 bp, Gossypium hirsutum
  Clone ID: LIB3149-064-Q1-K1-H11
catatttttttttacatattttctcttcgcatttttttataagaccgacaccaaatacatcgggctgtttattttctttatcatgctggggacatacacttcttttatcactgtctctttgacttattttcaactttcttctgataaccatgattggattgtgatgtcctttctatgtttattctctactcgtctgttcatattcacct

SEQ ID NO: 40837 - DNA, 398 bp, Gossypium hirsutum
  Clone ID: LIB3149-064-Q1-K1-H12
tcgtccacgcgttgcgttgggggacatgggtagtctgaatggaacactgttgaattcttgtccaattcatcatcctgatcctggaagtaggctatggggtgacccagtggaacttgcaagtggagacacaataacagttggcacaacctcaaacatttatgtccatatttcatcccacaatgagcgtctggtcccttttggagttggtatgacttcagaccctatgtcattgcgtcgaggaggaaagaagcttccaatggaagatgtttgctattatcattggcctcttcctggcattaatcagtttggagtttttggtatctgtgatggccagccaccgcagtggtgaaacggaggatacttttattgctgatctttcagtcggtttggccacgggc

SEQ ID NO: 40838 - DNA, 440 bp, Gossypium hirsutum
  unsure (1)..(440): unsure at all n locations
  Clone ID: LIB3149-064-Q1-K1-H6
ccgggccgcccacgcggccgnctatgccttgtttttgggtnatttttcatgtctgctaggagtcaacgggccaaatttcggttttggtgcaaaggggcgagtgaaagtcgaccctcggccgacgttcgcgcgagggcacacttggtggctgtggcgctcgagagagagctagggtttctaccctagctgagagtggtttatgtttttgggccttttgggcctctaaatttgggcttagtttttttttgttntgggtttcgatattttttttgaggcctggtcaaatttgggcatgtacattcacaagttcaccttttgttcatttcaaatttttgttttaaaattaattattcatctcgtttcaagtaaaaataatgccttttaagctggttntataatcatatncttaaaaaatctataaaacgaaagcaagttcgatg

SEQ ID NO: 40839 - DNA, 301 bp, Gossypium hirsutum
  Clone ID: LIB3196-001-P1-M1-A1
ataagctctacctgcagcctggggccctgctggagcagccagtgtccatcccagacgatgacttggtccaggccaccttacagcagctgcagaagccaccgagtactgcccggccacgccttcttcaggacacagtgcagcagctgatgctgcaccatgggaggctgagcctggtgacagggcagtcaggacagggcaagacagccttcctggcatctcttgtgtcagccctgcaagctcctgatggggccaaggtggcaccattagtcttcttccacttttccggggctcgtcctgacca

SEQ ID NO: 40840 - DNA, 362 bp, Gossypium hirsutum
  Clone ID: LIB3196-001-P1-M1-A10
atttttggaatatgatacctaaaataattttcagtggggcttgggacaaaagcatttccaacttttcttagttgcttgtcgtgtacattttcaaggaggaacgcgtgtaccaactaattgcaactcttaaagttcattgagaacatttctgcatattaccaaagtgatcaggctattaaactggccactatgatcattctagctggtcttataagaaatttaatttatgaacaagggatcaacttggatgcttctcttgcagggaggcttacttgacctgccaccttccattcatacagtgttaacaataacttgtcatgtgtttcttgaacactttgacttcttcatacaatatttaagat

SEQ ID NO: 40841 - DNA, 396 bp, Gossypium hirsutum
  Clone ID: LIB3196-001-P1-M1-A11
atagcagggttcctgatctatttggatccagccaaagaatcctcagaaatctgtaactgatttgctcaagtatgaaatgtacatctgagttggcagacttcccataaagagccaagtggtcaatatttttggctttgtaggacattggtctctgtcacaagtattttcaaaaacaggtggcaagctgcattggctcacaggccaaagtttgctgacccctgatctacactgcttttccttctaaatattgcctgattatcttagcttcttggcaaacatgctaggccggatggggcagaggtttctgttacatgctgtggtctcttagtaatgaatcaatccatgaacacattagagaatctgaagtcaacacatacagatgtcatatgttttaac

SEQ ID NO: 40842 - DNA, 316 bp, Gossypium hirsutum
  Clone ID: LIB3196-001-P1-M1-A12
tcgaattcatgaataaagtcaatcagattacaatattttaatttatgtaatttgattttttttgaagtggagaagttaaaattgatctttacttactagaagttggctttaaccaagaattataaatttgatctaatttgtgaataaaatatgtaaagtaaaaaaaaaaagtgattgaagattaactcaattgattttattgaataaaatgtgtaaaagtgatttgtgaataaaaaacgtgattcaattattcattttatgaattgatttgtatatttggactagagttgttcatgggccaggccgggcccggaaa

SEQ ID NO: 40843 - DNA, 252 bp, Gossypium hirsutum
  Clone ID: LIB3196-001-P1-M1-A2
gtgacgatggatcttgaactgttgatatacgtttcggtgatcaaatggttttggttttgcatcacttacaccattattgaagaaacaacatagtttggtatctatctcccttgaacttgtacatgctagcctgcaagtttacaacataaacacaatttccaatacagattatatatattcgtgattacgtatatatagccttacccttagtatctgcctttggctcgaatagcatagtagtgattagaaaaa

SEQ ID NO: 40844 - DNA, 338 bp, Gossypium hirsutum
  Clone ID: LIB3196-001-P1-M1-A3
tcagccacgcgttcgcaaagtcatcagtggcggcacagagtcacctgtcacatgccaaaatagggcctaaaaggaaaaatggttgcgaaaccgcgaatccaagatagaaacgattattccaattaattcttataatttaccaagtgattagatgcatgtgttagagtatcgatggaaaattttatagatagcatgcttaatttgcctactagggcttaattgcaaaagttgctaaatatgagttttagatgctcaaggattaaattgcagagtgtaattgaagtagaggtccttaaatggtagtaagaccattacgttttcatggacaaaaatggaca

SEQ ID NO: 40845 - DNA, 179 bp, Gossypium hirsutum
  Clone ID: LIB3196-001-P1-M1-A5
atctttgtaagagacaggatttggattcttcagaaattacagaagaattcatttttccttaaccaggtgtgcaaggacagcaacaaccaatctctataatgatgagagtgtacttatattttgttttgctattaacctacttaccgggttagggatttgccgggggtggggggtgggct

SEQ ID NO: 40846 - DNA, 411 bp, Gossypium hirsutum
  Clone ID: LIB3196-001-P1-M1-A6
ctcccagccaggataaatgtttattgatctcctaggtgtcagaccctatgctggcagagtctatggtttctgcagtgaaccatactcctgtactcacggcgccccagtcgaggagatacacacctaattagacaactactacccagaaggtcagacctggagtgaggaacacaggggactatgggagcctaagaggcgcctgccccggcctatggttctagaaaggcttccaggaggtggtgatccttaagccaagtacgaataggagccagctagaatgggaatggatctggcagagtgaacaagcgccaaggcccagaggccaaaaaaaaaaaaaaagcacatggtttgattgaggaagcaagagcagcatagtatgcctagaaccgaactggagaggggaaatggtct

SEQ ID NO: 40847 - DNA, 382 bp, Gossypium hirsutum
  Clone ID: LIB3196-001-P1-M1-A9
atgtcgcaatcagctgggtgattcccgtgattgcgttacaagctttgtctccttcgactgggagtgtttgtccaggacgatgagacactcaaagagaacttactgtcctgattgggatgacaaggattgggattatggaaaatggaggagcagcagctagcatcaacggagggagagttcacataacattgcctgggagaacaagcgcttcaaatacactcactctaaaatgtgtgatagccattatttggaaagcaggtgtataaatgagaaagattatcatagtcgacgctacattgatgagtacagaaatgactacaatcaagatgtgaacctgggcatcgccatagagaccatgaaaagccgtattcagaaccatagt

SEQ ID NO: 40848 - DNA, 349 bp, Gossypium hirsutum
  Clone ID: LIB3196-001-P1-M1-B1
gggaaagcggctgcgcgtgcctgtaccgatcctcaattcccgactcaacccactcgtttaccctgttccacaataggctaagatcggggcacacatttttagacggcgcgagaatgtactattatcaatcgatgtgggttcaattttgaatgaattgttgctgatgcatagagattaggtgctcatcatggtcagaggaagttagagacttaaagcttcctctcactctaatatgaagaacccaaacatggggtcaaacgcttctccttgaattatgtgagtcaatcttgtgaagattatgacaagtgaagatacttcttcttactatggacaaggagttcacacgtta

SEQ ID NO: 40849 - DNA, 418 bp, Gossypium hirsutum
  unsure (1)..(418): unsure at all n locations
  Clone ID: LIB3196-001-P1-M1-B10
atctcggaaggcgggcacgcgggccatggctccctgggcggaggcgcgagctctcggcgctgaacccgctgcgcgcggtgtggctcacgctgaccgccgccttcctgctcaccctactgctgcagctcctgccgcctggcctgctcccgggctgcgcgatctttcaggacctgatacgctatgggaaaacgaagtgtggggagccgccgcgccccgccgcctgccgcgcctttgatgtccccaagagatatttttcccacttttatatcatctcagtgctgtggaatggcttcctgctttggtgcctttctcaatctctgttcctgggagcaccttttccaagctggcttcatggtttgctcagaattctcggngcggcacagttccagggaggggagctggcgctgtctgcattctt

SEQ ID NO: 40850 - DNA, 348 bp, Gossypium hirsutum
  Clone ID: LIB3196-001-P1-M1-B3
atctcggacagcagtgcagagggggcttcggtccctgagcggccggaccaaggcattgacaggcacacatgtgagagcatcagagaaaatgactgattcttgtaccacctcaagtcatatatgaccaactactttggtgcagctgagcgattggcctgtcaggagaaagaccatatgctggcttggagggtcacacctgagggcaaggctcagaacctggaggagtgggaagggaccacctcttactgactagcccccacgggtgccaggggtactgaaaaccaaaggtggagcagaccaagccatatgcttcccagctatatgcaagctggggtgggagacggtagc

SEQ ID NO: 40851 - DNA, 419 bp, Gossypium hirsutum
  Clone ID: LIB3196-001-P1-M1-B5
atctcttcatcttcctcctcctcctcctcctcctcctcttcctcctcctggtcttcctcttcctcttcctgctcctcttcctcttcctcctcctcttcctcgccttcccctgctaagcctggccctcaggccttgcccaaacctgcaagccccaagaagccaccccctggcgagcggaggtgagtgctgccttgcctgagatggaaggagggtgggggagtgacttatccagagacagggccctggggtgtgagctcccggctgggtgtctcacgtgaccttgggcatctggttgtgggggaagaggcgcttgttctctcccccgcttgttgcaccttgttctggcgaagggctgcgccatccacaggggcgctcaggccaggactggggggtccttggtttcttcctctccctccctc

SEQ ID NO: 40852 - DNA, 313 bp, Gossypium hirsutum
  Clone ID: LIB3196-001-P1-M1-B6
attcttctggacagactctaacctggatcgaatagaagtggcgaagctggatggcacgcagcgccgggtactctttgagaccgacctggtgaatcccagaggcattgtaacggattccgtgagagggaacctttactggacagactggaacagagataaccccaagattgaaacttcctacatggatggcacgaaccggaggatcctggtgcaggatgacctgggcttgcccaatggactgacctttgacgcgttctcatctcagctctgctgggtggatgcaagcaccaatcgggcggaatgcctgaaccct

SEQ ID NO: 40853 - DNA, 400 bp, Gossypium hirsutum
  Clone ID: LIB3196-001-P1-M1-B7
ccctgttccacaagagggtaatatcaagccacgcatctttagactgcggcaagaaggtgctattatcaatcgctgtgggttcaatagtgaaggaattgttgctgttgcaaagagattaggtgctcagcatggtaagaggaagttagagacttcgagttcctcgtcaccctcgaatgaagaagccaaacatgggggcaaagctggtcctggaattctgggagtcaatcttgggaagaataagacaagtgaagatgctgctgctgactatgtacaaggagttcacacgttatcccagtatgctgattacttggttattaatgtttcatcaccaaacactcctggattacgtatgcttcaaggaaggaaacagttgaaggatcttgttaagagggttcaagct

SEQ ID NO: 40854 - DNA, 391 bp, Gossypium hirsutum
  Clone ID: LIB3196-001-P1-M1-B9
atggtttttcggatcatgtctggtggctccgcggattataacagagaacatggcggcccagagggaatggaccccgatggtgtcatcgagagcaactggaatgagattgttgataactttgatgatatgaatttaaaggagtctcttcttcgtggcatctatgcttacggttttgagaagccttccgctattcagcagagagctattattccctgtattaaagggtatgatgtgattgctcaagctcagtcaggtactggcaagacagccacatttgctatttccatcctgcaacagttggagattgagttcaaggagacccaagcactagtattggcccccaccagagaactggctcaacagatccaaaaggtaattctggcacttggag

SEQ ID NO: 40855 - DNA, 370 bp, Gossypium hirsutum
  Clone ID: LIB3196-001-P1-M1-C1
atcggagccggagacgagaccagaggccgaactcgggttctgacaagatgggcgggctgccccgcaggagcgtcaaggaaacccagcgtttgctggcagaaccagttcctggcatcaaagcagaaccagatgagagcaacgcccgttattttcatgtggtcattgctggccctcaagattccccctttgagggagggacttttaaacttgaactattccttcctgaagaatacccaatggcagcccctaaagtacgtttcatgaccaaaatttatcatcctaatgtagacaagttgggaagaatatgtttagatattttgaaagataagtggtccccaacactgcaaatccgcacagttctgctatcgat

SEQ ID NO: 40856 - DNA, 379 bp, Gossypium hirsutum
  Clone ID: LIB3196-001-P1-M1-C2
atccatcccgctgcgctcctcctgggtcatgacctgtgcctatgcgcccggagggaactttgtggcctgtggggggcttgacaacatctgctccatctacagccctaaaacccgcgagggcaacgtcagggtcagccgggagctgcctggccacactgggtacctgtcgtgctgccgctttctggatgacaaccaaatcatcaccagctctggggataccacctgtgccctgtgggacattgagacaggccagcagacagtgggttttgctggacacagtggggatgtgatgtccctgtccctggctcccgatggccgcacgtttgtgtcaggcgcctgtgatgcttctatcaagctgtgggacgtacgggatttcatg

SEQ ID NO: 40857 - DNA, 302 bp, Gossypium hirsutum
  Clone ID: LIB3196-001-P1-M1-C3
atcccgcgggtagtggagcccgtttgttccgcccgcgtccagcctggagccagaacctgtgaggaacgggagggccaaaggacctcttcttcacgccggttcgacttcaacaaagccgggggcccctcttcgtcctaaggctgagaaccgtgggtaccgatggatgtggccgagagccctgaacgggatcctcgctctccagaggatgaagagcagccacaggggctctcggacgacgacattctgagggacagcgggtccgatcaagatttggacggggccggggtgagggcttctgatct

SEQ ID NO: 40858 - DNA, 376 bp, Gossypium hirsutum
  Clone ID: LIB3196-001-P1-M1-C4
ttggaaaaaattttgcttatggtccatatttggggaccagggttctaaggttaagaggaagttttgcttaaacacccacttggggggataaattttaagggcccttgcttttccaacttacaagggaaggcttggcaattttggaggctgtttaaaccccacgtaacccaaacccaaccaccaggccttgggtggaaaggggctatataatggtgaagaattaagcatactatttttcagccatgataggaacagagtgcctgcattcccaggaaaatgagaaaatcccatgagataaataaaaatctaggtgatgggcagatctttttcttaaaatagaaaaggaaaaactcttgtagtacctagtcagatggtg

SEQ ID NO: 40859 - DNA, 399 bp, Gossypium hirsutum
  Clone ID: LIB3196-001-P1-M1-C7
atccacttttcagcaatggtaccacactccactcatctcactggcgtactcagcaggaatgcccgcaagcctgggactgctgctgggactggcagagaagccaggttcttacaaaggataaaaggtcagacttgccttatcccccaccgtcgacttacatttcagctctttggagggaggagacagactgcttgggccaccagtgagctcccagcgccttctacactcactgcccataataggcacgaaatctgtgtttggtaaatgaaagttagggaagacaggaaagagtgggagaaggagataaagtgggagaaagagaaagaggcgaggaaaagagggaatgagggagagaaagtagagagggaggaagaaagtgaaatggaaaaacaagggggg

SEQ ID NO: 40860 - DNA, 351 bp, Gossypium hirsutum
  unsure (1)..(351): unsure at all n locations
  Clone ID: LIB3196-001-P1-M1-C8
atggtgtattgtggctacttacagaccagcatctctacactgggtcctcatcaagcatgttaataagattgctggcctcaaacactgaaggttctctgaacatacaatggggtacatttattatattgtgtcttcatctttgacaaaactcggctataattcctggactaaaagagaaatctcgattggtatcctgtgacatgcctatttttgcaattaggaatgtaccctaaggcaagtaatgtgacaaactgtggcttaaaactaattaatgggtttgtttttctcatgttatanaagtctcgggaaaattgtccagggcttcagctactcaaaagtgacttgaagcag

SEQ ID NO: 40861 - DNA, 402 bp, Gossypium hirsutum
  Clone ID: LIB3196-001-P1-M1-D12
tgctctggatgcagttcctgtgaatggtgataggaatggaaactctgaagctgctgctgaaaatatgtcagcaagcagcttagtatctgggtacagtatggttgaactggaatccgaagaataccagtttctgtggggctttgctttgcttggtatatttcagggacaacatccagccctttgtaaacaagttataccgttagcctcagctaaagcgaaacatgatggagatactcctgctgaggatacaacttctccaggcttgaagttttatgaaattgttttgccagtgttccagtttcttttaacacagaagtttttctcagctggttttcttaccgtaaacatctgtgaagaactgctcctggtcttctcttattccatctacatggataattcatg

SEQ ID NO: 40862 - DNA, 197 bp, Gossypium hirsutum
  Clone ID: LIB3196-001-P1-M1-D6
atggcgtttgtatgatcttcggagattgctgcatcggaccttggccagtcataaaagatgacaacagcagccaggccaacctttgaacctgcaagaggtggaaggggaaaaggagaaggtgatttgagccaactttcaaagcagtatttaaggagagacctaccctctcacacaaaggttaaattccgaccaacttc

SEQ ID NO: 40863 - DNA, 397 bp, Gossypium hirsutum
  Clone ID: LIB3196-001-P1-M1-D7
tcgcatccttctgaagtagcttcgccatgggtgtggctatcatcgagaagcccttaacgaatcatcgatagtacccagtgagtcccaaaaagctccgaactttagaaacattcctcggaggtttccaatcaagaatggctgaaattttattcgaatcaactctaataccagaagcggatacaacatgtcccagaaagctgacctcccttaaccagaattcacatttactgaattttgcatacaactgattatctggcaaaatctgaagtacaagcctcaagtgttcggcgtgttcagactcgttgtgagaagtaatcagaatatcatctatgaacaccactacaaattgatctaaatactgtctgaatacccgattcatcagatccatgaaaactgc

SEQ ID NO: 40864 - DNA, 416 bp, Gossypium hirsutum
  Clone ID: LIB3196-001-P1-M1-E10
atcaagaatattgaatgctcagaacattgagaccaacgtagaacctttcttaaaatttagtaacttctttcttttctcatttatatatgcatttaacaaatatatttattgatttctaacaatataccagaccccattctagaaatttagggatataccagtgaacaaatggatataggaatcctggcttctattttaatggaaaaatgattaccgaaggtcaaattctacttttaattggcatggtatgatgtatcaaatggtataaggagcccattctctttccttgctagcatacttacagtcttccagatttggtgaatctggttattagttactatatcatgttcttgcaggatacatgtttcactcgataggtaaaaataattcagtgcattaaagaagttaaaatatga

SEQ ID NO: 40865 - DNA, 422 bp, Gossypium hirsutum
  Clone ID: LIB3196-001-P1-M1-E11
attgcgctctcacagtctggccaagaaggcacaggatgagggacgcctttctgatgtcgtaccctgcagagtaccaggaaaagatacagttaccaaagataatgggattcgtccttcctcactggagcagatggccaaactaaaacctgcattcatcaagccctatggcacagtgacagctgcaaattcttctttcttgactgatggcgcatctgcaatgttgattatggcagaagaaaaggctttggccatgggttataagccgaaggcatatttgagggattttatgtatgtgtctcaagatccaaaagatcaactgttactcgggccaacatatgctactccaaaagttctagaaaaggcaggattaaccatgaatgatattgatgcttttgaatttcatgaagctttctcgggtcaga

SEQ ID NO: 40866 - DNA, 422 bp, Gossypium hirsutum
  unsure (1)..(422): unsure at all n locations
  Clone ID: LIB3196-001-P1-M1-E12
acaaccaaatacaaaacttgatactcggtaccgaaattcccggaatttttttttttttttttttttnanntttttttttttttttggggantttttttttttttatctggacagttataactcatttaccattcttagcttactgtaacctttagctacaagtttaagacctttttttgtattaaactaccaacaacttgcctctacaaaaaagcaccaccactcctaggttatttttttaaaatatttagtatacacaaaggttcaccacgttaaacaagactatgtcgaaataattactttattatctcaacgcataggccttctaaagagcttttattacaagtgttaaccacctatctcgaccaaaattgaactcacttttttactgtttttcaaattcattacatgattatttaaat

SEQ ID NO: 40867 - DNA, 400 bp, Gossypium hirsutum
  Clone ID: LIB3196-001-P1-M1-E3
ctctttctctctctgctcccaacgatccctcgttccttttctcttcaaaattcagccaacttttaagtatgtggggttttgcttctaacgccattgcaagcattgggttaaagaattcaaaagagtcgagtcgagcttgttccgagttttcagacgatgatgtatgttctaatggtagtagagatgaagggttggaatgtcccatttgttgggaatctttcaacatcgttgagaatgttccttatgttttatggtgcggtcataccctttgccaaaactgcatcttggggcttcaacctgctgttttgaaactccccacttctcaattcgagatccctttgatcgtttcttgcccatggtgccacttgctatcgctccgacttctttataaagggaacct

SEQ ID NO: 40868 - DNA, 146 bp, Gossypium hirsutum
  Clone ID: LIB3196-001-P1-M1-E5
gtttgtacaaaaaagcaggctggtacccgtcccgaatttcccggatcagccaggcagcacattacaccgggaggagctgttccacgtggcgcaactcaacaatggcaatggggggccccaaaggcattatgctctaactctttggg

SEQ ID NO: 40869 - DNA, 383 bp, Gossypium hirsutum
  Clone ID: LIB3196-001-P1-M1-E6
atgcttcccttctggtcccaatacagctgtggtagtttgagacttacatccttctaattggaaggctagtgggaacaatttctatcccatgattcctgacaaactgtccttttcatctctttggctccagttggctcatagatccgcctaaaaaatgaagcactgttgtaagggagctggcatgactgcttgactcacgcccatgtcatatgcgtcactcctgagatggaattggaaccctctgtcccaagcacacgggctaagaataggaggatagtttcctggagggaatttggtgtccagctatcacaacagggaatagataggtagcaagaaaatcacaaatgctcagtcttcctacctacttccggaaggatttgcag

SEQ ID NO: 40870 - DNA, 400 bp, Gossypium hirsutum
  Clone ID: LIB3196-001-P1-M1-F1
atccccgactcaacgtgagactcaccgcccggactcaccatgcgtgaatggatctcagtccacgtggggcgggcaggtgtccagatgggcaatgcctgctgggagctctattgcttggaacatgggattcagcctgatgggcagatgcccagtgacaagaccattggtggaggggacgactccttcaccaccttcttctgtgaaactggtgctggaaaacacgtgccacgggcagtttttgtggatctggagcctacagacattgatgagatcctaaatggcccataccgacagctctttcacccagagcagcttatcactgggaaagaggatgctgccaacaactaatcccgtggtcactataccattggcaaggagatcattgacccagtgctggatc

SEQ ID NO: 40871 - DNA, 113 bp, Gossypium hirsutum
  Clone ID: LIB3196-001-P1-M1-F12
cggatctttttccttttaacttcaagcttttaagcttttcacaagccggttatgttctggaaccatgggcgggacattcaccaccattaggggccacaacaacagccccaagg

SEQ ID NO: 40872 - DNA, 401 bp, Gossypium hirsutum
  Clone ID: LIB3196-001-P1-M1-F2
gactaattcatcaatttccataaagtaaagggatggaattttagtagtaaaaaaagcagctgtttgtgtgagtttcgatgagtttcgaagatcacgtattttgttttctgcactgagtttggaaagattttaaagcttcttcaacaattctatttacacccaaattcctttttttttaaataaaataaattgaattattaaactttttagagtattaaaaatataagttttcattaaattaaaagaataaaagggttaaattaaaatatatatatttaaaagggactaaaaaaaattgtaccatttaatcaagggagcgaagcaaggtagtgagttctaaaccgatgaacatacctttcttgctctagtattggtatgtatttgtatctgtgtattttagt

SEQ ID NO: 40873 - DNA, 202 bp, Gossypium hirsutum
  Clone ID: LIB3196-001-P1-M1-F3
atgggctggccaccccccaccgcaaccatggacgccatcaaaaagaagatgccgattcttaaactgggcaaggggaaccccatttaccccgcccaggaagcccaaacccacaagaaacaaactctggacccctttaaagaacttgaggaggggccacaagcccttccaaaaaaactttaagggaccaaaggttaggggggaa

SEQ ID NO: 40874 - DNA, 406 bp, Gossypium hirsutum
  Clone ID: LIB3196-001-P1-M1-F8
atgttgaattctagttgtgccagaattgtcttgggttttattagacttcttgaaagctacatttgcttgtctccatgatgctttctgtctctttcatcatttttagcaggtgacatgtttcttactttagctaatagctagaggtcactcaaaggaaacaatttgacaaatcaacttcagaatgaaaccctttgcatccagttgaagaatacacagcaatgtcttgtaaatgtagcacactgtggagcttttaaggtctccatagtaagtaagtgttaaacgtacctgtgattaaactctactgccatggtttactttatatactaaagaaattcttggaagtttatagtttatagggaaatctaatgtcccaattaggttatattatacaggcaccaggaaaact

SEQ ID NO: 40875 - DNA, 124 bp, Gossypium hirsutum
  Clone ID: LIB3196-001-P1-M1-G11
aggagcctccacctgcagagctgctccgacagctatggaggtgggtatgggggtacacacttgccagatgccaggcggccggggtatctttagctaagaaacaacgcacgtcgctggcgtatca

SEQ ID NO: 40876 - DNA, 208 bp, Gossypium hirsutum
  Clone ID: LIB3196-001-P1-M1-G3
atgtttttcagctgctatgttgggagagaaacaagggtagaatgtgcattcgttagtttggataggggcgggccccattattcctcctgtccaggtccaatgaaacctcaagtggcaataaaagtaaaccgaggctttgcccctaaaacaacccattggatttcgattaaatcaacccacattgcctttttggacaaaggggagaggg

SEQ ID NO: 40877 - DNA, 225 bp, Gossypium hirsutum
  Clone ID: LIB3196-001-P1-M1-G5
atctcgtcaatcgcgtgagtagagcgatgagcctccgcctgcagagctgctccgccagctatggaggtgggtttgggggtggctcttgccagctgcgaggaggccgcggtatctttagctgagcaacatcgtttgtctctgggggatcagcttgaggctaccgaagcagcatgacctgtggatctaacagaggcacccttggtggctttcgaggccgctacgaag

SEQ ID NO: 40878 - DNA, 370 bp, Gossypium hirsutum
  unsure (1)..(370): unsure at all n locations
  Clone ID: LIB3196-001-P1-M1-G7
atgggacaaatacgttagtttttgctaaagcttttaagttaagaggcatagaattgggggaatgggtaataaatcagatttcatttagttatttaccacatgaatcactttccttccaacagttgtcgtaagagccatgtgttcatgtgtaatgaagaccagtatttaactgtgggaaccgtgggtggcgtggcgaaggagactgnccgtgactgtgccagtctccgcagccccgactgctgtcctgagtcctcggctccttggcgtctggactggtttttttttttgtccagccgaaaactaaagggccagacaggtgaaaacacacacacaacttggcaggtgaagatattaaagattgaaattgcaa

SEQ ID NO: 40879 - DNA, 242 bp, Gossypium hirsutum
  Clone ID: LIB3196-001-P1-M1-H9
attgctgtgcgtcgtagcgaccatccgctttctggtgccggctgcgatcttcgcccacctggagggggcctggagcttcctagatgccttctacttctgctttatctctctgtccaccattggcctgggcgactacatgcccggggaagcccctggccagccctaccgggccctttacaaggtgctggtcacagactacctcttcctgggcctgatggccatggtgctggtgctacagacct

SEQ ID NO: 40880 - DNA, 314 bp, Gossypium hirsutum
  Clone ID: LIB3196-002-P1-M1-A1
tcgaaaacataagaataagggatgaagttgaattggtgaacctaggggtggaagtggaaatatgcaaaagtttatgggcaaaattttaattttgtaaaagtttgagttaaggattgttttgaatattacattaattaaataaataaaatatgatgttttagatcccgaaaaacgagatttgtacctagaatgagagaaaaatcgaaaatttggaaagctggttaaatggtcgtttttggatcgaggtaagttcatatgtataattagcattaatttatgcatgtttcaatgtaaaatttatatatttattatga

SEQ ID NO: 40881 - DNA, 233 bp, Gossypium hirsutum
  Clone ID: LIB3196-002-P1-M1-A12
atgcagagaagacgggggcccaggagctgctcagggtgctacgggcccaacctgtgcaggtgggagaaggcatcgagccacatggcttctgggaggccctgggcggggaggcttgctaccgcacatgcctactgcttgaggccgagaagatcgatgcccctacttctcgcctctttgactgctataacaagattggacgttttgtgatcaaagcggtttctggtgagctcatg

SEQ ID NO: 40882 - DNA, 417 bp, Gossypium hirsutum
  Clone ID: LIB3196-002-P1-M1-A4
ataccgctgaacgtgtcccagtggctgatggtgctgaaaatctcgtggcgcgtgattctcatggacgagaggctcaagtttgtggcccgcaactacctggaacctggtaaagagtgtgtgcagcctgccaccaaatcctgctcgttctcggcatgcaccgatgggatttcctggccgtttgtgctgctcataatgcccctggtgatctgggtctatagcacagacactaactttagtgatatgttctggtcttgactgacagttttccataaagaagatgtttaacttaatcaattttttttattgtttaaagcaactgtctatttctgctgaattttcacatgaacatactggctggtgatggaggtttcatactctagattttgttttgctttttctgactccagtggggcaaga

SEQ ID NO: 40883 - DNA, 407 bp, Gossypium hirsutum
  Clone ID: LIB3196-002-P1-M1-A5
tcggtagtcccatataagctagggataagagtgaagcggatgaaatagaagcatacgattgtgagtggtgtcaaatattctcttcgacaagtgtggatttcttgctttgacacagtccacttagaacctggaactgtaagttccttgagaatttcttgcaaattttcaggctccatattgctcattaagggagaatattcatcgttttcaaaattcagcaattcaaagaactcattaatagcatttgaagttaatggtaccttgattctgcgaactggaacttctgtcaactcacttgaggttaaattcacatagaactctcgcactaactcctcatccacactaggtttcttctcataaaacaactcccaattgagagttttagcaacctgatggatatgcgccat

SEQ ID NO: 40884 - DNA, 163 bp, Gossypium hirsutum
  Clone ID: LIB3196-002-P1-M1-A6
aaaagcggctggtgccggtcccgaatttcccggatcagctttaaaccattatacttattttttaacttagtggaaatattgggggcggttattcctttatggacgttatataaaggaaccttttaaaatcttttatgacctaaattatggctttattttggtg

SEQ ID NO: 40885 - DNA, 414 bp, Gossypium hirsutum
  unsure (1)..(414): unsure at all n locations
  Clone ID: LIB3196-002-P1-M1-A9
atggactattctggatcaggttccggctccggctctggatcaggagtctgtagtggcttggtaacgtgaaatggaacaagattaccaaccagtagatgaaagtgatgctttccatgacaaccttaggtctcttgacaggagtctgccctcagacagccaggacttgggtcaacatggattagaagaggattttatgatataaaagagaattttcccaccttgacaccaggcaatgtatttagcatattttgcgtaccatggttagatgatcaaccttgggacaaaggattttatagacatttttaaacatctgaaaaagaagcttaagttttatcatcctttttttctcatgaattcttaaaggattatgctttaatgctgntatctatcttattgttcttgaaaatacctgca

SEQ ID NO: 40886 - DNA, 422 bp, Gossypium hirsutum
  Clone ID: LIB3196-002-P1-M1-B1
atggcccggccaccctctaccctccccatgcctctctcttctctgctttgcttctcacttccaagtccacgggcagtgcttgatagaatcactcccacctggaggggctggctcttgccctcccggagcctatgggttgagccgtaccccaaggccccctgcccagctgggcttgtgctgtgcttcattcacctctccatagtctctaaatcttcctcttttttcctaaagacagaaggtttttggtctgttttttcagtcggagcttctcttctctaagaggctttggaatgatgaaagcatgtaccctccacccttttcctggccccctaatggggcccgggccctttcccaacccctcctaggatgtgtgggcagtgtcctggcgcctcacagccagccgggctgcccattcacgcaga

SEQ ID NO: 40887 - DNA, 404 bp, Gossypium hirsutum
  Clone ID: LIB3196-002-P1-M1-B10
tatctggaacctctcatactctctctcaatctcaattttctcaatggtaaagtttatctaatatgttggtggtgaggtaatcatattattatctcaaataggcgattgtatatgaaagggctctggaaaggcaaatcccataatttgcttaaatccacttcttcctccaaacaagatatctcatataagaatgcgaacttaatctgtatgtgtcatttctttcaagtcctatctgatgtcgcttgtgactttctgagatttcctttcgcatctcaccaggttggctttccaaaaaaacgcaacaaagaaattagactgaaagataggacgacccagcctcaattacttaggcttgcggctcctaagactgattctagcttgaccaggacctgttgagatatact

SEQ ID NO: 40888 - DNA, 386 bp, Gossypium hirsutum
  Clone ID: LIB3196-002-P1-M1-B3
attgaaggcctcgcagtgctgctgctgtctcagccacctcttggcttccggcctcctcctgctgctgctggctgagctaagcgggcccctggcagtcctgctgcaggcagccgaggccgcgcaaggtcctgggcctcctgaccctagaccacggacattgccgccgctgccaccgggccctaccgctgcccagcagccgggccgtggtctggctgaagctgcggggccgcagggctccgagggaggcaatggaagcagccctgtggccgggcttgaggcggacgatcacggagggaaggccgtggaaggctcactgggtggcggccttgctgagagccccaaccctggcgacaagcccatgacctaacgcaccctgaccgtgttga

SEQ ID NO: 40889 - DNA, 422 bp, Gossypium hirsutum
  Clone ID: LIB3196-002-P1-M1-B8
attcctgaagtaaagcaagacacagtgtcagaaccagtcacacgtgcatctcttgctgccttacagagtgatgtgcagccagtgggccatgattatgtggaggaggtacgaaacgatgaaggaaaagtaattcgcttccattgtaaattatgtgagtgcagctttaatgatcccaatgctaaggagatgcacttaaaagggcgaagacacagacttcaatataaaaaaaaagtaaatccagatttgcaagtagaagtaaagcctagtattcgagcaagaaagattcaagaagagaaaatgaggaagcaaatgcagaaggaggagtactggcgaaggcgagaagaagaggagcgttggagaatggaaatgagacgttatgaagaggacatgtactggagaagaatggaggaagaacagcatca

SEQ ID NO: 40890 - DNA, 399 bp, Gossypium hirsutum
  Clone ID: LIB3196-002-P1-M1-B9
atgagtttgaaaaacaagatgaattaaagcgatctgccatgagagcgagagcagcactgctgaccagtccaaaagcaaaaaagagtccactgatgagtgaatttcagtcacagatcagttctaaccctgagctggcggctatctttgaaagtattcagaaagattcatcatctactaacttagaatcaatggacactagttagatggttgatcaccatggggaccattacagatgaccatacaatgcactgaattgacaggttaatcataagacatggaaagagaagtgtctaaaagcttcaaaatgttccacttttttttccttcgtggagacttgatgcttggctttcttccattgaagtactgtagcatttatgtcagaaatgtgtattttcataa

SEQ ID NO: 40891 - DNA, 423 bp, Gossypium hirsutum
  Clone ID: LIB3196-002-P1-M1-C1
atcaaaaatgctactgatcaaataagcttttaagaattggaaaaataaaaatacaaaagtccttcaccattatcctcaggtgatcagtagcattgccttgtcttggatcctcagtgctgccaaaaggccagtataaagaatttatatttgcactgtaaactctgcaaaaatatggtttaaagtgacatgattgcactgaaaagggatagtgcttttgtgaaatttttcaaatttgagtaatagatgcctttttaaggcagtgaatttacacaaatatgggaggggtatatggtgttactgatttttagacctctttgaccatcttctagtttttacttctagtttttacatctaggagaattgtgaataacaccaactgttcttaaactctttaattccatgtcttaaatgccggtatttgct

SEQ ID NO: 40892 - DNA, 415 bp, Gossypium hirsutum
  unsure (1)..(415): unsure at all n locations
  Clone ID: LIB3196-002-P1-M1-C6
atgaaaaagaaggaagaggaggaagatgaggaagatgaagaggatgaggaggaggaggaagatgaagaagatgaanatgaagaagaagatgatgatgatgaataagttggttctagcgcagnttttttttcttgtctataaagcatttaacccccctgtacacaactcacttcttttaaagaaaaaaattgaaatgtaaggctgtgtaagatttgtttttaaactgtacagtgtctttttttgtatagttaacacactaccgaatgtgtctttagatagccctgtcctggtggtattttcaatagccactaaccttgcctggtacagtatgggggttgtaaattggcatggaaatttaaagcaggttcttgttggtgcacagcacaaattagttttatatggggatgtttgtttt

SEQ ID NO: 40893 - DNA, 187 bp, Gossypium hirsutum
  Clone ID: LIB3196-002-P1-M1-C7
acgaagttcggccatgcttgtaactagattgaggtatgtttgatattattctttaaaattcatgtatattttaagttgttagtttgaattctacctagcccatggttcaaattttgctatttgatggagatgatattctgccatggatgttgtatttcttgggtggtgttttgatgttttcgttatg

SEQ ID NO: 40894 - DNA, 330 bp, Gossypium hirsutum
  Clone ID: LIB3196-002-P1-M1-C8
atggagattgtcgttcatcctcgagccgttgagcagctgaacaggggcaatgctggggcgcgcccgggcctgagacgaccacgcctgtgccactgaggaccttcagcagggctccattcacctggcccacttggctgtccagtcacactccagtgtcaaccactggcacccagcagccaagagaggtgtggcgtggccctggggacccatggctgatgcagggacaggtgagccgtcccccaacgtggagggcgagcacgttacggagtatgacacgcttactttcgacacagtctttttttagcgtctttggacttttgacctcaattt

SEQ ID NO: 40895 - DNA, 130 bp, Gossypium hirsutum
  Clone ID: LIB3196-002-P1-M1-D11
atgtcctatctgggggttaatcaggctttttctctattgcgtcgctcctactgtgcgtgcgcgatagtgtgtgttggggtgacagttggaatttctggaatggtggatgctggggggaggagtttgctgg

SEQ ID NO: 40896 - DNA, 385 bp, Gossypium hirsutum
  Clone ID: LIB3196-002-P1-M1-E10
tatccggaaagaagacatggctgtgcatgtccgtcgtgaccatgtggttgaagactcctatcgggaggtgcatcgcaaatcccctgaagaaatgaagaatcgattgtatatagtgtttgaaggagaagaagggcaggatgctggcgggctcctgcgggagtggtacatgatcatctctcgggagatgtttaaccctatgtatgccttgttccgtacctcacctggtgatcgagttacctacaccatcaatccatctttccactgcaaccccaaccaccttagctacttcaaggtttgtctgacgcatttgtggccaaagcttgtatatgacaaccctacttctaggagttgctactttactttgatccttttacaaacacaattt

SEQ ID NO: 40897 - DNA, 266 bp, Gossypium hirsutum
  Clone ID: LIB3196-002-P1-M1-E11
atcaagccgcaggtgagacctggtacaggttaagaatgggatcagtggagagcctgccattccttcagctaaggtcaggcccctggggcgctcccccttctgttgatagcatgtgggagtgagaaaacaaagtcattgagcataaggaatgagtgcttctgtgcccatatttaaggggtgaccttggagaagctactctgtgggcatgacagcaaaggagaaaatcatttggcatattaaggtctgtcatgctttattatgcatag

SEQ ID NO: 40898 - DNA, 433 bp, Gossypium hirsutum
  Clone ID: LIB3196-002-P1-M1-E3
atcccggggcagagtttcgctcctccacctctttttttcccaccaacccggccttttaccactgaggctgggccccaacatcacacctcttcataatcatcattattctccaccttattcacaactttatgactttcattcttcttgacttactctttttttaccttaaactttacttctatttacaaccatattaatttcattcctcttcattaagatattattatgtttattcatcctttttactttattcaaataataattttattttatttttttcttcatctcatttttaattcgtattttatatatttttctttctttcttttttataatcttttttttataaattttattttattttttttcttaatgattttcttttttttttatattttttatttttcttaataaatttttatttatttttttt

SEQ ID NO: 40899 - DNA, 297 bp, Gossypium hirsutum
  unsure (1)..(297): unsure at all n locations
  Clone ID: LIB3196-002-P1-M1-E6
atcccttttttttttttnttttttccnnnnncanaacaaaaccgggggtaggttttaaatctgcgggggcttggctaaattaagacatctttagttaattagngatatcgctttttgaaatcgaccatatttctcttgtccttcttcatcatgaattagtgtttcattttccaaatttaaagtgagtccttttcttatttactctgtgggcattacagcagaagagtaaatcatttgccatcttaaggtcttgcatgctttattattcatagtttcttatacatgttttttttttgt

SEQ ID NO: 40900 - DNA, 250 bp, Gossypium hirsutum
  Clone ID: LIB3196-002-P1-M1-E8
atggaaacccaaggttgtggtatgccgctttactgtctttcacaagcgccttttatatcctgtcaggcatctgtattgggctgctctatacatactacaccaaaccagatggctgcacacaaaacaagttcttcatcactattaacctgatcctctgcgttgacgcttctattatatcgaaccacccacaaaatcaggtacaccagccctgcttccgcctattgcaaccctatcttatcaccctttacac

SEQ ID NO: 40901 - DNA, 189 bp, Gossypium hirsutum
  Clone ID: LIB3196-002-P1-M1-E9
cggatcacagacatactcttccgattggggtgtttttcgagtgtgagagggaagctcccaagcctgcatgggcagaccttccctcctaaatcactgcgccttgtgaccccccatccctgccttctgcaagtcagcaaccgcgctgtgctcctgcactgtagcctagggttttaccgccttctacaccct

SEQ ID NO: 40902 - DNA, 344 bp, Gossypium hirsutum
  Clone ID: LIB3196-002-P1-M1-F11
atccgcccttttttttgtctttacttttataactgacccggccagactttattgcgcttaaaggcgcagagacagtaccaactccacatgcctacgtggccctggacctgcccaggttcccgagggtccttcacccccatgtgacaaataacctctggtgttcatcgggatgagaaaacctagggctgatctgaattgactccaaggctcgactagatcattgacagggccttcctgcctgaccctgataatacctggggctacaggcgcaccacaacaagcacggctggtttttaaaaggattagggcctacgagggatgactcacaaatccaggatggtcta

SEQ ID NO: 40903 - DNA, 168 bp, Gossypium hirsutum
  Clone ID: LIB3196-002-P1-M1-F7
atgcggggcatgaagctgacgctggcctgcccgggccccctggcggacagctcggtcacactgtcgcccgtggactcgctggactccccgcggcctttccgtgggccccctgcttcccctggtggctttccccttgaggggccctatgcagctgccactgccactgca

SEQ ID NO: 40904 - DNA, 394 bp, Gossypium hirsutum
  Clone ID: LIB3196-002-P1-M1-F8
atgagaaaggcatcatgcagaaggtggctggtgagcgttacgtgtgcaagtttgtgtgcgagcccggggccctcttctctttggccttcccggacaatcagcgtccagctctcaaggccgagtttgaccggcctgtcagtgaggaggacacagtccctttgtctcacttggacgagagccccgcctacctcccagagctggctggccctgcccagccgtttggccccaagggtggctactcttactagcccccagcggctgttccccctgccgcaagtgggtgctgccctgtgtacatatagatgaatttggtgttggggaaaccttcatctgaaacccacagatgtctctgggtcagatctccactgtcctaccagttggcctagcccagact

SEQ ID NO: 40905 - DNA, 184 bp, Gossypium hirsutum
  Clone ID: LIB3196-002-P1-M1-G1
atagatcaacattcaaaaccttaacgaccggcttgctttctaacttgagaaagggcccccccttgaggagggcaacccccaccttgaggggaaaatcccgtacttgcacctgaaacagaacccaacttggccttagcgggactaccagccctaacacaagaacatttaaaagcttcgggacaag

SEQ ID NO: 40906 - DNA, 413 bp, Gossypium hirsutum
  unsure (1)..(413): unsure at all n locations
  Clone ID: LIB3196-002-P1-M1-G11
atgtcatttttctcaagaaaagtgatctcttctgaatctgatttcgtcagtaatgagaactggactggtttcacttgacctctgtttcctgttagtgggaaacccctccccagaggtgctgtgtgaaagattgctggggaaagggtttctagatcccagcataacaagttcaaaagagcccagtgatattgtcattagaataatggtcttcattaagtactggttttcataatcttgaagcttcattttcaccaatttgaaaggcagtaactagggaggagagactatgcagggaacaaggaaaactcangagtgcatcacagaccttgagttaaggcagggaagaagcagatttgctgtccactgaatgaaaataaaaagaattccattgtccaaggtcagagcaagaacat

SEQ ID NO: 40907 - DNA, 249 bp, Gossypium hirsutum
  Clone ID: LIB3196-002-P1-M1-G12
tcccctatctcacttcttgtgggcactctgccatttctaaattgggtggagacataaatcggcacaggtcccttacacttttattgccaatgctgtcaacatggactgaatgctgtacttgtattccttgtcctagacacacaccctgaacgtgtttataccgcctttattaaagcgttgaatatacactatcttagtggcagtatcctccaaaacttatacccatgttggccagagacgggagaaaac

SEQ ID NO: 40908 - DNA, 357 bp, Gossypium hirsutum
  Clone ID: LIB3196-002-P1-M1-G4
atggacgagcggcgtttccgggtggccgaccaggatggggactggatggccactcgggaggagctggcgggcttcctgcaccccgaggagttccctcacatgagggacatcgtgattgctgaaaccctggaggacctggacagaaacaaagatggctatgtccaggtggaggagtacattgcggatctgtactccgccgagcctggggaggaggagccggcatgggtgcagacggagaggcagcatttcccggactttcgggatctaaacaaggactggcacctggacgggagtgaaagtggccactgggtgctttcctcgtaccaagaccagcccctggtggaaggcaactcacct

SEQ ID NO: 40909 - DNA, 431 bp, Gossypium hirsutum
  Clone ID: LIB3196-002-P1-M1-G6
aagaagcaaactgctgcctggtcaccgaattcccgggatggccagtggaggttctgggtctggacgagctcgggaggagtggttgtggccatagcgcacaggcggatctgaggctcggcgaccccactggtcgcagcccgggacaggacaaccacaggaacaccgccgagcccacgtccccccgcccgccaacagagtcatggctgcagcggctgctctgagggaccccgctcaggaggagttccgcctcacaggttgttccctacaggcgcctgtggaccccaagttccatcctcccggatccgtccatctccaggccattgccctcgcccctccctgtacctgtcgttctccccaccgcatcccaccggtgtctgaaacagggatcccttccgagagcgtctcagtgtcccgacgccaggtccgggttg

SEQ ID NO: 40910 - DNA, 241 bp, Gossypium hirsutum
  Clone ID: LIB3196-002-P1-M1-H10
atgccggatttttgtgtgtggcggacatggcacaataggctgggggctagagaccattggcaaagggaacttgccggaacagcctcctgttgctgtgtagcccctgcgtactgagaaattatcttgctcgatgcctaaaatggggaggccgatatgaacgacagaatctggcacagatcctcaaggctttagaggcacgtacagtggttcatattgatcgatgctcccttgagggcattcc

SEQ ID NO: 40911 - DNA, 376 bp, Gossypium hirsutum
  Clone ID: LIB3196-002-P1-M1-H11
atcggccttctcgctctgggtctccaggccttcaaccgggcgtgagtcttctcgagaatgttgggggcaccaaaccgttagcggatctaaccaaaacgttctcttacttctgcctcccacccagcggctcttcaccttcaccattagcctggacatacagtgtgagcagctgaatgacgctaggtgggccgagctccttcccctgctccagcagtgccaagtggtcaggcttgacgactgtggcctaacagaggcacggtgcggcgacatcagctcggcactccgagtcaaccctgcactgacagaactcagcctgcgcaccaatgagctgggtgatgccggcgtgcactgcatgctccagggcctgcagagcccc

SEQ ID NO: 40912 - DNA, 419 bp, Gossypium hirsutum
  Clone ID: LIB3196-002-P1-M1-H12
atcggcacgcgaggatcccacaacacaatttgctttcacgtgtgcgtacaaagagctgaagcggctactgaactagtcactagccatactgtcacggtcccaccatgcctatctgagaccccccaagcagaagtggggcccacaggctgcccccacctctcagggccacattcggcacaggggagcctggagaaggggctcccacgggataaggaagccaaggagcccctgtggatccggcccgatgccccgagcaggtgcacctggcagctgggccggcctgcctctgagtccacgcatcaccacactgtcccggaaaaatctccaaaaatcttgccagatattctgaagaaaattggggacacccctatgatcagaatcaacaagattgggaagatgttcggtctgaagtgtgagct

SEQ ID NO: 40913 - DNA, 425 bp, Gossypium hirsutum
  Clone ID: LIB3196-002-P1-M1-H2
atccgggtctgagtgaagctccccgcagggttcagcatgtttgtgcgtcgacaccacaagcagggctgctgacagacgtgcacagacctgaccggcagaccctccctgggcacggagccaccaggaccccaggaggagagtcttgccgtgcctcctgtgctcacccacagggctccccaaccaggcccctcacggtccgagaagcccggaaagacccagagcgagatctcgaccttccttagacagaggccagcagggactgtgggggcgggcggtgaggctgcagggcccagccagtccccaggacctccccatgggcctgcagcatctgagtggggtgagcctcctgggagagaccttgctgggcagcaagctgcgggagcttcgagcgtgcccctcttagcaggctgtgtgtgccagggctg

SEQ ID NO: 40914 - DNA, 418 bp, Gossypium hirsutum
  Clone ID: LIB3196-002-P1-M1-H4
ataccgtcggcaccaccctccggacacatgaggccagctgcctgagccctgccatgggccagcctagcccttgtcccttttaatataaaagatatatatatatatataaatatatatatataaaatatctatattctatacacaccctgcccctgcaaagacagtatttattggtgggttgaatatagcctgccttagtggcagcatcctccaaaacttagacccatgttggtcagagacggcagaaaacagagccagcctaaacaggcccagccagttggtggggccaggccaggaccacacaagtcccagactcagctggaagtctacctgcttgacagccttcaccaagatctacaggacaaagggagggaacaagccctgctcgaatggggcacggactgtccaccttttctga

SEQ ID NO: 40915 - DNA, 458 bp, Gossypium hirsutum
  Clone ID: LIB3196-002-P1-M1-H5
cacatggaacaacaaagacacaaactgcatgccggtaccgaattcccgggattgaacgcaacatgaaggtgctccttgccgccgccctcatcgcggggtgcgtcttcttcctgctggtgccgggaccttctgcggccgatgagaagaagaaggggcccaaagtcaccgtcaaggtgtattttgacctgcgaattggagatgaagatgtaggccgggtgatctttggtctcttcggaaagactgttccaaaaacagtggataattttgtggccttagctacaggagagaaaggatttggctacaaaaacagcaaattccatcgtgtaatcaaggacttcatgatccagggcggatacttcaccaggggagatggcacacgaggaaagagcatctatggtgagcgctttcccgattgagaactttaagctgaagcactactggcccggctgggtgagcat

SEQ ID NO: 40916 - DNA, 341 bp, Gossypium hirsutum
  Clone ID: LIB3196-002-P1-M1-H6
tatagaacaagtttgtacaaaaaagacaaaaagcaggctggtaccggtctcgcaatatcatgattcgtgatctgatagaaattgactaatagatgatttcaagagagaggagaagaggaaagtgctagagaaaagtacttgagtacttcaggatgttcataatgaagggattggccttactcaatctgttttgttttgatttgttttgttttacctatcagaagagaaagtagagtatattgatgtagatggggtggtgggaattttgtttgagctttcttgatgagttgggcatattgtactttcaatgcttggtatatttttttctgccaattttatgt

SEQ ID NO: 40917 - DNA, 412 bp, Gossypium hirsutum
  Clone ID: LIB3196-002-P1-M1-H7
atgacgtgagcaacagggaggaggccacagagaagccgtggctgaagtccctggtgagccggaaggatcacgtcctggacatcatgctggaggccgtgaacaaccttagagattcaatgcccaagctccaaatcagggctccagaagcccagccgactctgttctccataaaccagtcctgcctccctgggttctataccccagctgaactaaagcccttctgggaacggccaccacaggatcccaatgcccctggggcagatggaaaagcatttcagaagagcaagtggacccccctagagacccaggaaaaggaagaaggctataagaagcactgctttaatgcctttgccagcgaccggatcttcctgcagaggtccctagggccagacacccgaccacctgagttagt

SEQ ID NO: 40918 - DNA, 339 bp, Gossypium hirsutum
  Clone ID: LIB3196-002-P1-M1-H8
atcccacttctctcatgctgcagtgcccgccctaccactatgtcggaacaattcatttacggggccacacactttttatccacacgcataatcatctacatctacaacacagtctgtgcttcgaaccagcgtgtcaagctactgctgcagatccaccacgccagcaagcagatcaacagctacacgcactacaaggtcatcactgactgcatcgttcgtatccacaatgagcagggcttgctgtctttctggagaggcaacctggccaactttattcgctacttgctcactcaagccctcaacttcgccttcaaagataagtacaagcatatctttctt

SEQ ID NO: 40919 - DNA, 349 bp, Gossypium hirsutum
  Clone ID: LIB3196-003-P1-M1-A1
atgcattgtgtgcccttttgtggacatagaggtggctggagctgagtttgacagcaccaagcataatacagtgattgtggcggacaatggactcaaccctgtttggcctgtcaagccctttcacttacatatcagtgaccctgcatttgcctttgtgcgctatgtggtgtctgatgaatacatgtttagtgaccagaatattctggctaaagctacttttccggttaaaggtctgcatacaggatacagagcagtgcctttgaatatcaactacagagtggatctgacgttggcctccctgcttgtcaagattgacattttacctgacaagcaggaaaatggtgacctt

SEQ ID NO: 40920 - DNA, 380 bp, Gossypium hirsutum
  Clone ID: LIB3196-003-P1-M1-A12
attccggaaacaaaatccttttctcatttcgggaggggggtaacagtgacgtgcagggacctcttttaaacaggcaaaacaggaagggggaaaaggtgggatttatgttgaggctagaggcatttggaacaaccaatctatgtagttaacttgaagaaacagatttttaaagttggtgcatctagaaagctttgaatgcagaagcaaacaagcttgatttttctaacatcctcttaatgtgcagcaaaagcaggcaacaaaatctcctggctttacagacaaaaatgtttcagcaaacgttgcacctcatggtttttgaaggctttagttctgctttctgcctcttctccacagcccaacttcccacccctgatacgtga

SEQ ID NO: 40921 - DNA, 381 bp, Gossypium hirsutum
  Clone ID: LIB3196-003-P1-M1-A4
atcagccaggcgcgcactgcacagctctcttctctcgccgccgcccgagcgcacccttcagcccgcgcgccggccgtgagtccttggtgctcgcccgccggccagacaaacagcccgcccgaccccgtcccgaccctgcccgtcctccggaccctggccgccccgagcggagcctggagcaaaatgatgcttcaacacccaggccaggtctctgcctcggaagtgagtgcttctgccatcgtcccctgcctgtcccctcctgggtcactggtgtttgaggattttgccaacctgacgccctttgtcaaggaagagctgaggtttgccatccagaacaagcacctctgccaccggatgtcctctgcgctggagtcagtcacg

SEQ ID NO: 40922 - DNA, 136 bp, Gossypium hirsutum
  Clone ID: LIB3196-003-P1-M1-A5
acatttgatatcttcaaggggggccagacacacagagaatctttcctgtgtcaacccttatatctctggaaaactccaaactaaccttgcacggcctgtaacaaaatgaagcttcaacacccagctccagaacttt

SEQ ID NO: 40923 - DNA, 382 bp, Gossypium hirsutum
  Clone ID: LIB3196-003-P1-M1-A7
atggaacttgggaagaagacagatggttattcaggggcagatataagtatcatcgtacgtgatgcacttatgcagcctgttaggaaagtacagtcagctactcattttaaaaaggttcgcggaccttcccgagctgatcctaaccatcttgtagatgatctgctaacaccttgctctccaggtgaccctggtgccattgaaatgacatggatggatgtccctggagataaacttttggagccagttgtttccatgtcggatatgttgcggtcactatctaacacaaaacctacagtcaatgaacatgacttgttgaaattaaagaagtttacagaagattttggtcaagaaggctaaaccaaagacaaggaagatgcttacc

SEQ ID NO: 40924 - DNA, 267 bp, Gossypium hirsutum
  Clone ID: LIB3196-003-P1-M1-A9
agtaaggaagagcagccgctgctggttctcaggcgcggctctttatcggtggttctggctcccggccgcgccgcagcccctgcccagtctctcttcctcagctcggcgggctcctccgcgccgcacgtgagcgcgcccgccaacagggccactgccgcgggtaagtcgtgcccgcgccctgcccggcgtccagtcctcagccgctgggcgaagccggaggagcctggcgtctcctccccggcggcccgcgggacctttcccaggtcc

SEQ ID NO: 40925 - DNA, 388 bp, Gossypium hirsutum
  Clone ID: LIB3196-003-P1-M1-B1
atgggcgggccgtcatcatgtttggcgtcccctacgtctacacacagagtcgcattctcaaggcacggctggaatacctgcgggaccagttccagattcgtgagaatgactttctcaccttcgatgccatgcgccatgcggcccagtgtgtgggtcgggccatccggggcaagacggactacggcctcatggtctttgccgacaagcggtttgcccgtggggacaagcgggggaaactgccccgctggatccaggagcacctcacagatgccaacctcaacctgactgtggatgagggtgtccaggtggccaagtacttcctgcggcagatggcacagcccttccaccgggaggatcagctgggcctgtccttgctcagcctggagca

SEQ ID NO: 40926 - DNA, 377 bp, Gossypium hirsutum
  Clone ID: LIB3196-003-P1-M1-B10
atccccaggtccctctgtgcttcttggaaattctcctttgctgcttgttttagctttaaggaaagccctgaggtctcagccctgatcctcagggttcctggtgactgtggtcactctttgtccacccacttccaatcatacaactgtggcttccccaggtctggtgtggcccttcaaattcatgggcagaggttggaggcatgcattgcctttcgctacattaagattttgaaccccacctgctttgaggctttggggttattgggcaaatatacccatccctgcctgtcagactgtacctaggaattttggagagcaaaaaaaaaatcctcctttgtggaaaaaggaattggtgtgggctgtgattgggttgaagc

SEQ ID NO: 40927 - DNA, 296 bp, Gossypium hirsutum
  Clone ID: LIB3196-003-P1-M1-B11
atccttatgttcctatgtgcttcttggaaattctgctttgttgtttgttttagctttaaggaaagctctgtggtcttagccttgatcctcagggttcctggtgactgtggtcactctttgtacacccactttcaattatacaactgtggctttctcaggtctggtgtggccttttaaatgtattggtcagtatttggaggcatgcatatgacttttgcttctttaatattgagaactcctttttttttgatgttttggggttattggtccaatttacttattcctgcctggcaaac

SEQ ID NO: 40928 - DNA, 387 bp, Gossypium hirsutum
  Clone ID: LIB3196-003-P1-M1-B4
atggcgtcgcccttcagtggagcgctgcagctgacggacctggatgacttcatcgggccgtctcaggaatgcatcaagcctgtcaaagtggaaaaaagaccgggaagtggcgtggccaagattcgcatagaagatgacgggagctacttccaagttaaccaagatggcgggacccggaggctggagaaggccaaggtctccctaaacgactgcctggcgtgcagcggctgcatcacctctgcagagaccgtgcttatcacccagcagagccacgaagagctgaagaaggttctagatgctaacaaaatggcggcgcccagtcagcagaggctggttgtagtctcagtctcgccacagtctagagcatcgctggctgcacggtttcag

SEQ ID NO: 40929 - DNA, 383 bp, Gossypium hirsutum
  Clone ID: LIB3196-003-P1-M1-B7
atcgagggttcgagggaggggcacggaccaggaacctgagctaggtcaaagacgcccgggccaggtgccccgtcgcaggtgcccctggccggagatgcagtaggaggggcgcgcgcgagaagccccttcctcggcgctgccaacccgccacccagcccatggcgaaccccgggctggggctgctcctggtgctgggcctgccgttcgtgctggcccgctggggccgagtctgggggcaaagattggcctcttctgcatatgacagtagcactgttgtgccttcacccaccagctccagctccaatggcaacttgtctcaggaggccatcactgctatcattgtggtcttctccatcctggccatcttgctcctggctgtgggg

SEQ ID NO: 40930 - DNA, 383 bp, Gossypium hirsutum
  Clone ID: LIB3196-003-P1-M1-B8
atgccgagagtcggagccattactgcaggaaaaggtcccgcagagctgagcagtcaagatgtgtgacttcaccgaagaccagaccgcagagttcaaggaggccttccagctgtttgaccgaacaggtgatggcaagatcctgtacagccagtgtggggacgtgatgagggccctgggccagaaccctaccaacgccgaggtgctcaaggtcctggggaaccccaagagtgatgagatgaacgtgaaggtgctggactttgagcactttctgcccatgctgcagacagtggccaagaacaaggaccagggcacctatgaggattatgtcgaaagacttcgggtgtttgacaaggaaggaaatggcactgtcatgggtgctgaaa

SEQ ID NO: 40931 - DNA, 379 bp, Gossypium hirsutum
  Clone ID: LIB3196-003-P1-M1-B9
attctgcacagcctggtgaaccacacaggcccgcgctctgacatgcagaaggtgaccctgggcctgcttgtgttcctggtaggcttgcctgtcctggacgccaatgacccagaagataaaaacagtcctttctactatgactggcacagcctccaggttggcgggctcatctgcgctggggttctgtgcgccatgggcatcatcattgtcatgagtggaaaatgcaaatgtaagttcggccagaagcccagtcaccatccaggggagactccacctctcatcaccccaggctcagctcataactgatgaagacggaccagctgaaagtgggtggaggaccgttctctgtccccaggtcctgtctctgcacagaaacttg

SEQ ID NO: 40932 - DNA, 387 bp, Gossypium hirsutum
  Clone ID: LIB3196-003-P1-M1-C1
atcgcgcgtcctgcccgtctgtccccgcaggtagtcgcccgccacagccgcgccatgaccacccagcagatcgtcctccagggcccggggccgtggggcttccgcctcgtgggcggcaaggacttcgagcagcctctcgccatttcccgggtcactcctggaagcaaggcggctctagctaatttatgtatcggagatgtaatcacagccattgatggggaaagtactagcaatatgacgcacttggaagctcagaacagaatcaaaggctgcacagacaacatgactctcactgtcgccagatctgaacataaagtctggtctcctctggtgacggaggaaggggggaagcgtcatccatacaagatgaatttagcctctgaaccc

SEQ ID NO: 40933 - DNA, 368 bp, Gossypium hirsutum
  unsure (1)..(368): unsure at all n locations
  Clone ID: LIB3196-003-P1-M1-C10
naaaaaaaaaaaaaaaaaaaaaaaaaaaaaaaaaaaaaaaaaaaaaaaaaaaaaaaaaaaaaaaaaaaaaaaaaaaaaaaaaaaaaaaaaaaaaaaaaaaaaaaaaaaaaaaaaaaaaaaaaaggggggggcctttttaaaggatcaaagtttacttccccgtgtttgcaagataatatttttttttttgtgccccttaatttaaattaatgggccgtgttttaaaaacgtgtggattggaaaaaccttgggtttaccaaatttaaacgttttgaagaaaatccctttttttccattttgcgaaatacgaaaaaggcccccactatttgcttttccaaaaatttgccaaccctaattggcaaatggac

SEQ ID NO: 40934 - DNA, 380 bp, Gossypium hirsutum
  Clone ID: LIB3196-003-P1-M1-C12
ataatattcaaatatatttaaattatcttagtacttatactcaagtaaaattgatttattagattttcagccgattcatatttatattcaaagaagaaaaatccttatgtttctgactatttgtagcttctttcatccgaagaaaactactacagcacttcttacagccagtcagatagtcagtgtggttctcctccaaggggttggtcagaagagttggatgaacgtgggcataccttatataccagtgactatactaatgaaaaggtacattctttttttctcatctagtgtttttttggcagaattctctcataaaatagttgtgtactgaaggtttagtagtattttaaaaaacatgaaaatagtcttcattgtaa

SEQ ID NO: 40935 - DNA, 386 bp, Gossypium hirsutum
  Clone ID: LIB3196-003-P1-M1-C3
ataagccagttcacccggcctggtagttctgactcttaatccctagacacattcttcagaaacaactgtacatggtgagagaaaagtccaaaggaaaaaagttttccttcctttaaaatagactaaatgtgcttatcacctttaaaatttggactgaatgtttaaactttaaacacaaagcaaagggagatgctcttaaatgtcaaatctgaagcaaagattgcatttttgcaaagctatccagaggatgtgttcattattgagacatgggattcattaacacatcagcgcccaaccactgtctctcctgtcccattcacacagtatcgacaaccaaataagcagctgggcaggggagacctatcactgttaatgtcataatcaca

SEQ ID NO: 40936 - DNA, 384 bp, Gossypium hirsutum
  Clone ID: LIB3196-003-P1-M1-C4
atgggattttatctgtcccgatttttatgaagctgtttgtggcacagatgggaaaacatatggcaacagatgtgaactgtgtgctgagaatgcgaaaaccgggtcccaaattggtgtaaagagtgaaggggaatgtaagagcagtaatccagagcaggatgtatgcagtgcttttcggccctttgttaaagatggaagacttggatgcacaagggaaaatgatcctgttcttggtcctgatgggaagacacatggcaataaatgtgcgatgtgtgctgagctgtttttaaaagaaactgaaaatgccaagcgacagggtgaaactagaattcgacgaaatgctgaaaaggatttttgcaaggaatatgaaaaacaagtgagaaa

SEQ ID NO: 40937 - DNA, 223 bp, Gossypium hirsutum
  Clone ID: LIB3196-003-P1-M1-C6
aaaaaaaaaaaaaaaaaaaaaaaaaaaaaaaaaaaaaaaaaaaaaattaaaaaaaaaaaaaggggccaaacttttataaaagggccggccgctttcggggttcctggctttctttcgctttctttcatcctcagaaatcttctatagcgcttcctacattcaattcacatggtcagtgtgtaaatcctgccaagtgttgaacacatgagtttgcccaacttaa

SEQ ID NO: 40938 - DNA, 382 bp, Gossypium hirsutum
  Clone ID: LIB3196-003-P1-M1-C8
atccgcactaatagcggccaccccggcagcggcggcagcagcagcgacgcagcggcgacagctcagagcagggaggccgcgccacctgcgggccggccggagcgggcagccccaggccccctccccgggcacccgcgttcatgcaacgcctggtggcctgggacccagcatgtctccccctgccgccgccgcctgcctttaaatccatggaagtggccaacttctactacgaggcggactgcttggctgctgcgtacggcggcaaggcggcccccgcggcgccccccgcggccagacccgggccgcgccccccagccggcgagctgggcagcatcggcgaccacgagcgcgccatcgacttcagcccgtacctggagccgct

SEQ ID NO: 40939 - DNA, 381 bp, Gossypium hirsutum
  Clone ID: LIB3196-003-P1-M1-D12
atggattcgaaacatcagtgtgtgaagctgaatgatggtcacttcatgcctgtcctgggatttggcacctatgcgcctgcagaggttcctaaaaataaagctatagaggccaccaaattggcaatagaagctgggttccgccatattgattctgctcatttataataatgaggagtacgttggactggccattcgcagcaagattgtacatggctctgtgcagagagaagacatattttacacttcaaagctttggtgcaattcccatcggccagagttcgttcgaccagccttggaaaggtcactgaaaaatcttcaattagactatgttgacctttatcttattcattttccagtgtctctaaagccaggtgaggaact

SEQ ID NO: 40940 - DNA, 386 bp, Gossypium hirsutum
  Clone ID: LIB3196-003-P1-M1-D5
atggcagaggagcattttgtttcaaatgaactgcggctttgacccccaaaatgcaaggaggaactgtgctgggccaagctggagcggcgctgtcttgctggagtggggacctggagtcagagaaaatccacaggctccctgcccctcctcctccatctgcacacgcctcagcttaggaccttcaccactctatggtgaggaatgccatggccagggagaactgagtttcatccaatgtggagaggagtcccagagcagggcagctcccaaactgtgccctctgatcatcgtcccttccagcttgctggagtgtccagagagacagatttgccacaagctaggcttacttataatgctccaccccatagaaatgggaccccaagtac

SEQ ID NO: 40941 - DNA, 366 bp, Gossypium hirsutum
  Clone ID: LIB3196-003-P1-M1-D6
atttattttactttttatttactttacttttaataataatatttaatatacttatataataagcaaacataaatgtgtattacaagtgtatgtatactattggtacacattatttttaccatacacttgtcttatatttaatttatttatcatataatattaatttaataataataaatacattaattatttacttaaataataaccaaatacatacatgtattacaaatgtgtgtattatatttattacacttgtattttattttttccatacacttggcactctttttggcttatttacttatttcgtcctttcaattttctttattctataattaaactttaacttcatagtctctatacttc

SEQ ID NO: 40942 - DNA, 379 bp, Gossypium hirsutum
  Clone ID: LIB3196-003-P1-M1-D8
atcaaagatgttactaagggctttttactactgtgagataaccagcatgatgtgaagacaacgaacattttaagaagtttgactagtagacgtttcttttaagtcttttggagggtcttggtcgacgacccacaattttattgtggctccccaggatttgagaacatgtgggcttggatgatcactgttgacctatgaaagagcacaggtctcttgagagtttattgacacaactactgattacacccccacaatatgtctcaacctctgttgaagggctattgatatttttaaaaacgttacttccaatcagaaattcaagtaagttttatgtcttctactccatcaaaatttatgtttctcagcataaggtagtcta

SEQ ID NO: 40943 - DNA, 364 bp, Gossypium hirsutum
  Clone ID: LIB3196-003-P1-M1-E1
gccgcgaaggcctacaagctcaacaattcgctgcttctcttcactcctctaatgtcgaaaagaagctggagagtcttccttcgatggttgctggcgtttggtccgataacggtgctgcacagctggaggcgactactcagtttcgaaaattgctttcgattgagcgaagtcctccaattgaggaagttatacagtcaggcgtcgttccccgttttgttgagttccttggtagggaagattttccacagcttcagtttgaggctgcttgggcgcttacgaatattgcttctggaacctcagacaatacaaaggtagtaattgatcttggtgctgttccgatttttgtaaagcttcttgcttcacc

SEQ ID NO: 40944 - DNA, 363 bp, Gossypium hirsutum
  Clone ID: LIB3196-003-P1-M1-E10
tcttggtatccctaaatggagatcattatccattcactagtaaattggattttgattgtacgaataacatggtggaatacgaagcgtgcatcatgggtatccgcgcagccatagatcgcaagattaaagtgctagaggtgtttagggattctgcgctagtgatttatcaactcaagggagaatgggagaccagagacctcaagttaatcgattatcagaagctggtccttgaattggttaaagagtttgatgacattaccttctactacctttcacgagacgaatatcagatggctgatgctttggctaccttagcctccatgatcaaggtgaacaaacaagatgtcaaacccatctggttga

SEQ ID NO: 40945 - DNA, 366 bp, Gossypium hirsutum
  Clone ID: LIB3196-003-P1-M1-E3
cccacgcgtccggttgaattaatccgaatttttatttattaagttatgaagttgatggattaattggaaatgatgaaatggtgactaagtagggattggatattggtataaggagagcaagagttgataggtgaattcaaaatttccattacaaaagcttaatgattaaaggccattcataccgttagatagtaaatggtgagagaaaaaggatgtatctcacgtacatatatatatataaatatcaagaattgctaaagcatgattttcattacatatggctccattttcttatcaccacttatttttccttcacttcatgtttgttttggaccagacatgatgatcaatttgttcaacattcat

SEQ ID NO: 40946 - DNA, 367 bp, Gossypium hirsutum
  Clone ID: LIB3196-003-P1-M1-E5
cagatattttatcttttgagggacctttgcagttgtgttcattttgtttgccatactctgctatgtataatataattatgtggtagaaatagatgtttgtcaagtttttgctgcgtatgtaagggtgccatagctcttcccatttgtggtagtggataatgatgaatgaaacgaaggggcatagtcgattctaacatgtaaggtacttgggcagacattcaaagttgtagcaatcacctcatcaacccaattgcttaggcccagctctttatcacacagggtctaggataataataacccaaactccataattaccccaaacaaaccaaatattaaaataaattgtatgaattaatgaatgaatgaa

SEQ ID NO: 40947 - DNA, 371 bp, Gossypium hirsutum
  Clone ID: LIB3196-003-P1-M1-E6
cggacgcgtgggaaaaagctgaaaaacatattttcatggaatgatggttagtgatgagctaagctttcatgacatttctcagctgttgagtttatttggttccaaatatggtaatgaaattgctgtcaatgcgagtaaaaatacaaagctagaagaaacctaagttttcatggccaaaagtaaaggtggattgctaaagaagaaaggttgatttttttttttgaagaagaagaagaaggaggaagagggaacaaaaaaagaaaaaaaatgccaacagtttggttttcattgaagagatctttacactgcaaatcagagccatcagatgttcatgacccagaaaccaggaagcaattgagtacaatattgac

SEQ ID NO: 40948 - DNA, 380 bp, Gossypium hirsutum
  Clone ID: LIB3196-003-P1-M1-E7
atattttcattcttttttgagacagggtcttgcccaggctgaagtacagcctcacaatcgcagctcactgcagcctcaacctcctgggctcaagtgatcctcctgcctcagcctccagagcagttaggactataagcgcataccaccacattccactattttttttccctagagatgaggtcctactgtgtggcccaggctaagattatttttatgttatccttgctctgacttgaaatcccactctaggttggggatcactcttctttgctttaatgaatgtatactttgtcctttagagacatctagacgatcagaattcataaatatcagaatgggtgtattttaaaataatgtttctggtcatatatggccattgg

SEQ ID NO: 40949 - DNA, 359 bp, Gossypium hirsutum
  Clone ID: LIB3196-003-P1-M1-E8
cccacgcgtccgtttctttcaaaatgtaattggctgtgctataccaaaagcttaccaccttgctaactctttcagtcgctcctttattatatgtacatgagattgaattcctcccaaagactaaaccgctacctcaatactcgaccgtcaggctttacagacagacctatagtcgaccctctcacttccttcgtatttattcctttttccagctatgcttgaactataattataatagaaaactcatcgtagagaaagttatggatggaatgatctcctctcttgtaccccgcgaaagctgaagaatggctttagaatcttccattccgctgctccaaaaatccttatttgctgcgtta

SEQ ID NO: 40950 - DNA, 378 bp, Gossypium hirsutum
  Clone ID: LIB3196-003-P1-M1-E9
atgccgggcaaatgccaacatggcagcggttggggctggtggttccaccgcggcggccgggccaggggcgctttccgcgggtgcattagagccggggactgctagtgcggctcacaggcgcctgaagtacatatccctagctgtgctggtggtccagaatgcctccctcatcctcagcatccgctacgcccgcacgttgccaggggaccgcttctttgccaccactgctgtggtcatggcggaagtgctcaaaggtctcacctgcctgctgctgctcttcgcacagaagaggggtaacgtgaagcacctggttctcttccttcatgaggctgtcctggtgcagtatgtggacacactcaagctcgcagtgccctctct

SEQ ID NO: 40951 - DNA, 363 bp, Gossypium hirsutum
  Clone ID: LIB3196-003-P1-M1-F1
gtacgaactctcgatttaacgcaaaataaattagttgaaattcctatggagatcagcgaactagtcaacatgcagcgactgattttagcctctaatcatattgagcaattaccaagtactatggggaatcttcagtctctgaaagctatgatacttgatgggaaccgaattacttctttgccagatgaattgggcgagctggtaaaactcgagaagttatcaatttctggaaatatgttaatgtccttgcccaatactattggcagtttgcgcaatttgtctctgcttaatgtgtctaataataaattgaagtatcttcctgaatcaattgggatctgctcttctttggaagaactgcaagca

SEQ ID NO: 40952 - DNA, 382 bp, Gossypium hirsutum
  Clone ID: LIB3196-003-P1-M1-F11
atgccccagccagagaggaggtttttccgtcgtggctgggtgaccttcgaccgcagtgttaacattaaagagatctgttggaacctgcagaacatccgtctccgggagtgtgagctgagccctggtgtgaacagggacctgacccggcgcgttcgcaatatcaatggcatcacccagcacaagcagattgtgcgcaacgacatcaagctggcagccaagctgatccacacgctggacgacaggacccagctttgggcctcggaaccagggacgcctcccctgccaacgagcctgccctcacaaaacccgatcttgaagaatatcaccgactacctgatcgaggaagtgagcgctgaggaggaggagctgctggggagcagcg

SEQ ID NO: 40953 - DNA, 385 bp, Gossypium hirsutum
  Clone ID: LIB3196-003-P1-M1-F2
atcgcatcccggccctcctccttcccgcctccacagagactgtgttctccgaggtcgccaaacatgttttccaaaaagtgcagcctttttctggtcgtaaaagtacagaagcagaaaacaaaacctgactgccacccttccgggataatcactattaatgttttagtgtattgtctgccctctaaacatttaatgttttttgaatagataatacggtataatgtttcagaaatgataaccagattttaaagtaaatagacctttcttagaagagtcttcctactcctccacaggttaccgcttacattagtttattatgtttccatttagttttgtaaaaaaaaaaaaaaaaaaaggacactttcccttcttaattagtgtattt

SEQ ID NO: 40954 - DNA, 386 bp, Gossypium hirsutum
  Clone ID: LIB3196-003-P1-M1-F4
atggacaagatgcagctgctggagattatcacgactgagaaaacttccagagacaccagtgcttcagctgtagcagtcggtctcaagcaggggaaggtcatcattgtggttaaggatggacctggcttctatactaccaggtgccttgcgcccatgatgtctgaagtcatccgaatcctccaggaaggagttgacccgaagaagctggattccctgaccacaagttttggctttcctgtgggtgccgccacactggtggatgaagttggcgtggatgtagcaaaacatgtggcggaagatctgggcaaagtctttggggagcggtttggaggcggaaacccagaactgctgacacagatggtgtccaagggcttcctaggtcgcaa

SEQ ID NO: 40955 - DNA, 388 bp, Gossypium hirsutum
  Clone ID: LIB3196-003-P1-M1-F5
atctgcggactacgacgactttgtgaatgcgatccggagcgcccgcagcgccttctgcctgacgcccatgggcatgatgcagttcaacgacatcctacagaacctcaagcgcagcaaacagaccaaggagctgtggcagcgggtctcactcgagatggccaccttctccccctgagtctttcacccgtagggtcctatacagggacccaggcctgtggctatgggggcccctcacacagggggagtgaagcttggctggacagatcatcctcactcagctccctggtagcccagactgacagctgctcttgggctgtagcctggggccaagatgtctcagaccctagaagcctagggctgggggagacagccctgtctgggagggggc

SEQ ID NO: 40956 - DNA, 323 bp, Gossypium hirsutum
  Clone ID: LIB3196-003-P1-M1-F6
ccacaatctaaaaagattgttaaaactcttctaaaaaaaactcaagaacaattcttgaaaagaaaaactcaaagagaatttaaataataatcaattgaatgaattgtatacaatgcaaaggcctatatataagctagctaaataaatctaaataaaactcttaagtatagtaaaactctaattaatctaaacaagaagtagttttaaactaaactttcttgttgacataaaactcctaaatagcttaaactacttaataattattaaaaattcggaataataaaataataataacttatagatacaatattggaatcataaaa

SEQ ID NO: 40957 - DNA, 364 bp, Gossypium hirsutum
  Clone ID: LIB3196-003-P1-M1-G1
gggaaagctttcactaataaaatgcactaattggctagaccaaaaattctggaaaaaaaactattaagaagatatatgagtctagtttcaagaaaaattcacgaatttaaattttgagttttgtgtctcgagttatgatttatttagtgactatgatgcaggtgggcagttttataaggaataatgaaaaaaattgttttgatttgtctaagtattcgaaaaatttttaatgttcccgatttggtcctgaaccatttcaattgcatattttagggcctcgagggccctttttagggacatattgaatgaatgtaaataaattaaatttaaaagcaaattttatgcccgaattagtaagttaagt

SEQ ID NO: 40958 - DNA, 367 bp, Gossypium hirsutum
  Clone ID: LIB3196-003-P1-M1-G11
ctcgctactcactttgatacattttccttcattttgcgtaattttcttgactagcaaatagagagtagatccttcagctgttaggaaatgagatttcatcttaattatgtggctgcctaactccatccacacgtaattgcaaattacaagaaaaatgataataattattaaaaaaaaaggttagtgagagtattcatttgatgagagtaattacgatgtcttttgataatttgttatgagagtattcatctttaattatgtggctacttaactccactcacaactgtaataggaaaaaaaaaagataccaataattataaaatggaggttaactagactattcattttgatgaaaactatctcagct

SEQ ID NO: 40959 - DNA, 365 bp, Gossypium hirsutum
  Clone ID: LIB3196-003-P1-M1-G2
cacgcataacatcccatattttctttcttagccaaaaaccttgataagattatctcttgactagccaccttgaggagccattaacaaaggaacaacacaaggaccgaaggaaaacatcttcaatcagagttcatgagactgctgattcaacagagtttattcttattatactttgttattttgattttaatcatgtttgcaatgggttttattatcttgtcatctacaatggtagcttaattatatttaactaggatgattgcatttatttaatgaagtttgtttaaatcatatctatagtgtttgtgcctcagtcgatcatgttttcaattaaactcaagtatgtattttattcatatgtgacc

SEQ ID NO: 40960 - DNA, 387 bp, Gossypium hirsutum
  Clone ID: LIB3196-003-P1-M1-H1
atagcaggaggagctgtcaggaagatcagaagccagtcatggatgaccagcgcgacctgatctccaacaatgagcaactgcccatgctgggccggcgccctggaaccccggagagcaagtgcagccgcggagccctgtacacaggcttttccatcctggtgactctgcttctggctggccaggccaccactgcctacttcctgtaccagcagcagggccggctggacaaactgacagtcaccacccagagcctgcagctggagaacctgcgcatgaagcttcccaagcctcccaagcctgtgagcaagatgcgcatggcaaccccgctgctgatgcaggcgctacccatgggagcccaggggcccatgcagaatgccaccaagtatg

SEQ ID NO: 40961 - DNA, 383 bp, Gossypium hirsutum
  Clone ID: LIB3196-003-P1-M1-H10
atctcaggcctggaactcattaccttgcctcacggacaccagctgcgcctggacatcattgaaagacacagcacgatggccatcggcattgcagtgtacattctgggctgcacgggcactttggaggaccgagcagccactctgagtaaggtcatccaggtggcagtggaactgaaggattccatgggggacctctattccttctcagctctcatgaaagccctggaaatgccacagatcacaaggttagaaaagacgtggactgctctgcggcaccagtacacccaaactgccattctctatgagaaacagctgaagcccttcagcaaaatcctgcatgaaggcagagagtccacatgtgttcccccaaataatgtatcagt

SEQ ID NO: 40962 - DNA, 384 bp, Gossypium hirsutum
  Clone ID: LIB3196-003-P1-M1-H11
atcgcaccgcggcgccggctgcaaagttgagcgaaaagtttgaggccggagggagcgaggccggggagtcctctccagcggggcgctccagtccctcagacgtgggctgagcttgggacgagctgctttccgccccaggccactgtagggaacggcggtggcgcctccccagcaaaccggaccgactggatccagccgccgcagggaatgacgccggtgctcctacagccacagctccggacggggagggcgagccccacagccggccctgcgacgcccgcctgggcagcaccgataaggagctgaaggcaggagccgccgccacgggcagtgccccgacagcgccagggaccccccggcagagggagcccagggtcgaggtta

SEQ ID NO: 40963 - DNA, 387 bp, Gossypium hirsutum
  Clone ID: LIB3196-003-P1-M1-H12
atcagccaccgccgccgccgccgccagtggcgagaccccgacctggcgggtcagcgctgggcgtgcgtgcgggcaggcgggggcgctgacgaggagcaggaagaggctgcagtgccggcgtgggcggctggccgaggcggaggcgcaggaactgggcggcgagtcgtgagaggctgcccgcctcactcagcattatggatccaagcctgttgagagaaagggagctgttcaaaaaacgagctctttccactcctgtagtagaaaaacgttcagcatcttctgagtcatcatcgtcatcgtcgaagaagaagaaaacaaaggtagaacatggaggatcgtcaggctctaaacaaaaatctgatcatagcaatggatcatttaacttgg

SEQ ID NO: 40964 - DNA, 366 bp, Gossypium hirsutum
  Clone ID: LIB3196-003-P1-M1-H3
gcttggaagcttgaaaaaccctagccatggtttctccttgctatattcggccatggggttgaagatgagcaaaattgacttttaattttgtattttaattcattttacccctaaatgaccaaaatgcccttactactaaactttccaaaaattccatccatgtccaatttttgtccatagacttagaaattggtaaaattctatttaagacctcctaattaatatttcaaaacaatttcatgctagaaacttctagaatgcaagttttgcaatttattcgatttagtccctaatttcaatttaagcactttatgcataaaatttcttcacaaaattttcacacaatcatgcaatcatatcatagac

SEQ ID NO: 40965 - DNA, 384 bp, Gossypium hirsutum
  Clone ID: LIB3196-003-P1-M1-H5
atctccacccgcgcttggtcccagcgcccgcggcgccgcgtccccggcccagccatggcgtcctccgcggccggctgcgtggtgatcgtcggcagtggagtcattgggcgaagctgggccatgctgtttgccagtggaggcttccaggtgaaactctatgacattgagcaacagcagataaggaatgccctggagaacatcagaaaggagatgaagttgctggagcaggcaggtgctctgaaaggctccctgagtgccgaagagcaactgtccctcatcagtggctgccccaatatccaagaagcagtagagggcgccatgcacattcaggtgaatccgccgtactacatcccgctggttgagctggtcccccacccggagacg

SEQ ID NO: 40966 - DNA, 388 bp, Gossypium hirsutum
  Clone ID: LIB3196-003-P1-M1-H6
atgtcaggataaattaaaagaacatttgtctggaaatgctgccaggagcctattatgtaaatgttaggtattttgtaaaataaccttgaaattgtaaattgacacgtgtttggtcagattgtgtcaagtttaatttgttttgttttctttttttttatttgaaaactactttagcaataattaattccatgattatcacattctgccattaagggatattagtaccgtaatactgaagaaatcttactaagtctgaacttttggggtaggcagcttctttgtttcttttctatccacccttgtcggttgaggtatttgtttcttgactaataaaccctttgatacttttagccagaaatcggtctcataaagctatttttgagtatag

SEQ ID NO: 40967 - DNA, 382 bp, Gossypium hirsutum
  Clone ID: LIB3196-003-P1-M1-H9
atctcattttcatctgttttttgaagaaaaatggaaaaatgtaaaaggcggcccctccccaggctttgtgagcctggcccgagccagtataagagggcctggggcacgatgtggtcagccaggaagcatacgatgccatttcttttatagactcctcggtatttctggtagggtaaggggcaggccagggctgttcctgcccatgatggaagaggaaagtgctactgggcaaggtgtcccaccctcccctcctgaccctccttctacgaggcttatcctggcaatggggtagtcactgccacccttccatcaaaaaaaaaaaaaaaaatcccttccttgtgggattcttgggcatctcctgcctccctcactctcacggtaa

SEQ ID NO: 40968 - DNA, 377 bp, Gossypium hirsutum
  Clone ID: LIB3196-004-P1-M1-A10
atacttgcaccactaagaaagaaatgtagaaccatttggaaaaatgaaatttagtagttccaagtttcaaagaaatgtcaacattttattccattcaataaagaacaaaaccaatagtatttttattactttcatctgaaacattccatgttttaatctgagccttgcagactttgatttggagtttgaacctgttttggttgcatttcatttttggagaacttcattaacgtgagattggcgattcaaatgcaggtgcagttttctgttaatgtcatgctgttgtttaggtaataagaaatattaagtaattggctttagattttgtaattttttccctgagttcctgctagatttcgtattctagtagcaatgta

SEQ ID NO: 40969 - DNA, 364 bp, Gossypium hirsutum
  Clone ID: LIB3196-004-P1-M1-A11
atcgaggccgtgcggcatggcagctacaaagccatgaagctgctgctgctctacggggccgagctgggggtgcggaacgcggcctccgtgaccccggtgcagctggctcgagactggcagcgcggcatccgggaggccctgcaggcccacgtggcgcatccccgcacccggtgctgaccctgaccgcagcccgggtcttgcgcacctgccaccattccatcccatgcccagcccccgcgtctgtgcctctgtggttcctgccctcagccccggttcctgcctctggggtctgtgcctgctcagcagcccttgcagaactgagtggtggcaccgggccctgcaagcagagagaggggcctccctg

SEQ ID NO: 40970 - DNA, 379 bp, Gossypium hirsutum
  Clone ID: LIB3196-004-P1-M1-A12
atgtttattaaaataattaaaaatactttataagaagagatatttttgatattaggactgatgttgaaatatataggggcaatttataaaaaggtagttagagaaatatattttagtgaactataaccacagagcacagatgactcccaatgagctgatctgtctttagatttctccctttccctgacccatccctgttctctaggggctgggagtggggatgtggacacaggagggggagctccttcacattttgcacaaagcacaagtctaaacagcctatgctctggccagagccatttctaagagctttaaaccagaagacctatcctgggccaattttcctttttctttatattattttccgggaaaaaaagta

SEQ ID NO: 40971 - DNA, 377 bp, Gossypium hirsutum
  Clone ID: LIB3196-004-P1-M1-A2
atggtggctctgcagagggcgatggcatgcagccgggcgctcctgttgcccacgcctcccaggccctcacccctcaccatgcctgcgcccagctgctcctccagcgccattcatcccagcaggcagcatggacacggcagctgagaaaagatgccagcagaacgcgcttattttataatatttaataactcagtgccaatctgcattaacacagtcatcctcaggtttttcagagggctgtgtacacatctgtgagaataaatgttagcctctaagttttgaatgaagattctctgaagacgggcagccggtgacctttgttttacattgagcaatttttcaccatctcagccgctctggccattttgaaaagggct

SEQ ID NO: 40972 - DNA, 324 bp, Gossypium hirsutum
  Clone ID: LIB3196-004-P1-M1-A3
gaggctgcacactttagataacttggggtcaggggtgcacactcttggtcgtatgtgtccggtcctgccttctttgatggcataccctttttccctactaacccgtgtagacctttatctcgctggataaatgatcatggtccggctcaaggttgtgatgatgctaagactcagtattgacgctttgaaaagtaaatgatttccatgcattgcagctgatgatttctcctggggcgctaagagctgggctagactggctaaagatacccttattcaagctcctgacaggggagatccttcagttggcaatgagggtgatttcaa

SEQ ID NO: 40973 - DNA, 375 bp, Gossypium hirsutum
  Clone ID: LIB3196-004-P1-M1-A5
atgtgcgacctacatgtattcttggagtcactcagaaaaccatctggacgcagggaccgagcccccggaaagcaaaggagggtagcagcaaacaagtgtctgtacacaggagtcaaagagggggaaccgccgtcccaacatcacaaaaagtgaaagaagccggaagagattttacctatttaatagtggtgctttttggaatcagcattacaggtggcttgttttacacgattttcaaagaacttttttcttcatccagtcctagcaagatatatgggagagccttagaaaaatgcagatcacatcccgaggtaatcgctgtctttggtgagcctgttaaaggctatggggaggtgacaaggcggggtcgccgga

SEQ ID NO: 40974 - DNA, 363 bp, Gossypium hirsutum
  Clone ID: LIB3196-004-P1-M1-A8
atgccggctggtgaatgacacataacagctgtacaatgtggggaaaagacaaattgtccgaagtgctaagaactccatgagagaagatgccataaaataaacacctccctattcctattatctttcaatggttaccttgacttaacctattgagttacctggtcagcactgtgatctttttttctctccaaaggacctgcgttggacaacaataaagaaaaatttaacctatcatgcactgtacacatttcctgttcataagtttgggatttacataacccgcaaccaccatgttcctttgtatatgatgcaacagcataaatgtaagcttttatatcataagttctggtctttccagtcaca

SEQ ID NO: 40975 - DNA, 360 bp, Gossypium hirsutum
  unsure (1)..(360): unsure at all n locations
  Clone ID: LIB3196-004-P1-M1-B1
cagcaataggacgtggatggtgcctgatgctaagggcattccgtggacatccagaactgggggtaaacaatttgtggattatgatcgaaacattgttgtgaagaatgaaggcaatagctcaggagacatttcagcgtcccaacactctattctgactatggataaagccatttcagatttggagataaaattgatggcttctagggccgaacatgagacaattcagaaagaccctacgatgtctgaaggtgtgaagaatatagaatcgattttaaaaaggaaatattttatggttataggaatcaatacggcttttagtagtcgnaagcggagagattcagtacgtgcgacttggatgct

SEQ ID NO: 40976 - DNA, 378 bp, Gossypium hirsutum
  Clone ID: LIB3196-004-P1-M1-B11
atggagctggaagggacaacggagaacattgcagcccaggctctggagcacattcactccaatgaggtgatcatgaccattggcttctcccgaacagtagaggccttcctccaagaggctgcccgaaagaggaaattccatgtcattgtagcagagtgcgctcctttctgccagaatcagcctttccctcccattgcagggtcatgaaatggctgtgaatttgtccaaagcaggtattgagacaactgtcatgactgatgctgccatttttgctgttatgtcaagagtcaacaaggtaatcattggcacgaagaccatcctggccaatggtgccctgagagctgtgacaggaactcacactctggcactgcagcaaaa

SEQ ID NO: 40977 - DNA, 385 bp, Gossypium hirsutum
  Clone ID: LIB3196-004-P1-M1-B3
atcacggaacgaacggcactcttaccaggtttaccggcagccaatcccagtccaggagctggtcctagaagacctgcaggatggagatgtgagaatgggaggctcttttcgaggggctttcagcaactcagagaaagctaaaaatatctttagaattcgcttccacgacccatctccaggccagtctcacactctgcaagccaatgacgtattccacaagcagcagtggttcaactgtattcgggcggccattgcccccttccggtcggcaggcagtccgcctgagctgcagggcctgccagagctgcacgaagagtgtgaggggaaccacccctctgcgaggaagctcccagcccagaggagggcatctacagtttcagtgtta

SEQ ID NO: 40978 - DNA, 377 bp, Gossypium hirsutum
  Clone ID: LIB3196-004-P1-M1-B5
atcgcgtgtgcaattagcaatgcagtgtatatacaagaagccatgctgttaacagtttatctcaagtaatttggtgtcatttacaaaaggaagaaattcctgccatcagaagggacagaaggagatggaatgatcaaatcacagagaaacactaaaattactaaatctacaacagctcgccttatttttcttggacccaaactgtcagggtataaacactatttgtttcttttttaaaacatcgatagttttgctgtaaataataacactgtataaattctaacagaaaaatagaataaaatgttgataaggcactgcctcttagaacacaaacagaatattgcaaatgcatttaacaaataggggtctcaagtact

SEQ ID NO: 40979 - DNA, 377 bp, Gossypium hirsutum
  Clone ID: LIB3196-004-P1-M1-B7
atctgagctttttatcagaaagcttttttgatgttttaagtgttatgtgacttgttgaactttttaaaaagtgctacttttaaaatcccagatactctgaattttagaaaacaaactaattctgattgtgtcgtgcccaagtaccctttttttttttttaaacgaatagggaccaatgccacattgctttttatatttctttcttttttaatgttgccaaaaccaaaagtagctttgttttcctttgtattttgctactttgcagtatttgtgtgtggttttttttccttaatttgaaagggacagcactgtgtatgtttataaactaaatgaagataagatattattttgtataaacattcatctgagacaatcaa

SEQ ID NO: 40980 - DNA, 380 bp, Gossypium hirsutum
  Clone ID: LIB3196-004-P1-M1-C10
atggagagggaaaaggagagggagagggagtgagagagagagaggagaggtgaagcattggatctatgtcaagggacaggcagatatacccagagaggaaaaaaatacttaataaaggaagagtacagctgcaaaacaagacatacaggagctgaagcagacatggcagaaaccagctggagaaagcacaggacaactaggacaatttagttaagcacaatctgtcattccagtatggactaccaagttcaattcaggatgcttcagttgaagacacgtggggtaatgtgctcagctgacgagggtccaaggaggccccattttccctgtcaccctatcctatgctcgtgctttggatcgttagcacactaggaatttca

SEQ ID NO: 40981 - DNA, 379 bp, Gossypium hirsutum
  Clone ID: LIB3196-004-P1-M1-C11
atcgcagctcggagtcagggcttctgggtgagccccagttcccccgcagctcggagtcagggcttccgggtgagccccagttcccccgcagctcggcgtcagggcttccgggtgagccccagctccccccgcagctcggcgtcagggcttcctggtgagccccagctccccccgcagctcggaggcagggcttccgggtgagccccagttcccccgcagctcggagtcagggcttccgggtgagccccagctgcaagcctgtgggtcttcagtgcatgctggctgccactgcgatcacacatgtgatctcacaaagagcagatcaacagcatggtagattcaaggaaacgttaacactgtgtgtttccgatctatccga

SEQ ID NO: 40982 - DNA, 362 bp, Gossypium hirsutum
  Clone ID: LIB3196-004-P1-M1-C12
atggctgctgaggacgagttactgctgccgcggctccccgagctgttcgaaacgggcaaacagttactggacgaagtagaagtagcgactgaacctgccggttcccggatagtccaggagaaggtgttcaagggcctggaccttcttgagaaggctgccgaaatgttatcgcagctcgacttgttcagccgaaatgaagatttggaagagattgcttccaccgacctgaagtacctgttggtgccagcgtttcaaggagccctcaccatgaaacaagtcaaccccagcaagcgtctagatcatttgcagcgggctcgagaacactttatgaactacttaactcagtgccattgctatcatgt

SEQ ID NO: 40983 - DNA, 369 bp, Gossypium hirsutum
  unsure (1)..(369): unsure at all n locations
  Clone ID: LIB3196-004-P1-M1-C5
atcaaagaccctggggccaccaggccaggagtgtggaggtggctcccagaggggcctgcccccaagccctccccgctgcactgcctggagagcgccctgagggggatcttgcctttacggcccttgcgctttacctgcgtggcatgccccagccccagccccggctccagctcgagcttcagcggctctgaaggagaagacccgaggccagagcccgagctctggaggccgctcctccaggagagggaccgccttcccaactgtnagcctcctgtccctctgtccccatgtcctggtgggacccctgctggaagcagtggcagcagccctggtgaagaccccaggagaacagagcccaggtactgcagc

SEQ ID NO: 40984 - DNA, 362 bp, Gossypium hirsutum
  Clone ID: LIB3196-004-P1-M1-D12
gcctgagtgaaagttctttgaaaataacgaattgtttcaattcggtaattttgtgaattagtgtttaatttaagtataaggactaattgcataagtgattaatatgaattgatattagttataagatgaaacttgattaggggatttattaaataaataaattgtaacaccccttacctgaatccgacatcgggacagggttcgaggcattatagggctaaaacattaacattcacagaaaaccagccaataatttcgttaaaatttaaaacttttcaatttcatgcaaattacaagggcctacgaggcccaaaacatacattgaaggtggttcaggactaatcgaggactttgaaaacttt

SEQ ID NO: 40985 - DNA, 379 bp, Gossypium hirsutum
  unsure (1)..(379): unsure at all n locations
  Clone ID: LIB3196-004-P1-M1-D2
acaagnnngacaaaaaagcaggctgnnnaatgccgcggtttcccgggttcgccccacccgtgcattccaaacacacttgttcggggactgaaaggtcaaataaatgaaacccatcgacctatgtcgctactaggaacattccgcccttaacgagtgtgatcaaaccctgtgttactggcggtatgtgggattatnactaaattgtgtnagcgctaagtgttagtgtgtttaatgtgattgaccgatttatgcgctcttagactaaactgaatgatactcntttagaatgagatttatttgaatttgttgngaacaacagaccaaggaattggatttagatccactaaaatagaaagttgttggttagtcnatcatttag

SEQ ID NO: 40986 - DNA, 378 bp, Gossypium hirsutum
  Clone ID: LIB3196-004-P1-M1-D3
ataccgacgacaccttctgcgaggcctgcaagtccaccgtgggtgttgacttcaaaatcaaaactgtagagctaagaggaaagaaaattagattacagatctgggatacagcaggtcaggagagattcaacagcattacctcagcttattacagaagtgccaaggggatcatattagtttatgatatcactaagaaggagacgtttgatgatttgccaaaatggatgaagatgattgataagtatgcttcagaagatgcagagcttctcttagttggaaataagctggactgtgaaacggacagagaaatcaccaggcagcagggggaaaagtttgcacagcaaataactgggatgcggttctgtgaagcaagtgcaa

SEQ ID NO: 40987 - DNA, 375 bp, Gossypium hirsutum
  unsure (1)..(375): unsure at all n locations
  Clone ID: LIB3196-004-P1-M1-E1
atcttggatgaaactggcgaagaaagggaaaggggagtaaccatggatgttggtatgacaaagtttgaaaccacaaccaaagttattacattaatggatgcaccaggccataaggacttcattgcaaatatgattacaggagcagtccaggcggatgtagctgttttagttgtagatgccagcaggggagagtttgaagctggatttgagactggaggacaaacacgagagcatggactcttggtccgttctctgggagtgacncancttgctgttgcagttaataaaatggatcaggttaattggcaacaagaaagatttcaagagattactggaaaactnnggcactttcttaagcaagcaggttttaaggag

SEQ ID NO: 40988 - DNA, 360 bp, Gossypium hirsutum
  Clone ID: LIB3196-004-P1-M1-E11
ggaacagtaccaagtaccatgattttacaacttgaataaattgaataactagaataacaaattggtataaatacctctcgtatcttagccaagttcgaaaatgaacaaattggtccctgaattaaaaaaaaatcaaaattatcttcaaaaattcaactaaatttttttctaaattttataaaaaaaattataaagataacttttatgaaaaaaatataaaaatcacaaaaataatatatataattctaaaaaattatataaaaatgttaattataaattttataagaaaacacaaaatataaatatgaggtcttaaatgagtaaatggccaaatcaagttcaacatactaaattattttt

SEQ ID NO: 40989 - DNA, 363 bp, Gossypium hirsutum
  Clone ID: LIB3196-004-P1-M1-E12
cggacgcgtgggcagagaatgaagcttgcaaaggagctggaattgcagaggatgcagtttttcatgaagacacagctggagatttcacagttgaagcatggtagaagaagtggtggaattgggaaatctagtgatcaccacactaaaattaataatagcaacaataataacgacaacaataacattagtggtaatagtaactaaaattctgtaggtttgtaattggattaggttttagatttaatgtgtcttcttggggcaaatgccctggatttgttgtatttgaactggtagttcttgagtgtattttcatgctttatctgttgtactctttttttttttctggccaacagttcattattg

SEQ ID NO: 40990 - DNA, 417 bp, Gossypium hirsutum
  unsure (1)..(417): unsure at all n locations
  Clone ID: LIB3196-004-P1-M1-E2
gctggnncncctgcnnnnntccggcaattcccgggatggaagaggtcctgttactacagctataattcaaagaggaactttaagaaaaggctgtgttctggttgctggaaattgttgggcaaaagtacgcttaatgtttgatgaaaatggaaaaacaatccatgaggcccatcccagcatgccagtgggaattacaggctggagagaccttccttctgcaggagaagaaattcttgaagtagaatctgagccaagggcacgtgaagttgttgactggaggaagtatgaacaagaacaggagaaaggtaaagaggatgtgaaaataatagaagaaaagcgaaaggaacaccaagaagcatatcagaaagcccgngagaagtatagcaatgtgcagtggaagaagagatcactctacag

SEQ ID NO: 40991 - DNA, 367 bp, Gossypium hirsutum
  Clone ID: LIB3196-004-P1-M1-E3
cccacgcgtccgtgtctactcagattttgtctattacatagaggtgacagttatacacctataaggctataacatcatgttgttatagagagatagttattgtaaacttaccatatcatttatgtcgtgaatttccatccaatacaaaaaaatgaaaattatgtttaaaaaaaagaaagagaaagtgataatcaaatcaacaaaattaaaagacgtataacaagcacatttattattgcttttatacatttttttttattctacattctttcacatgattaattataaagttcataaatttaacaagttcaattaattaatataagttatcaaattaaattaattaattaattaattatcataagtt

SEQ ID NO: 40992 - DNA, 387 bp, Gossypium hirsutum
  Clone ID: LIB3196-004-P1-M1-E4
aattcccgggatgggccgcccggctccggcaccaggagctgttccggctgcgcgggatcaaggcccaggtggccctgaggctggcggagctggcgcggcggcggaggcagcggcaggcgcggcgggaggctgaggctgacaagccccgaaggctggggcggctcaagtaccaggcacccgacattgacgtgcagctgagctcggagctgacagactcgctcaggaccctgaaggtgctcatcgctggcgccgcagagccctgtgcccaatgatgacaccatccttgctccccgtgccccccaggggctatgggcgacaccaatgctgcccctgggctgggccagtggggccaatgcccaggggctgaaggcacatggtgctgggggg

SEQ ID NO: 40993 - DNA, 377 bp, Gossypium hirsutum
  Clone ID: LIB3196-004-P1-M1-E9
atgaattttagagtaccattttctttcaggctgccatattatccctgtttccatttgccatggataattggagggtcatagtatagaagcaagagttaataacagaacttgcataagtgtgttaaagttcgtgggggaggggtggcaaataccatattttaagttatgcaattgccattttaagaaagtcaattctattcacttgttaactagaaacattgcctagattgagtttattgaagcaaaaagaaaaggcaatgagagagaacttttatcttccttcctgtcaccttctatatagttgattatgacttctgccagacttagaggaacaactttagttcatttcaacacttttttttgtttttataagagca

SEQ ID NO: 40994 - DNA, 362 bp, Gossypium hirsutum
  Clone ID: LIB3196-004-P1-M1-F10
cttgtattacccttaatattaacccttaacccattattgctgaaatcccctaaattaatttgatccctatttttgttgagaatctgagttggaataattgcttagctatgttttattatattttgtatctagttaacttgttcttaaaaaaaacactatgtaagtctatattctgaaacgaagccctattgtacgcaaataatgattaactctttttctagttaagcaactttttaattcaatcccgattctaaccctttctttcaacttgtgaccacacccccaaaccaagcctcattactaccctctaaagaccttttgattgatgtatcatcttaaattacagtggtggaatttgattt

SEQ ID NO: 40995 - DNA, 374 bp, Gossypium hirsutum
  unsure (1)..(374): unsure at all n locations
  Clone ID: LIB3196-004-P1-M1-F2
atcctcaatctcagacctacagatggtgaacatctccctgcgagtgctgtctcgacccaatgctcaggagcttcctagcatgtaccagcgcctagggctggactacgaggaacgagtgttgccgtccattgtcaacgaggtgctcaagagtgtggtggccaagttcaatgcctcacagctgatcacccagcgggcccaggtatccctgttgatccgccgggagctgacagagagggccaaggacttcagcctcatcctggatgacgtggccatcacagagctgagctttagccgagagtacacagctgctgtagaagccaaacaagtggcccancatgaggcccagcgggcccaattcttggtagaaaaagcga

SEQ ID NO: 40996 - DNA, 350 bp, Gossypium hirsutum
  unsure (1)..(350): unsure at all n locations
  Clone ID: LIB3196-004-P1-M1-F3
cccacgcgtccggtgggttagtgggttttgttgtattgggcctgatggcatataagtgggccggttggtttagtgggttaggtggtgggtaaacgggcttaataggttagttgggctgagggtgtatggattttgtaaaggggttgagggtaattagggtctggggttgagcccaaaattggtctgtacatatcaattcaacccctatctccagtttggtttacaaaacactagttttaatcgacgaaataactttttcgatatctcttggttcagcaagcatatgatgaactaagcgataaattgtttaacaacnncnanttgagcaattatcgatgtcaatggaacta

SEQ ID NO: 40997 - DNA, 363 bp, Gossypium hirsutum
  Clone ID: LIB3196-004-P1-M1-F5
gttaaatgtatcattagagccattgtgggaagaattgagtaattgtattggcatgactgaggcacagctggctcagagctcactctgtccaactgtatctaatataaatgttggggagcatcttcaaggagcatcctcgtcatcaccacttcctcctgggactcagagacttcttcctttcattgaggccttcttcgttttgtgtgaaaagctacatgccaatcattctatcatgcaacaagatcatgtaaatgtgactgcacaagaagtaaaagagtctgctgagtgttctgttaccttaccctctaaatgcggtggggattatcagaagaagcttgatggttctgtcacattcgcaggttt

SEQ ID NO: 40998 - DNA, 272 bp, Gossypium hirsutum
  Clone ID: LIB3196-004-P1-M1-F9
atgtaaactttaagaatatgattctcccattcaaattcacagcaaacatctagccaccttcaaaacgaagatacagaccatcatttagcaatactaatacatgattttccttggggatggcgggtttgaaaattctttagcaacaggacatacttgccctaaattacagggaattatttataacgaggaaaaagttttcaggtccaacctgaagcgagggggtttaccacctacaacctttaattaattttcaagaggaaggttttggaaaa

SEQ ID NO: 40999 - DNA, 394 bp, Gossypium hirsutum
  Clone ID: LIB3196-004-P1-M1-G10
aattcccgggatctcagcacccgcagcgccgcatctctacccgattgtgcagggatgccggggggggggggtcatcaggagagaatcctgcgtcgggatgcggggttcatgaatgtttaaaagctttagtctgtggagttcctagtccatcttttttctcttaaaaatctgtggaagtcaccgcaaaaatattgaagaatttaatcaaagagcaatgcacgaattgtagaacacccacctgcggtttgtaatttgttctccatgggagggacttaagaaaatactactataaggtgcatgataaaggaaagcaaattcaataattggttagggagagctatgcagcttcttagttttagatcaaggtggaaattttctggtcacgtatcatagc

SEQ ID NO: 41000 - DNA, 381 bp, Gossypium hirsutum
  Clone ID: LIB3196-004-P1-M1-G3
atgtttgcaagacataacaaaatctatacttactctataatcccaaatagatgcttcggcagcagtgactctccaaaaccactgaggcctagacctcctcactgctgagaaaggaggactttgcaccttcttaggggaagagtgttgtttttacactaaccagtcagggatagtatgtgatgccacccagtgtttacaggaaaaggcttctgaaatcagacaaaagctttcaaactcttataccaacctctggagttgggcgacatggcttctcccctttttaggtcccatgacagatatcttgctattactcgccttcgggacctatatttttaacctccttgtcaaatttgtctcttccagtatccaggcctaaagcta

SEQ ID NO: 41001 - DNA, 373 bp, Gossypium hirsutum
  unsure (1)..(373): unsure at all n locations
  Clone ID: LIB3196-004-P1-M1-G6
atgtggtgcctttgcctaagggtgccaatgtctcctgggagcctggctttgatggtggctatctgcagagattcagtgtctggtacacgccactggccaagcgtcctgaccgaatgcaccatgactgggtgtccttggcagtgcctgtgggggctgctcacctcctagtgccagggctgcagccccacacccagtaccagttcagcgtactggctcagaacaagctggggagtggtcccttcagcgaaatcgtcttgtctgctcctgaagggcttcctaccacgccagctgcacccaggcttcctccaacagagatatcccctcccctgtcccctccacggggtctggtggcagtgaggacaccccggngggt

SEQ ID NO: 41002 - DNA, 377 bp, Gossypium hirsutum
  Clone ID: LIB3196-004-P1-M1-G7
atccatggatgaagcggaccggcggctcctgcggcggtgccggctgcggctggtggaggagctgcaggtggatcagctctgggacgccctgctgagccgcgagctgttcaagccccacatgatcgaggacatccagcgggcaggctctggatctcggcgggatcaggccaggcaactgatcacagatctagagactcgagggagtcaagctcttccttcgttcatctcctgcttagtggacacaggccaggacatgttggcttcgttcctgcgaactaacaggcaagcagtaaagttgtcgaagccaaccctagaaaaccttaccccggtggtgctcagaccagagattcgcaaaccagaggttctcaaccggaaac

SEQ ID NO: 41003 - DNA, 360 bp, Gossypium hirsutum
  Clone ID: LIB3196-004-P1-M1-G8
aagaagggctgcaaaattgaatgtttgattaggtttcaggctattctgattcacattatcaatatataaaatttcttgggttatcccagatccaatccgtctattttgtttgtaaaattaaatgtcgattccacataccatggtgaggtggcaaagtctttgatatcagtctcgggatcaaaacttcgtatttgatcctggaacaatttctacctttcctttgtaaaaaggaaaatgaggagttggagcccaagtgaaaaccaggcttatccaagtcaaaacaaaaaattagccccataacaagaagttgcatggtaaacagagagacaggtgcctcaccttatccaaatcttatatttt

SEQ ID NO: 41004 - DNA, 358 bp, Gossypium hirsutum
  unsure (1)..(358): unsure at all n locations
  Clone ID: LIB3196-004-P1-M1-H3
gataaagttatcatttacccattcttacaacttatctccaccagtctgtactcttataatcttggtagaagttagcgcgatgtgtcggatgtagtaaatggatctccatggcataccggaatgcctaatggcggcaattaatcctttccttatatcgaaaatgatgtaaatattatcgttactaataacaaaccactgcaagttcgtaaagttatcatttacgatggtaagcgctatcgggagcacgttcttgttcctaccttgaccaaccgcaacaagtaggatctgtgtatatttgtcgtatagtcaggtctcatctactngcaaaaacggcttgtaatggggacatgcgcgccgc

SEQ ID NO: 41005 - DNA, 386 bp, Gossypium hirsutum
  unsure (1)..(386): unsure at all n locations
  Clone ID: LIB3196-004-P1-M1-H5
attcccgggattgtggctccagggagggagcgagggcccggggctgggacacctgggactcggaggaggggcaggcggggactggggtgtcctgggtccgctgaggggggcgtgggaatttcagcacttgtctaggggccagcaaccctgcttgtgaggtgggaggtgtgtggttgctaatagaccaaatgaccttccaggtctcactggatctggattttctgtaattctctgatcctgcaggcaacatgagtgagaatgaggaagaggaaatntctcagcaagaaggcactggggactatgaagtcgaagagataccatttgggcttgaaccccaaagccctgggtttgagccacaaagccccgagtttgaaccccaaagcccc

SEQ ID NO: 41006 - DNA, 373 bp, Gossypium hirsutum
  Clone ID: LIB3196-004-P1-M1-H6
gttttacaagcttattaaaagccgaatgaacaaaatataattttactaatagatgaataatattaatttaccaaactcacatctgagcacttgagtgatcgactctagtaattgcttgggggatgatgaatccattaattcgacggatttaatgttggaccagatttcattgcccttcaaaacacaggcttgcttttgacccgtagcaagctctaaatcaatcacgtttcttattatcttgtgactcttacaaaaaaaaattcacgttcgtaatcgtcttgcaaaaatttacagttttctccatcacctctagggttatgttcgcacgttcttaagctatctatttattaattgctctatcaaaattacaaat

SEQ ID NO: 41007 - DNA, 330 bp, Gossypium hirsutum
  Clone ID: LIB3196-004-P1-M1-H8
atgtgtaacaatgatttacatagcatttacattatattaaatattataagtaatctagagatgatttaaagcatacagaaggatgtatgtaggttatttgcaaatcctgctctttccttggattttggaatctgcgggagattctggggatcccctactcccactgtgcatgctgagagacaactgtatttatttgggatttaagcattggggtttgttgttgtttttgagaccacttctctctatgttcccaggctcatcttgaactcctgggctcaagcagtctttctgccttggcttccaaagtgctgggagaattacagcatgagc

SEQ ID NO: 41008 - DNA, 379 bp, Gossypium hirsutum
  Clone ID: LIB3196-004-P1-M1-H9
atgaaaggagaataatagcatgtggcttgtaaacttaacaaatgtaatcacagtaattgagaagcccaggaaataatttgaccagcataattatattacaaattgcatattgcgcaattaaacaattgcattttggccacaaatggaactccaagtatacaatttgtagtgaagtggagaggtaatttaaaataagaaaagaaaagcaaaggcccagaaatacatttacatttatatccatattggagggcataaacaaagtaataaggaaaaaggtcagtgttttcaagagaaaataatacaactgactcaaacgaattttgccaaatcctttgtggatgttttaccgctatttaactttccaatgtgcataaacatt

SEQ ID NO: 41009 - DNA, 399 bp, Gossypium hirsutum
  Clone ID: LIB3196-005-P1-M1-A1
atgcggcagcggctgcagcaggcatcatggcggagctgcaggaggtgcagatcacagaggagaagccactgctgccaggacagacgcctgaggcggccaagattcactctgtggagacaccgtatggctctgtcactttcactgtctatggcacccccaaacccaaacgcccagcgatccttacctaccacgatgtgggactcaactataaatcttgcttccagccactgtttcaattcggggacatgcaggaaatcattcagaacttcgtgcgggttcatgtggatgcccctggaatggaagagggagcccctgtgttccctttgggatatcagtacccatctctggaccagcttgcagacatgatcccttgcgtgctacagtacctaaatttttcta

SEQ ID NO: 41010 - DNA, 203 bp, Gossypium hirsutum
  Clone ID: LIB3196-005-P1-M1-A2
catcaaaagcagctggtccttgtgccgctcaactgtcctagtccttcgtcggtaagcgccccgccccggggcctgagctgcatgtctcaggcctgcgcctctcgaccccggctggccttgctttgagctgcggaggcctcgccgcgccttcaccgggaacaaaaagcggggtgggccgggccgggcggactggcgttgtgcgg

SEQ ID NO: 41011 - DNA, 401 bp, Gossypium hirsutum
  Clone ID: LIB3196-005-P1-M1-A4
tatacaacagactgagcaaaaggcgggctgctccggtcccgaatcgccgggatcccggcgcccctcgcgtgccaagcccagcgcaagtcagctaagctcagccgagcgagcgcggcgcgatggacgggtctttgcttgtgcagaacgcactcctgttccgcacggtatacccccatgtgcgttgctggttgaacgcaggtctttttacatcgacgattgatggcgataccgaccggctcccggagttcatcgtgcagacgggctcctacatgttcgtggacgagaacacgttctccaacgacgccctgaaggtgacgttcctcatcacccgcctcacggggcccgccctgcagtgggtgatcccctacatcaagaaggacagtcccctcctcagtgactac

SEQ ID NO: 41012 - DNA, 401 bp, Gossypium hirsutum
  Clone ID: LIB3196-005-P1-M1-A5
atctctgatagctaccagcttaatgtacccagcattcagcgagacacacagcgcaccgacagaggggacatgggcagagcaatggtggtcagacttgggctggggctgctgctgatggcactgctgctacccacgcagatttattccactgtaacgactcttgcaccactttcaagtaactcctcccagaatacttcgactaccccaaatgcagctaataccaccaccaaggccgttggtggtgccctgcagtcaacagccagtctcttcgtggtctcactctctcttctacatctctactgttaagagactcaggccaagaaacatcttctaaacttccccatcttctaaacccaatccaaatggcgtcttggcaaggaaaaacaggtcttcattgaatc

SEQ ID NO: 41013 - DNA, 396 bp, Gossypium hirsutum
  Clone ID: LIB3196-005-P1-M1-A6
atcgaatagactcatacggggctcaggcctctctgcggggctgactctgcacttcaccatggctttcattgccaagtccttctatgacctcagtgccatcagcctggatggggagaaggtagatttcaatacgttccggggcagggccgtgctgattgaaaatgtggcttcactctgaggcacaaccactcgggacttcacccagctcaacgagctgcaatgccgctttcccaggcgcctggtggtccttggcttcccttgcaaccaatttggacatcatgagaactgtcagaatgaggagatcctgaacagtctcaagtatgtgcgtcctgggggtggataccagtctactatcacccttgtccaaaaatgtgaggtgaatgggcagaatgagca

SEQ ID NO: 41014 - DNA, 405 bp, Gossypium hirsutum
  Clone ID: LIB3196-005-P1-M1-B1
atgcggtgttgtgctgtggggaagggagacggatttgtaaatcccggagcgaggttctgcctacccgaggccgctgctgtgcggagacccccgggtgaagccaccgtcatcatgtctgaccaggaggcaaaaccttcaactgaggacttgggggataagaaggaaggtgaatatattaaactcaaagtcattggacaggatagcagtgagattcacttcaaagtgaaaatgacaacacatctcaagaaactcaaagaatcatactgtcaaagacagggcgttccaatgaattcactcaggtttctctttgagggtcagagaattgctgataatcatactccaaaagaactgggaatggaggaagaagatgtgattgaagtttatcaggaacaaacggggggtcat

SEQ ID NO: 41015 - DNA, 453 bp, Gossypium hirsutum
  Clone ID: LIB3196-005-P1-M1-B11
cactatataacaagagggaacgaagaagcacgctgatgccccgccgcaatatccccgatgcgtacccaaacgcttgcgggatgggttcttcgcgacgggactgaccgaacacttgttacatgcatgatgactgcatcattgcattgggtccctagagcccgctcgcgaagccacaggtggccaaggactcataggaagaagaaccaagacaagacgcaccccatacccaagtccgccatggagctcctgattgagaaactaaaccagatgaggaagaaggcttagcgcctacatcaaactaccgtgaggctgaacaagctccacgctgatctgaagatacatgctagggatgaacatcgccgcaagaaactaaagatcgacactggcacaaagattgggagaaggaagcaagactcatacgcaaccttaaaggcatcttggccaaaaatggac

SEQ ID NO: 41016 - DNA, 402 bp, Gossypium hirsutum
  unsure (1)..(402): unsure at all n locations
  Clone ID: LIB3196-005-P1-M1-B2
atccggcctcgctatgtctgccattttcaactttcagagtctattgactgtaatcttgctgcttatatgtacttgtgcttatattcgatccttggcacccagcctcctggacagaaataaaacgggattgttgggtatattttggaaatgtgccagaattggtgaacggaagagtccttatgtagcagtatgctgtatagtaatggccttcagcatcctcttcatacagtagctggggaaaatgccagaatttaattgccgtcagatttcattgtgaacaaggacttactgcagaaaataatggaaaggatggttaacccttttatctctgaacattgaatgagataaatttccagatgctgntctctatttttatgttattggaccaatgttctgtataat

SEQ ID NO: 41017 - DNA, 291 bp, Gossypium hirsutum
  Clone ID: LIB3196-005-P1-M1-C1
gcaccagctccaaacaatgtgaacgccgccatgaatgtaatagccaatttgcagcagcaaaatcagaggattttgtttgatgtcgcaaattctcgcttggggatatctcgtgaagcttgtaactaggcttatttcttgtcgtttaggctaagtttctggttttatttaactaaaaaaagaagaagatggtgtagtaagttcaataaacacaggacaagaaaaaccctgttgcattggttattttaagttttcaatgaaatatcaaagggatggaagaaacctctgaagttt

SEQ ID NO: 41018 - DNA, 286 bp, Gossypium hirsutum
  Clone ID: LIB3196-005-P1-M1-C11
atgcgtgattcaagccaggatggaggagggagaactggcatgcagttccaaagtagagctgataggacttgcacagtgtctaggatcttatccagtgaatgcccagagcttgggtctggaggatgagaatggggccagaagcgggtttaatctgccaagggttggggatgtcatttgctcctggagctcccaagggacttggggaagtttgatcccaacccctttctttccttcccaggggctgccgggaggctatcaaaaggatcgcctacgagtttatagagat

SEQ ID NO: 41019 - DNA, 397 bp, Gossypium hirsutum
  Clone ID: LIB3196-005-P1-M1-C4
ataaataacctgcgtgtgaatgttgaaaatcaaatcaagataaagatatacatcaatcaagtctgtgaggatgtcttctctggtcctctgaactctgctgtgcagctggccggactgagattgttgacaaacatgactgttaccaatgaccaccagcacatgcttcacaattacattacagacctgttccaggtattacttactggaaatggaaacacgaaggtgcaagttttgaaactgcttttgaatttgtctgaaaatccagccatgacagaaggacttcttcatgcccaagtggattcatcattcctttccctttatgacagccacgtagcaaaggagattcttcttcgagtacttacactatttcagaatataaataactgcctcaaaatag

SEQ ID NO: 41020 - DNA, 405 bp, Gossypium hirsutum
  Clone ID: LIB3196-005-P1-M1-C6
atggtacttgataaataatcatagtcttaaatgttagaaatcctatataatattatttatttaaaattgcagatttttagtttaaaatacatttttatttttaaattttgtcttttcccttttttttcagatcaacaacccctccccgtcgtaaacgctgaggaatgatgtggcaagaatgccatgatgttgtttaaaaaaattccatgagttttaagggcttgtctcattatagaggcacattgtggctgttttatgtgaagaaccagctcagttggatactacagattaaaccaggggttttcaatgaatacagaaccatgtggttcaaatcctacaggatgaccttttcctgtctgaacagaataaagagtttcaggtaccgttgggcgagactgtacagta

SEQ ID NO: 41021 - DNA, 372 bp, Gossypium hirsutum
  Clone ID: LIB3196-005-P1-M1-C7
gctctgaactctatgagggtggaaacatccggccaaggtccggtcaccagaccactgtagtggccgtcggtcgtcgatgacggcgctgccatccacgcccattttttatcccttttcagatggatttgaggatcaagccctcctagcccaaaaatgttttaaaaaaactttgtcctctacttagaacgattgtaacatcggggaggagctcttacgacaacgagaaggccaaacgactccggggagtctatatctttctttacctttgtcgcatatgtatataaatataaaatatgcgtgaaaaaaataaatgcaaaataaacaagaacttaaaacataagtcgacaactttgaagcttttttttctctgca

SEQ ID NO: 41022 - DNA, 382 bp, Gossypium hirsutum
  Clone ID: LIB3196-005-P1-M1-D12
cccacgcgtccgtttggcagttttactacaatattgagtggcttgaccacaatgttattggatggcttggccacaacgttattgagtggcttgaccacaatgctattgagtagcttggccacaacgttattgagtgacttatccacaacgtgcaacttgattgcaatattgagtggcttggtcacaacatggtgtgttattggatggacgagttctagggaactctataattgtgtgtagcgaagattggtaggaattgttttgtaaaaattgcactaatttctgaaaaagctgcatcaacattctcatgcaccttgctatatgtgatattatgttgaaatataagtgtttccatatatataaaatatatggcttaaatatt

SEQ ID NO: 41023 - DNA, 407 bp, Gossypium hirsutum
  Clone ID: LIB3196-005-P1-M1-D4
atgtcagtgccagccttgccagatcattttgaaccaggtatgctattgcggcagcacctgccgagatgtgttatgtggaaccgatgtaggaaagtctgatggatttggggatttcagctgtttaaagatatgtggcaaggacttgaaatgcggtaaccatacatgttcacaagtatgccaccctcagccctgccagccatgcccacggctccccccactggtgcgctgttgcccctgtggccaaactcctctcagccaattgctagaacttggaagtagtggtcggaaaacatgcatggatcctgtgccttcatgtggaaaagtgtgcggcaagcctctgccttgtggctccttagatttcattcatacctgtgaaaagctctgccatgaaggagactgtggaccat

SEQ ID NO: 41024 - DNA, 388 bp, Gossypium hirsutum
  Clone ID: LIB3196-005-P1-M1-D5
cccacgcgtccgggcatgtatagactagattatgttttggaatattgtattttggtctatgttaaatgtgagtcattcgaaaatggcttaattgctatgcttgagttcggtgttggttaaattatagtttaagtttattttgattattatgacgagtaccatggttgactataagttatgttatgtgcttgtattcggaaatgatatggataattaggttgtattatgttttaatgaatgaaacttggtttgattattaatggtttaaaaatgttaatgagatacgtggatgttcgaatatgaattgattttgttggtatggtttgcatggtaaacgtatgtgtacttaaagtgatttaatgttatatgaaagttgtataatgtatat

SEQ ID NO: 41025 - DNA, 233 bp, Gossypium hirsutum
  Clone ID: LIB3196-005-P1-M1-D7
cccacgcgtccacaccggtggactcattaaaaacttagaacccataattcaggaaaaaatcatttatccaacaccaagcattaaaaataaataccttatcctttactgctgcgatcaaatatattagattaaaactatacaaacacagacttaacatgttcttaagagcactctaacatatagaaatacctatgatgactcatacacaacacatatttagatatcagttaaaa

SEQ ID NO: 41026 - DNA, 361 bp, Gossypium hirsutum
  unsure (1)..(361): unsure at all n locations
  Clone ID: LIB3196-005-P1-M1-E1
atccctcttcttcagtggccccatgccaggtgctcagaccacccagacctggccacagtgccaccaaatctagcccgtggtggccatgaccacctgggccacaccctctttggacgctcagcaaggcaggggcctaatgcccttcaggcgttactcaggcgagtcaggcctggcctgcctctgccaaggcgtggggcacgctgggagaccatctgggggtcaggatggggctgtaggtggagacacccttaaggccagtgcctcccgtgcacccaggccttagccctgtgctctgagctggcctggccaaggggtggaaacggccctgtgcccaccggctcccaggagagcttncagggga

SEQ ID NO: 41027 - DNA, 348 bp, Gossypium hirsutum
  Clone ID: LIB3196-005-P1-M1-E2
atctctgataatgagagggaggacaagggggcccatgggcccaggccagacactgttgggcagaggggaggttcccggcccagcccgggtcctatccgctgcaggcatcgatccaaggtttccagtaaccaacatacaccatctcatccggaacagcggggttcggcttctcctatggcaggatctggggcgaaaagatcaagagatggtgaactggagaccagtctaaacatccaaggttgtaccacagagggagacctgctgtttgcccagaagtgtaaagaactccaaggatttatacctcctctcacagatctactcaatgggctgaagatgggtcgttttgag

SEQ ID NO: 41028 - DNA, 363 bp, Gossypium hirsutum
  Clone ID: LIB3196-005-P1-M1-E3
atgttgctatggggattgctggctcagatgtgtccaagcaagctgctgacatgattcttttggatgacaactttgcctcaattgtgactggagtagaggaaggtcgtctgatctttgataacttgaagaaatccattgcttataccttaaccagtaacattcccgagatcaccctcttcctgatatttattattgcaaacattccactaccactggggactgtcaccatcctctgcattgacttgggtactgacatggttcctgccatctccctggcttatgagcaggctgagagtgacatcatgaagagacagcccagaaatcccaaaacagacaaacttgtgaatgagaggctgatcagca

SEQ ID NO: 41029 - DNA, 408 bp, Gossypium hirsutum
  Clone ID: LIB3196-005-P1-M1-E4
atggatcacttgagcctgggaaatcaaggatgcagtaagtcgtgattttgccactgcactctagcctgggtaacagaggaagacctcatctcgaaaaaacaaaacaagattactttcttgttacatttagtcttcagaggattttgctaaaaaatagctaacactatacaaattcttttagcatccttgtggttttctaaaataatcatgctatcttttttactataccgaatgttgctatttataatatttatccaggatactttatttctggctcttctttttggtcccacagctcagtttctacatggaatgaagtggacaagaaatttacatttgatatttcattaattcaggcattcatttagtaaacatctcataacaattactttatactcggcactacgt

SEQ ID NO: 41030 - DNA, 257 bp, Gossypium hirsutum
  unsure (1)..(257): unsure at all n locations
  Clone ID: LIB3196-005-P1-M1-E8
caagagggaacgcaggagcgcgcgcaggcaccggcccggaaccccgggggcgacccacgcgagcggaggacgcggggaacggacgcgggggcagacacgagggcggacgcgaagggcgcagacacaaaaaacaccgagaaaggaaggacaaaangcgagnnaaagggccaaacagngcaaaggcagcgacgccggaaccaaaagcgcgagaagcagggagncagggaganggcgcgagaggacaagaaaaaacaaag

SEQ ID NO: 41031 - DNA, 271 bp, Gossypium hirsutum
  Clone ID: LIB3196-005-P1-M1-F1
atgcggcaccgcgggacgggacggagcgatgtcaggccgaggcgcgggcgggttcccgctgcccccgctaagccctggcggcggcgccgtggccgcggtcctgggagcgcctactacatgcggcaagcccggtaatgccgcaacaaacggtggttccgtgctcattctttcctgttgaataatagctggcaccgttattgcactcactataggcacgccacttttctttattttaagccaagttattggccctgctctcattgcaacagct

SEQ ID NO: 41032 - DNA, 382 bp, Gossypium hirsutum
  Clone ID: LIB3196-005-P1-M1-F12
ctcatgccatgaaaagcctacctccacgattaacccctagtaaacccccttgagcccaacaaaccaattcttgtattacccttattatattaactctttttctagttaggaaacttttcaattcaatctcgattctaaccctttctttcagcttgtgaccacaccccctaaccaagcctcattacaaccctctaaagaccttttgattgatgtatcatcttaaaattaaagtggtggagatttgattttcatgcaagcctatggtaatgactttccattattgactattgagtgcttcctttattatccttaaaacacctcgagcgatttgagtgaatctttagtgaggatgtaaaactctgtgatatcctgaattaaaggt

SEQ ID NO: 41033 - DNA, 318 bp, Gossypium hirsutum
  Clone ID: LIB3196-005-P1-M1-F2
atagcgtgtaccttaaatgaattttggggtaagaatgtgaagtatcaaaaaaaaaaagtagcctcttctgtattattacctatttatgcctagtgttccgttattggaacgctaagcttatggaagttatttatatcctactgatcaaggtcactcaggtctgatttttcatttaaaaaaaaaaagtgcaacctccagcataaattggttaataacttagattcacgcctgtaatccgagcacccttgggagggccggggcgggtggatcactttcggtcaggctggtcttgaactcctgacctgaggtgagccacct

SEQ ID NO: 41034 - DNA, 385 bp, Gossypium hirsutum
  Clone ID: LIB3196-005-P1-M1-F4
gaaatatgtaagtatgtatgccatatgatttatgatatatgtaagtatgatatatgattatgttttgtttttgtttttgggtggggttatgatatgatggatgaaatgttatatggcagtttatactgcaattatagtggctagactacaaatttatgtacgacagctcagctgcaattatatgagtggcacaccgccacctattggtgtgattggatggatggactctagtagccctatatggtgtgaacggctagatggagatggtgtgtagtggatgggggtaggacataatatgctttggtatgtcacgttatgatatgatatgatatggcacaatatgttatgttatgataaaatatatcttgatatgaaatctgatatg

SEQ ID NO: 41035 - DNA, 404 bp, Gossypium hirsutum
  Clone ID: LIB3196-005-P1-M1-F6
atatatcgacatgatttaccactattatggcgatgcttggtgcggtgtatcatattatacagctgaagctactaaacacaaaccactaccaaccaccccttacaaaaaaccacactctttaactaaacaacatccactgtcaaccaacatgaactaaaaccaatataccccttaatcaacactaacatattaaaatcaaccacttacaatccttattatgcaatgccatatcctactaatcttcactccttagatctccaatattaacttactatctatcaaggaataattccttactccagtcatcatattactaagaatctcatcatacatcgcttaaggacaaagcctatttccttatatcacagaaccagattattttataaacgcaccatatcgaattg

SEQ ID NO: 41036 - DNA, 369 bp, Gossypium hirsutum
  Clone ID: LIB3196-005-P1-M1-F8
cccacacgtgcgtggatatacgtttgaaccaactattgggtttactgtgggcacgttgttttaagaattacactacgactgattataattaagatgggtctaatattttatattgtgaaaaagaaattctcaagttttggaagggtgttaaggatggacttgcattgccattgttgatagatctttcttttaagatcggattgcctattgcaggttgtgacatgcgtctctcagctgacttaaagctccagattctggactcattgttctgcactgatgttgcatggatggcgatgcgtttcagctgagatgcgatatgtggcttttgataatgatctatggatgaagaaagttcaagagtgagtttga

SEQ ID NO: 41037 - DNA, 384 bp, Gossypium hirsutum
  Clone ID: LIB3196-005-P1-M1-G10
ccgacacgctccaggccaaggatctgcgtgttttattaaaatggttttatttccgttttagtccattcgctttttatcattttacaattaactttgttatgcttttaaattcgcccctcttattttgtttcattttcactttggtcccgtttaagtgcagcgctttggaaggaagggaaaatttactttttaatcccccatgccatttgtgcatttcaaataagtcctccccctttccttttatttcagattcaccccaaatgtttgttttaacttcgatttcgtcccttttcgccttttaattaatattttgcattatttctattattattattactattattatactttattattattgtattttaatatcatatctattat

SEQ ID NO: 41038 - DNA, 376 bp, Gossypium hirsutum
  Clone ID: LIB3196-005-P1-M1-G11
tcgggtctttatcatttataactataaactggtacgggcaaagatccctttccagcgaaaaatgggagcgaaagaaaaaacacggggatgccagctgccacgtgcgcctacggctattgctgctgcatcgccaactcttgtgctatcggctgaggaggccgtggcacgaggaggtggagagatcatgctttttggagacagagaggcgggtgatggcatgaggaatagtgtgagtctgaacaatcatgatcactacgatcaacctgatgaatgggacaagaattacaacaaggacgacagagatcaaggcgatgatactctgaccggcaggtacgcgtccagcgacgatacctgtcgtcactctaccggaaatcga

SEQ ID NO: 41039 - DNA, 260 bp, Gossypium hirsutum
  Clone ID: LIB3196-005-P1-M1-G4
tctcaacacactactttaaaacagcccgccttatattttatactaactgacaacccaataagccacaaccattacatcttatccctaacacaatttgacattcactacaaaacactctaatcttagatctctcaaccttatttactaacaattcatgatcctcataataaagcaacttgatcaactttcataccatattccatttggactatctagtattgcacactttcatacataataacttattattaccatcttat

SEQ ID NO: 41040 - DNA, 336 bp, Gossypium hirsutum
  Clone ID: LIB3196-005-P1-M1-G9
atggaatttgcaggggaagataattgggcttttgctagacttagaaaaacttctatttagtggagatccttgttagacatgagtacaatggtgactactgaaggactcactgctatggtatctttaagcaattggggcaaattcaaattaacaaagtttagccaaatggacaagtcccagttttgtcagagagataatttggatccacctatcttttattaaaaagtgaactgtgttactatttcatggctagagttccaagtaaaagctattggactaagttttggttccctatcttaaaacaggttttttgttttttttttaattggctttatt

SEQ ID NO: 41041 - DNA, 341 bp, Gossypium hirsutum
  unsure (1)..(341): unsure at all n locations
  Clone ID: LIB3196-005-P1-M1-H1
tcgcccacgcgttcgcccacgcgtgcgtggttggataagaacacaggtggggtttgtttatcaatgtcttctaaggcgttgacaattacagggattgatgatcggagatattggaaccatatttccaccgaggaatctagatatcgaacagtagcctacctgcaacaaacatggtggttcgaagtcgatggagagctcgagtttcaattccctgccggaacatattccctattctttagactgcacctcggaaaatcctcaaaaagactcggccgtcgggtttgcaacaccgagcacgtncacggatgggacataaaacctgtccaattncaactaacaac

SEQ ID NO: 41042 - DNA, 383 bp, Gossypium hirsutum
  Clone ID: LIB3196-005-P1-M1-H11
atggccccctcagttggccaagatctttggcacaggggccctgctgccagagaagcctcagagtcagttttggctttactgtgtgttgtccagctgagtcatcctgggtaaaggtcttctgaggatcagtttcccacctgcacgatggggatagggtatcagcagaacacagcagggtaaggcactcaggaagccatcagtgggtgttagccaataacactgctctcattcttcttcttagagccccggacccaggaggcccaaggagctggaggtgaccctcaggcagcaagaaccccgcggaagggcgtgagccctgcagacagctgtgcggcacctcgggctgggctcctgttaggaggaagtgcctgcgcccaggcagc

SEQ ID NO: 41043 - DNA, 335 bp, Gossypium hirsutum
  Clone ID: LIB3196-005-P1-M1-H2
gaacaagagggaacgaaaaagcacgttggtacccgtccgcaattttcgcgataaaaaaaaaaattgttttcacctgttgcctttcaaacgtcagagttgcagtagtataaacaacaaagcacaagtatagagaatgcattattttcaaacctattaaaaatgcatatcaataggatgttcttgcaagttggttacctagctgtgctgatatgctaacacctgctatctccaacactcatggtggctgaggctggaatgtaggttgagcttacaagttcgtgaccagacttatcaacatttcatgatactatacttcacaaaatggtaaaaaagac

SEQ ID NO: 41044 - DNA, 392 bp, Gossypium hirsutum
  Clone ID: LIB3196-005-P1-M1-H4
atgtccccagcctctcactcggagccgatatggggagtaaagtggcggacttgctgtactggaaggacacgaggacgtcaggagtggtcttcacaggcctcatggtctccctcctctgcctcctgcactttagcatcgtgtccgtggccgcgcacgtggctctgttgctgctctgcggcaccatctctctcagggtttaccgcaaagtgctgcaggccgtgcaccggggggacggagccaaccctttccaggcctacctggatgtggacctcaccctgactcgggagcagacggaacgtttgtcccagcagatcgcctcccgcgtggtctcggcggccacgcagctgcggcatttcttcctggtagaagacctcgtggattccctcaagctg

SEQ ID NO: 41045 - DNA, 387 bp, Gossypium hirsutum
  Clone ID: LIB3196-005-P1-M1-H5
cattcctaaaaaattgattgcatgaagagtgacctgattcttgttacctttgcttgtcgcaggattttaacgttgcttatagacagatatattgaaagaatttcatgtagaatgtgcaacctggcttatgttacttgggtggtggctcaaaatctacaggtattgcaacatcttctgcttcttcctctctatataaaatttcttgagttaattgcaccaaacatcctcaatttctttttattacagttaagaagaggattggatggtactggttctatgattatatgtgcttgtcaactactagtttgagtgaaaaacaaagacattttgtgagcaaagtgtcctttccttctaagatgtattttggtggagctattaaacttagtt

SEQ ID NO: 41046 - DNA, 164 bp, Gossypium hirsutum
  Clone ID: LIB3196-005-P1-M1-H6
tattcctaaatatttgattgcgtggcgcgtgacctgattatggtcaacgaaaattctcatactaaaccctagctctgggaaaacaaaatctgataactaaagtaaaaaaaaatggctttgctcataggctctacagcttgtgtgaacctctaaaatacacttgt

SEQ ID NO: 41047 - DNA, 374 bp, Gossypium hirsutum
  Clone ID: LIB3196-006-P1-M1-A10
cccacgcgtccgattgtaagccattatataaatgctagataatcttttacaaatgtgaaattgttggcatggttgaatttatgaaatgtatataggtcttagctatggttgttggttgataaatcatattaagttagattttgatatgttgattggtattaaattgtgtttcagggtggcacagggctttgtaaatagccttatattgtccacacgggtagacacacgggcgtgtcttgtaataacctgaattttaccgttacagaaaaagtgtattttcgggtctccgtttctgaaaagtagattcgtaaatatttttaataaatgtttacgaagttaatcgagtggttaattagagtttaattaagtgaatt

SEQ ID NO: 41048 - DNA, 343 bp, Gossypium hirsutum
  Clone ID: LIB3196-006-P1-M1-A11
atgttcgagaccagtctggccaacatggcgaaaccctgtctctactaaaaacccaaaaaaattaactgggcatggtggcgtgcacctggagtcccagctatttgggaggctgacgcatgagaattgctcgaacccaggaggtggaggactgcagtgagccactatcgtgccactgactccgacctgccttggaagaaagaaaaaactgcctgagactggtgatgtataatgaatagaggttgaattgactcacagattctcatggctgtggtggcttcacgaaacttcctatcatggttgaaggcgaaccgaaagcatgctccttcacattgcaacatacaga

SEQ ID NO: 41049 - DNA, 376 bp, Gossypium hirsutum
  Clone ID: LIB3196-006-P1-M1-A12
attagctttcgcattcatccgtctcattctttatcactcatccccaccaaaaatattgttgcccctaactctatcacaggttatagtaacgagctcaccgcctttagtggagatggataaaacaaattacttgattatactgaaaggcccctatgttttttgtctttaacttatgtatgggttttatagagtatcatcctttgatgaggtgaaactcattgtcatggtcgcataaccactgccaaccggggcctcatttatgctttatctcttgacaacataatttttgtaaacttgaagccctagttacacttcaacccaagaccgtataatcaccgtcaattgggaccttgagttgcaacacgatttggtttct

SEQ ID NO: 41050 - DNA, 327 bp, Gossypium hirsutum
  Clone ID: LIB3196-006-P1-M1-A3
ttatgtttcactggcggaaacaagttattctcaaagatttggtctgtattaaatttaaatgtccatgtcgatatggtttaaattctacatgctgtaaagctgcagagcagaggaaccataccagttttatttgcgctaccattaggtttttttactgtgaacagactctttatctttagtcacattttacaggattattttcattatttctttagtgtttgattttttcccttctttttattccatcttgttttataatctatatatatattaagtctttttttctcatattatcttatttagccttaattttaatatttttattat

SEQ ID NO: 41051 - DNA, 293 bp, Gossypium hirsutum
  Clone ID: LIB3196-006-P1-M1-A4
cttgatttttatgtatgggtgcgggggtcacttccatctgctggagaacttgttccacacgattacattctcggaagatctggttgactgattcgtcttgtcgaccatataatggacatatagcatcaaacctcatcctacgagcctttatgttacttagtgtaagcaaataattgcttgtaattctgcataagctgattcctaccttgctaggaacttttaggctccataatgtccgaataaacattttttgttggatctggatgatttgccttcccatagaccagcatgtc

SEQ ID NO: 41052 - DNA, 401 bp, Gossypium hirsutum
  Clone ID: LIB3196-006-P1-M1-A8
atgtttcactgggggaaacaagttattctcaaatatttgcactgtattaaatttaaatgttaatgtgaaatggtttaaattttacatgctgaaaagctgcagagcagaggaaccaaaccaggtttatttgtgctaccaggaggtgttcttactgggaacaggcctcctatctttagtcacattgtacaggatgatatccatgagtactttagtgtttgtgtatgtttttttcttttaaatagaacttgtttttataattgatttaaaatagggctttttttctataaaagccttaatgagccataattttaagaatataagaataatgactatgatattggtcagtcttagaacataaaaattgtagacaatgaatttaatcgggcccctggtggaaacat

SEQ ID NO: 41053 - DNA, 374 bp, Gossypium hirsutum
  Clone ID: LIB3196-006-P1-M1-B10
gctttaattcatcaataaaaaaaaacttgatagtgaattatagtagtaaatgagactttaatttaatgaagcttttagttattatgctcaagttcctagtttagatttaactttgatttgttagtttaatagttgaattagtaatttaattatttaataataaaaagggatctatgtatactgatgtaaaatttaagttgttttacattcttctgtaattttttatattattaatattttaaaaatccaaacattatattttatgttccatttatatagatcatacatgtcaagtttggcataaattaaacatttctaactattcgttttacgtaaaataaaaattcaaccgttaaatatatattaatataaac

SEQ ID NO: 41054 - DNA, 376 bp, Gossypium hirsutum
  Clone ID: LIB3196-006-P1-M1-B11
aaacaacactgatccagagccaggaaggtgtcgcagaactgatggaaagaaatggcggtgctcgagagatgctgttgctggccagaagtactgcgagcggcacatgaacagaggtcgccatcgttcaagaaagcctgtggaaggccaacctggccattccgtcacagccactgccgccactacttccaagctgatgcctaatgtctcatcctcttcagcatcagcggtagggccagttggtggtagtggtgagcccaacagcctcaccagtgctcggcagaagtacgagaatttgcagcttggtggcacatctaatctttctgctgcagcttcactgaacaggtcgattctgaataaagacactgtaggtgaaaaa

SEQ ID NO: 41055 - DNA, 282 bp, Gossypium hirsutum
  Clone ID: LIB3196-006-P1-M1-B2
aaattcgcaggctgggtccggtcccggatccccattatcccgatgacgaccaagttatgctgaagaaggatgtagatgctgagtacatgaacaagtgtggagctttaggccaaaatcaatgcgctgatagatgagattaacttcatgaagatgtaatacgatgcaatgctggcccagatgcagactcacgtctctgacacatcttaggtcctttttatagtcaacaaccgcaaactggacctggtcagtattatacacgatgttaaggcctattattgagga

SEQ ID NO: 41056 - DNA, 400 bp, Gossypium hirsutum
  Clone ID: LIB3196-006-P1-M1-B4
atcggcagcagcgggagcctctccacgtcctcgtcgtccagcccgcccggcacgccgagccccgccgacgccaaggcgcccccggccgcctgctacgcgggggccgcgccgccgccctcgcaggtcaagagcaaggccaagaagacagtggacaagcacagcgacgagtacaagatccggcgcgagcgcaacaacatcgccgtgcgcaagagccgcgacaaggccaagatgcgcaacctggagacgcagcacaaggtcctggagctcacggccgagaacgagcggctgcagaagaaggtggagcagctgtcgcgcgagctcagcaccctgcggaacttgttcaagcagctgcccgagcccctgctcgccttctccggccactgctagcgcggcccccgcg

SEQ ID NO: 41057 - DNA, 380 bp, Gossypium hirsutum
  Clone ID: LIB3196-006-P1-M1-B6
ggaagatgcattttggatgcttgctgtcctccttgaaaatgttttagttaatgactgctatacaactaacttatccggatgccatgtcgaacaaagggtttttaaggatttgcttgctaaaaagtgcccaaggattgctgctcatttggaagcattggagtttgatgtctcccttgttgctactgaatggttcctgtgcctcttctctaaaagcttgccttcagagacaactctgcgggtatgggatgtccttttctatgagggggcaaaggttctttttcatgtagctttggctatatttaagatgaaagaacatgaattgcttctaacgcatcaggttggtgacattattaacatattacagagaactacccatcacc

SEQ ID NO: 41058 - DNA, 296 bp, Gossypium hirsutum
  Clone ID: LIB3196-006-P1-M1-B7
acactatataacaagagggaacgcaaaagcacgctggtgccccgccgcaatttccgggatgggcccctatcctcagccctctattgcggcgcctgctcaatggccccgttgtaaaggaggccggctgaatggaggggtagagtggtctgcctctactgtcattaccctctctcaattgagctaaactgagacattaatcatagctacttgaacccctgaactgatccttgaggcaaagaagttcgaagcacatacacacaaatgccactcggctaagaatccaaccccgtgagagc

SEQ ID NO: 41059 - DNA, 369 bp, Gossypium hirsutum
  Clone ID: LIB3196-006-P1-M1-B9
cggacgcgtgggaactcgacattctagatttggaattttggtgttgattactgatgtaaatggtcatttttcagcctttaaaacactccttttgagttgcccaaagttgtccccacaattgtcaccgttggtggtggttgtggcccaaaaatctttcctttttgtgactatcgatttgagttttatttagtaaagtatgctgctgttccagccttgatttttttttcaagcttaaaacagtcccttatcatcctttaaacaaatatttttggtgtttctcaaaatagtcccttcgtagccaattttgttgatgtgttgctcctagatctaccattaggggctgccgatttttattatttttaccactta

SEQ ID NO: 41060 - DNA, 393 bp, Gossypium hirsutum
  Clone ID: LIB3196-006-P1-M1-C10
atcccaccctgcagaacgtggcccaggcctcgcctggcgccagcacaattgtgacagtgcccacaggggctgcccccgggcccgaggagcacacggccaccattgaggtggctgccgtggcagaggaccacgagcggaagtagccgacgggagggcgaggcccctgggacggacggggctggctgcctctcagctgcggcagcagggaacgggcagaggccgcagggctggctcgggcaggtgcgtcacgtgggctgcagaaccaaagagaggaatcgccaaaacaaatcacgagaagagagaaggggacagaacagcgagagcaacctggaaatcggtcttcaggtcccacgtttcccccccttttttcttgggaaatatatttttccatct

SEQ ID NO: 41061 - DNA, 391 bp, Gossypium hirsutum
  Clone ID: LIB3196-006-P1-M1-C12
atcgcctcgtgttctcttcgcaggcagctacgtcagcgaccccagcaacacggccaacgtctccacttctggtctggaggtctacccttcgcgcacgcagctgccgggtctcctgccccagcctgtgttggccggcgtggtgggcggggtctgcttcctaggcgtggccgtcctcgtgagcattctggccgcctgcctcatgaacaggcgcagggctgcccgccgccgccgcaagcgcctccgccaagatccacctcttatcttctctccgaccggaacatcagctgcaccctctgctctgggctcaggcagtcctgacagcgtggcgaagctgaagctccagggttccccagttcccagcctgcgccacagtctgctctggggggatcct

SEQ ID NO: 41062 - DNA, 317 bp, Gossypium hirsutum
  Clone ID: LIB3196-006-P1-M1-C6
gttctagatcgcgagcgccggccttgtttttttttttttttttttttttttttttttttttttttttttttttttttttttttttttttttttttttttttttttttttggaaaagggaaaaaagaaaaagttttttaattttttttaaaaaaaaattaacttaatttggcaaccaagcacaggttaaaacctaactaaagggtggaaggttgttaataaattgggcgaattctttttaaaaggaataaacctttccaatgcttttacaaaaaataccttatggttgggatttatgagcattttaattgaagttttt

SEQ ID NO: 41063 - DNA, 382 bp, Gossypium hirsutum
  Clone ID: LIB3196-006-P1-M1-C7
cccacgcgtccgccccaactgaacggctttgagacccagtctcagtagtaggcgaaaccgtcgtcttactcatatccaagcttggcatactgcccagagaggaacactcagctcgagccccctacagcctctaccacggctgcaagttccacgtgtgctcattgtgtatttcaatttttatctatattataaagttttatgcatcaattctagtgtttattagtagatattttatgcataaattattagtaattcagaagtgtttcagagatttcagtctctatctagctctgtatagtttcagaaagtactaactacagtgtgtccaaaatattcttatcaaagctcaaaaatatttatagaatcagcgttggagactttg

SEQ ID NO: 41064 - DNA, 377 bp, Gossypium hirsutum
  Clone ID: LIB3196-006-P1-M1-C9
cccacgcgtccgatttcccttcttcaccacatgatcaaaacccaaccttcgttttcacccgaccgatcaactcaccacgtcttgctctcacaatcttgcaaagcacccgattcctccctctccgccgttaaccaaatcctcaacctaatgatcaataacgggctaaaacctaatcaggtcaccaccgatattgctatccggtcgctttgtgaagttgggcgtattgatcatgctgttgaattggtaaaagaactttctttaaaacaatctccgcctgataattatacgttcaatttgcttgttaagaatttatgcaagtgtagaactttaagtacggtttacagttttattgatcatatgaagagttcttttggcat

SEQ ID NO: 41065 - DNA, 395 bp, Gossypium hirsutum
  Clone ID: LIB3196-006-P1-M1-D10
atgtactaagcacaagacaattctggaggcccgaagtgggctggggcccatcaaagcttaccctcggctggggcctcccaccccgggggaaccagaggctcctgcccaggaccgaactttccactgtgagatctgcaatgtcaaggtcaactcggaggtccaactgaaacagcacatctccagccggcggcaccgagacggagtggccgggaagcccaacccactactgagccgtcacaagaagtctaggggcgccggggagctggcgggcacgctgactttctccaaggagctgcccaagtccctggcgggcggccttctccccagccccctggcggtggctgcagtgatggcagcggcagcaggctcgccgctgtccctgcgcccggctccag

SEQ ID NO: 41066 - DNA, 395 bp, Gossypium hirsutum
  Clone ID: LIB3196-006-P1-M1-D5
ataaaaataaagtctctagtaattgaaaactatatctaggggttataaccactcactgaaaaaaaaatacattttaaattaaaatttctttttttagatagctgacattaatttgtatcattttctttcaaatacagatatgtaatgggaaataatccagctgaccttctagctgtcgatccaagaacaggcataatcactttgaaaaataaagttaccagggaacagtataatatgctcggaggaaaataccaaggaacgattctctctagatgatgctcttcaaagaacttgcactggtacaattaatattgacattcaaaatgttgatggagatgacaggactaatacacaggcgagcactgaagttaccaatactggcagagaagaaagta

SEQ ID NO: 41067 - DNA, 243 bp, Gossypium hirsutum
  Clone ID: LIB3196-006-P1-M1-D7
atccgctccgggcgggtcccaaacacggttttcccgcggcagaacccttggcccgcccggggcagccgccgcccgaacccccgggttccggggggcattgagggggcatgggaaggggcactgttcctcggccattacttaaagaaacgggacaatccggccttcccgccggccctccttttcttgtgccggggcccgcgcaattctgcgacagagggacagtcgccccaatatgtaaagacc

SEQ ID NO: 41068 - DNA, 380 bp, Gossypium hirsutum
  Clone ID: LIB3196-006-P1-M1-E11
accatgtcgccccaaaatgaatggtagagtggagaaaaaaaacaaaaaacaaaaaacaaaaacaaaaacaaaaaaacaagaaaataaaaaacaaaaaaaacctctaccggggcaactcatttctcattggtatatggaatagagacaattttacccgtcgaagttgatattccttcccttcgagtcttgttagagctaaagttggatgaagcagaatggatccaagcccgatatgatcagttaaatttgattgaagagaaaaggttgaaagctatccgtcatggtcaaatataccaaaaacaaatgatgcgagctcaccaaaaaggttcaccccagtgaattccatgaggtggacctgatatcgaagaagatccttccca

SEQ ID NO: 41069 - DNA, 382 bp, Gossypium hirsutum
  Clone ID: LIB3196-006-P1-M1-E6
aaagcattcttctccactcaggccggaaaacagaaccctccatttccatctttcaaagccgcgaaatacgccataataaccgagaaggaccctgaaaagctagcggaaatcttcgaacaatgttcccatttgcccactttcctccgccaccgccccatctaccacctctccatccgcaagctagcccgtgccaaccgcctcgacctcgtcgaccggctcctcgagacccaaaagctccattctcaagacacccctgcgctcaaatccgaaggtttttggattcgtctcattatgctttactcaaacgctgggatggttccacaagcactccaaacgctcgacgatttgtctagaaacaggtattgtaatatatctgaaaaat

SEQ ID NO: 41070 - DNA, 390 bp, Gossypium hirsutum
  Clone ID: LIB3196-006-P1-M1-E7
atgtttgctgtgatgtttggggatgtgggccacgggctgctcatgttcctcttcgccctggccatggtgcttgcggagaaccagccggcagtgaaggccgcgcagaatgagatctggcagactttcttcaggggccgctacctgctcctgctcatgggcctgttctccatctacaccggcttcatctacaacgagtgcttcagtcgcgccaccagcatcttcccctcgggctggagtgtggccgccatggccaaccagtctggctggagtgatgcattcctggcccagcacgcgatgcttaccctggatcccaacgtcaccggtgtcttcctgggaccctacccctttggcatcgaccctgtctggagcctggctgccaaccacttgagc

SEQ ID NO: 41071 - DNA, 377 bp, Gossypium hirsutum
  Clone ID: LIB3196-006-P1-M1-F1
ccttcaccaatttttacaatctccaacaatagaagtgagtagtggatttcatagggaagcgtattgatgctgatagaatgaggattagcaatttgtaatctgtcttggtaccaaagaaaataattttttgaagtttgtggtgtacttccatggtgtgtgtaggggtttatttatagtgttaaaaaaaaagttcagtgaaaaattaaacttataaaatttgatttttttaaaacttatcaggtatatttaaaacttttttttattgaaataacttatccgtataataaattaggctaaaaataaatcatgttatattaatattttaaagatttactaatatctattttatcaatataaattttttagtattttataaa

SEQ ID NO: 41072 - DNA, 391 bp, Gossypium hirsutum
  Clone ID: LIB3196-006-P1-M1-F10
atgcagatgaaataaatacttcatcctgctctggaaacgactgcaatgacattattcccagtgctgttgttcctggttgctgggctgcttccatccttcccagcaaatgaagacaaggatcccgcttttactgctttgttaaccacccaaacacaagtgcaaagggagattgtaaataaacacaatgaactgaggagagcagtctctccacctgccagcaacatgctaaagatggaatggaacaaagaggctgcagcaaatgcccaaaagtgggcaaaccagtgcaattacagacacagtaacccaagggatcgaaagactagtctaaaatgtggtgagaatctctacatgtcaagtgcccccaattcatggtcacaagcaatccaaagct

SEQ ID NO: 41073 - DNA, 398 bp, Gossypium hirsutum
  Clone ID: LIB3196-006-P1-M1-F2
atcaacaatcggactcatagcaaagagtgttgaaatcccaactactaaccttcactcaaatgtaattccaagttgtgaacctcagagtttggtggaaaatctaacacagaagttaaataatgttaacaatcagttatttatgactgatgtaaaagagaatttcaaaaccagtattgagtcccatacagtgttagcccctttaacattaaaaactgaaaatggtgattcccaaatgatggctttgaattcatgcacaacttcaataaattctgatttgcagatttctgaagacaatgttatacaaaactttgagaagactcttgaaattattaaaactgctatgaattctcaaatacttgaggtaaaaagtggatctcagggtgctggtgaaacatcac

SEQ ID NO: 41074 - DNA, 375 bp, Gossypium hirsutum
  Clone ID: LIB3196-006-P1-M1-F4
aataaatcgtccggttcagagtcggggaacaagtgaaatctaggtggattcctccttgggtgtcgtctttatcaattgcttttcttcaagtctttttccaaactttctctttgctttaattaaatcagttaattagtttaaataattagttattaaaacaaacccttttattcttaggctagataataaaaagatatttattactagtacttttggttcccttgggtacgatatcccggtcttgccattgctatactattgttcgataggtgcgcttgccttttccttgtgataatagttagtctaggtttgatcttcattataaatatttattacttgttacgaatcacgtgatcaggttgtcattcacgtact

SEQ ID NO: 41075 - DNA, 399 bp, Gossypium hirsutum
  Clone ID: LIB3196-006-P1-M1-F8
atgcatcctccatacagaagcacaggacagtggacggggggagcatcctccatacagaagcacaggacagtggacggggggagcatcctccatacagaagcacaggacagtggatggggtgcttcctctttctcccgtggacactatagtctcagcactgtttctggcacaatctgtgttctcaacaaatatgtatagttgactgactaataactatagtgatgaaacccaggatatcttagaagagttgtcagtgatctgtcccttttccctcaaacctcagcctctttcagagcctgagactggattgctccatttcctggtgacaaattaggaggaagaaggaaactgcacatcccccacaatcctcgtctgttttctgtcaccataaaaatacct

SEQ ID NO: 41076 - DNA, 394 bp, Gossypium hirsutum
  Clone ID: LIB3196-006-P1-M1-G2
atctttgaaggcacaaccatggcacgatctactacctatgtttgtgcctgatggcagtcatcaaaatgccagcccaagtacacaaggcaattcggagccaaaactgagtagggatagctgtgttatttacgtgcactaaacacagagctgagaagaaggagttctaatctccagtccattactgacttacttatagggaacagtcacttacacattttgtgggtcagttttccttgacacataaaggtatttcaaaggttactagtaaacaaccccagcacactttccaaacagtcaaagctgtatgactttccccccttagaggatggagcatggcccaactccacattcttcactacctatcaccttgccattgtggcaggtacacataaat

SEQ ID NO: 41077 - DNA, 345 bp, Gossypium hirsutum
  Clone ID: LIB3196-006-P1-M1-G3
cttaactactaaaaccctaatttttcatttttcatttgagatatatatatgtgtatgtatgtttaattgtatataccatcattttattttctattttgcagttgggcaggagagactgagccagaggttattttccgtgacattgttcaaagacttcgccataaatccactggtatttttgctttattcaaattatttttaacaaaaacgaaaaaaagaagaaggaaattctctaaattatacgagttatatatataatatcaaaataatatttacgtatacaaagccaaatttacagtaataagaaaacctaaaaacgacaagcactttcaaatgaaacgcaag

SEQ ID NO: 41078 - DNA, 392 bp, Gossypium hirsutum
  Clone ID: LIB3196-006-P1-M1-G4
atccacgtgtcgagcaccttgttcctgggggtgttagtggcactgccccccgacctccaggctttcccagttcccaccctgcccctcagagactgaaattacgggtacctgaagatgggagcctctaccttttatccaaaaggtttattccagaaactagtgtacatttctataaatagatgctgtgtatatggtatatatacatatatataaaatatatggaagaggaaaagactggtacaacggaggcctgcgaccctgggggcacaggaggcaggccccaggggtctcacccatgcaagcaggagcagggccttttctggcactgcagttttgttttaaaactggacctgtatatttgtaaagctatttatgggcccccggcaccctcg

SEQ ID NO: 41079 - DNA, 396 bp, Gossypium hirsutum
  Clone ID: LIB3196-006-P1-M1-G6
atgttttaaattctgacctcctgagatactgactagcaaccatggaatgaatgtgtgaccagaaagtggctttgacaccaagtgctgctgtccctttgtaattggcttctaatggattcaaccagaaacaattgataatgtgaatttttgttaattgttcacttgtaggaaaatagaacatgtatcacccttaggtagacatgaacttttcctgcacaaagccttgcttttagagaatgcccaataaggcaagaaaaagcatagtaacttgtgctttgagagctcaatatttgtatcttatcagtacagaagaaatatttctgtgtaacttgatcttctgtctagtacttgtcttataggtaaccaacactgaaaactttgtagtgatgactacca

SEQ ID NO: 41080 - DNA, 361 bp, Gossypium hirsutum
  Clone ID: LIB3196-006-P1-M1-H11
ctcggttatgcttctattcggccaagggatgaaacaaacaaacttgatattattatgccattcttttaaatgatttcattatttaaaacttactaagcatcgaaatgcttattctctgttttatagattttgttcgtgaactatcggactcgggagtgtcaaagtcgaagtcatccacactatctaagccactttttggtactcttcagttgaacttgataatggcatgtatagggctgacccttgatgttaattaagtgtcttttggtaatgtatattcgtatagccgtgcgaaaatggcttgcttattttaacattatggtcattttgtatatatgatcttatgacatggttattaagt

SEQ ID NO: 41081 - DNA, 325 bp, Gossypium hirsutum
  Clone ID: LIB3196-006-P1-M1-H4
atgccaaagtggcctccaagaatgtcatccctgccttggaactggtggagcccattaagaagcacgaggtcccagcaaagtctgatgtttactgtgaggtgtgtgaattcctggtgaaggaggtgaccaagctgattgacaacaacaagactgagaaagaaatactcgacacttttgacaaaatgtgctcgaagctgccgaagtccctgtcggaagagtgccaggaggtggtggacacgtacggcagctcaatcctgtccatcctgctgcaggaggtcagccctgagctggtgtgcagcatgctgcgcctctgctcttgcacgcg

SEQ ID NO: 41082 - DNA, 378 bp, Gossypium hirsutum
  Clone ID: LIB3196-006-P1-M1-H5
gatttgagtgatgttcccgtttgtttcttttgaaaataaactcattcaggattctaaacatataaatttaagtccttatttttattcaatttttgatgattttccaaagtcagaacaagggaacccgaaatcattctgaccttgtctcacaaaatttattatatctcatgatttacaattccattgtttacatcatttcttctataagaaattagactcaataagatttaatttcatgttttattcatcctctaattcgatttctattttttggtgatttttcaaagtgatacaactgctgctgtccaaaattgttttatgcaagatgttaactaccatttttgcctcttaagctttaataagtgacaatttcatcac

SEQ ID NO: 41083 - DNA, 378 bp, Gossypium hirsutum
  Clone ID: LIB3196-006-P1-M1-H7
ctctattcggccaaagttccaattctaatacagttccccaggatatcaacttgaatgcaggcttaatggatgatgataataactgtcaagatacagaacagtctaatctgtataagcctagtggatctcaaaatgagcggatttcagcttttactggtcccgaagcttttcttctttcatctggaagtggtgggtatgtcatgggtgataatgatagaagacctgtttgcccttatgagggccgtcgtgcatcctgcaaaagaaagacacttgaaggaaatgttgggcagtcctcatcaagtggaagttctagctactttcatcgaggtgaaaatagtgggtgccgtggacttcctgttagctatagcactggaagta

SEQ ID NO: 41084 - DNA, 403 bp, Gossypium hirsutum
  Clone ID: LIB3196-007-P1-M1-A10
attgcaaactctcttacttgagctgaatatttagtgtaattacatctcagctttgagggctcctgtggcaaattcccggattaaaaggttccctggttgtgaaaatacatgagataagtcatgaaggtcactatcatcctccttctgcttgcacaagtttcctgggccggaccgtttcaacagagaggcttatttgactttatgctaaaagatgaggcttctgggataggcccagaacttcctgatgaccgcgactatgagccccctttaggcccaatgtgccccttccgctgtcaatgccatcttcgagtggtccaatgttctgacttgggtctggacaaagtgccaaaggatctttccccttgacacaactctgctagacctgcaaaacaacataataact

SEQ ID NO: 41085 - DNA, 404 bp, Gossypium hirsutum
  Clone ID: LIB3196-007-P1-M1-A4
attgaccagggaacaggacagagcccaccagaccagcgagactgtgactggatctggaactcagacccaggcaggtgccacccacactgtggagcatgacagcagccaccagacaggaagcaccagctcccagacacatgggtccaccaatggccagaacagtgggactgagatccacggtcaaggcaggagccagaccagccaggctgtgacaggacatgctcagatacaggcagggacacacaccctgacacccacccagaccagggagcaagacagcggccaccagacagaaagcaccagcacccagacacaggggtccaccaatgaccagaacagggggactgagatccaaggtcaaggcgggagccagaccagccaggctgtggcatgaggacatgctc

SEQ ID NO: 41086 - DNA, 405 bp, Gossypium hirsutum
  unsure (1)..(405): unsure at all n locations
  Clone ID: LIB3196-007-P1-M1-A6
atcctgtcctgtatttagaaaaagcagctagaatatttctccattaactcttgagattcacaggactgtctagctctgagtcctagcaatagactccttagaggagtagtaaatttatctagactttctctagataatgcaggcggaagacctgggttcccggggtggggcgctgcagctcttcctgtgtttggcttccaggaattacatgaacgacagccttcgtaccgacgtcttcgtgcggttccagcctgagagcatcgcctgtgcctgcatttatcttgctgcccggacactggagatccctttgcccaatcgtccccattggtttcttttgtttggagcaactgaagaagaaattcaggaaatctgcttgaagatcttgcangcttatgctcggaaaaa

SEQ ID NO: 41087 - DNA, 339 bp, Gossypium hirsutum
  Clone ID: LIB3196-007-P1-M1-A7
attttataaaagtaaaataatttaaaatttttttgatatatattaattctaatctggtgtccttaaaagtcattttctattcttacctcaccgctacagttgcatttgaatccaaacacacactccaccgccgtttctaatctcaccattacaatatccaatctcactactatagtaactaatctcatagccaccactgtttttaacctcaccagagctaaacacaccgcccatccaaactaagcctgagttctcaaatgtcgaaattttcaaacgaaattttcacgaaattatttcgtgaaaattgtagatcatttaaatataataagaataaatttt

SEQ ID NO: 41088 - DNA, 365 bp, Gossypium hirsutum
  Clone ID: LIB3196-007-P1-M1-B1
atgctagacaaagctacccagatttgtcttataatttttgagttaaccacagtatacctattgtgattatagtaaacagactagtgggtagtaatgctaaattaccatcacagttatgtaccatccccccatcccatttttttttttttttttttgatcagcaaagaaatacaggagaccagcctcgagtggtgctgtacttgttatgagagaggcagcagcacagtgtgtggcatttacatggtacccgggctccacagagtaccgagatgttgctctctgggaccacatttagttcaaagaatatggggtccttacttgtattcttttatcagctgatttcaaaacatataataataattttc

SEQ ID NO: 41089 - DNA, 386 bp, Gossypium hirsutum
  Clone ID: LIB3196-007-P1-M1-B6
acactatataacaagtgggtacgcagaagcacgctggtgccgggccgcggtttccgggatcactccgacacaggcgcgggttcctaccatgcacattacaaaggctcacactatgaaaccagctgcacggctaacacctgtgagggcagctgctgcctccccgattgaggaagagccaggccgagacaagtgcgatgtcaaagatgcaaagcctgtgggcaaggacagtgtggaggttgccactactgcactgacctgacgaagcttgggcggcctggactcatgaatcagaaacgtgtcctacgacagtgcttggcacccatactgcgttactcagtcacatgacccctctgtggagaggtggatcagaaaggagagacacaaga

SEQ ID NO: 41090 - DNA, 180 bp, Gossypium hirsutum
  Clone ID: LIB3196-007-P1-M1-B7
ctataaaacaagaaggtacaacgaagcaggctgctgccgggccggtatttccgggatcaccccgtccctgatgcgggtctggaacttgaccatgaccacctcggacactttcaggacttctacgttgctgtaaccggtggggcaggatacaaactctctcgatgagatatgatccacgct

SEQ ID NO: 41091 - DNA, 352 bp, Gossypium hirsutum
  Clone ID: LIB3196-007-P1-M1-B8
agcaagttgaggaattgcttattattttcatacggtcttaataagctataaagcttactcccttcctttcctttcctttagtatttttaggttagctcagggttggagatcgtcagaggccgtatcagactatcaaaccatcgcctttggaatatgaatatatgttacgcgtgttcaagtgagtggcatgtataatggctaggattttatgatatgttttaatatgattagccaaatgtattggcccttattgaattatttgtatttggccatgagatgtggcttatattggttattggctggtaagcctaagcatatgtatgcatgattaaatgcctcatgggatgtgatc

SEQ ID NO: 41092 - DNA, 355 bp, Gossypium hirsutum
  Clone ID: LIB3196-007-P1-M1-B9
cggacgcgtgggattattttaaaattctttttcaacccaaattgattattttcactaatgattatttaaaatctttaaaataatttttttaattttctagattattgtttaatcgattttaggtgaaattaacctcctaaattaaattaaaaaaatactaaaaaccctataaatttctagtttcacacttggaacccgaaaaatatacttgaaactactagacccagtttaaggatattacaaacaacatctatttacatttcacatgaacaaaagtgaacttcatagagatcacattagtcaatttattactcttttgaatgatttaaagaatgttgaggttgatattgacgat

SEQ ID NO: 41093 - DNA, 413 bp, Gossypium hirsutum
  unsure (1)..(413): unsure at all n locations
  Clone ID: LIB3196-007-P1-M1-C1
atggcggagcaagagcaaagaaaaatccctttggttccagaaaatctgctgaaaaagaggaaggcttatcaagccctcaaagccacccaggcaaagcaggcacttttggcaaagaaggagcagaggaaaggaaaagggctcaggtttaagcgactggaatcattcctacatgattcctggcggcagaaacgtgacaaggtgcgtctcagacgactagaagtgaaacctcatgccttggaattgccagacaaacattccttggcctttgttgtacgcatcgaaaggattgatggcgtgagtttattggtgcagagaaccattgcaagacttcgcctaaagaaaatttttagtggtgtctttgtaaaagtcacccnccagaacctaaaaatgctgcgtatagtggaaccttatgt

SEQ ID NO: 41094 - DNA, 407 bp, Gossypium hirsutum
  Clone ID: LIB3196-007-P1-M1-C3
atctttcctgtgcgccacctagcgtttctatcgcgccagttcctcagcctgagtgctgtgaaggtgacagcctgaggtgacccagctggccccccgcgatgctggcagcacggcggctgctcggcgggtcgctcccctctcgggtatctgtgcgtttcagcggcgacacgacagcacccaagaaaacctcatttggctcgctgaaggatgaagaccggatcttcaccaacctgtacggccgccatgactggaggctgaaaggtgccctgagtcgaggtgactggtacaagacaaaagagatcctgctgaaggggcccgattggatcctgggtgagatcaagacatcgggtttgcggggccgtggaggcgctggcttccccactggcctcaagtggagcttcatgaat

SEQ ID NO: 41095 - DNA, 289 bp, Gossypium hirsutum
  Clone ID: LIB3196-007-P1-M1-C5
cactgtgcgagcacataggtgacgccgttgctgctattcagcacttgcttgattaaaccggacccaagtcagtgaaataaaacgatgttcttcaaaagcctggacaaaaccctctgttagatggaggccatatgacaggcacaatctacttcaaatagcttaaactcaattctaatggtggactaagggtgggcttactgcttacccattagaacctatcgttagaagagcacatcggatgcttctccaacttgctgagacatgaaagattcaaaacctagttatccgg

SEQ ID NO: 41096 - DNA, 394 bp, Gossypium hirsutum
  Clone ID: LIB3196-007-P1-M1-D10
atgtcttggttgcctcattcctccccaaaattggcccactgaaatctgtagaataccaaggattgccattgcttatctctttagactcatgacttcttgctttttttacttttaaagacttccttattttcttgtcagcttagccatatgcttaaaagaatttttaaaactatgttaactagggaagtttcaaaatactttgcaaatagaactaacattgaagccataccaacaaaagggtggcagaaacttgcagcctgaatttaaccaggctgattgtctgctaaaacaaaaatattgacattctttataggattcaaataagacccagggcctaagaacataatatttaaaattccaaggatacaattcaaaattacatggtctatgaaaa

SEQ ID NO: 41097 - DNA, 385 bp, Gossypium hirsutum
  Clone ID: LIB3196-007-P1-M1-D11
atcaggaatgggtttaaaagcacaagtttggtagcttatcatctataccatggacagtgaacccttttacgaaatgaaagtcaaacgagaccatcctagaaaaagaagatgctcataggcatttgtaccataatcaaccccacgcataatgaaaactatgaccaagtgacgtgcctgggagctttgacacatgagccatttgaattcactaggaaacatgtaataaggtaatggaagagaaaatcgtgtgtaaattttgcctttaactttaggcagcagtatattatacatttgatatctgaaatacctttacttttttaagaataagattccatatgtctgtctggaagggagccatggttatgctcacgaatatcgacgtcac

SEQ ID NO: 41098 - DNA, 174 bp, Gossypium hirsutum
  Clone ID: LIB3196-007-P1-M1-D12
tcggccagaaggaggctgattgtttggtaatgcaggaacgggtatcaagtaaattagatgtgattcattcagcggtatgggaagatgtcatcaacctagaaactctacatgttttcccaatagatagggacccgcctagttccgtggacaaagtggtttttaggtaagcatttg

SEQ ID NO: 41099 - DNA, 406 bp, Gossypium hirsutum
  Clone ID: LIB3196-007-P1-M1-D3
atctcggcccagagctgcccagggcgaggagggctgggggtatcgggggcaggccgggcggtgctcatctctctgtctcccctcactgctgctgctgcaggatctgtgtgaggtagggtcctgagtcctccccctgccctcccctccctgcacctcccctccctgcaacccctgttgcagcctcttctccccaccccacgccccccggctcccccagggaggcgacctggcatggcaatcaagggtatgggcatcagacaggcctggatttgaaccctgaccttcctgctatggactgtgcaaccctggcatgtctcaccctctctgagcctcattctcctcctctgcaatggggaatagaggtgtccctacaaggtgtagctatatggggaggttcagagcatca

SEQ ID NO: 41100 - DNA, 313 bp, Gossypium hirsutum
  Clone ID: LIB3196-007-P1-M1-D5
atctaacgcacaggggctgcaattgaatttgcgggactaaagaaggacgtggctgctgtctatctgaacaaggcgaaactcaaagccacagttgacacacttaatgaggggatcaaatggacagaaagccctatattatgcctagacagcccagatgctgacgcaagtgcgaacatgtgcgagggctctacatagacaactaccgcccctgtagtgcacagactagtcgaggagccgagaccacacgaggagacagggagaggagctgggctcacgaagcaggccattgccagaaccaagcccatgatccaca

SEQ ID NO: 41101 - DNA, 212 bp, Gossypium hirsutum
  Clone ID: LIB3196-007-P1-M1-D7
gttcctcgcggacgtgacatagtgtttaaggggggcgtggcaatccctgacacaccggcgtgatgcccaacgtagacagtgcgacctgaaagtgcaactactttcttaagagcatccaactcttggatgattatccgaaatgtttcatcttgggagcagtcaatgtgggctccacgcagatgcatcagatccacttgtcacttggagggaag

SEQ ID NO: 41102 - DNA, 313 bp, Gossypium hirsutum
  Clone ID: LIB3196-007-P1-M1-D9
gctttgtattctagacaaaatggagccaaattaatggagctttagatactccaattctttttattattcgaatacgtcaaggcgtggtgaatcacgatctgatctgtctctatgaggaggatatgaagaaattgacggatacgaggatttcacggcacagttcgtatgtccattgagcgctgaggatactgacattgttggactttgacgccatatcgctcaataacatgctgctgaaaccaaatacggggcgtgcaccggttgcgcgaatagggacagcatggatatcgtcagtcgcattaccatgcgacat

SEQ ID NO: 41103 - DNA, 364 bp, Gossypium hirsutum
  Clone ID: LIB3196-007-P1-M1-E1
gcgacaccgacgaactatgtggaacgctggagcgcgctggtgccccgccccggttttccgggtctggccctgccgttcgggggcctatatgtggctctgggctacctgactacgaaccacggggaggtgccttacgcccttcggggactggcttaccgattgattattggggagacattctcttaccgctgtgatgccttgttctgcattcatgccgagaggcttcttcattctttgttgttggttgattacttccaattggctgccttggatggtttattctggttgacaactgagctccaccgctaggtggtcgccgacagaaagctagctcatgacggcatgagcgggatctaattgctcc

SEQ ID NO: 41104 - DNA, 398 bp, Gossypium hirsutum
  Clone ID: LIB3196-007-P1-M1-E10
atgttctccactggactcagaagccaagccgcttcccgcccggactcggcgcaaggccctgcacctgtgaggaaggtgcttttggccccattgcgaggggccttggctaggactggccctgtggccagggggcgagaaggtggctgttcccggatcaacggctttttcccgggggcctttggaagatttggtggaaggacaagagggccggtccctgtccccaggaggcaccgacagtccctgtactggttagacacacggagcgctgcacaccgaaagtccaaattgggagctctgcctgccagcagttttgctgagggggtgatcgctgcttctggggggtaaggaaacaagttacagaaattactgcgttctgtgtgaaggggctggggggtgtg

SEQ ID NO: 41105 - DNA, 373 bp, Gossypium hirsutum
  Clone ID: LIB3196-007-P1-M1-E12
acactatataacaagttggtacgcaaaagcacgctggtgcccctccgcaatttccgggatgtgacccactcttactggaacgaattgcagcgcaaaggatctcgataggcatgacggtgcctttactgtcccgccttatagtgccacaattcaagctcttgaacccaatggctgaagttgcataccagctgtgatgagtgaccaaatacccattctggcatatcatgcaccggtaaccattgaaccagaattccttgactggttactgctgttagtgagccacgagcttctaaccaacatatgcgagtcaataaatcagaccaaattttctactcaatgcatcttgcattatgatggcgaaagaaacaagaag

SEQ ID NO: 41106 - DNA, 354 bp, Gossypium hirsutum
  Clone ID: LIB3196-007-P1-M1-E2
gccacacttgcgggtgatcgcactcgtcaacttgattgatcccatgttgaatatttacggcgagttgatcatgctcttgacatagaggggagcaatgagatgtaccctaatgaactagccaggctcattgaaatgacatatcctcagaacaagccaacctgaataacacatcattgtgatgatgggagctgagaatatgcgtgagtaacttccgcatttgctcacagcacatcgtggcgctccataagctgaaactcgtgttagctaccccattcatgcatgcacgactatagcttcgtgtagactgagaactgcgctctttggtgccattaaggccgaagggtgagcattttt

SEQ ID NO: 41107 - DNA, 404 bp, Gossypium hirsutum
  Clone ID: LIB3196-007-P1-M1-E4
atgtcgttcggcttgggtacgagcctcagcgccatggacaccagcgacttgttcgccagctgcaggaagggggatgtgggccgagtgcggtacctgctggagcagcgagacgtggaggtgaatgtgcgggacaagtgggacagcacccccttgtactatgcctgcttgtgtgggcacgaggagctggtactctaccttctggccaatggagcccgctgtgaggccaacaccttcgatggtgagcgctgcctctatggggcactgagtgaccccatccgccgggctctacgcgattacaagcaggtcacagcttcctgcaggaggcgggattactatgatgacttcttgcagcggcttctagagcagggcatccacagtgatgtggtctttgtagtacacggaaa

SEQ ID NO: 41108 - DNA, 409 bp, Gossypium hirsutum
  Clone ID: LIB3196-007-P1-M1-E5
attgccagtctaaagctttaatcgctttgtgttttcttcccagccctggtttataggggaggtaattagacttaaagcaggtatttctaccaagtcaccaagcttacaacaagtacctctgagtgaagctctgtgcccgtcctttctaaaagtgacacatacacccaccacccactcttggccttctgctgactaactgcagaggggcctcttcccaaacctgtgccaccaggaccagctgctgtgtatgttggtgggaaggggcggtggggggttgtactctgcgccatgtctcaaaatttgcatgagcacatccacggagacagaggctcctctacagacacacaagctgaaggagagcgtatctcccgtgctgagcgtgctgaccgtatgtgctctgatgcaccgc

SEQ ID NO: 41109 - DNA, 385 bp, Gossypium hirsutum
  Clone ID: LIB3196-007-P1-M1-E8
atctttaaaaagcctgcattgtgtattaaacaccaggtaatatgtgcaaaaccgagggctccagtaacaccttttaacctgtgaattggcagaaaagggtagcggtatcatgtatattaaaattggctaatattaagttattgcagataccacattcattatgctgcagtactgtatatatttttcttagaaattagctatttgtgcatatcagtatttgtaactttaacacattgttatgtgagaaatgttactggggaaatagatcagccacttttaaggtgctgtcatatatcttggaatgaatgacctaaaatcgttttaaccattgctactggaaagttacagagtcaaaattggaaggttttattcattcttgaatttt

SEQ ID NO: 41110 - DNA, 235 bp, Gossypium hirsutum
  Clone ID: LIB3196-007-P1-M1-F12
gccatacatcgggagcgcgcactatcaaagatccaatcttacatcctcatgcttactgcgaaatgtctcttttatagtgtcaccaaaattaaattgaatctcctgactggtccaacgccgggtctgtataaacaatataatgtcccaactctatctgatcatattacattctcctttcagcaactgaatttatagcatagaggccatctaagatcggcctatcctacagaagatc

SEQ ID NO: 41111 - DNA, 336 bp, Gossypium hirsutum
  Clone ID: LIB3196-007-P1-M1-F7
ctcgatctcatcccatccccttattccaacgaccaaggacgaaccctaacttgggcgtttcgactcggtttttctcaagctaacgcagctcccacccgagatctttatcctctggcaatgccactctggttctccgccatatccctctcgatagaggactcctttagtttgcctagaaccttcccctcttttcagatttatttaataagttcaagaaatgaccaacgattcccagccccctaattccaggagtctcctttgcaatgccggtgctggcgctgccgccggtgttattgctgcaacattcgtgtgtcctttagatgttataaagacgag

SEQ ID NO: 41112 - DNA, 403 bp, Gossypium hirsutum
  Clone ID: LIB3196-007-P1-M1-F8
attgcctatttttgtctcaaatataaggttccagtgctggaaaacgatattcacctcagtttgtaaaggctgccaaattactccattggaatggacattttaagccatggggaaggactgcttcatatactgatgtttgggaaaaatggtatattccagacccaacaggcaaattcaacctaatccgaagatataccgagatctcaaacataaagtgaaacagaatttaaactataagcatttctcaggaagtcctggaagatggcatgtatgcaaagtaacagttgctaggcttcaatgcctatcgtagcaagccatggaaaaagatgtgtcagctgggtaaagatgacaaactgccctgtctggaagtcagcttcccagactatagactataaatatgtct

SEQ ID NO: 41113 - DNA, 242 bp, Gossypium hirsutum
  Clone ID: LIB3196-007-P1-M1-G12
gaggaatatgacgatgaaggagatgaagagatggggaagctatgttgtggacacagttttcacattcaatgtataaagcagtggctgctgcagaaaaatgcttgccctgtttgtaagactgaggcatcacctcggtgatagtagcagcagcagcagcagccatggatggattcaatttaatccacttgttgttggtttacttactgtttcatttattttagtttagtccaaaattagtgttt

SEQ ID NO: 41114 - DNA, 321 bp, Gossypium hirsutum
  Clone ID: LIB3196-007-P1-M1-G5
cccacgcgtccgactccataacaggtatgtgcatcactgccattagatgtgaaacggcaaaatccaaaaagccgaaaagtgaagagtcgacaccactagggcgtgtgactgcccgtatggcaagtcctgtgataaaacttggtcgtgtggtcgatgagatggccatgagcactttcatggaccaagatgatgtcgggccattttgggccgaactagatcatgtgggcccaatgggcctgtgggctccacacgaggaaatcactcaagagttaggaaatattgggccaggctatgtaaaccacatggctaaggccattttgt

SEQ ID NO: 41115 - DNA, 384 bp, Gossypium hirsutum
  Clone ID: LIB3196-007-P1-M1-G8
ctcgtgaataggtgatgaatttttactcattataacaattagttgacatttttttggatgatattactctaacagtttgttttcatagatggagcactaatctgggtatcgaaaggtcatacacggttccaatataccgtctgatgatcgagaatcatgctagagaagggataagtttttctaatattcatgacattttattattttatttcactcgacctgcgttaatataaccatgttattaactgtgtagttcatttggatgtcgttttctatcctagaaattatggcggtgattccctcgtgtctgtccacgtccactcaaacctatggtgcataagcgcacctgttatcaatttccaaacagtagagtggtatcatggt

SEQ ID NO: 41116 - DNA, 335 bp, Gossypium hirsutum
  Clone ID: LIB3196-007-P1-M1-G9
atcgggatccttgcagggattgcgtgagggggatgctctcttacctacacgcgcactcgcgggtcctcggagccgactgtcctatttgtactggcccctgggactactgacccgttcagtccgctttaggtacggccagactgcacggcgaagatacgctgagggtcgccccagattgttatcgaccggagaacccgaaagtatgcaagaggaagagagcgcgcggagagcaatcgagcgggccgagtgcagcggcagcatctcctgggaccattgtgctgccggcgcctgctccgctggcgtgaaggcggggcgtctactcccttcccggactt

SEQ ID NO: 41117 - DNA, 394 bp, Gossypium hirsutum
  Clone ID: LIB3196-007-P1-M1-H1
atggaagagcctcgtcctgggcagcggtggtgcggcggtcgccgttatggccacgggactaggcggctgaccgccgggctaggagagggctaagagccccgaatctgggtggccgctgctcgagcgcgtcctgcgccatggccgcctccgccgccttctcggagcatttcgagaagctgcacgagatcttccgcggcctccatgaagacctacaaggggtgcccgagcggctgctggggactgctgggaccgaagagaagaagaagttgatcagggattttgatgaaaagcaacaggaagcaaatgaaacgctggcagagatggaggaggaactacgttacgcacccctggctttccgtaaccccatgatgtctaagcttcgaaactaccggaa

SEQ ID NO: 41118 - DNA, 323 bp, Gossypium hirsutum
  Clone ID: LIB3196-007-P1-M1-H12
atgtctctagatatcagcataaccaatgccttaaaacatgactctacttctccgcaatgatacttaatctaccttctttccttaaatatcacctgctttgaaccctttaagatgcacctcatatgccacttcctgtgaaatattttccctcaatatctcacacagtttttctcccacactcttgcgcaggactataggaccattaaactctgtttatattatcttcatagcacggacatcatcctcttaactaatggattgttcattcgctctgtctttcacaactttgtcttcgatcaaaagtggtaaaggaaccttttagt

SEQ ID NO: 41119 - DNA, 392 bp, Gossypium hirsutum
  Clone ID: LIB3196-007-P1-M1-H3
atatcaagctggaggaagaccttgtgccggagccagctactggagatgacagtgatgccgccacctttaagccaactctccccgatctgtcccctgacgagccttcagaagcactcggcttccctatgttagagaaggaggaggaagcccagagacccccaagccccactgaggcccctactgaggccagccccgagccagccccagacccagccccggtggctgaagaggctgccccctcagctgccgaggagggggccgtcgcggaccctggcagcgatgggtctccaggcaagtccccgtccaaaaagaagaagaagtttcgtaccccggcctttctgaagatgagcaagaagaagagtgactcctgaaggccccacgctaacactgtc

SEQ ID NO: 41120 - DNA, 360 bp, Gossypium hirsutum
  Clone ID: LIB3196-007-P1-M1-H7
aaaactaggataataaaaataatttaataataaaaaaagggcaaaaaaagagactaaatcgaaagtaaaaccaaaattaaagtatgaaaaatgcaattcgagatgtccaaaggctgccttgaaatgcgcgcgtaatatttgggatcaaaaaggtaaataatcccttgcccaaaacgcagcgctttaatgtggattagaatgaaacaaaaacaaaatgagagattaaatctaaaaagaaataaaatgattggattgaagcgcatttgaaaagcggagggactggggttgtaaataacccattaatcaatacacgtggatccccatggaacgggtcgggccgcgcacggatctgggtcaata

SEQ ID NO: 41121 - DNA, 401 bp, Gossypium hirsutum
  Clone ID: LIB3196-007-P1-M1-H8
atcctggggcatggtccgtgtgggcggccccgggcggccttggctacactgcttctgggggaagagctgcagccccagtttcctccaccctggatgggccctgggcctgcctgctaaccaggacccactcaggtggctgccgagaacctgcgctcttgcttctatctctcaagtgaagctcatccacgatcagacttctccaaaccccaagtacagaggattcttccacggggttagggagattgtgcgggaacaagggctgaagggtgcgtaccaaggcctcacaggcaccgtcctgaagcatggctcgaaccaggccatccgctctttggtcatgacctacctgcgcaactggtaccgaggggacaaccccaacaagcccatgaaccctctgatcactg

SEQ ID NO: 41122 - DNA, 403 bp, Gossypium hirsutum
  Clone ID: LIB3196-007-P1-M1-H9
atggaaaatatagagtagacctgagatgctagtcaagccccctttgattgagttcatcatgggccgttgctaatgccgggccagtaaaagtataacagcaaataaccattggttaatctgtacttatttttggacttagtgcagcaggttgaggctaaaacaaatctcagaacagtctcaaatacctttgcctggatacctctggctccttcagcggctagagctcagtatactaatgccctgtcttagcagagatttcatagctatttagagatattttccattttaagaaaacccagcaacatttctgccaagtttgttaggaggccgcatgatactcattcaaaaaaaaatcctagaaattgttagctctcgggacactggcttggcccactggagcatg

SEQ ID NO: 41123 - DNA, 293 bp, Gossypium hirsutum
  Clone ID: LIB3196-008-P1-M1-A1
atatttttacacagggctttgtccagggacttgggtttcacacacacagcggttaactgggatgggtttttggtaagggaggtaaaaaaaatatgtagctgatgaaatagcatgtgctgggccccaccactgggcctgggaggtgcagcgcgttccaacagaggctgcctcctgcctgccacgcctgctgttctcacaggcaggggctctgctgcttagagcagtgtggccatctcggcttttctcctcatcgtctgtcgcacactggtccccaccacgcctttcgccggccc

SEQ ID NO: 41124 - DNA, 374 bp, Gossypium hirsutum
  Clone ID: LIB3196-008-P1-M1-A12
acgggggaaaaaaatcactaaagctctttatgtttttgtcatctcacttggtcctctcaacactgccatcaggtgcgggggttccctctgtacccgtgaagctcagtggggtgtgtggttcagggaagcccggtggttggcctagcatggcatgacatcgtcccaggacagtaaccccccaaatattcttttccagtgccctgtcctgtccctccaggacgtggtgaagggcctgttcgtgtgctgcctgttcctggagtatgtggctttgtcccaaaggtttatacctgagcttattaattttcttcttgggattctttacatagcaacttcaaacaaagccagccaagagcacttgggaagcactcggaact

SEQ ID NO: 41125 - DNA, 388 bp, Gossypium hirsutum
  unsure (1)..(388): unsure at all n locations
  Clone ID: LIB3196-008-P1-M1-A4
atccgcaaagcatcaaacgaggctaagcgctacaccaggcgccccctggtggttgtctactacagtgtggacttcagctttgattacagagctgcaactcagttttggcggagcaaagtcctagaggtggccaaggacttccctgagtacacctttgccattgcggacgaggaggactatgctggggaggtgaaggacctggggctcagcgagagcggngaggatgtcaacgccgccatcctggacgagagcgggaagaagttcgccatggagccggaggagtttgactccgacaccctccgcgagtttgtcactgctttcaaaaaaggaaaactgaagccagtcatcaaatcccagccagtgcccaagaacaacaagggacccgtca

SEQ ID NO: 41126 - DNA, 314 bp, Gossypium hirsutum
  Clone ID: LIB3196-008-P1-M1-A5
atcggggatcttccaagtctggaaagttgaaaggagatgaccttcaggccattaagaaggagttgacccagataaaacaaaaagtggattctctcctggaaaacctggaaaaaattgaaaaggaacagagcaaacaagcagtagagatgaagaacgataagtcagaagaggagcagagcagcagctccgtgaagaaagatgagactaatgtgaagatggagtctgaggggggtgcagatgactctgctgaggagggggacctactggatgatgatgataatgaagatcggggggatgaccaacttgagttgatc

SEQ ID NO: 41127 - DNA, 331 bp, Gossypium hirsutum
  Clone ID: LIB3196-008-P1-M1-A8
acggcagcctgctagatctgagagtgtgtgtcggtagctatcctctcgccacttcactcatcagctcagctgtactcaaactgaagttgcatgtttctaaacaagcccatggctgcagtttctccacctttggatccgcctctcttatttgctagaatatcagggatcctagtggcagctttggtcctctcgtgggctcttcttttcaagtctaagcttcttcctcactcttctttaccctcccaagaagccctcatctatgcagtcctccatcctttgctcatggttatgggcttcattctcataagtggggaacctatattgatacaca

SEQ ID NO: 41128 - DNA, 270 bp, Gossypium hirsutum
  Clone ID: LIB3196-008-P1-M1-A9
attcaccggagggataaaggggactgtttatttttttacctatcctcaaaccacttcactcattacttaatgtgaactcaaactgaacttgcatgtttgtaaacaagcccatggcttcagcttctccaactttaccaccacctatgttctaagctaaaatataacgcatcctaaaggcaattttgagcctctctaagactattcttttcaagaaaacgcttgcttgctcactcacaattacccttgcaagactaccacatgtatacaatt

SEQ ID NO: 41129 - DNA, 375 bp, Gossypium hirsutum
  Clone ID: LIB3196-008-P1-M1-B1
cggacgcgtgggtaaaaaaaaagttacattttgttctcttggctatatagccaaatacatctctgttgcgtgttgtgttgtttctatttccttttttggtttgcttgcaggttgggagcaaggtcaacgagaggggcttccgttttggtgcaaaggacaggcagagccgaccctcgagcggtgttggcgccgaggacgcacgtggctggtagaagggaggcacggtgctagggctagctagggtttctgcctctgctgaaaccgtttgggtctttgggcctgctaattgggtcataagattttttgtattttgggctatttaggctttgggccttatgtaaaaggactgctcttattctttaagattttggtttt

SEQ ID NO: 41130 - DNA, 348 bp, Gossypium hirsutum
  Clone ID: LIB3196-008-P1-M1-B10
atcagggaaggatgacaaaatggaaatttaaatgacatcctagaggtagaaaaaccgtggagatcacttttctcagactcaccagattttaatgggatttcatggggtttggttgtgctgatggggttaaggggaggcttctttctgcccttatgcccactcccatctgatttacctaattcagtctcagctgctgacatttggaaaggaccaaattgctttacagagtttttctttggggtatatctttaaaaactggaaaattctatggaatagttctggatataggacacaagtaaagggctatgcccaagaatatttatttatttattaccttatgagaaagct

SEQ ID NO: 41131 - DNA, 370 bp, Gossypium hirsutum
  Clone ID: LIB3196-008-P1-M1-B5
attgtttctatttgactttgattagaataagatttttaaacctataaatagactagtcatctctcctcttgtatcattcgaatttaacagttagtgaatttttcttctcctctgcgttctatttttctttctttgtgattattgtcattatcgacgttcgatttttcatacacttcttcaaattcaaagctgtggttgcttaaaccatttttctttgtctaagttgaatgatcttcaagaattcattaaccatgattgatgagtaggggagagcaaaactcgattcgactaaaaaaattggaaaaaatttccaatttcgagttaaacaaactgagttatttgaatcaactaaaatcttttttttttttga

SEQ ID NO: 41132 - DNA, 223 bp, Gossypium hirsutum
  unsure (1)..(223): unsure at all n locations
  Clone ID: LIB3196-008-P1-M1-C10
atggccgccctttttttttttttttgttttttggtttttttttttgccagntggttatattactttgtttgggaagcttttttgccggggcagtctaccaaaattgggttccctttacaaaacataccgattcttggaaatgatgaggccatggaagccccggccagggcctgacctggcaggaacaaacctggctggtggctctgaggtacccggggaccga

SEQ ID NO: 41133 - DNA, 384 bp, Gossypium hirsutum
  Clone ID: LIB3196-008-P1-M1-C3
cggacacgtgggcggtacgcgtgggggaatttaaccgttttcttgtaagttttcagtgtaagaatgtagatagacaccactggcgaaagcatgtgatgccatattgcgttacgagcctataggggggagaaatcttaatgagtatggaatgcgcatctaactggatctagtgaataatgaacataagcgaagtgagacaattattcgagtgaaaaagaataataaagtttatggaccattataaaatttcgaaatgattgaaaggaatatgaattattagaggcatatatatgctcttgacttggaacagattaataggaagcgtttaaaatatgaagccaaatttacgattttgcatacttgaagagtggttacaaaaatgat

SEQ ID NO: 41134 - DNA, 181 bp, Gossypium hirsutum
  Clone ID: LIB3196-008-P1-M1-C5
ctcgttttttttttgagtctcccatcgtaaaaggatggcaggtaaacaggaggaacaagcgtttttgacaggtttatagtgggatgggcttgtattcggctctattgcagccatacatttggagagggcaaggtcacactatttacttagctaaggttctgcgcattaactaccaaattta

SEQ ID NO: 41135 - DNA, 338 bp, Gossypium hirsutum
  Clone ID: LIB3196-008-P1-M1-C6
atgttcatatatttgccattctcaattgactctaaaaaggtatgagcagcagcgggacaatctcgcccaacagtcattcaacatggaacaagccaattataccatccagtcattgaaggacaccaagaccacggttgatgctatgaaactgggagtaaaggaaatgaagaaggcatacaagcaagtgaagatcgaccagattgaggatttacaagaccagctagaggatatgatggaagatgcaaatgaaatccaagaagcactgagtcgcagttatggcaccccagaactggatgaagatgatttagaagcagagttggatgcactgggtgatgagc

SEQ ID NO: 41136 - DNA, 352 bp, Gossypium hirsutum
  Clone ID: LIB3196-008-P1-M1-C9
atccgaatgggaccacgggacccaaataagcccccgtccctcctggacgtaaaggcacgcgcacatacctctaggagtgtgagacttctgccacctgttgggttggttctaggccccacctgccctcagggagcctcgacagggccggtgggagatgggcttgtgtcctgggaggcagctgcagctctcaccccagcggctgtctctgcctcaggctcccctccctgaagcgtgtctcgaggcgcacgggcacggctgctccgcgccagcgcgtaagtggattgcagctcctcccgcgcctgcgctcgctggccaccccccagcccctcaggcaccaggactggccactccc

SEQ ID NO: 41137 - DNA, 332 bp, Gossypium hirsutum
  Clone ID: LIB3196-008-P1-M1-D3
tcgtgcgtaaatccttgcacgagcttcaatgaataccatgttttgcatgacctttattataccaaaatatagcgataatcgcttgcatttcagcacataatgatttaggaagtatgaagtgagtggttaaagattaatcatacaaaaatataccaaatgataaaaaattattggaatgtgtatattagggtgaggggatggctttctctgctgcactctgtatgtctatataagctaaagaatgatatcaagtttgggtggatggaatagcctatgcattggaattctattcaatgggcccagtacaaactgctgttgaggttaacggaata

SEQ ID NO: 41138 - DNA, 165 bp, Gossypium hirsutum
  Clone ID: LIB3196-008-P1-M1-D4
gcgcagtattccgggtgggacccacacctctcacaactactaactgggggcacgtatggttgatgctattgcgggttccatctattgtatgacgcatacatactcattgggcaggacgatagtagaaattttgagagctttagaggcatatactgtatatgataa

SEQ ID NO: 41139 - DNA, 394 bp, Gossypium hirsutum
  Clone ID: LIB3196-008-P1-M1-D5
attctcagatcattttgtctattcacagaaactaatttgctgccagtgatagggataatccatgatttctgagacatctacttccataatttcacagttctaagtctagaaaaattattagaagaaaattattgggtggtcttggaaccaacccaaagaaaaatcatgtcctgtgaacagtaggatagatactgaatctagcttgtctcactttggagctagttcttataatttcccttggactatatatttttgtccaatcactactgttcaggacatgggtttgatttgcttttccctcccatgagccactcaattgctttgctaaaagccccatcacttttcctctggtttcctttggtacaccaacctcaacacagagtccacttggttt

SEQ ID NO: 41140 - DNA, 354 bp, Gossypium hirsutum
  Clone ID: LIB3196-008-P1-M1-D7
atagaatgcacaaaatgtcaacatcagcagagatgcccagatctatttatctctaagtatatttgaagtgattgctgtttatatgttgtcattttaaaattgtgtgtcagtaaagctacctgtaaaatttcagtccaaaaaaataaagctctcagggagacatgaataaaaacaatgaacattagaaaataaaatatagatgcttaccattaacctaccaactcttaatatccttaaattatgtgatatataaagaggactgttacttttttttttttgctttgctttatttatttgtagtcggggatgaaggcttacggtttctcttttctttctatcgaacctcgtgggggt

SEQ ID NO: 41141 - DNA, 383 bp, Gossypium hirsutum
  Clone ID: LIB3196-008-P1-M1-D8
atggagatttgcttttgtaggacagttcatttgccacttctaccagaatgagtcattttgtgtataagtgtcaagcttggagaggttctaattaagtgcaaattacaatgaaattaataaatggcaccaatttttagattttaaaatgtgctttgagagaatgcaatgtgggcttagattgattgtaattctcgtgttttaagttgtgattcaatattatgtagcattaaaactcaattaagtaaaaaataaatgaagactcaaagagagagaacactcatctctcaaatgcctcaacttctccaatgataacttaaaatctgttaaatgcttagattggaattctccttattggtcactacattccaaaataattgcacata

SEQ ID NO: 41142 - DNA, 358 bp, Gossypium hirsutum
  Clone ID: LIB3196-008-P1-M1-E2
aaggattttctagaccgagtttctcacctttgggtgctcatgttctatttgtaaaaaagaaaggcgacacgatgagaatgtgtatagattattgtcagttgaataaagtggctatcatgaataagtatcctctgcccccaattgatgatttgtttgattagttgaaaggagctgctgtgtttttgaaaatagatttgagattaagctattatcagttacgagtaaaagactcaaacattttgaaaactactttcagaacaaggtatggccaccatgaattcttagttatgcctttcggattaactaatgcacctgctatctttatggatttgatgaatagaattttcatactgtatct

SEQ ID NO: 41143 - DNA, 181 bp, Gossypium hirsutum
  Clone ID: LIB3196-008-P1-M1-E3
atgtaacatacacgtgtaaactctcgtgtttaaagagagagaacatttgatggtgtgtacttttaaaaagggaaccaaaccgccttccacaacttggaaatgtgtattccaggtttaaaggctccatacttggtaaaaaaaacttaaggccttccaccggggagctgcctttattttattc

SEQ ID NO: 41144 - DNA, 388 bp, Gossypium hirsutum
  Clone ID: LIB3196-008-P1-M1-E4
atgcggctgggaccctgcgtacatatcctgagaacggcgagggccttcaaggctatcatcgctgcacaatactatatggataaggtgcgcgtgctctccaaaccaccccactttcatgatgagcacaccaacctgaccgctgtatatgttcccaaattttctgacatgcaggctccagcatttgacggggacgatggattctgcgtgtacgagagccacgccattgactactataggagcaatgatgagctgcggggacatactccagaggcagcacaccaggtcgtgcattgggtcagctttgctgattacaacatagtgcccccagtccggacctgagtattccccaccttgggcatcatgcaccacaacaaacatgccactgaga

SEQ ID NO: 41145 - DNA, 236 bp, Gossypium hirsutum
  Clone ID: LIB3196-008-P1-M1-E5
gccaattcttgtgtcaacttctcggcacgatcatcatgtccgccggcaaatgtgtaaacctggaaagcgaattggaaaaccctccatagcagcttaacgccgccatttttgttttgcccatcaccttctcttctctcctgaaataagtcccaaaaaaatagaatggaaaatccaattatgataagctcgacatatacacacacgagtataattgagtctagctaagctcaagttgt

SEQ ID NO: 41146 - DNA, 377 bp, Gossypium hirsutum
  Clone ID: LIB3196-008-P1-M1-E6
atccctgatgtagcgcgtgtattctgccggaaggtcgcaggcctgccttgttcgcctctggttctgagtacctctcctccttactgcagcgtgccctgatggtgcactctggctgcttcccacacactggtgcctgcttgcctgatgctagttctcctgtgtctcacacacgcagggcaggaggttcgtctatgctggctctaactcgggcgtggtccaggcccctctggccttctgtgggaagcacggcacctgcgaggactgtgtgctggctcgggacccctactgcgcctggagcccacccacagcgacgtgtgtggctctgtaccagactgagagccccagcaggggtttgattcaagagatgagcggcgatg

SEQ ID NO: 41147 - DNA, 253 bp, Gossypium hirsutum
  Clone ID: LIB3196-008-P1-M1-E7
gaccttctgtaattagttcaaaacaccttttttttgtttatttgcaacataagactaaagcatgtaaggtttctttttttcctttcttgtcatttatttcctaggaaaaataataaataaataaataaggtgttttggacaaattacaaagaagtgtctaagttttgtcaaaagttaaagaaaatgttatgtgaactatctgttaataggttaatgagatttttaatgtaatgaccaatttgaataattatat

SEQ ID NO: 41148 - DNA, 322 bp, Gossypium hirsutum
  Clone ID: LIB3196-008-P1-M1-F12
atctttaagatgacttgtttcctttgaaaatacatatgtactgagggttatgatttatgtcagaaattgacataagtgcttttacaagcaccaaagttgaatgaattttcaacaaaatgtaattcaagtctatgttttcagatgtgactcaggttaagaaatgtgttttaggatctacttgctggtttttctttttgatccaaatgtatgatctgccctgataaataacaagttatagtaccatctcccccgccaaaaaaaaaagaaagaaaagaaaaaagagaaaacctgtggcactatgtaaataaaagtagcatacttt

SEQ ID NO: 41149 - DNA, 283 bp, Gossypium hirsutum
  Clone ID: LIB3196-008-P1-M1-F3
gcgggaagtctgagaatgtcccatctcccccaaatgggatttctgaaatacccccatcacaaccacaatcaatctagtattattacttgtgggcttagaggaggaacaaagaaacccttgtggaaatcaagggtgctttccaccgaagccatccaagctgttcattccctcaagttagccaactccaattccaaattacaccatgttttatccaccaggctttccaggttactcaaagctgaccttttggatactttggctgagttacaaaaacaaaatgaat

SEQ ID NO: 41150 - DNA, 389 bp, Gossypium hirsutum
  Clone ID: LIB3196-008-P1-M1-F6
atgctgaacgttaatacgtgtagtaaacgcacctccttgtattcccactttcgtagtcatttcggttctgatcttgtcaaacccagcctgaccgcttctgacgccaggatggcctcgttactagacttttctttttaaggaagtgctgtttttaagggttttcaaaacattttgaaaagcacttcagatttacttttttgaccacgagccatgagttttcaaaaaaatcgggggttgtgtgggtttttggttttttagtttttggttgtgttgcctttttttcttttggtggggttggccccatgaagtgggtgccccactcactcctctgagatcgaacggactgtgaatccgctctttgtcggaagctgagcaagctgtggcttttt

SEQ ID NO: 41151 - DNA, 388 bp, Gossypium hirsutum
  Clone ID: LIB3196-008-P1-M1-F9
atctcctacagatccatgcacttgcgtataggcgtgagattttttttaaatgattcccccttgggttacgtgggcatatgcatttttcggaagtcatagcctgtatactcaagatgtgtgcattttgctatatggaaattacacagtttttaaaaaatgagttcttcctccccttaagttgatagtggagcttgcataaatgtgcaagtggttgccatggcccacggggatccatttgtggttaccagctgggaggagatacacctgcttgcatgtctctagcaagagggtgtgacctggccccaacttctggcaatttgggcccctttcttaggcctttattctatattcattttgccttgggttcttaatacctttacttcttttc

SEQ ID NO: 41152 - DNA, 315 bp, Gossypium hirsutum
  Clone ID: LIB3196-008-P1-M1-G11
atggcatccaccacgatgctgtcatcttcctggccgagcagcttcctggagcccagcgttgccagcactataagttccgttaccaccagcagggagagggccaggaggagccgcccctgaatccccatggggctgctcgggcagaggtctatctccggaagtgcacctttgacatgttcaacttcctggcctcccagcaccgggtgctccctgagggggccacctgtgacgaggaagaagatgaggtgcagctcaagtcaaccagacgtgccaccagcctggagctgcccatggccatgcgctttcgtcacctta

SEQ ID NO: 41153 - DNA, 344 bp, Gossypium hirsutum
  Clone ID: LIB3196-008-P1-M1-G12
acactatagaacaagatggaacaaaaaagcacgctggtgcccgtccgcaatttccgggatgggcccaactcagcacgttgagccatgtggcgcgtctgacagtatggctcctatacagactgatcatgaaactgatcatgatctacacaccagccatcaccctcgaaagatccaacatcaagtactccatgcggttcatcgaccggaagatcataatgcatgacacccgacgcttgcgctgtgccctgacagcatctgaacatatcctgggcctgcctgtcgaacagcacatgtacctctcgagtcgaattgacagaaacctggtcataccgccctatacacct

SEQ ID NO: 41154 - DNA, 334 bp, Gossypium hirsutum
  unsure (1)..(334): unsure at all n locations
  Clone ID: LIB3196-008-P1-M1-G2
gcaacttactaagctgtatgcttattccctttcctttccattttcttatagtattgccaagctagtgtcggggatcaagggacgtcggaggcatcgatcacactatcacttgaagcttttggtatagttagtttaaatgttttgattgtggcatgtatagggacttgaatcttttgtttagagccttgatagtttagccgcaagtgttggctcatatgatggatgtaatattcaatttgtataggccattaatatntgttaatattgattattattaaatgcatttgatgcaaatttctcatggttgtgggtggtttgggtatttggggtatac

SEQ ID NO: 41155 - DNA, 337 bp, Gossypium hirsutum
  Clone ID: LIB3196-008-P1-M1-G6
agccttccggggggaaaaaaaggtaaccttgtctgcttaattaaattcattttgggcgaattaaataccaaagttccacctaacttggaccatgtttatattctgcggcctatagggcggacatcacttattccaggggctattttgcctttgaaagacccccacagtgggcttctggaaattgaacaccctgatgctataaagaggacttatgcactttatgcagatgattgctttgttacaatggggatcacattcggtaacatttatttactccaacctgttatgcacctatatgatcatgctttaacacatgagacggagaaactactggcgc

SEQ ID NO: 41156 - DNA, 343 bp, Gossypium hirsutum
  Clone ID: LIB3196-008-P1-M1-G8
atgtgctaagtatttactccctgacttcatatcacgatatagccagttaatggtagagatgggcttaaaatccatgtctgtcaactctagaaatattcccaaaattccacaccgtccctttttctcttcctaccacaccacctcacacgtgtttgtaatgatttctgaacagtaatataacaattgctgcaattagacttttctacagtctgataaaaacaatacaatttttaccatttgcagtgatgatttcccttttggttcctatctaaggaggaagctccatggtcttaccttcccaattatgaagcaacgatgacctctttaaactcgtgaatctaaa

SEQ ID NO: 41157 - DNA, 327 bp, Gossypium hirsutum
  Clone ID: LIB3196-008-P1-M1-G9
atctctctcagacctgggctgaattttgctgatcagccgggtggctttggccgagaacttcacttgcctcagtattctcatctgtgaaataaggaccctcatacccacattgtagagtcacgaaggtcagagattattctgagtggcagccagcacctggcctggctgaggacattgcaccattcattatcctggaaattgaggcagacactccagcccctttctgggatcctggccacgccactgtgctcctgccctgcaagctggctcccacgggtctctgatggcccaccaaggggctgcccaaggacctgactccatatattc

SEQ ID NO: 41158 - DNA, 241 bp, Gossypium hirsutum
  Clone ID: LIB3196-008-P1-M1-H1
gacaccctagaacaagagggaacgcaaaagcacgctcgtgccccgccccaatatccccgatgggccctattccttctgtgatagcttccaggttactctttgcactcttgaatgtcaaacagcattatgtaacaaagcggaactcgaggcttaagctgaggctcaaacatcaaatgcaggggcaacagaggtgcctaaagctcatgctcctgactttgaggtgctggacaatactcttctg

SEQ ID NO: 41159 - DNA, 389 bp, Gossypium hirsutum
  Clone ID: LIB3196-008-P1-M1-H2
atcgggcacggtcgtggcgtgacgtcgggaggagggcagacacgccgctttttggatgcctcctgtgcctggcgagagtcttgtctgagccggcaccaccacacggcccacaacatcttctcagggaagcctgtggaccctctgccaggcactgcaagaggtcaggacaggacagtgtgttcacaaggccagtttctgattgtccgccctgagggtgaggaccagtaggcagttcccaagatgggtgaaaggaaaggggtcaacaagtactatcctccggacttcaaccctgagaagcatggctctctcaaccgataccacaacagccacccgcttcgggagcgggctcggaagctgtcacagggcatcctcatcatccgattcgaaat

SEQ ID NO: 41160 - DNA, 451 bp, Gossypium hirsutum
  Clone ID: LIB3196-008-P1-M1-H4
gacaccatctaacaagagggaacgcagaagcacgctggtgccccgccgcaatttcccgggtgcgacccaatcgttcgttttctcttaagtggggtggcaggggaagcctaatgtgactatgagagactagtttacggagctaccgatacgctgctgatatatgacctttgtttaacgggtttcacgacttgaacctaataattgtgtgaactgctctctccttttttccctcccttattattgtttggggtgagcatttatatggttggacaacacatacaagactggtgttaaacgactgcctgtgaaagggccttaactggtggtgctgtacagatccgctggtctatgcttagagctctcactccttgctgtcttccttgggattgaaactttatataactggagcaagtggagagccaaaattttgcttgtcactgcacatcaatat

SEQ ID NO: 41161 - DNA, 350 bp, Gossypium hirsutum
  Clone ID: LIB3196-008-P1-M1-H5
atgggaagcaccgtctgtgcccggatccaagccctgccacctagagtccagagccaggaaggggctgctgagggagggcatcctgctgggctctctactcggcccgcccctccaagggtctggcctgtgagccttgactgggcttcatgctgtggaggcccccccactccctgaagcagctgggactctgctcacacaagcgactgggctggccctggcccctaaaccccaagcccgtgctggctgcctgcacaaagagcagctgaggcccaggcagggcccccacaccagaccccagcatagcttccccacccaagcacccccttcccaaggcagcaggtgtgggagtc

SEQ ID NO: 41162 - DNA, 433 bp, Gossypium hirsutum
  unsure (1)..(433): unsure at all n locations
  Clone ID: LIB3196-008-P1-M1-H6
aagantgaacaaaaaagcaggctggtcccgggccggacttcccgcgatctttatattagtaaagctgaaaagaaagcacccttcacttatcttagcctggcaaccctcctccttgttgacccccatgctttcttcctcttagtacctttgcgttggatgaatttaagcgcaagtactccaatgaggacacactctctgtggcactgccatatttctgggaacactttgataaggacggctggtccctgtggtactcagagtatcgcttccctgaagaactcactcagaccttcatgagctgcaatctcatcactggtaagagagcgggtctgagacgaggaaggagaacaaagagtagcaagtgctgtgattccaaaagctgaatgttcttgctagccccttcacgaatgttccagcgactggacaagctgag

SEQ ID NO: 41163 - DNA, 329 bp, Gossypium hirsutum
  Clone ID: LIB3196-008-P1-M1-H8
atccttctgacctctatgctgaggggtgtgaggctctagttgtgaagaagctacaagaaatcatgatgcatgtgatctgggctggactggcatttgcagatattcagctgctgggcatgctgtgtgcctgcatcgggttgcgcagaacgagtagagatcctgcttatgagctcctcatcactggtgggacctatgcatagttgacaactcaagcctgagctttttggtattgttctgagttggaaggcgaattgaccaagtgtgctgctgttgagctactgagttcatgtaagtaaagcacatgtacactggagatggacagagcagct

SEQ ID NO: 41164 - DNA, 311 bp, Gossypium hirsutum
  Clone ID: LIB3196-008-P1-M1-H9
actatagggaaagctgatacaccttcatacccctccccaatatccccgatcctacccacccgtatgatcatgcgggggagggtatatttaaaattatccttcactaaaatatccaacaacccaatttttcttgacaccctaatccaaatatcaaattcctgctctttacatgtatcatcaaatggcaacccagaaccacttaaaatactcattatcagctcctcataaattggaagacctaactattgataccaaatctactctaaaattccttcgaataaaataagctctaaaacccaaaaaaccaaaaa

SEQ ID NO: 41165 - DNA, 279 bp, Gossypium hirsutum
  Clone ID: LIB3196-009-P1-M1-A10
gactcactagagggaaagctgaggcgcgttcatgccccgccgcaatttccgggatcagctcccccccctccacccaccctttgagagtcaccaccacgaccccacgtgatatccaaccaaagaggaggaaacaccgattcttgaatcatgggagttggaggagcatttcactcttctactagtatgccttttctcagcactgctgactgatgtgcggatcaactgtaatggacaggaggtcctgttcctggcagaaggtgataatgccatgctgggctg

SEQ ID NO: 41166 - DNA, 298 bp, Gossypium hirsutum
  Clone ID: LIB3196-009-P1-M1-A2
tcacggccgcgtggggaaaatgatgctcagccacaaaagaagccgttcaagatattgcggtatttttcgctgataccaaggctttaaaggcttttcatgtattcgaagacagtggagtcaatgacgtggcaccatgaaagacgaaccgatgatggactattaaggcataccgcagattctttagcttggaaatcatttgacaatatatttacaagctttgcaagcgatcccaggagtgtgaggcttggactagcatctgatggatttaatccttacaagatcatgagtactgcataca

SEQ ID NO: 41167 - DNA, 319 bp, Gossypium hirsutum
  Clone ID: LIB3196-009-P1-M1-A3
atcaaacctggtcgcaccactcgtgtgagtaaaaactacttgtgactccagtgccatatgcaaactgcttggcaagggctgtaggtttacagtcctgacgaagaggtttactgcaaaaacttcattttgcttgcctactgaagggagtctatctcccgctacatgggactatttgttagatatgacaagggcactaacacctgtcggacctgcactgatgttgttttatctgctcatagtaccagtgctctgactctccgtcctgaccaaactgtctcttgtagttcacaggacagagagcaggtgactattctgtgag

SEQ ID NO: 41168 - DNA, 333 bp, Gossypium hirsutum
  unsure (1)..(333): unsure at all n locations
  Clone ID: LIB3196-009-P1-M1-A4
attgcatacttctggaatctccgggaagtgcctgtcgaagctgatgatgccagcgactgtgaaatcaactatgagggcctggacaacctcctcctcctgaaggagctccagtacttgtcgctgcaacgctcgcctcacttggaccactggtgtctcacccgcctttacccactggccgactcgttgcaggagctatagctggcccggtgtccccgcgtatacgaacggtggcttggctggctacaacacctccagaacctacacaagctggacatttcggacctncatgccgtgtgcaacccaggcctcactcagatcttagcggaggagatg

SEQ ID NO: 41169 - DNA, 312 bp, Gossypium hirsutum
  Clone ID: LIB3196-009-P1-M1-A5
atgcctaggcatcccttaactcagcacctctgacatttccacagagccatgagggtatgtgcccccaagagagtgtctactgtgagaataagtgtggtgcccgcatgatgcggcggctgctggcccagcatgccacctctgagtgccccaagcgcactcagccctgcacctactgcaccaaggagttcgtctttgacaccatccaggtgaggcccttcctgagctgtggttgcagggcaggtgacagggagtcaggatattgactcctgcctctctgcctctgtggccccagagccaccagtaccagtgccc

SEQ ID NO: 41170 - DNA, 303 bp, Gossypium hirsutum
  Clone ID: LIB3196-009-P1-M1-A7
tgataacttcaagcttactcattgacaacatgattgccagacatctgagtgagctcagctgagcaacgggctaaagtagaggctcagccatcacaggccacaggacgagaggcgccgtctggtcagactccacaactggaggtgctaaccgatgcagagttgagggctaagagcgtagcgagcgtatgaacctattgggggacccgagcgtgttcaagagcgaaaataaagcatgacatagctcatgttacgaaggagcaggccgctaatggcctgagagctttggcgaacgattaagacatc

SEQ ID NO: 41171 - DNA, 133 bp, Gossypium hirsutum
  Clone ID: LIB3196-009-P1-M1-A8
gcgaattttcttggttttcagccatctcctcggttgtggttgaagtatcgtcctcttgctcgtcctttgtgtatcttaggcttcgccttatttctctttggtttttgtgaactgcgcggtcgatctcaccctc

SEQ ID NO: 41172 - DNA, 319 bp, Gossypium hirsutum
  Clone ID: LIB3196-009-P1-M1-A9
atcagctcccccccctccacccaccccctcacacgtaccaccacgaccccacgggatatccagcccaggaggaggaaacacccagtctagaaacatgggagtcggaggagcattccaccttctactcgtgtgcctgagcccagcactgctgtctgctgtgcggatcaacggggatggacaggaggtactgtacctggcagaaggtgataatgagaggctgggctgcccctacggactggaccctgaggactatggtcccaatgggctggacatcgagtggatgcagcgtaactcagacacctcccaccaccgagagaac

SEQ ID NO: 41173 - DNA, 402 bp, Gossypium hirsutum
  unsure (1)..(402): unsure at all n locations
  Clone ID: LIB3196-009-P1-M1-B1
atgccaagagaacctttgtcaccgagtaactcgcgcacaccgagtcccaaaagccttccgtcttacctcaatggggtcatgcccccaacacagagctttgcccctgatcccaagtatgtcagcagcaaagcactgcaaagacagaacagcgaaggatctgccaataaggttccttgcattctgcccattattgaaaatgggaagaaggttagttcaacccattattacctactacctgaacgaccaccatacctggacaaatatgaaaaattttttagggaagcggaagaaacaactgcaagcgcccaaatccagccattacctgctgactgcggcatatcttcagccacagaaaagccagactcaaaaacanaagtggatctgggtggncacgtgaagcgt

SEQ ID NO: 41174 - DNA, 359 bp, Gossypium hirsutum
  Clone ID: LIB3196-009-P1-M1-B11
gatttttgttttttccaaaaagaaacttccttagttccgctaagcgaaaccgtaggttcatcatgtcgccgtccggagacggagccatcaatggtggatgttgctgctcttgttctcccggcgagaatggtggttatgatggagccaataatttcggtatctccgcatcgcaagacgagacatgcatgcattgcccgaggtctgaaccttcatcatgttcttcctctgagctcggttttgattcggtcctgttaactaattccgagatgttgcctagaattttcgtcgcttcagctaaaggcttctcaattgtagctggcctgcaaggtggcttagctatcttctccattctcgcacgc

SEQ ID NO: 41175 - DNA, 400 bp, Gossypium hirsutum
  Clone ID: LIB3196-009-P1-M1-B2
atcccaagtaagagcaaatctgtatgataacattgttttctctggacataagacataacagtaacacgatgtacatttacaagcggccttatgtacatttcccaacaatctttttaaggcaaaattgtgaccatatgtgtataattaaaatcgtttttaatcctttgcctatgaaaatattttggaaaaaaacttgctgtgtatattcagtttctgaaagataaagaaagtgctttgtattttgttgaagtcagtattttgtataaacatttatgttgacccagttatgtttagtgctgaaaactaaaatgaacatgctatctctgtcagctgaatatggaagaaatcttttttactagagatctgcagaagaaaagcaatcttctgagcacaatatgga

SEQ ID NO: 41176 - DNA, 362 bp, Gossypium hirsutum
  Clone ID: LIB3196-009-P1-M1-B5
gacactatagaacaagagggtacgcagaagcacgctggtgccgggccggagtttccgggatgtgacccacgcgctcactgacgcgacaccacatactgcagcactttctaatgagaacatcacggatgagccactaggaaatgctgcactctcatatgctcacctgggcagttgtttctaaaaatgtgtgctgcttcggacgtcctgtgctcctaccactgttgctgccctgcagcccctggtcaagtgtacagacccttatcctgccttacagtgtctctgtctgacatgacacacgcttccacccaagtacctgtgacccccaggctggaacagggctagtcggagatacgtgtgctttc

SEQ ID NO: 41177 - DNA, 356 bp, Gossypium hirsutum
  Clone ID: LIB3196-009-P1-M1-B7
atgcctcaggaagaacttcaaagagagtctgggcctctccagggtaaggggaagcctcgggcttgggctcgggcctgggcagctgccttggagaattctagccctaagaacttggagagaagtgctggacaacgtagtcctgctaaagaaggccctctagacctctaccccaagttgactgacactatccaagccaaccctgtaccaacccatctctcattggtcaactctgcccaagccagccccatgccagttgactctgttgaagctgatcccactgcagtaggctctgttctagctggccctgtacctgttgaccctgggttggttgaccttgcttcaaccagctcagaact

SEQ ID NO: 41178 - DNA, 342 bp, Gossypium hirsutum
  Clone ID: LIB3196-009-P1-M1-C1
atgcgcgggccttccccggtggcctggccgaggacatcaattaaggccaggtgtctgcccggcaggagctcaagcagctggcacgctacctgaccttaaagtaccagtgggacgtggcctgggcccgcaagatctgatgctttgggcctgactgcaccggccccaacatcctgaccgacattaccaagggcgtgcattacgctaacgagatcaaggacagtgtggtggccggcttacagtaggcctccaaggagggtgcgctctgttaggtgaacatgcggaatgtgctcttcgacctacaccacgtgactctgcatgctgacgccatacaccctgggggcg

SEQ ID NO: 41179 - DNA, 298 bp, Gossypium hirsutum
  Clone ID: LIB3196-009-P1-M1-C10
atcagggccctgccggtcccccaggtccccctggactctcagggcccactttatttacagggcctcacaggcagactatcagcgttccccgccctccgggcctcactgggcccactgggcctcctgagaccatggtcaccttctcaggggtgaggctctggtccacgccccaggtcatgctggggcaggggcacgaggttcctgagggctctctcatgttacaagaccatcaggatgagctttacttccgtgtgccaaaccggctcctgaaggggcacttgaagctcccgacctcact

SEQ ID NO: 41180 - DNA, 402 bp, Gossypium hirsutum
  Clone ID: LIB3196-009-P1-M1-C2
atcggccggggacggtgtgagagcagtaagatggcggcggcggcagtggtggagttccagagagcccagtctctgctcagcaccgaccgggaggcctccatcgacatcctccactccatcgtgaagcgtgacattcaggaaaacgatgaggaggcagtgcaagtcaaagagcagagcatcctggaactgggatctctcctggcaaagactggacaagctgcagagcttgggggactcctgaagtatgtacgacccttcttgaattccatcagcaaggctaaagcagctcgcctggtccgatctcttcttgatctgtttcttgatatggaagcagctacagggcaggaggttgagctgtgtttagagtgcatcgaatgggccaaatcagagaaaagaactttc

SEQ ID NO: 41181 - DNA, 376 bp, Gossypium hirsutum
  Clone ID: LIB3196-009-P1-M1-C4
ccaaaacttaccttaatctcaatacattagctaacacatacctgtaccttttaattcaatttcacattcggtctttacttaaaattgcccattgaatcatttaaaattaaataggatactcggatagtcgcacttatagtacaatgccaacgtcccagacgtggtcttacatgtaattacatatcaatgccattgtctcagacagggtcttactcgtaaacacatatcggaatcatctatcgatgccaacgtattaaacgtggtcttacttgcacacacatataaaaattacatatcgatgccaatgtattaaacgtggtcttactcgtacacacaaaccagaatcacatatcgatgccaacatattaaacgtggt

SEQ ID NO: 41182 - DNA, 396 bp, Gossypium hirsutum
  Clone ID: LIB3196-009-P1-M1-C6
atcgcctatgatgtccttgacatgaggcgtatagttgagcccggctgcctggatgccttcccaaacctgaaggacttcatctcccgctttgagggtttgaagaagatctctgcctacatgaagtccagccgattccaccgaggtcttttgtttggaacgacagccacgtggaacagcacatagggccccgtgatgccagaagatggaagggaagagccgacccttctgcctgtgacccgggagaacagcctgactccctggacccgccttctttctttctccttctttctgctctcttctcttccccaaggcctcattggcttcctttcttctaacatcatccctccctgcatcaaggctctttaaagcttcagctccccaccgtcttccatcaca

SEQ ID NO: 41183 - DNA, 397 bp, Gossypium hirsutum
  Clone ID: LIB3196-009-P1-M1-C8
atgcttggtagcctagtacaggttgtttttttaaaaaagaaaaagcaggaaggaggagtgaattttattaacatgtttgccaaatgtattgagatttggcctctgaagaacactttttcagtgttaagttgtctttaccttaagattgagaaatactttagaatattattaattttaagtcctgtcttcacgtccttttggaaaacttgtgttaccatgggtttggaaaaaggacaacaaaaggcttttcgtgtaaagataagatctctagctgtctctaaccctgtccttttttcacagcattttttctagttttgcttcattgcttatcattaggatagggtaagttaagtttgctatgctgctagcatcctaagatgatacctttgttgaaaga

SEQ ID NO: 41184 - DNA, 372 bp, Gossypium hirsutum
  Clone ID: LIB3196-009-P1-M1-D11
caaaaatggaagatttcccttagatttatctaaggtagttgaccttttaatggaagatttcccttcttgtttaggtggttgggcatcttgctgcaaaaaattaaacataatcattggttaaacaaaataaaaaaaaattaaataaaaaatgtactcaatatttataactaaagaacaacactgtacctgtttcgaatttttgcaagaccgcttgttatggccatgttggccacattgagtatatgtcatgagtagacctttcctactcaaatgaccaggctttaattttttgggttcatctttggccatcctcctattctttttgggcctcccaggcatattcctttcaatggaggtagcacaggctgaata

SEQ ID NO: 41185 - DNA, 364 bp, Gossypium hirsutum
  Clone ID: LIB3196-009-P1-M1-D2
atagccagttctggagcttgaagtccgacggcaggatttatagcaagttgaagccaaatttagttttagatgtcaaagggggcacacagtatgatcaaaatcacattatcctcaacactgtcagcaaagagaagtttacacaagtgtgggaagccatggtcctataaacctgaacaaagaaggaagaagaatcttctggaggtccttccagtcaccttattttttaaaaaggacaatgctgatggaagatccaactggaaagtggatcaactcctccttcattgattctaaattcaaccttaaatcatgctgccatgactcagagaacttactcatcgtttcaaaagactatcatagctttaag

SEQ ID NO: 41186 - DNA, 396 bp, Gossypium hirsutum
  unsure (1)..(396): unsure at all n locations
  Clone ID: LIB3196-009-P1-M1-D5
atgaagccctcacacactgaagattttattgaggatattgtaaagctcattaatgggagatacaaagggcaatcaggaatcatatattgtttttctcagaaagactctgaacaagttacggttagtttgcagaatctgggaattcatgcaggtgcttaccatgccaatttggagccagaagataagaccacagttcatagaaaatggtcagccaatgaaattcaagtagtagtggcaactgttgcatttggtatgggaattgataagccagatgtgaggcttgtcatccatcattcaatgagtaaatccatggaaaattattaccaaaagagtggacagtcangtcgagatgacatgaaagcagactgtatttcgtactatggctatggagatata

SEQ ID NO: 41187 - DNA, 381 bp, Gossypium hirsutum
  Clone ID: LIB3196-009-P1-M1-D7
atgaaggagctcttgcaggagcagctggagcagctgcagagggagtacagcaaactgaaggccagctgtcaggagtcggccaggatcgaggacatgaggaagcggcatgttgaggtctcccaggcccccttgccccccgcccccggtgagtgagtgagcattgggcctgtgggaggaggtgggtggggagggcaggtgctgcgccgcgggaggtcacagttcgaccttcctgtcgctctccggagacttgacggcgggagctcgtataggccaccccatcggtagcccacccccttccctgaggctaagggaggcgtgccgtggtatcggcggctcctggttttacatgagtggcctgtgagaccaggcctgccattgaca

SEQ ID NO: 41188 - DNA, 373 bp, Gossypium hirsutum
  Clone ID: LIB3196-009-P1-M1-D8
atctgggagagcggtccgcggggtacgttcgtcgtattgccggagagaaccggagtcttctaggtggtgtccatcatgttctctatcaacatgttcgaccacccgaataccaacgtcttccaaaaccgcttctccacacagtaccgctgcttttctgtgtccatgctggcagggcctaatgacatgtcacatgtggagaaaggagggaagataattatgcctgcctaagacctggaccaactcaccagacttaatattacctatcccatgctgtacaaactgaccaataagaattcggaccgcatgacgcattgtggcgtgctggagtatgcggctgatgagggcatctgctaccttccacactggatgatgc

SEQ ID NO: 41189 - DNA, 382 bp, Gossypium hirsutum
  Clone ID: LIB3196-009-P1-M1-E1
atcacctttacacctgtcttcttatcctcacatctgttttcacaccttcacccctgtctttctcatgttcacacttgtcttccctgtgttcatgcctgactttctcaccattttggtttgaaggacagtcttctctggcttgtatttttgttttgtttcttttttttttccccagaaaatcagtattattttttaaataagagaaaccttcctaaaagatgataattgtgaaaacctcctttggcttgtttgctcttccagattttagtctcctttctccccatccaggaaagatggtggaagacaaaggctaaatttctccagcctcacagtggtcttcacttggtctgacttgtaccagttctagcacccactgaaaaac

SEQ ID NO: 41190 - DNA, 359 bp, Gossypium hirsutum
  Clone ID: LIB3196-009-P1-M1-E11
gaaaggttaggggcaaaacggtcatttggaccgggggtagatattaaacttgaaatatataatgtagtgtattaatgagttaaattttgttgtttagaccccgaggaacaaattccggaggtcgatcgaggtaagcgccaggtttcgaaataaccgaaacacaactctgaaaagaataccagttaagttcagataacttaaagtaaacccctaatatgcatatttgatggtaacatgtgaaaaatgtctcggatgaggttgacaaagggaattcgatggataaaccctcattgatatgtgtaaagagatcctgcgtgtgttgtagtaaggatttagcctggacaggtaatccgttgatc

SEQ ID NO: 41191 - DNA, 398 bp, Gossypium hirsutum
  Clone ID: LIB3196-009-P1-M1-E2
atggcattttgactgtccattgcagtgttctgatcttaaaattgacatccactttcctaatgtatatgagattctcttagttgaagtaggagaatcaaatggagcagttgtcctgcccccaccccatgttcttacaagcagctgtgatggagttattctgaccttgagtcactgcctcccatcatttcccagacgtttggaccttgctctccctttgagaatcatcttccacattttttctttcttctcccacctctatttgaggtagtggcatctgtgccattgggtggtttcactgctcctttacttcatttgcagtttctttcccatgatagtttttagttgggcagtcttaaaacccctctgataggaaggaaaatagatgtaatgtgagagag

SEQ ID NO: 41192 - DNA, 366 bp, Gossypium hirsutum
  Clone ID: LIB3196-009-P1-M1-E5
gttcaagtgtcgagtatgcggagaaaaaggccataacagaagaacttgtccaaggtcaatgttgagcaatgaaggaaggtcaagtagaaggcgtcaccgttgcaaagtttgtcgcaaaagtggtcataatcgtcgcacatgccctcaagtgataggggtgagagacattttgaccgctggaagtagaatatacacctgcaagttatgccgaaaggaggggcacaatgcaaggacatgccctagtagcagttaataacaaaacagtttgattttgggaggttatgtgaagtcacaaacttagtgtttatgttgtatgatggacggatggtaaatattgagaatgtagaacaagttatatatatatat

SEQ ID NO: 41193 - DNA, 363 bp, Gossypium hirsutum
  Clone ID: LIB3196-009-P1-M1-E7
atggagcttgcagtgagccaagatgggaccactgcattccagcctgggcaacaaagcgagactacgtctcaaaaaaaaaaaaaaagaaagaaaagaaagattctgaaagatggaaagaagaaggcagactacctgggaacctcaggaattaagaaatgacatgcagtgagttatttgggtttccttattatctcatgtatattctggagaggatactgaagaaagccttcaacctggaaccaccaacggatggcacaaacaaaaaatgcccctacaaaagcctatctgtttagccaacagaccaagacaaggctcacctaagaggcaagaatggcttttcagcaatatttgccctactacagc

SEQ ID NO: 41194 - DNA, 385 bp, Gossypium hirsutum
  Clone ID: LIB3196-009-P1-M1-F10
ataacgcagcggccggccatggtgcagacggaggatgagtaccagttctgttaccaggcggcactggagtacctcggaagctttgaccactatgcaacctaaagccatggtcccccccggcctgacaccaccggccccggatgcctctgcccttcccgggtggacctcctgaggcctggacccccagtgggcagggcaggaggcggcagcagctgcgtttctgcaccgtttccggggaccatcagcccctcaggccccccactggccccggccgccccagcgacctccctggcaccggccgccgccttcaaatacttggcacattcctcctttccttccaattccaaaaccagattccggggtggggggtggggggaacggtgag

SEQ ID NO: 41195 - DNA, 377 bp, Gossypium hirsutum
  Clone ID: LIB3196-009-P1-M1-F3
atgggaatttaaagaccagatggtatggttgatcagtaccctcaattatcaattaattatatattataggacatcatcctgaagactttcagcatttcctagatatgatatttcttacttggaacattgatacacctttgactttcaaatctatgacatagggacaattttatctattatgctatcttaaaattatgattttggtatttaataactaaattacttaggatgggtataccttgcaccactttgttcaattagacatgaagaagaaaacttacaacatagaaatgctctaaattttttgtgttcatttgaaaaataaaataccaactctgcatttggttaatgttcattttataaaataccttaaaaga

SEQ ID NO: 41196 - DNA, 353 bp, Gossypium hirsutum
  Clone ID: LIB3196-009-P1-M1-F4
cgatccttgagattacctaagctatgttattattcctttcgagactaataacgtctaaccctcagaggaattaatcgaaatctctttcttaattaaaacccttagggatgcacaaaatcactctatgtacttccatattaagtttcaccctaatccggtaaaatctcgtaaccctatttttaggcgatcgatcaactccgcttaattatgccaaatctactcttaggcagggtctattcctcctctacataagcacatcaaatcatgaattaataccccgaatattaactcaagcattaagaacacataattaagaacaaatcaagtatttatcatacaattcagataataat

SEQ ID NO: 41197 - DNA, 369 bp, Gossypium hirsutum
  unsure (1)..(369): unsure at all n locations
  Clone ID: LIB3196-009-P1-M1-F5
ccatgtcagcaatccggtagggggttaatggatttttaacacaattatcttaattagaggggctaaattgggagaaaaaaattagagtggcccaaatagaacaaattctattttagagggatcattggtgtagtttaccctaactttttttttgggagcaatatttatactttacgtcacttactttgaccatttttctcaaacatttattggttttttttaattataaatttacaacatatttttttcaaattgaaccacttagtaatggacaatatgtggagcaaacaactacttaaaacaaaatctttcactctcattaaattttacatttaattcttacttatttgnctntacaatttttatatt

SEQ ID NO: 41198 - DNA, 386 bp, Gossypium hirsutum
  Clone ID: LIB3196-009-P1-M1-F7
atgccccgtgctgacccgtctaacccatgtgggggtgctccactcacataggcccttggcagaaaagattgtccgttctgcccacacactgcctggatacagtctccaactctaggagatggaattggtttgctccatttagaaatagatcgaaattgggcattcagtagattctaccagtttcttcctgtgctgggaaatattaaatttaggttgtgaatgtttacttaatgataatttttagagaaggagatacagatgagtatgattggaaagttcagaaaactaaaatttgatttttacagccatccaactatagaatcattggaattcagtcatttatggataaattaaaatgaacacctggactcttgttaaaatcaaaa

SEQ ID NO: 41199 - DNA, 372 bp, Gossypium hirsutum
  Clone ID: LIB3196-009-P1-M1-F8
ataaccctgcagcaaagtgaatttctgtctgactgcaatttaaaattgaaaacttaggtagattgactcttctgcatgtttctcatagagcagagaagtgctaatcatttagccacttagtgatgtaagcaagaagcataggagataaagcccccactgaggtgcctcttgtgcctcagctgggacccaccgtgtagacacacgacatgcaagagttgcagcggctgctccaactcactgctcaccctcttctgtgagcaggaaaagaacttactgacatgcatggtttaacttcctcatcagaactctgcccttccttctgttcttttgtgctttcaaatgactaacacgaatttccagaaaattaacatt

SEQ ID NO: 41200 - DNA, 322 bp, Gossypium hirsutum
  Clone ID: LIB3196-009-P1-M1-G1
gggatcacagggcgtgcccgctgtgtgtggctggagtgccccatccctgatgcccccgttgtcaccaacgtgactgtgaaggcacgagtgtggaacagcaccttcattgaggattacagagactttgaccgagtccgggtaaatggctgggctaccctgttcctccgaaccagtatccccaccatcaacatggagaacaagaccacgtggttctccgtggacattgactcggagctggtggaggagctgccggctgagatcgagctgtggctggtgctggtggccgtgggtgcggggctgctgcttctggggctgatcattc

SEQ ID NO: 41201 - DNA, 238 bp, Gossypium hirsutum
  Clone ID: LIB3196-009-P1-M1-G11
atccagtggcttctacactgtggaagacacgcgctacgtcaccaggatgtatcgtgtgtatgggaaaaagaacatcaagttggaacctgtgcccctcaagggagcctctctggacccaaggtttggtttccttctggaccgggggctagacatctacgtgtggcggggggcccaagccacactgagcagcaccaccaaagccaggctctttgcagagaaaattaacaagaatgagcgg

SEQ ID NO: 41202 - DNA, 306 bp, Gossypium hirsutum
  Clone ID: LIB3196-009-P1-M1-G12
acgcggacgctgggttttatatttaatagggcttacattaataccctactcatcatgcaatttggttaatgacttgcttaaaggggcttgtacggactgactatagcgcttgaaaagccagcgaacgctacgcatgcctaatccaatgcctttgagctgcccactgaacaaatgtacgactgtgggactgatggtcgaattttataatttatcatgaccaactgactgaaaagccgagaaggcctccacctaacgaaataggactatacacgctgagcgatggccaaactgaatctgatggggtta

SEQ ID NO: 41203 - DNA, 378 bp, Gossypium hirsutum
  Clone ID: LIB3196-009-P1-M1-G2
cccacgcgtccgcccttattcttattctccctccttcattcttcaattaaaaatcaataaaaaagaaaaaaaatcagatttttggctttttgatgcgcctcaggatgaagggaaccccttacaaaatgaggtggagggctaaagaactctctctggctctcattattcttgtttgtacgactatttttattttgacatgggacagaagtccaacacttacttcaaccctgccatcaaaaaatcagttgcaggtctctccagatattaaaactgtaccagtagatcccaaaacacatgtgaaagaagatatttctacattgacacggagtgaaacagtaaataacaaagagggacaacatgtggataagacacgttcta

SEQ ID NO: 41204 - DNA, 376 bp, Gossypium hirsutum
  Clone ID: LIB3196-009-P1-M1-G4
gtaaaagggggagaaagactaatgattggcagccggttgactagaatgaaggagactgatgaatgatttataagaggtttaaccaaaattatagcatggtatttgttttttttctcaaagtgattgaaattcgggctgaaagtcttggtctcaaattgttatacaactacatctaatattgatatatttgaagcatgatctttagattttttattttttataattgcattaaaatattatatatttatattaaaatttatttgtgatatgtcttctttttcaagttaatcataatatatcttgtatgtatctataaatctgaatggtacatgatttttttattgtgttacttatatttattttgtaaaatataaaa

SEQ ID NO: 41205 - DNA, 247 bp, Gossypium hirsutum
  Clone ID: LIB3196-009-P1-M1-G5
tacaacgcgtgggaaaaacggttccttaacaaatggttttttttttcagaggcctaaatcaggaattttcatcttcccaaatggacattcttagatgtccatctttgagaaacattaactagccaactaacttttccttctactttgccttgcctttccccatgccggctcgcggagccaacggatcaatattcgaagatggacccattttcaacatggcattcaggcttttccatgaacttaccct

SEQ ID NO: 41206 - DNA, 387 bp, Gossypium hirsutum
  Clone ID: LIB3196-009-P1-M1-G6
gaaagtctagttgtattaaagatgttttcttgtcaaactagaaaaatgtccatatgtagcattccaataaccttttgcatttccttttagtaacaagaatttgggtagacttgattttctcctagttttttgatgtatttagaggatccttgtaagttcatatttacatagcatgtctggatatatgttggacatggtatttcaaaaacttgaagagtcatagcagcatagaattcatcttgtttctattcttgctgtgagcatctccttacctgtggaatggattatatagcctttgatgtctgctctatttcaatcttttgatcttgtgacaacattctcacagctctagtgatgaagagggtaattgggagttgacgagatctg

SEQ ID NO: 41207 - DNA, 357 bp, Gossypium hirsutum
  Clone ID: LIB3196-009-P1-M1-G7
cggacgcgtggggcgtaatttgagaagtcaaaattaatttaagaaacttttattcagttttaaattattaaaaaaaaagttatttgtcaatagaccttttaaattctgaaagagattagagaattattatacatctcattaagatatatttaagatattaataagatcatctatcaaaaaaatccaacaacctgtaaattttagcaaaccacgctaagacctatagagataaaatccaagcacacaagacattatccaaaatattacgcaaaacaaacaaccaaggcagataaactcaagtttatacgtgattgagtaggttacattatcgctcctttttttaagtttttttccccc

SEQ ID NO: 41208 - DNA, 353 bp, Gossypium hirsutum
  Clone ID: LIB3196-009-P1-M1-G8
gtgcagagagcgtttacatgagctggtgaaagaagagttagccagtgaggaggaatggaaaggtgctatggagcgtagcttcacgcgcatggataaggaagtgataaagtggaacgagagcgtggatggtgctaattgccgatgcgagttacagtcacccgagtgtgatgcggttggatctacagctgttgtcgctatcgtaacgcctgataaagttgttgttgctaactgtggtgattcgagagctgttttgtgtcgtaacggcaggcctgttgctttatcgtccgatcataagccggatcgtccggatgagctgaaccggatccaagaagcgggagggtcgggtatttttt

SEQ ID NO: 41209 - DNA, 342 bp, Gossypium hirsutum
  Clone ID: LIB3196-009-P1-M1-H11
atggtgtcttggcccaggccccacttcataaggttaagagccgagtccgtgtaaggcgggcaagcatctctgaacccagtgatacggacccggagccccgaactctgaaaccctctccagctggatggttcgtgcagcagcaccgggagctggagctcatgagcagcttccgggaacggtttggccgcaactggctgcagtacaggagtcacctggaggcctttggaaaccctttgacgggcacccccagctctgctgacctcagcacacctgtagccagcttccagggccctgacactacacccagaccttcacccctgcaagagggaggcagaggccccc

SEQ ID NO: 41210 - DNA, 405 bp, Gossypium hirsutum
  Clone ID: LIB3196-009-P1-M1-H3
aaaaaagcgggctgctaccggaccggccttcccgggatcaatttttatggccacgcccacccgtctcatgtctcgatgtatatactaatccaaaaggatatgaacgagaagtcaagcgggtataaatctcctgctcacttctctggttctctgcccagggaggggaggtgagccccgtagaggttcctgtcctcccagggagtattttccagaaaacagccttcttccggtaggggagaaccaggccctgctttaagtaatgtatacattctccaagggccgcatgattacatgaaatctcagtaaatcagatttcatgtttccaataacgttggatgcgttttatctttatttctgatgacaaaaccaaaaaaaatcctttcatgaaatgtgcacacttgaaaa

SEQ ID NO: 41211 - DNA, 383 bp, Gossypium hirsutum
  Clone ID: LIB3196-009-P1-M1-H4
aaatgcgaaccctggcttaaattattgctagaataagcttaatcaagttatcgggattccaaaatagtaaataacttgaaaaatggggctagaacggacttactattgagcttggaaagcttgaaaaccctagccatggcttcccccatgctaatttcggcctccatgaaaaagatgagtcaattttggctttattttccctttttatttcttttaattaccaaatgactaaaatgcccttaaggcctttctttaaaattttgtcctattcatgcccatttttgtccaaacgaaatataatggtctaattaccatttaaggacctcctctttaaacccccatttcaatcaagtacttatgaattagaacacatatttttgtac

SEQ ID NO: 41212 - DNA, 288 bp, Gossypium hirsutum
  Clone ID: LIB3196-009-P1-M1-H5
tcggttgtaccgaaggtatgtgtgaggagaatgtgacatttttgtgaacgccgaaccggcatctacgtgaaataaacagtgggcggtaggaaattcgtggttgtttttaggagcctgttgtgggaccttttttcgaccgatatcagttctctttgtgcacttaagttggtgacaatcctctttagggcaccgtcattaaccataaagtcctttaatggaacaagcttttcagtaccctgctattaatgcccttgcacggcccttggacatatacccatgtttttttaa

SEQ ID NO: 41213 - DNA, 194 bp, Gossypium hirsutum
  Clone ID: LIB3196-010-P1-M1-A5
gtttgaagctcatagcactattacaatgtttggcaataatgccgggtcgtcactagattttggaatatttcaaaattctctaatcaagactgcacagaaggatcactcaaaaggctggtgcttcagaaaagccttgtaactccgttaaaaataaaccggttttggcttctatttttgtcagcaagcctgagcaa

SEQ ID NO: 41214 - DNA, 400 bp, Gossypium hirsutum
  Clone ID: LIB3196-010-P1-M1-B2
atgttaaaagttcataaagaaaagttacctagatagactgatgctcgcaaacaggccgccattctctgcagcgaagagcctcataaattcccattcacaaggggctttttcatcattaggagacccaagtcctcaggaaaatccttttctggaaggatttgctccttcagaacgttttacagaaaacactaatgtaaaagacacaactgaaagaaatgcctttgaagaaaacattattatggaaaacactactatgccagaaggcaccatctgtgaaaaaacaaactacaatccttcttctgaggcagattccgatgggactgcgttcaacttagggccagctgttaaacgaactaatcagacacaatgggaatacaacaacatgggcactgacctgtac

SEQ ID NO: 41215 - DNA, 401 bp, Gossypium hirsutum
  Clone ID: LIB3196-010-P1-M1-B4
atgttttttcttagccaagtcatgcaataattgaatgtacctcaaatttttagagaggggagggtgggttagggactgatactccctaataattgggtaataattgaattgatttttaaaggcaacgtagcattctacagcagggttaaactattaccaagaacagtcaccctggttaataacaagttttactgatcagttgctgattggttggttggcgtgtgggcgtgtgggtgtgtaggtgtgtgtgggtatgggtgtgtgtgtgtatcttttcccatgagccctttttgtaatcctgtggctttttcacttacaactagcctaaccctgtaatttttctatatccaagaacacaatcacaaagtagtggttacaatactttgttgtatttggctaat

SEQ ID NO: 41216 - DNA, 430 bp, Gossypium hirsutum
  Clone ID: LIB3196-010-P1-M1-B5
ggctggctgtttccgtaccggatattcccgggatgaaattatccttacccaacttatggagtgtaaatgacggacgggatggttttatgtctttagaaatgttttgcctttttaagcctcgtgctaaaggcgtttaacgttggtgcctatctacttagggggcattctagtctttaaagttgtctgaactgtcccgacctggcgttttttgatttggggtaaacctaagggtgtttgttagtctcaaaactgtgaagagacatagcagatcagaccagactggtgaagaaaataaagggctctactttaatgtaaaccagctctacataggaaaaaaaccagcctcctcatttgctttttcaattggagtgaaacattccatattttataacaagtaaggctgccattgttaaataaatagcatttaatg

SEQ ID NO: 41217 - DNA, 457 bp, Gossypium hirsutum
  Clone ID: LIB3196-010-P1-M1-B6
gggcgcactataacacagttgcacaaaaagcaggctggccgggcccggacttcccggcatccggctccagccttctcagatccctggggagggtcacctgccaaacccagcaccaatggcaccacagccaccgggggattcgacacggagcctgacgagttctctgactataaccgactatctacagaactgccgtcctacgctagcatcgctggagagccgtaactgatgccatgagaggtgccggcccgaagccctggggcgtttgacatgagtggggtcaggggatctctggctgaggctgtgggcagccccccacctgcagccacgccaactcccacgccccccacccggaagacgccggagtcattcctggggcccaatgcagccctcgtcgacctggactcgctggtgagccggccgggccccacgccgtctggagccaaggcctccaacc

SEQ ID NO: 41218 - DNA, 383 bp, Gossypium hirsutum
  Clone ID: LIB3196-010-P1-M1-B9
catttttacgatttagtccctaagctcgtataatgaaacacatgaaatttctatcttacccaagcctagccgaacactttttttcctcttatggaagcccacattttccattattttcacagttctaccacacatttaacaacttttgcaaaaaggtccctttaggagtttttcatgaaaatcacctaggaaaagatgtttaacacacatgcaactttcatattcctctataaaccatcaaaaaacaagtaactcatgcatgggtaaatttttaaacataaatcttatcatgaaaatatgggtagaaatggagagagcaagctatcgggatctcaaaaatgcaaagaacattaaaaacggggcttgggagtacttactaataa

SEQ ID NO: 41219 - DNA, 401 bp, Gossypium hirsutum
  Clone ID: LIB3196-010-P1-M1-C1
atggccccgccatgggcctcaccgtgtccgcgctcttttcgcggatcttcgggaagaagcagatgcggattctcatggttggcttggatgcggctggcaagaccacaatcctgtacaaactgaagttgggggagattgtcaccaccatcccaaccataggcttcaatgtagaaacagtggaatataagaacatctgtttcacagtctgggacgtgggaggccaggacaagattcggcctctgtggcggcactacttccagaacactcagggcctcatctttgtggtggacagtaatgaccgggagcgggtccaagaatctgctgatgaactccagaagatgctgcaggaggacgagctgcgggatgcagtgctgctggtatttgccaacaagcaagacatg

SEQ ID NO: 41220 - DNA, 346 bp, Gossypium hirsutum
  Clone ID: LIB3196-010-P1-M1-C10
attgaaggtgcagctggagcacgtgcagactcggctgcgggagatccagccctgcctggcagagagccgggctgctcgtgagaaagagagtttcaacctcaagagggctcaggaggacatctcacggctgcggcgcaagctggaaaagcagaggaaggtggaggtctatgcggatgctgacgaaatcctccaggaggagatcaaggagtataaggcgcggttgacctgcccctgctgtaatacccgcaagaaggatgcagtccttaccaagtgctttcacgttttctgcttcgagtgcgtgcggggccgctttgaggcccgccagaggaagtgccccaagtgcaac

SEQ ID NO: 41221 - DNA, 377 bp, Gossypium hirsutum
  Clone ID: LIB3196-010-P1-M1-C4
ctctaattcatgctttttaaaggatgtcttaaaactcccaccaatatgtcgcacatcggaaggatcaacatggtaaaagatgggaagaacaatatgtttgtcagtggactcgcgcttgcgatccatgatgctagaaagttcaaccaagcacgatatcgaagaagcatagtctttagataaaatgaggattgagagatttgaggccgaaattgctcgagaatatattggtggaagtttctctccttttcctagtgtttcgttatgagggaagacattaattcctacgttttccaaataattgactaggtgattggagaagttgaggcgtgtgtcttcacctaagcttaaagaaaatttgatgctttcataaaattttg

SEQ ID NO: 41222 - DNA, 194 bp, Gossypium hirsutum
  Clone ID: LIB3196-010-P1-M1-C7
cggacgcgtgggtatttttgggcctgacgatactccttggtattgaggcacgttcaagttgactttgcagttttcagagttatcttttatatgtgctcttcatatttgatgtcttttttttatatatttgtttattttattagttttataattttattttgaggtttataattatttttttatttattattttt

SEQ ID NO: 41223 - DNA, 283 bp, Gossypium hirsutum
  Clone ID: LIB3196-010-P1-M1-C8
cggacgcgtgggtttaggtagctatgtggagccattgctcctcttcatcatctttttaattctcaccggtataaattttgagacgatgtctatttaccttaaaagggtcctgtgatggatggcttacctctactgagccatattgaaacactattttgaactactaataggaccttgcccatcttgaattaaagcttttctaaggaaacaaatttctagcccttgagtttatattaatattgacaaagaatctctcaacttttaaaattagtccttttttttt

SEQ ID NO: 41224 - DNA, 367 bp, Gossypium hirsutum
  Clone ID: LIB3196-010-P1-M1-D10
atgaaccagtgtcgctggttccgcgcgtgactaccttttttttgcaaaccagttattccagtttctggtctaaaaaactctgtggctgtacggtagccgaggaggttccagcgcggcggaagtacccagtagggaggagagagaatgtcttttcgaggcggaggtcgtggaggctttaatcgaggtggtggaggtggcggcttcaaccgaggcggcagcagcaaccacttccgaggtggaagcggcggtggaggcggcggcaatttcagaggcggcggcaggggaggatttggacgagggggtggccgcggaggctttaacaaaggccaagaccaaggacctgcagaacgtgtagtgttattaggag

SEQ ID NO: 41225 - DNA, 145 bp, Gossypium hirsutum
  Clone ID: LIB3196-010-P1-M1-D11
atgaaccacagtcgctggaaacgcgcgtgactaccttggttttgcaaaccagctattccagtttacggtctaaaaaactctgtggctgtacggaagccgaggaggttacagcgcggcggaagaacccagttgggaggagagagaa

SEQ ID NO: 41226 - DNA, 387 bp, Gossypium hirsutum
  Clone ID: LIB3196-010-P1-M1-D2
ggaaactggagctatagtacaagtttacggcattaaagcaaatactggagagaaggttgaaatttctactcccgatggtaatgaaacccaggatgcttatgaagagctgtatgttcatctatcagctgacacttttgagaaagttgatggagcggtggcgctgattgagttgctagttagttcaatatcaggaaatttaggtgctggttcagtgcctgcgatatctggtaatgatgtgaatgttctaagtcaaatccctgacacagctgtatcatgtgtgactgatgctgctttaaatcagcaagtgccacaacttacaatagcatctccacaaggtcagtttcaatatcagaattcatggttccctaccagctctatgccgctgaa

SEQ ID NO: 41227 - DNA, 163 bp, Gossypium hirsutum
  Clone ID: LIB3196-010-P1-M1-D3
tggaaatcttctatagggatagacctattttagatgatgatagtcaagagataagacttttgaaaatgctaaatttttagaaatacaataataataaacatagaaaatataatattatatagcaaggtggcttctagacttctccaactagtactagtgttgg

SEQ ID NO: 41228 - DNA, 338 bp, Gossypium hirsutum
  Clone ID: LIB3196-010-P1-M1-D9
attgtctacatcaacctcaataagctctgcctcacggtgtaccagctgcatgccctgcagcccaactccaccaagaacttccgcccagccggaggcgcggtgctgcacagccctggggccatgttgtaagtaggcaggggagaggggttcgggcatgcctaccccatccctctgcacctagagggccgggccccccctcagggaccctctcaccgcccacagcgagtggggctctcagcgcctggaggtgagccacgtgcacaaggtggagtgcgtgatcccctggctcaacgacgccctggtctacttcaccgtctccttgcagctcttgcagcagc

SEQ ID NO: 41229 - DNA, 407 bp, Gossypium hirsutum
  Clone ID: LIB3196-010-P1-M1-E1
atgttttcccaaaaaccgtgttattggaagtggttgcaatctggattcagccagattccgttacctgatgggggaaagactgggagttcacccattaagctgtcatgggtgggtccttggggaacatggagattccagtgtgcctgtatggagtggaatgaatgttgctggtgtctccctgaagactctgcacccagatttagggactgataaagataaggaacagtggaaagaggttcacaagcaggtggttgagagtgcttatgaggtgatcaaactcaaaggctacacatcctgggccattggactctctgtagcagatttggcagagagtataatgaagaatcttaggcgagtgcacccagtttccaccatgattaagggtctctatggaataaaggatgatg

SEQ ID NO: 41230 - DNA, 403 bp, Gossypium hirsutum
  Clone ID: LIB3196-010-P1-M1-E10
atcagcggcggccgtccgagcgccgagaggtgagggttcccccggcctcacctgcggaggggccgttccgggctcgaacccggcaccttccggaaaatggcggctgccaggcccatcctgggccgagtccttccaggatcctctatcctgttcctatgtgacatgcaggagaagttccgccacaacatcgcctacttcccacagatcgtctcagtggcagcccgcatgctcagggtggcccggctgctggaggtgccagtcttgctgacagaacagtacccacaaggcctgggccccacggtgcctgagctgggggctgagggccttcagccgctgaccaagacctgcttcagcatggtgcccgccctgcagcaggagctggacagccggccccagctgcgtt

SEQ ID NO: 41231 - DNA, 394 bp, Gossypium hirsutum
  Clone ID: LIB3196-010-P1-M1-E12
atgcccggcccggcccttatccctctttctactatatagatgtggtcaagattctaatctttaaaaaggacattccccccaaccaccaaaaaaaaaaacccttataattgcatgtctctgtttgctgccattcccacagtccttcccttcagtctagcttttaggaaaagtagtctgttctttactttctctcttttcttgactctgttcacccttccacgcactgcattctgatggtggcgggttttattctgtgtcctgactgtgccactgaagctgtgctcactgaggccaccctgacctctttgacatatgtaatgggcagtgcagcttttgtcttatgagtcctctgttacccttcacgtagctgcttttcttgttgaagcttcttgat

SEQ ID NO: 41232 - DNA, 311 bp, Gossypium hirsutum
  Clone ID: LIB3196-010-P1-M1-E2
caagagggaacgcagagcgcccgggacccggccggacaacagggagggataccttataaccgtgttattggaagtggtcgcaatcgggattcagccagatttcgttacctgatgggggaaagactgggagttcatccattaagctgtcatgggtgggttcttgtcgaacatggagattccagtgcgcctgtaatgagtgaaatgaatgtagctgccgtattctagatgactttgaatccataattgattgactgtattatatgatgaacagtggatagatggttatacgcatgtgattttgagtgcttaat

SEQ ID NO: 41233 - DNA, 364 bp, Gossypium hirsutum
  Clone ID: LIB3196-010-P1-M1-E6
cggacgcgtgggtgtacaaaaagctgtatcaaagcttattcgatgcacatgttgtttctcctttacatgtgaagccttcacagcctgcgtatcccaaatagtatgacgcaagtgcacaatgcgattatcatgcaggaattacgggacactcaatagagaatttcattaccttcaaaaagctagttgaaaaattcatcatcatgggtattgacaagttggatggctcatttaatgcagaaaattcgctacccaatcatgattgacaatagggtgaatgcaatgtattaggagatgttggaagttgtcacatcaatgacatatacggagacacaaatgaaaaggggaccttttgatatctgccctt

SEQ ID NO: 41234 - DNA, 389 bp, Gossypium hirsutum
  unsure (1)..(389): unsure at all n locations
  Clone ID: LIB3196-010-P1-M1-E7
atgcggctcagtatactccagaaccgcctcctattcaacagcatttcaccaatgtggaggcctcagaaagtgaggaagttaggcgatttcggcaacaatttacacagctggctggaccagatatggaggtgggtgccactgacctgatgaatattctcaacaaagtcctttctaagcacaaggatctgaagaccgacggttttagtcttgacacctgccggagcattgtatctgtcatggacagtgacacgactgggaagctgggctttgaagaatttaaatatctatggaacaacatcaagaaatggcagtgtgtttataagcagtatgacagggaccattctgggtgtcttggaagttctcagctgcggngagctctgcaggctgca

SEQ ID NO: 41235 - DNA, 400 bp, Gossypium hirsutum
  Clone ID: LIB3196-010-P1-M1-E8
atcttttccattcttccaggtctccagtatctattattctactctgtatgtctatgtttacacactgttatctcccatcttaaaaccttttaaaatatgaacttacttaccttattttctcctccccccttaattattgtatcactttgttaaaataacttctgtaacaatattttacttattatttaagaaatgatgattcattatatcataagcaaaaaagtgtaaagtctggagttcatttatgactttgtgacatttgctgtcaaattataatgctgaatattatgtctttttattttagataggttaatccatttaaaaagtcatgccctggaagtggagaggatattctagagatatttgctaacatataagatcaatatccggtgtcagaaag

SEQ ID NO: 41236 - DNA, 289 bp, Gossypium hirsutum
  Clone ID: LIB3196-010-P1-M1-F1
gctcttcctcctcgcgaaacgacgcggaggatgctgtcgcaaatgacacgtggcggggtgttttgataaagcatgacactcattccagcacgagtcttgacgattgaagtgcccttaagcttcttcacgtctgactatgactgcccacccacacagaacatatcctgtgctccagctatgtataccattacctgtgctggttcgacctactgataaagggcgtagcacttgacgttcaaaacccgatcaatgacctttgccagaacacaattggggccgttacccaatt

SEQ ID NO: 41237 - DNA, 354 bp, Gossypium hirsutum
  Clone ID: LIB3196-010-P1-M1-F5
atgtttgttcatctgtagctctaaaagatcctttttatccttttaaaattcagtcctaagaatgagtgcttgtcccctaacagtgtttaatggcaaggcagccttgtccgaaggacacctccagcctaaaggtgagcgggatctgcatactagaattctagtgctgctgaatcaatgggaaatactactcctgtaagttttacctccctgcaaccaactacaaccaagctctctgcatctacttccacgtacgggattcaagagagtaatgggtttcatatttcttatcaccacagtaagttcccactaggcaaaatgagagggcaatgtttccttattggtacttattactgc

SEQ ID NO: 41238 - DNA, 384 bp, Gossypium hirsutum
  Clone ID: LIB3196-010-P1-M1-F8
gttacggccgaattcggcgtgtcacattgaagtgtttttcgaaaaccatgttttcattaaaaacccttcttgatgtaaaactcattggagcgttattgtaaaactcatgttttaattaaaaatctttgagaagaatattttcgttatagattaaagtgaatggaagctgtgcaccaagtaggaagccaaaaaagaagaggtgagtctattggactgcttaagtaccaagctcttcatggatccaatcctagacatgcacacatccattgccacacttaaagcatattacttgtccatgaacaacaaattaagtttaagtccatttaaaatatttatttcctttgaaaatatttacgttgcggaagctttgctcggtaatcgtga

SEQ ID NO: 41239 - DNA, 380 bp, Gossypium hirsutum
  unsure (1)..(380): unsure at all n locations
  Clone ID: LIB3196-010-P1-M1-G10
atgtgcggactccgctcctccgcggcccgcccgcccgccggtctagccgccgcctccctcgctccgtgaacgcgccaggcgagggccagcggccggggcgacgcggcgcggagagggcgggcgggcgggctgtgggagcgccggtctctatatggcggcggctctgtcgggcctggctgtccggctctcgcgctcggccgccgcccgctcctatggggtcttctgcaaggggctgactcgcacgctgctcatcttcttcgacctggcgtggcggctgcgcatcaacttcccctacctctacatcgtggcttccatgatgctcaacgtccgcctgcaggttcatatngagatccattgaaggccctcccagagtgatgaag

SEQ ID NO: 41240 - DNA, 378 bp, Gossypium hirsutum
  Clone ID: LIB3196-010-P1-M1-G2
gcgaacgagagtttctcatccgcggttcctacatggaatttgacattgaagaaaataaccaccttgttgctgaagagagtgcttgccagcatattcatcatacaaaagaggccgacttttacactggccaaattccatagacaaatgccagcaagcctgcactatttatgagcctgtttatcttctattggtgacaaacatcaaacttcgtttgagactgagactacacatattctttttcttcgtattacccatccagacctcatatagttccaataatgagcatataatcattttctagcttaatgccaaattgatggcacctagagtcattcatcacacacacaaaaaaaacataatgattacacgatcaaagct

SEQ ID NO: 41241 - DNA, 346 bp, Gossypium hirsutum
  Clone ID: LIB3196-010-P1-M1-G5
atgctaatttgtggcttttacgaccctaccccaccccctattttcaggggtttagactacatttgaaatccaaacttggagtatataacttcttatcgagcccaaatgctttttttttttttttttttttttgcttctctgccccttgtccatttcttttgtatttgttttctgtgagagcgctgaaatggcggccctggaatctagaatttggctctccactgagcaccttatcttgccaccttagccttaagaatgaatatgaagaaaaatacacagccatctctgtccagggcagtaagaagggggctgcaaggaaggggagattggggataaggaaaggaac

SEQ ID NO: 41242 - DNA, 386 bp, Gossypium hirsutum
  Clone ID: LIB3196-010-P1-M1-G8
atcgagagtttctcatccgagtttcctacatggaaatttacaatgaagaaattaacgacctttttgctgtagagaatcagaaattgcagattcatgagaatttagagcgtgggattttcgttgcgggtcttagggaggaaattgtgaacaatgctgaacaagtgatgaagctcctggagtctggagaagttaataggcattttggtgagacaaatatgaatgcacgaagtagtaggtctcatacaatattcagagtggtgatagaaagcaagggaaaggatacgggctcttttggtgattattcaatcagtgatgccatacgcgtctcagttttgaatttggttgatttggctggttctgagcggattgctaagactggaactggt

SEQ ID NO: 41243 - DNA, 241 bp, Gossypium hirsutum
  Clone ID: LIB3196-010-P1-M1-H1
acggttctatcacttagaattacactgccaattttgatctttctaccagaagaagtgttaggctaataaatcatcatatctatctcttcaatttgttcctgcaatgcataatgacattcatggatattacagggattaatgactaatgtgcatgactagcgctaggtggacatctgctaatgatgtttacattacactgctagacgaaccacattagctacaagtgcaaaatctgcgtaaa

SEQ ID NO: 41244 - DNA, 388 bp, Gossypium hirsutum
  Clone ID: LIB3196-010-P1-M1-H11
gcgatgaatagtagatgacataaattaactgtaattgaactgtaaactgcggtaatgctccataaccctggtctagcgacggatacagattaggggtattacatttattggtatcagatctaccgtttagctgattctcagactaacgtaacaagtatagagtgatatcttctgaccattataaacatgttttccatagagtaatgtcatacaaccaagctagacttgaattaaaggagctgagagcattgatcaagctttagttcaaagaactgcatgtagtattactagaaggctttcgattgataaaattcaaaaatataaggtcgaagaatttaggggtactaccaaaactgaactgggaagagctgtattttggctggaaaat

SEQ ID NO: 41245 - DNA, 134 bp, Gossypium hirsutum
  Clone ID: LIB3196-010-P1-M1-H2
acgtggctcgtcccaaacgttcagttcttgcaatcaattaagggaagccgtctattatcctattacaaccagacttatggtgctaataaatgattttttcgttgccatgaattcgcctagcataccaatcttta

SEQ ID NO: 41246 - DNA, 262 bp, Gossypium hirsutum
  Clone ID: LIB3196-010-P1-M1-H7
gaggatggccatatgatgcatttcacctgaatactgacgttgtaaagtgggcgggaaaaaaagagagctactgtctaatcatcagatggtttacgccctgcaattatggatcctgatgacctaacgatttcaaaagttttcatcgtcatgcatactggaaaggaaaaaacaattgagtttgtaagcagattgcctaacgcttttactgtgattactatttacgctagagatcacgaccctttacatttgaatagaccttatg

SEQ ID NO: 41247 - DNA, 384 bp, Gossypium hirsutum
  Clone ID: LIB3196-011-P1-M1-A10
atggagattgacaatgccccggaggagcgagctcggggtatcaccatcaatgcggcccatgtggagtatagcactgccgcccgccactacgcccacacagactgcccgggtcatgcagattatgttaagaatatgatcacaggcactgcacccctcgacggctgcatcctggttgtagcagccaatgatggccccatgccccagacccgagagcacttattactggccagacagattggggtggagcatgtggtggtgtatgtgaacaaagctgacgctgtccaagactctgagatggtggagctggtggagctggagatccgggagctgctcaccgagtttggctataaaggggaggagaccccagtcattgtaggctctgct

SEQ ID NO: 41248 - DNA, 320 bp, Gossypium hirsutum
  Clone ID: LIB3196-011-P1-M1-A12
atctccggatggctcacttcagaccagaagcacagaacgggctgtttctggcgcttgggcattgggaggtggggagctggtgggcaatgggcttgccattccctggcactggacattcaggcctgcagaacaggcaggtgacgaaggcaggggagagacgccctttctcctcccggcgtgcctgtgggtgaggcctccagagaggacgtggagacgaggtaaagaggatggggacataatctgtcaatttccttagaccagaagcgggtgggggctggacagaaagggatgaaaagggaagtggaagccatgagcctcac

SEQ ID NO: 41249 - DNA, 370 bp, Gossypium hirsutum
  Clone ID: LIB3196-011-P1-M1-A5
ccggaactgaatataaaaggacaatgggagacctttttctttccattttttgagggtaaggaggctagaccctcaaaacatgggaaacgagggctaaaaagccctattttgcacgactccgaccaccgtctgtagtggagccacggtggagatgcagtggattgacggtgggctccaaagttgggttgaaaccctagcagagaaagggagtgttttaattttttttaaaacaaaacattagaatgagttttttttttaaaaaatttgcttttataaagggtatgaaacggcgtcgtttatggcctatagtggcctcaaaacgacgtcgtatagggacacccacacgcgacccaacccattccatggggat

SEQ ID NO: 41250 - DNA, 376 bp, Gossypium hirsutum
  Clone ID: LIB3196-011-P1-M1-A9
catacatggaaccttatacatgatcgttctgataattcgttctgcaacgctgttttgctgtgaagtatgacgaactgtaaagtgtattatgaccccttctaacttgtacaatctattaaactcattataacagaattctaagccattgtctgtgcggaggtattttatctggtttcccatctgtttttcaatcataattttacaagacttaaatgcggaaaacacatcatttttctgcttcaggaagaacgcccaaacttttgtagaaaaattattaataaaagttgcatataattagctccacctttcgaaggcactctggatggccctcacagatcagaatgaatatactccaacgtttccttccgggtatgga

SEQ ID NO: 41251 - DNA, 385 bp, Gossypium hirsutum
  Clone ID: LIB3196-011-P1-M1-B10
atggagctgcggctgctcaagcacctgaagcacgagaacgtcatcgggcttctggacgtcttcacgccggccacgtccatcgaggacttcagcgaagtgtacttggtgaccaccctcatgggtgccgacctgaacaacatcgtcaagtgccaggcgctgagcgacgagcacgttcagttcctggtttaccaactgctgcgcgggctaaagtacatccactcggccgggatcatccaccgggacctgaagcccagcaacgtggctgtgaacgaggactgtgagctcaagatcctggacttcgggctggcgcgccaggcagatgaggagatgaccggctacgtggccacgcgctggtaccgggcacctgagataatgctaaactggg

SEQ ID NO: 41252 - DNA, 352 bp, Gossypium hirsutum
  Clone ID: LIB3196-011-P1-M1-B11
cccacgcgtccgaaaacttgtcagaagaaaataaatgaagagttagaaaagaaaagaaaattttaaattgcaataaaagtaaaatggctaaagtaataaaatcgagtgttcctaatatcttagttcctcagcaacggcgccaaaaacttgatacgtgatattcgtgacaagttttaaatatttataatgaatcattcttaaaactaactattatcacgatgaaggcaagtgtacctatcgaacagtagtatagatttagcaagaccgaattatcgaacccaaaggaactaaaagaactaggatcaactttcttttattatctagcctaaaaaaataaatggggtttgtttat

SEQ ID NO: 41253 - DNA, 316 bp, Gossypium hirsutum
  Clone ID: LIB3196-011-P1-M1-B12
attattaccgatgccgaaagctatcacatctgttgatgccatcatatgaaacagaagcaactatgtccattacaaagaatacttcttgatcaaactagttttttaaacatacatatcacatagtatccaccatgactagacatgcacagaagctaatgaattgcttatcatacccctactacaacaaagacaataatgaattttaacaccaaagtatgttaacattgcctatggcatctattggatgacatatcaagattgacgaccttacgctctgtaatcctacccaaacggacattaatgccaatatcgcatg

SEQ ID NO: 41254 - DNA, 231 bp, Gossypium hirsutum
  Clone ID: LIB3196-011-P1-M1-B2
atcaggaacacagtccagcaaacagcagcacgcagttaaaaggaagactcataggagacagttgaagaaggaaaggggcgttggacctaatcccaaatttggccatggaaacctggtttttcctggttgtaaacctggggcttctttttttttacgggacccgttaatttggactttttaaaaaaaaaggaattccagggcccaacacttttgcttttttgggaaaatttt

SEQ ID NO: 41255 - DNA, 370 bp, Gossypium hirsutum
  Clone ID: LIB3196-011-P1-M1-B3
cggacccgtgggttagccgccaaattggagggatggggttttaatctaaaattattaaactaatttaactaaaaccgtaccaaaaggggaaaggggaaaatattcgaggatacccaatgggatagacattgccggggaaggaataaggagacggtaattcctagcacttttagtcctgggggatccgtattctttactcaccatagctatactatggttcgataggtgcacttgcctttgtggtatttatagttagtttaatgaccataaagttttgggcgctgttgccggggattaaaatattatgaacactttatttttattaatataggcatttttttattatttttatattttttttagtttaaat

SEQ ID NO: 41256 - DNA, 382 bp, Gossypium hirsutum
  Clone ID: LIB3196-011-P1-M1-B7
atctggaactcagaccccagggcagttgagggttttttaggcggcttccccactctgtgttttggccactcacacctcttttctcctccctgtttctccctgtccatctgtccccacgtccaccatgcagggtttccaggcctgaggtgcccgccttggccccaggagaatgaaccagccgcaaaggatggcgcctgtgggcacagacaaggagctcagtgacctcctggacttcagcatgatgttcccgctgcctgtcaccaacgggaagggccggcccgcctccttggccggggcgcagttcggaggttcaggttttgaggaccgccccagctcaggttcctggggcagcggagaccagaacagctcctcctttgacccc

SEQ ID NO: 41257 - DNA, 165 bp, Gossypium hirsutum
  Clone ID: LIB3196-011-P1-M1-B8
ggaacctaaccttcgggacgggtgaggaaaaaggagattacttgggtaaaattttttaacaaaaacgggaatagtttgggtaactggtaactttggatgctgaaggttcacgttttagggcaaatagttcacgataacctacatattgtgacctttatttttgtt

SEQ ID NO: 41258 - DNA, 355 bp, Gossypium hirsutum
  Clone ID: LIB3196-011-P1-M1-C10
ctgctctcatgctttgttatgcagataatggactttttacccaggctgaggcaatatgggaggaaatgctaaatatatcatcttttatgcctgctattcctctggtttcaaaatttttggatgcttacggaaatatggggcaatttcaccgagtacagaaaattttggatcatgtaattcttgaaaaggttaacttggtacccccaagtgtacccagtggctatctcttgctttggaaagcatgggcaggttgatctaatggagaatacattgaaggagatggtttcaaagggcttgtccatagattctgccactggaaatgcttttgttagatattataacattttttgtttct

SEQ ID NO: 41259 - DNA, 125 bp, Gossypium hirsutum
  Clone ID: LIB3196-011-P1-M1-C2
atcgggcacatgcggacaagcacgcaggttaacggagtgggttgacttagggttgaatgaaaacccagttaagcttgcctttatccccacttgggaaaattattgaaaaggtgtatcaaatgttg

SEQ ID NO: 41260 - DNA, 294 bp, Gossypium hirsutum
  Clone ID: LIB3196-011-P1-M1-C4
gttattaccgagtccgaaaggtatcacatctgttgatggcatcatatgatacagaagcgactatttccattacagagaatacttcttgatctaactagttatttaaacatacatatcacatagtacgaccatgactagacatgcaaagagctaatgaattgcatacatacccctactaaaaaaaagacaataatgaattttaagaccaaagtatgttaacattgcctatgccatctattggatgacatatcaagattttcgacctaacgctctgaaaccctacccaaccggaca

SEQ ID NO: 41261 - DNA, 244 bp, Gossypium hirsutum
  Clone ID: LIB3196-011-P1-M1-C6
ttttgtatcaaggttgccattggttctgagcatgaaagatgggatctggcatgttgttgatagattcacaatgttgggtcaatttattcccgtacgtatagataattaacttgatatgttaaacgaaatatatgatattcatattgtaaagttaccacggggtacctacttttattgggtaggatagagatcctagatttacattacaagtttagaagattttgtatgtaacatagaactcttt

SEQ ID NO: 41262 - DNA, 380 bp, Gossypium hirsutum
  Clone ID: LIB3196-011-P1-M1-C7
aacgcgacactaaagtaacaagagggaacgcaaaagcacccggagacccggcccaaaaacccggggtaaagacaaccgaacggcaaaattaaaatcccgggggcccaaggtaaaaaagggatccaaataatggaaacccagggaacacaaagggggaataaatgaacacggggcctccaaagtggaaaaaaaaaaaggggtaaaggggtgaaaaacaacacaaagaggacgcaaggcacaccactaagggggggggaacaggaaaagccaaacccccactaatagaaaatacccctacacagtgcacccccgaacaaaaataaaatggcaaaaaaaaaaaaaaagggggggacgagctcaaagaaaccccccgagggggg

SEQ ID NO: 41263 - DNA, 383 bp, Gossypium hirsutum
  Clone ID: LIB3196-011-P1-M1-D12
atgccagtgaattgtacacctaaaaatgggtaaagtggtaaatttcattacaagtttttcaccacaataataaaataataataccagaagctgaagagtaatcaggacctcagtattactcatagccatgttgtatctaatattgggcagagcagaagcagaaaaaggaagaagttggagatttagaaactagctcaaaagaaaaaaaagtatagatttttatttaactgttttagtaaaagtttagtttttactttttttctcagttatcaggaaacacatgttttaaatttaaaagatgggagggaaactacctattactactatcacctaatgtttatcttaaaaaatttgtcacctactgatatggtttggatttgtgt

SEQ ID NO: 41264 - DNA, 388 bp, Gossypium hirsutum
  Clone ID: LIB3196-011-P1-M1-D3
atgtttttagcatttgcttttatttttttactttgatgccttttcagattggcatgtctctaaagtatttttcttcctgattaaaaatgtgtgtgtatgtgtgtgtgtatatgtatatatttttttaatcacattaactttaccaagtgaaaccaagccatactgtgtttgagccaattaagaaaattgccatttttaaagtgtagcatttcagggtaaagatccataaaatgacttgatgtattctagactactgaaagaaaaccacttcaaagattttgttgaaagttttagtgttgtctgaaaagcaagagggaaggtgattggtagtgagctaaaagaaaaagagagaaaaagagagtagttttgtcttcaggtaaaatgtctg

SEQ ID NO: 41265 - DNA, 312 bp, Gossypium hirsutum
  Clone ID: LIB3196-011-P1-M1-D4
cccacgcgtccgttaatactcgaaaaacatcccaatattgggatatgttacgtaagtgttgaatttaatcgagcccttacaaataaatattcgctcagttgatgaacgagctaccggccttcggctaagttggtcttttgtgtatgtacataagggttaacgttgtgaagtaagtttgatgtcggaaaattgtgtattatgaaatattccgtgtagctaaatgtgtgctattctttcgttatgctggaatgtctgctcaaacttactaacataaattgttacttcgtccattgctccctgtttatagatttt

SEQ ID NO: 41266 - DNA, 207 bp, Gossypium hirsutum
  Clone ID: LIB3196-011-P1-M1-D6
cccacgcgtacaattggactgggaaaacaaatcaattttgggatatggtacgtaagtgtagaattaaattgacccctgacaaataagaattcgctcagcagatgaacgagatacacgtcttttgttaaattggactttacatgtatgtacataaaggttaacgacgagaagtaagcttgattaagaaaaatagagtatgatgaaaat

SEQ ID NO: 41267 - DNA, 268 bp, Gossypium hirsutum
  Clone ID: LIB3196-011-P1-M1-D8
atggccttcattgctgcctatgggtgcggggcagagtggcaaagtgatggcggagaggcacagggcaccatgggggcccaattcctacttcggggatctctgggatagagccgagggtcccctttgtgggggtagatcactagggttaggcgttcctactgtctgtgcggacctgagtcctggacatgcccaagtgcctcaagtacggatgctaggacggtctcgatcgctctaagatgtcatacatttctggaactggacaggtgca

SEQ ID NO: 41268 - DNA, 357 bp, Gossypium hirsutum
  Clone ID: LIB3196-011-P1-M1-D9
gtctatgaccatgcatgtctgcctacgacgaggggtaggacctttgaaggagcatgtatgtctccactcgaagaacgggcctgcgcatgagcttacagcgacgctcataggtgtctgtccaactgatgccatatgcgctgatgtggacgaaacaaatgagccgatgcgagcatttgcatactgtacattatatcatcgagaggaattgcaacacatgactttgataaggcctgaactatcacaagctggatacacattctagcgggtgccgtactcatggctgttaaagagctagactacacatacatggatggtgctgagaatgtgcacgcgaccgaccttattgacataaacagc

SEQ ID NO: 41269 - DNA, 370 bp, Gossypium hirsutum
  Clone ID: LIB3196-011-P1-M1-E10
attgagtcgaatcgaattttactcaccttaacgaaagctgtggtaatgagaacttgttagctaagaaggaaaaaaggaggccaagtctaaaatgcagacaaaatccaatgcaaaaatacagacaaaatccaatgcaaaaatattgacaatgacttcacgttttatttccgcaaggagttggaactctgctgaccataaatgagaaatgccatatttatataatcatatatactaattatagaagtattgattaagttccgccgtgttaaaaacacattaatacttgaataatttatcttactatttattgttttgaattaagtgaaattaaaatcaatcaaattaattgctttcgttatttcattaaatg

SEQ ID NO: 41270 - DNA, 367 bp, Gossypium hirsutum
  Clone ID: LIB3196-011-P1-M1-E11
aaacacctccttccacccaccttttcaaaatatcagtttgtttctttgattccactcccttgtattaaccattttgtttgaaatttagtaaaattgtttgtttgaaattaattaataatatttttatttaaatatatactagcttttaaggtaataataatactaatcttcttcttcttaaaaacagtggataaggtaagaaagtctaattttgttttgtttgtttttaaatttgaggtggttttctttcagttattaaaccctaaacagaaccgaacatgaaacagaaagaatcagcagcagcctctggttttagttttatcatacttatctctctctctaaaacagtctcttctcttcgtctttt

SEQ ID NO: 41271 - DNA, 371 bp, Gossypium hirsutum
  Clone ID: LIB3196-011-P1-M1-E3
aaaaaatttcattttttttcctttctctttataagctatcattctctctctctctctctctctctctcattacgagaaggggtttctctttcaagaattcatgtcggaaaagggtcggcctttgccaaaatttggtgaatgggatgtcaatgatcctgcatcagctgagggatttactgtgatctttaacaaggcgagggacgagaagaaaacaggtggcaaacccgaatcaccatcaggaggtgatcctcatcttaagcctggagcggatcccagcaaaacccagcctaaaaaatggctttgctgcatgcacgccccgcctgcggaatcttgaagtgatcctgcccgtataagagcttttccacaagtat

SEQ ID NO: 41272 - DNA, 362 bp, Gossypium hirsutum
  Clone ID: LIB3196-011-P1-M1-E8
cgaagactacattcagaacgagatatggtcactatgaatacttagctatgccttttggacttacgaatgcacgtgctacctttatggacttaatgaaccaaatttttagactgtacctagatcaatttgttgtagtgttcatagatgatattttgatatattcacgagatgaaactgagcatgccgagcatttgagaagtgtattacagattctacgtgataagcagttatatgcaaagtttagtaaatgtgaattctggttgcgcgaggttggttttttggggcatattgtgtcagcatcgggtattcgagttgatctaagcaagatttcagctattctggattggaagcctccgagaaat

SEQ ID NO: 41273 - DNA, 364 bp, Gossypium hirsutum
  Clone ID: LIB3196-011-P1-M1-E9
cttcctggtttcaagcctgcaaaacatatggtgttttctggtctctatcctgcagatggatccgattttgatgcgcttaaccatgctatagagagactaacatgcaatgatgccagtgtttctattactaaggagagtagcacagcacttggactgggttttaggtgtgggtttttaggcttacttcacatggatgtttttcatcaaagacttgaacaggagcatgaagctcatgtcatttccactgttccaactgttccttatatttttgagtattctgatggaagtaaggtagaagttcagaatcctgctgcattgtcctcagatcccaagaaacgagttacagcttgttgggaacctactg

SEQ ID NO: 41274 - DNA, 448 bp, Gossypium hirsutum
  Clone ID: LIB3196-011-P1-M1-F1
cgacactatagaacacgtttgtacaaaaaagcacgactgcgtaccggagccgtttggcacagggaagcgggtatctacaatgaccctcttctttctgtttagctctgcttattccaggggcttggttcgacgagaagcatataagagtgagattgctcatcggcacaatgatttgggagaagaacatttcataggcctggtgctggttgccttttctcaatatctccagcagtgtccatttgaggatcatgtgaaactagccaaggaagtgactgagtttgcaaaagcctgtgctgatgaagagtcaggggccaactgtgacaaatccattcacaccctgttcggtgacaagctgtgcacgacggactccctccgtgacacgaacagggacatggccgactgctgtgagaagccagagcccgacaggaacgagtgctttctgatgcac

SEQ ID NO: 41275 - DNA, 319 bp, Gossypium hirsutum
  Clone ID: LIB3196-011-P1-M1-F2
atgtccaccctgtcccatgacttgattacttttgcacattccctggccacttctccccagggctgcctgctctgtgggccccacagccctgctcatccctcacgcccttcaatgctgcaggatggactggcccctgacctagggactctccaaatgggacacaggagaaaagctggtctagattgtttgctgatccccaacctgcacggggcattcctgctcctctctcaggccaccacagagggcaggggatggttagccagctgccccagcacccacaccctaactcaaaataaatgttaaataagtgcgatcacac

SEQ ID NO: 41276 - DNA, 265 bp, Gossypium hirsutum
  Clone ID: LIB3196-011-P1-M1-F6
aagaagcccaccatcactttcagggaaatccaaaacggttgttaaattggtttttcttgaaaacttggccaaaccccccgtttttaagggccccaaacccgggcccaatttaattagttttggatttggaggaatttaagggtaagggtttccccttcatttttgcaaccgaagtttgaagaccgtgaagacctggggtaattattgatttgaaaaggaagaacctttttttttttggaatatataaaatgcttatggttggctt

SEQ ID NO: 41277 - DNA, 281 bp, Gossypium hirsutum
  Clone ID: LIB3196-011-P1-M1-F7
atggatttgtgtataccactcttattaccgtcgagagagctgatctacttctctgcatgttctatcgaaggtcattggacggaggacggcttccactaccttacgatactctgtttctcactgacatgtacattacacactatggcagcgtgttaaaaccccatatggaggtcagagagaaaatatacatggatttgatcattgaactacgatccaagcttgagacaatgagagttgcggcgacattccagaaaatatgcatggactagatgaatgaactt

SEQ ID NO: 41278 - DNA, 217 bp, Gossypium hirsutum
  Clone ID: LIB3196-011-P1-M1-F8
atggatttgggtattccactattattacagtcgaaaaaaatgatctactgaagtgatgagttatttagcaatatatgagaaggtttcaactactttaaacccttctaataaatgaattcacatatgcatcgttttaatacatattgggtagctaaaacacattttttttattaacaaaatccaatttctaaaggggagtcttttacatttctgaaaa

SEQ ID NO: 41279 - DNA, 369 bp, Gossypium hirsutum
  Clone ID: LIB3196-011-P1-M1-G11
gttcaatattaattcgacatggaaatgagaaagtatgtaagtttgtatgtaaataatacattatctttattatgtttttgtatttcagcatattttatgtattgtagctgatttttgaatcataattgactattggaagtatggaatcaagtattagaaagagagagaaatcccggttaaaccttcagaaagattggatgatacagatggtatgtagctaggtcacatgtatggtgctgagtgcacatcatgtgtacaagagagctacgggatatatgtagctgggtcgcatgcgtggttccaggtgaaggacaccatgtagacaagagagctacgagataaactggctaggtcacatgggtggtacta

SEQ ID NO: 41280 - DNA, 264 bp, Gossypium hirsutum
  Clone ID: LIB3196-011-P1-M1-G12
cccacgcgttcgcattgttgaatctcacctgcaaaatgcaaattgctgtgtgtgatttaaaacatggatggcacaataaacttaaagtcctaaagcggaaggagataaaattttagagaagagaatccaaggccattttgtttctccagtaaaatttttgtgttatataaactgaaaactcacggtctctaattgcttgtcgcttgctacatgaaaagctgtcaataaatggatccatcaattttcataacgttcttgcgccaa

SEQ ID NO: 41281 - DNA, 241 bp, Gossypium hirsutum
  Clone ID: LIB3196-011-P1-M1-G3
ctagagggaaagctggaacgcctggaggcaccggcccgaaatccggggtgcgacacacacgtttgaatacgtgtgctttgaggaccagacataccgactgtatgctgaggatggaggctttgagctataattttaccattggaactttcttctatgggaccaagatacttgatggttaatcaaatgctataccccaaagaaacaaaaattataataaaagctgctgtctttatgctaacgg

SEQ ID NO: 41282 - DNA, 332 bp, Gossypium hirsutum
  Clone ID: LIB3196-011-P1-M1-G6
atcctgcattaatcagccccagttccgggctgtcttgggggaagtgaagctgtgtgagaagatggcccagtttgatgctaaaaagtttgcagagacccagcctaaaaaagatacaccacggaaagagaagggttcacgggaagagaagcagaagccccaggctgagcggaaggaggagaaaaaggcggctgcccctgctcctgaggaggagatggatgaatgtgagcaggcgctggctgctgagcccaaagccaaggaccccttcgctcacttgcccaagagtacctttgtgttggatgaatttaagcgcaagtactccaatgaggacacac

SEQ ID NO: 41283 - DNA, 308 bp, Gossypium hirsutum
  Clone ID: LIB3196-011-P1-M1-G9
cccacgcgaggaacttctatccacactgaccctttaggtcctaaccctaatatcctgaattgaacccatgccatgtttgtcggacggaacttggaatccccccaaacagttgtaatgttggcatggataacctgctttgagaccaaaaactcccccccctggcctcggacaatcatacccaaaagggatcctgcattttgctgatcaaagggcgcatcaaaatacactgagattttcgcacatttctcaacagttcgcaagacaccatttcctgtcaaatgatcccaataccgtatccaaaaaaataa

SEQ ID NO: 41284 - DNA, 365 bp, Gossypium hirsutum
  unsure (1)..(365): unsure at all n locations
  Clone ID: LIB3196-011-P1-M1-H12
caatctttgtaccatcaactgagggtcaatgagactgatgtttacaagacagtgtttaggactcgttatagtcattacgagttcctagtgatgtcgtttggactgacgaatgcaccaacgacttttatggatttgatgaaccgagtgttctagccctacttggatcagttcatagtggtgtttatagatgaaattctagtgtattcgagaactaatgatgaacatgatgcacatctccaagtggttctgcaacttctgaaagaaaaaaactgtatgctaattcagcgagtgtgaattttggttacaagaggtaactattctgngtcatgtggtatctgctgagggaaattaggttgatcatcgaa

SEQ ID NO: 41285 - DNA, 297 bp, Gossypium hirsutum
  Clone ID: LIB3196-011-P1-M1-H2
atttttaaaaaattttacaaacggaaaccctaattttaatagtggtaattcctaaaatttttccaaatcgcttatttgaagaaaataaaattttttgaaatttgaattgaatcccccaaaaaaaatatttgaaattaaaaaaaatactaaaagtgcgaaaacttttgtcgaaaactataaaatatacacccccctggttgaattataaaaacttaatttaaatttgttgaactatataccacaatagtgtaaaaaacttttcaaaaataatactctaaaaataattttttttatttt

SEQ ID NO: 41286 - DNA, 301 bp, Gossypium hirsutum
  Clone ID: LIB3196-011-P1-M1-H5
cccagacgttcgcttttgagatggtagaaacgactatgcttcttgaagccatgcaccctacgacagcattagttgatcttaacaatgatatggaatacaatccattggctatgcatattctctaagggaaggacctggctgcatcttaaaatgcgggatttgcttgtatgacataaccagctgctgataggacttgcggatgcatagaaggaaactgctacaacaaggatcatgattgcaatgtaaacacataatgaacgctactgtgttaaaaaaaaaaatcaaattataattaaatata

SEQ ID NO: 41287 - DNA, 138 bp, Gossypium hirsutum
  Clone ID: LIB3196-011-P1-M1-H8
atttttcacaaattgtacgaacggaagcccttattctcatagctcgaattcctataaattgttccgaaatcgcttattggaagaaaataactttcttgaaatatgaattggatccccccaaatgaaatcttgaagttg

SEQ ID NO: 41288 - DNA, 330 bp, Gossypium hirsutum
  Clone ID: LIB3196-012-P1-M1-A10
agatacttctctttctcaaatactgcactggttgctaaaatcagagttgcatgcttgcttctcacgcctagaatgtcaggtgcatttgtgcttgagattcctgactgatctgttagccgcaacaggctgatgctgcaggatgcgcatgtgtgggggctgagatgactttcttgcatcatgaagatgaattgggagagatcttctcctggatgaatagaagtgccatgtatcacaatcaagttccttactcttctctgctcaaaactgagtttgcagatggacaaatcttgcaccattcattttgtacttggttcatagagaagatttatc

SEQ ID NO: 41289 - DNA, 226 bp, Gossypium hirsutum
  Clone ID: LIB3196-012-P1-M1-A11
atagtttcttatcataattcttaacacaatgtttctgtgtgggggagaagtttatggtgagttggaatgtctctggtcagaggggaggttatcttggggctgacatctctcagattagaggggaggatgtctcggggctggcgtgtctctggtcagggaggggtttatcttatggttggaatgtcgctggttggaggagacatttgtgatttttggtcattctaac

SEQ ID NO: 41290 - DNA, 323 bp, Gossypium hirsutum
  Clone ID: LIB3196-012-P1-M1-A12
caatgttttaccactctgattagtggtagtagttgtgttggtaaaatattagatttcaaatcttgttaggtaagcttagtctttttatttcaagggcaatagtggtagtagtgggatttcaagaacaacatttattaaatgattattttaaattaaaatccaaggtaagcagaggtgtcaaattatgaaactttcagttcataagagccttagtgtgaattatggaattttgtgaaccaattggtagatagttgaatttcaatttcggttttaatatattttggactagatagaatgagtggggaacaacatgattacaactt

SEQ ID NO: 41291 - DNA, 345 bp, Gossypium hirsutum
  Clone ID: LIB3196-012-P1-M1-A5
tcgaaaagaaaaaaaaaacaccaataaatgagccttcgcatgacaagaacgagcaatagggtttttattcatttcccttttctctgcacccaaagcctcaccttcgtggattttgtgtgcaattttttcttataggcagccgagcggtggctttgtgcaactatggctggtattgagcaatgtgaggcaaatgattctgcttcttctctgatagagcaactttataaggcggttcatgaactggaagctttcaaggatgcttctgagaacaaggttcattggacagaaattgaacaatttttctgcaatcttgaagtgacgtttaagaagaaatctgaagagcta

SEQ ID NO: 41292 - DNA, 164 bp, Gossypium hirsutum
  Clone ID: LIB3196-012-P1-M1-A6
gcgtccacacaaacgaatcttttttttttgtgccataccaggaattgaactagcaatgggcttaaattcgaccgcattctgtctgtaaccatagactaaaaatcttggacaatgagagctatgaacacttataggctcacaacccttgaatattaactactata

SEQ ID NO: 41293 - DNA, 311 bp, Gossypium hirsutum
  Clone ID: LIB3196-012-P1-M1-A7
atgggaaatcaaagttgctacaactatctgtataggatgaaagctctggatgccattcgacctctgaaatcccatttcattctgaaggccggcatccccgttccttaatgggcaagattttccgctcctacctgcttgatctgcgaaacactagtacacctttcaagggtgtacgcaaagccctcatcgataccctattgggtggcttttagacagcccgctatgggacaggggtctttggccagaatgaagtccttccctatcaagaagccctgagtgagccggccactggggtttaagcacgaattggg

SEQ ID NO: 41294 - DNA, 405 bp, Gossypium hirsutum
  Clone ID: LIB3196-012-P1-M1-B1
atgtagctgtctccgcgttgtcggacagcggcacctagaggttgagacttggcattgcatctatttaatgaacttaagtctgtgaataagcctttgtgttaacgactggtatttggtcacagcatatttagagaaaagacttggagcttaaataaaaacgaaggcaaaatagacgctaagctgctgatctacagagaacttcttgtaattaaaatagttcaattcatagcgaactagggttttaaactattgcagtagctggaactttttacggtaaccatcatttattggagaagtgagtcacaaagaaattaaaatgagtaaaagcaaagatgatgcttctcacgaactggagagccagtttatcttacgtctgcctccagaatatgcctctactgtgagaag

SEQ ID NO: 41295 - DNA, 342 bp, Gossypium hirsutum
  Clone ID: LIB3196-012-P1-M1-B5
ggacagtaatgcaaaatcctatctttgttacatcatggacactctgggcatgagaacttttctgatgaaatgaccgctgctcttaagcttgctgacagagctgtgttagattgttgatgctgctgaaggagtgatggtaaacactgagagggctatacgccatgcaatacaagagcgcctacctattgtagttgttataaacaaggttgaccggctgataacagaacttaagttttcccccaaaagatgcttattatatattaaggcatacactggaagttttcatataaccacatatctgtccgctctacaactgctggtaaatggttctgttatttgatc

SEQ ID NO: 41296 - DNA, 442 bp, Gossypium hirsutum
  unsure (1)..(442): unsure at all n locations
  Clone ID: LIB3196-012-P1-M1-B7
tatttaggtagacacctatatgaacaaggttagtacaataaaagccaggctaggtaccaggtcccggaanttcccgggatcttaggtaagtctgttagtagggagataccttgtcagcccttcgncctccttcaacagccgcaatccccttcaagttctagtcatgcgtgagtgcatctccatccatgttggccaggctggtgtccagattggcaatgcctgctgggagctctactgcctggaacatggcatccagcctgatggccagatgccaagtgacaagaccattgggggaggagatgattccttcaacacctttttcagtgagacaggcgctggcaagcatgtgccccgggccgtgtttgtagacctaaaacctactgtcattgatgaagttcgtactggcccctaccgttagttctttcccccctgagcaactcat

SEQ ID NO: 41297 - DNA, 285 bp, Gossypium hirsutum
  Clone ID: LIB3196-012-P1-M1-C6
atctttgcttaagagcgccataaatattcacagggagctaggctcctatttcataggttttagaaaaaaaaaattctaatatacacacatgagtcaaacagtctgcagtaaaaagcattcaatgtgtaattgttataatacactataagagggagtaaagccttgtcactcaccagatgaaatctgatctctctcaaattatttcacccaacaatgtcaaagacattactactgtgacatatttcaacctcaaaacatcttatgggaaacacaaggtaagtttta

SEQ ID NO: 41298 - DNA, 270 bp, Gossypium hirsutum
  Clone ID: LIB3196-012-P1-M1-D10
cccacgcgtccgcggacgcgtgggtgcgcatgccataagttgttgactgctgggagtgaccatgcagaaatgcttttacatgaagagcgttagaacttggggggaataagcatagaggagcttcatcgacttgtttatgctcaagtcctatcttcatttccattaacttggcaaattgctccaatttatcttatttcatgcatgaagcacgggatgattctgtttcagatattattgtccaagctacctggtcaagataaattagttatt

SEQ ID NO: 41299 - DNA, 246 bp, Gossypium hirsutum
  Clone ID: LIB3196-012-P1-M1-D11
cattagtttatgagatattggaaaaaccagcaacaagtgtataataggaatatgtagcggtatatggttttacatacagataataaacattggatatcagcatgttggcttaagttactaaacctcgatcgaaggtgaccattggagggtaattacttcagcgttttcacacataaggcgtcttaatctagattgtaacatgagagccctttggagtcttgggggtattgaacagttagatcattt

SEQ ID NO: 41300 - DNA, 194 bp, Gossypium hirsutum
  Clone ID: LIB3196-012-P1-M1-D12
tcgatgaccagtatgaacattctgatggagaggtggctctaacttgttggctcggattaggtggatttgctgaaccaaaattcaatgatctaacctacttactatgattgttggactgagatataaaaagttagtgatctttgaaataaaggctcaaatctaaaatctttcatttaaaagctttttctaattta

SEQ ID NO: 41301 - DNA, 120 bp, Gossypium hirsutum
  Clone ID: LIB3196-012-P1-M1-D2
tcgcccacgcgtacgtgctgagcagttttctggagccttctctggattttcctccatgggttggagttctatctagcaggcaaattgtacaccttttgtactgcttaggctattatttct

SEQ ID NO: 41302 - DNA, 224 bp, Gossypium hirsutum
  Clone ID: LIB3196-012-P1-M1-D5
atcttttctcagccacaacaaaccccagtctgcattctatctctgaggattagcctattttgaaccataccatatggggccttccatttctgacaactcattgagtgtcatagttttcaagactggcatttgtcagagcttcattacttttttataggtagcacagtattacattatgtgtgtgtaccacaatttacctgctcatccactgatggacattcaag

SEQ ID NO: 41303 - DNA, 164 bp, Gossypium hirsutum
  Clone ID: LIB3196-012-P1-M1-D6
gcaggctggtgccgcgccgcggtttccgggatgggccctattgcttctctgattgctacgagcttactatacgcagacatgattgacagaagcagtgtgtccaaagcgggcctcggtgcttcagctgaggctcaaccattcgtagcagtggcaagagaggcgcc

SEQ ID NO: 41304 - DNA, 384 bp, Gossypium hirsutum
  Clone ID: LIB3196-012-P1-M1-D8
attttatctttatgatatattcataatatatagtaaatttataaataattataaaatagtaatatatgatgcaataatataataaattattgataaatctaagctattatttaaatttctgtttgagttagtgttacgagtcaatcgggcaccaaatcaattaaaaaaattactcaaatatttctttggaagtaaaataattatattatttgaagatatttttatcattttattttaacaaaaatcatttgaaatatactttactttgtcttaattcgttctaatgcctttggtttacttattttaatttaaagatttcaaatgaatagaatattatgacattttgcttattcattatttcttttttttttccttaaatttaat

SEQ ID NO: 41305 - DNA, 311 bp, Gossypium hirsutum
  Clone ID: LIB3196-012-P1-M1-E10
atagttccgattatgttaccaagcagaggtctcactcccagatgcacattgaagccatacaaaggtaccagcttttcaggaaaaaaaaaaaaaaaaaaaaaagcttctttattgccatgtcaattgacaaggagacaggagacctcattctcccagagctggggtctcagggagggttttatgggaagagtaaaacggtgagggagacggaaaaatgcagtgaggtatgatttgattgagctctgcaatgaaggcatgctaggccttttgctcttaaattcctgttgcaacaaaacaagactccctttagt

SEQ ID NO: 41306 - DNA, 355 bp, Gossypium hirsutum
  Clone ID: LIB3196-012-P1-M1-E12
atgtactaaggaaggcgcacagccagccgcgctcgcctcgccgccccgcgttcagctgcccagcgtccgccgcgcctcggccaaggcttcaacagaccacaccaaaatgccgtctcaaatggagcatgccatggaaaccatgatgtttacatttcacaaattcgcgggggataaaggctacttaacaaaggaggacctgagagtactcatggaaaaggagtttcctggatttttggaaaatcaaaaagaccctctggccgtggtcaaaataatgaaggacctggaccagtgcagagatggcatagtgggcttccagagcttcttttccctaattgcgggccttaccattgcatgc

SEQ ID NO: 41307 - DNA, 236 bp, Gossypium hirsutum
  unsure (1)..(236): unsure at all n locations
  Clone ID: LIB3196-012-P1-M1-E4
atatttgcttttcttgttggagtcattctcttaccttggtagagctggtgtaatgnatttttcttgttgtgtcctgctaggtgagtttagtaggtcatgaggcaaccatctaccatatataaattgctgcatgatatcaaatagaattggtatctatgcttgcgtgtgcctgaggtggtgtttttttatttacttacatgctgctctgcctggcataggttagtgacgtgcttttt

SEQ ID NO: 41308 - DNA, 402 bp, Gossypium hirsutum
  Clone ID: LIB3196-012-P1-M1-E5
atgcgactgacatgatgtttccacaaagcaagcattcgggctcttcgcacctaccccagcactcaaattcaccacctcggactcctgcgaccgcatcaaagacgaatttcagctactgcaagctcagtatcacagcctcaagctcgaatgtgacaagttggccagtgagaagtcggagatgcagcgtcactatgtgatgtactatgagatgtcctacggtttgaacatcgagatgcacaaacaggcggagattgtcaaaaggctgaacgggatttgtgcccaggtcctgccctacctctcccaagagcaccagcagcaggtcttgggagccatcgagagggccaagcaagtcaccgctcctggattgaactctttcattcgacagcagcgtcaagtccacca

SEQ ID NO: 41309 - DNA, 376 bp, Gossypium hirsutum
  Clone ID: LIB3196-012-P1-M1-F10
actgaaagagaaaaattttgctcagttaactgtgtcgggaagtcgttcagatgggaagcgtgtccaccttttaagattgtgattctggatgaagcagattctatgacctcagctgctcaggcagctttaagacgtaccatggagaaggagtctaaaaccacccgattctgtcttatctgtaactatgtcagtcgaataattgaacctctgacctctagatgttcaaaattccgcttcaagcctctgtcagataaaattcaacagcagcgattactagacattgctgagaaggaaaatgtcaaaattagtgatgaggtaataccagctgagaaaattgatggagtatttgctgcctgtcagagtggctcttttgaca

SEQ ID NO: 41310 - DNA, 328 bp, Gossypium hirsutum
  Clone ID: LIB3196-012-P1-M1-F11
tccacgcgtacggtgggttcaaacttttgtttctaatataaaaaagattgcacatgtgattacgcaaggaataattgaagcttagaagtcattgtcaaggtggcaaacagtacttatcatatatcaaacaaaaggtcatacaatttatgacattctcatgttcaataccttcagcatcaaagtgtaaggtctttgaattatgttttcatcaagctttctatcagattattctttagcttacgggttaactggtagagtataatatgatgggtgcacatatttaaaatatttgagaataattttttaacaccgccgcgtctttattttt

SEQ ID NO: 41311 - DNA, 373 bp, Gossypium hirsutum
  Clone ID: LIB3196-012-P1-M1-F7
ataaaaactcttacagataatattataattgttacccttcacaattccacatgagaaatatcagacaaaatgtatacaaatatattccttatggcataatttactgcatttctgactgaaatcaaaattctgatttgatggcaattgaattttaattttacaataaataaatgcttgtgttacctaaagcacttagcacacagttaaattatactgacatcctaaacccaaagaaataagattgtgtgtatatttgggatatttattaaagaaaaaaaaaacctgaaagataatggacatgttttatgtcatattttaaaaataatttaaacaactattttggtttaataattaaaactctggataacccttc

SEQ ID NO: 41312 - DNA, 171 bp, Gossypium hirsutum
  Clone ID: LIB3196-012-P1-M1-G1
tagtttgtacgctgaagcacgctggtgccgggccgcaattcccgggatgcgacctgctccaccgggacctcaacaggggtgtctctcccataaatgcccgcgcttcatcttcttatccgagtgacccgcaaaagcctatgagtccaagccgagtacactcaataccaaact

SEQ ID NO: 41313 - DNA, 384 bp, Gossypium hirsutum
  Clone ID: LIB3196-012-P1-M1-G10
atacagcttcagtaatgtgtgctgagtttgtaaaaaggagaagtcctttattggcatttctaagccctctgacattgttagtgtctggattggttggtttgcattttaccattatggttgaatctttgttccttcaccattagttaagtctgaggaactaactgtgaaattccttgatggccaacttggataaaaatgaagaatggtattttcccagtttactacacatggaccaatagtgattatttgggagagaacactgggtagtgttgcttgacttaaaaaccttaaatgtattgaaaagtaacagcattcttactcatggtttgcatttgttactgagatctcaccatattatttaatggagcttcttacttaaaattt

SEQ ID NO: 41314 - DNA, 404 bp, Gossypium hirsutum
  Clone ID: LIB3196-012-P1-M1-G12
atgattccctctcaaaaaactttatagtcaactttgtaatagtttcattattaaatggtgagaaaatcattaaataatactaaccttaactttcataaacctgcaatatggcctccctttgtttgaaatgtattgataggcagcatatttaaatcagatacatacgattaaacatataaaataacttcttaccttatgactggtggagatgtcaatgatttgctattatttttatcacattacgtttgtttttattaagactttcattgtttttattggtataatttacatatagtaaaattgacccttagtgtacagttctgagttttgacaagcgtacacaatcattgtaccaccccaattaaaatacaagacatctttaatacaaaaactttcccttacac

SEQ ID NO: 41315 - DNA, 408 bp, Gossypium hirsutum
  Clone ID: LIB3196-012-P1-M1-G2
atggcttctggaaaaaataattaaacaagcaaagcatatttttctaaggagtagagctgctcaaccattgacagcttagcaagccgaattgaggatcctcagatacaagctcattggtcaaatatcaatgatgtttatgaatctagtgtgaaagttttaatcacatcacaaggctatgagcaaatatgcaagtccattcaactgcaattgaatattggagttgagcagattcgagctgcacatttagatggaagagtaatcacactatcgtatcaagagcaggagcttcaggattttcttctgtctcagatgtcacagcaccaggtacatgcggttcagcaactcgccaaggttatgggctggctagtactgagcttcagtaatcatgtgggacttgggcccatagag

SEQ ID NO: 41316 - DNA, 235 bp, Gossypium hirsutum
  Clone ID: LIB3196-012-P1-M1-G3
taaatagaataggtgagtgctcattttgtaacttactataatttagtgacaaaaaaaattacttataattgtgcaaccattgtaactttttatagttgggcacaaaaaaaaacataattagataaactacttgaaattgggataatataatttttacccctcataatttaagtatatttttgatactggtccttcataatataatggattacttttataatataatcttatacca

SEQ ID NO: 41317 - DNA, 328 bp, Gossypium hirsutum
  Clone ID: LIB3196-012-P1-M1-H10
ctctcttcacactctgaagaaagaaattaaaaactaaaaaataccgagtttttctcgggattgattttttaactctttaaatcaattccaggtcactgatcaccgataccctgcatttctttccaattttgaaacggaccgacgaggatggccatggcagaaaaaaccttacgaaaagactggaaccgacaagcagggggttgtatctgacggaaccagagcttctttgtcttccttagcacctcttggagatcaggaaaagtgtatgaagggcaattatggtctaatatgcatgggattttacctgcaattgactgggttaaaggat

SEQ ID NO: 41318 - DNA, 369 bp, Gossypium hirsutum
  Clone ID: LIB3196-012-P1-M1-H12
atgaagattcttatagaaagcaagttgaagtagatgcacaacagtgtatgcttgaaatctggatactgcaggaacggaacaatttacagcaatgagggatttgtacatgaaaaatggacaaggatttgcattagtttattccatcacagcacagtccacatttaacgatttacaagacctgagagaacagattcttcgagttaaagacactgatgatgttccgatgattcttgttggtaataagtgtgacttggaagatgaaagagttgtaggaaaggaacaaggtcaaaatctagcaagacaatggaacaactgtgcattcttagaatcttctgcaaaatcaaaaataaatgttaatgagatctttta

SEQ ID NO: 41319 - DNA, 242 bp, Gossypium hirsutum
  Clone ID: LIB3196-012-P1-M1-H2
tgtattttgcctctggaacgtgaaggcagaaagaaggcatggcctgataaataaagccggcgaatagagaatcaatctgtggaaaaatcacaaagaaacaggaaatcagcgatgggagagagcaacagcagcgttgatgaggatttagctctcaaaaaatttttcgctgaagtcagcgaattcgaaagagacaacgaagtcgtcaggaccctttcatgcttcaaattaaaaccgtctagaag

SEQ ID NO: 41320 - DNA, 379 bp, Gossypium hirsutum
  Clone ID: LIB3196-013-P1-M1-A1
atgtggcccacattggggcatggcatcctgctcgtgtggccttctctgtggcacgtgctgggcaaaaaggctaccatcaccgcactgagatcaataagaagatctataagattggccagggctaccttatcaaggatggcaagctgatcaagaacaatgcctccactgactatgacctgtctgacaagagcatcaaccctctgggtggctttgtccactatggtgaagtgaccaatgactttgtcatgctgaaaggctgtgtggtgggaaccaagaagcgggtgctcaccctccgcaagtccttgctggtgcaaacgaaacggcgggctctggaaaaaattgaccttaagttcattgacaccaccttcaagtttggcca

SEQ ID NO: 41321 - DNA, 191 bp, Gossypium hirsutum
  Clone ID: LIB3196-013-P1-M1-A12
atacctagaatatacaacctccatctttaatgtgttcaaccatacacaccatgcaaacagtgaattaaaccaaaaaccactaggggctagtaccaaagatgccacctgtggagccctcatatcataccaccttttcctgttgaacaggaatgaccagtactcaaggtgaccttacaactagctcatattat

SEQ ID NO: 41322 - DNA, 239 bp, Gossypium hirsutum
  unsure (1)..(239): unsure at all n locations
  Clone ID: LIB3196-013-P1-M1-A7
aattggtggaactattaaggttcgttacacgtgaacgcatcacattcttcgagggaatcatgagagcatactgacacacacgtttatgagggttatgattagagcttaagaaaatatgggaaatgcagcagtgttttggaagatatttttacagagggttaaaaaacgatcnttcctatcactgccttggtggaatgtgacagctcttatttacatggtgggctctttttatatattga

SEQ ID NO: 41323 - DNA, 379 bp, Gossypium hirsutum
  Clone ID: LIB3196-013-P1-M1-B3
atcagacttagaagcatcaacgagatctataataataaagaatgcaggggataactgaggttagattgaactgttttcaaggagtctaacaaaaataattgttttactttcctcaggtctgcagtttggcagatctagaaactccattttgaaattgtttgcagggttaaacaggtccagaggcaatggctcttacttccagactcaaaagagatagtcatataacaaattgtttattcctttatgtgcgattgtcaggtgtgccaaaggactcttcagcacattctttctcctgtatgacaacatatgtggcaaagtgttgcttggtgagaatgaactcaaaacaggatgagttagttggatggattgtatcatcaag

SEQ ID NO: 41324 - DNA, 296 bp, Gossypium hirsutum
  Clone ID: LIB3196-013-P1-M1-B4
atgggtgaccaacgcaagagcatatgccagttggtggtagagattggactggctaaggacgatcaactgaaggttcatgggttttaagtgcttgtggctcactgaagcttaagtgaggatttccttgcaatgagtagaatttcccttctgtcccttgtcacaagggtaaaaaccttacagcttgtataatggaaccatttttgggtccgtttttaacttggactagtgtaactccttcatgcaataaactgaaaagagccatgctgtctagtcttgaagtccctcatttaaacaaa

SEQ ID NO: 41325 - DNA, 402 bp, Gossypium hirsutum
  Clone ID: LIB3196-013-P1-M1-B5
gtttgtacaaaaaagcaggctggtaccggtgcgcagttcccgggatgcgagactgcatctcacgaacagaaactaatggcacactttttaggtaggtggcaagaacgccactgtgcccagccatctataattttctggtagtcacactggcaacaaaacaccttagaaccagagatcaaccccctccaagcaatacgtgaattcccttcacaagaaacgtcagggctacgtgaggatctgtgttgaatgcaatctgaaatgaccctgtggattatcctggctgggtgccactactgtacaacattcagtgcccacacccaccttggccattaagggtttttgagacatgagagaagcctctttccttgtgtgtgacacggatttgggaagttggaaagaaat

SEQ ID NO: 41326 - DNA, 320 bp, Gossypium hirsutum
  Clone ID: LIB3196-013-P1-M1-B6
atgccacctacagttcgcactacagttggtctctgcaggacctgtcatgccccggcccccaatggcatctgtggttcggctgccctcaggctcagtgatcgctcccatgccgcccatcatccacccgcccagacatcaacgtggtgcccatgcctccctcggaccctcctatcatggccccccgcccaccccctatgattgtgccaacagcctttgagcctgctccacctgtggcacctgtcccagctccagcgccaatgcccactgttcatgcgccaccttccatggaagatgagcctacctgcaaaaaactgaagaca

SEQ ID NO: 41327 - DNA, 306 bp, Gossypium hirsutum
  Clone ID: LIB3196-013-P1-M1-B9
atcttgaaagacagttactttaggtccagttggaaccctcgggctagagatcgtaccagtgttgattggccacattgtttggtctagcagtttttctttatcattctgaaactgggtttgcctaatacattgataaattattttgaaggaatttttatagttccagtcacttcacttttaccctgactcatattaatgactaggaatgaccttcagatcgcatttagcatctgtatccaatctgacaataatgtgttcatcagggacctatggattaaatttcattctggcataaataaactggat

SEQ ID NO: 41328 - DNA, 366 bp, Gossypium hirsutum
  Clone ID: LIB3196-013-P1-M1-C1
tcaaaatcaaaatcgtaatcaaaaagaagaaacagaaaaatcaaaatcaaattcaaattcaaaatgaaaatgaaaaaagagagaagaaaaaaaggaaaaaaggaaaaaagaaaaggagaggccacggcgaaaacccgcaaagggcgctttgtgaccaaaggtggttttgagttgaaaacccgaaaaggacgactcaaattttgagcaaaatggggcatggacattaccattatcgaagacttctaatgggcattgcttcactattgatatcattaattacttcatcaaatggatagaggctactgcatgcgtcaatgtcatcatatgccgatggtattggaaaatgcattgaacttgaattataac

SEQ ID NO: 41329 - DNA, 356 bp, Gossypium hirsutum
  Clone ID: LIB3196-013-P1-M1-C10
ggataagatgtcgtgtcttagtagagagcttgtccttttgatcttacagtttctagatgaggaaaagtttaaagagactgttcacaaatttttttgaaacttaaatggatttgattttaattagtattttattgttaatagataaaatataaaatatgattattattttaaatttaaataggcttgaacatgaatctgggtttttctttaatatgaaatattttgaggatgatgtacataatggaaattgggatgaagttgagaaatacttattaggttgatgataactggtattcaatgaaaatctttttcgacattagaaagcatgtaacaccctagattttgaggttaaaagt

SEQ ID NO: 41330 - DNA, 353 bp, Gossypium hirsutum
  Clone ID: LIB3196-013-P1-M1-C11
cggacgcgtgggctaattttcactgaaactagactcacgtatcttcttaccataaaattttcataatttttggtttaaccaataagtacagtttattctttaaattcacctctgttctactgtctaacagtttcgacccttcttcactgaaaattaattatctcctcgtacaggaattgaatgatgttcccgtttgtttctcttgaaaatagactcattcagaattctaaaaatataaaattaagcccttaattatttttattaatttttttatgatttttcaaagtcaaaacagggcacccgaattcattctgaccttgtcttacaaattttattatatttcatgatttaca

SEQ ID NO: 41331 - DNA, 332 bp, Gossypium hirsutum
  Clone ID: LIB3196-013-P1-M1-C6
ctgtaccggccgaattccggatgaataagctgccaacttgaaatgaggtggagaatcttgctaagcagtttctaccttcaagcaatgaagaatcctaacaattgagattactttggtgaccatgatgggaggaaatgaaacttgtaagattgggacagttgttatttttatgaaatgactctaaatatgaattgtactaactggacctaaatagcaaagccctgtgtagattctggtaatgatctatctcaaggtatgtgtatttttgaagagtgttatgtccttagttttaattttgggtaaagaaagggctaaaatcatggattaggtac

SEQ ID NO: 41332 - DNA, 337 bp, Gossypium hirsutum
  Clone ID: LIB3196-013-P1-M1-C7
acggaatattgcggccgagtatgagaaaacagcatacatttttcgaatacaagatcctgcgaaattgatagctaaaggtggtgcctatggttaaaaagtcaaagatatagtgaggcaacagggaaaaaacggctagggctcttttttacaaaaggagatattgaggagagaaccttcaaaagtacacacatacattgagaaaaaagtggcatggtcaagtctataaagaaacaattctaactggcatttgttgaattaaaatataaataataaccccatcacattattggaggctactagatgcgtaattgtgtgtataatccgataatatttggaa

SEQ ID NO: 41333 - DNA, 222 bp, Gossypium hirsutum
  Clone ID: LIB3196-013-P1-M1-C8
atcttgggtgcccgcggcagggcgtgggtggtgctggcagtgtcccttgccgacctgatcgctgtctacaccgacctgcttctattatgcacataccaggcggatacctgcactgtggcccctctggccagcctggacccattcatggagcttactttcttcttggtcatgggaccctgggtctggctaggtagtactgtttcttacttttaagatgcccgt

SEQ ID NO: 41334 - DNA, 302 bp, Gossypium hirsutum
  Clone ID: LIB3196-013-P1-M1-D1
atcgtgtatgtgatgaaagtatacaacctgaggcgcctgtacgaatcaaagcatatcctgagctaccaccagttcacagagcagactcgagacgccatcctcagcgtactgataaagggactcagaggtcagtaggagctgtcttgcttagagaattaccataagtcgtgcggcagtggtaccccactccggactcacgtgcgaagaatgacctgagtactacctgctacaggagcaggcgagatgataaaagagcaaagcgtcgtgttcttgacagaaacacatgactgactcgaccatta

SEQ ID NO: 41335 - DNA, 349 bp, Gossypium hirsutum
  Clone ID: LIB3196-013-P1-M1-D10
atgtggagaatgcgcagagcccagccccgccagcacccccggccctggaccgagagccgccggcgcccgagcgtcccccggaggttgacctcgcgtcagcgccgggcctgcagttcccgctgctggaacctttcacgacccccgcccctgccgccaccggaccgttcgtgccctacttgatccctgcgccctttggcctaagccccccgcgcctgtgccccttcctggccgctgcacccgggccgccggctttcagcgccgccgtctggaaaaagagccaaggtgctggcagcagcccccgaagaccccagggcggttccggcgcgccctcaggtgcgtgcatgtgacc

SEQ ID NO: 41336 - DNA, 356 bp, Gossypium hirsutum
  Clone ID: LIB3196-013-P1-M1-D12
tatttttgtagtttatcctataaaaattgaaggttgaatttatcattatatcatataatatctataaatattttatttcttagttagtgcccaaaatcaagcatcatcaaaaatcattacaaatttataaatgtgacacattgtttgtatgatgtttgataatttgatttccataacattaatcaataggtggttgaatatatatttgtgcctaaaaactacaaagaaagactcaatattttggcataaaacaaaaacctttaagatggtggatacttttttttgaataatctcattatagattctgatcatatctattctttttgacacaatgcttagaactactcataacatct

SEQ ID NO: 41337 - DNA, 270 bp, Gossypium hirsutum
  Clone ID: LIB3196-013-P1-M1-D5
gctcgatcccctcgagtatgggtcttatgccaattatgatttcattagataagaacttgatcagtattagtctaaaaccatgatatagtctgtagttactgtgctatagcaagataccttaaacttacattagtctaaaaccatgatatagtgaggagtaaccggcactataatggaggaatactttaggtatcaaaatggggaaaaatgctaaagggggaaaatgggtatgctgtaagagcctaatcctgaattaagactttgcttttc

SEQ ID NO: 41338 - DNA, 290 bp, Gossypium hirsutum
  unsure (1)..(290): unsure at all n locations
  Clone ID: LIB3196-013-P1-M1-D6
cttcgcggacgcgtgggatcccccaaaatctttaaccttctgctacacgtttccaagagaccatttcaattcctcaatctggagcctgtggccttctcctttccagaactcttcgaacatgctcaggaattcctccatccaggaaatgaccttcattttcttttaaacgcttactttgcaaacacattagcaaaangtgttttctgactttggaatatgggaaaaagacaagtttttgggaagaaaatgcttacataatcttggaatggtccccttaattaatagccccc

SEQ ID NO: 41339 - DNA, 375 bp, Gossypium hirsutum
  Clone ID: LIB3196-013-P1-M1-E11
atcgcgtccactcaaggaaactttgacggaaattttgagtcactggaccttgcggaatttgctaagaagcagccatggtggcgtaagctattcgggcaggaatctggaccttcagcagaaaagtatagcgtggcaacccagctgttcattggaggtgtcactggatggtgcacgggtttcatattccagaaggttggaaagttggctgcaacagctgtgggaggtggattttttctccttcagcttgcaaaccatactgggtacatcaaagttgactggcaacgagtggagaaggacatgaagaaagccaaagagcagctgaagatccgtaagagcaatcagatgcctactgaggtcaggagcaaagctgaggag

SEQ ID NO: 41340 - DNA, 377 bp, Gossypium hirsutum
  Clone ID: LIB3196-013-P1-M1-E12
atagagtattggttcatacggagaaactgtgggcctttataaatagccagcccgcatcaccctcttccccaatttgtaggtgtattctatgctcttaaggcttcatcttctccctgttaagtgaggtttctaccacacctttgaacaatgttctttcccctctggttatctgaagactgtcctgagaggaagacgtaagtgttgtgattagtagaagctttctagtagaccatgtttcttctggattgtaataaaattgttagctccttttactttgtgcctgtctctggaaagccatttttgaatcgctaattactttggctttaatcagaggtcacctggtaaaagctttgtaatcataacacaatcaattcttg

SEQ ID NO: 41341 - DNA, 377 bp, Gossypium hirsutum
  Clone ID: LIB3196-013-P1-M1-E3
atggcaaccaagcaagactctgtcttgaaagagaaataaaaaagaaagcgataggtctttattatgggacattaagaaaaacctaaatatcatgttcaaagtaattttggggaagcttgataaactaattctaaaataaaggaacagtggtctcagaagacccaagacatccctggaaaagaacttttcctctagatatggaaacttataaagccgtcttaattcctatagatttattttgtcgatgcagtatacaaaagtcaaacagaacagagagcctagaaacagaccccacatgtgtatgaaaacacgtgtatatggaagatgacagaaagagcgttgccgatttgtgccccatgcaaatctatttcagattg

SEQ ID NO: 41342 - DNA, 159 bp, Gossypium hirsutum
  Clone ID: LIB3196-013-P1-M1-E5
gtgagtgggtatagccactccggtgatccaagcttctccaagagcccactacgccttggttattctttcaggaatctgccccttctgttgaaaggtgtccccgtgcggcccacacgctcattggaggtgccacttgatggtgcacgggtttcatttttc

SEQ ID NO: 41343 - DNA, 295 bp, Gossypium hirsutum
  Clone ID: LIB3196-013-P1-M1-E9
ataattgcctagccatggacacaagaaagctaggaggaagagttatacttgtggatcaattttatttattttaaatatcaggagcaatccagggccatacaaccatgaatcgcttagcgaaatgaacacaggaagatttactatctgaagctagcgttagtgattagaaaacaaaactgccagttttgagcttcattaacgtgaactcatctttcacgcaaggagggaaaacttgctttccctagcagatggtgcatatgtgtgtacagactgcacaattctaagaaattatgca

SEQ ID NO: 41344 - DNA, 372 bp, Gossypium hirsutum
  Clone ID: LIB3196-013-P1-M1-F1
atgggtagaaaagcacctggggctggtgcagactgcggagcgggccgcaccctgtgtgcagaaagaggaggcgctcttgtgggaaatcctgaagatggccaaagacgactccactgttcgttgcttccagggcctgctgatttttggaaatgtgattattggttgttgcggcattgccctgaccgcggagtgcattttctttgtatctgaccaacacagcctctacccactgcttgaagccactgacaatgatgacatctatggggctgcctggatcggcatatttgtgggcatctgcctcttctgcctgtccgttcttggcatcgtaggcatcatgaagtccagcaggaaaattcttctggcgtatttcat

SEQ ID NO: 41345 - DNA, 266 bp, Gossypium hirsutum
  Clone ID: LIB3196-013-P1-M1-F11
atatcgtatgggaccattattggtgggttatggcatcatatgggaaaatttaatgaaggttattacctaatgtgggtctttgtgtgtcctagaatgataaggggcaaacctcattaaatgtaaggttaggcaaatacctatcgtttaaaacatcagttaaaggacaacctttgtggaaaaactctagaaaggtaagcctttatggcgaacatgttataaaagattgcctttttggcaaatctctagaatggtaagtccttgtggcc

SEQ ID NO: 41346 - DNA, 357 bp, Gossypium hirsutum
  Clone ID: LIB3196-013-P1-M1-F12
gaaatcgatgccccatacatcaaagatttcgcatacatgaatcggggaaaggggcatttgattttgtttagtgatgttacctgcatgttggcacctatcgcaagacttacagaagttatatgcgtctcgaaaaattgtgggccaatatagcccacattctaacaccttatgagcggtccgcttagggccaaagtgacctccgcaagcttcagcatgacaaaaattaaagatagaagttacctcagtttctggaacacatcttcgtattatctggtctgaacagtgtttccacaagtatgggtcatcccaaatgtaatatcgagcgttgcctctaagcttgtccctcacggaacgtgc

SEQ ID NO: 41347 - DNA, 380 bp, Gossypium hirsutum
  Clone ID: LIB3196-013-P1-M1-F4
attgttttttgacttctgcctgtgggcctgaggaagggagaaggcagacccataggcagtccctgggcaagggaggattttcccagctgcagcacagctttccattcatgtgcatgtgagtctggtgaaaatggccttgtgtagtccagtgtctgtcatgcccctgagttcttgtggtcccagagaggcagcctgggcagtctgtttacagctggcaaacactggctggcaagttgtggtgctgggtcagaaagtgtctggactggtaatcgggtgccctgctgtccacaggtggactctggggaagccaggcccctggatcccaaggcctttgtgtctggagccttacctggcctgtgcctggaacatagcacattttt

SEQ ID NO: 41348 - DNA, 318 bp, Gossypium hirsutum
  Clone ID: LIB3196-013-P1-M1-F5
atgctgtgactggtgggtgagcaggctcatcgcggagcggatgcggtccacagctctcacctaagcaagacatcccaacaacggtctggtgtcacaatgaccatgtgacctaaaacaccgactgcttcctaactgcattaaacaagagcgtgaaaagccaggcaccacgctctacctgacgaatatgcctattgccagactgactaaaaccttgaggtgagcggcactgcgggttgcgaccacaagatgaccttatcttccacggggagctcgctgtgctgattcatacacaacaggacctcaactagctgttatgcc

SEQ ID NO: 41349 - DNA, 309 bp, Gossypium hirsutum
  Clone ID: LIB3196-013-P1-M1-F6
atgccggagtcaaagccggttcccggcccagtgccgtcccgcagcagcctgccgcctctttcctttcaacatgacagatgccgctgtgtccttcgccaaggacttcctggcaggtggagtggccgcagccatctccaagacggcggtagcgcctatcgagcgggtcaagcttctgctgcaggtgcagcatgccagcaagcagatcactgcagataagcaatacaaaggcattatagactgcgtggtccgtatttccaaggagcagggagttttgtccttttggcgcgggaacctgggcaatgtcatcag

SEQ ID NO: 41350 - DNA, 370 bp, Gossypium hirsutum
  Clone ID: LIB3196-013-P1-M1-F7
atgtttgttttaacagagatgccttttgtgatggcagtctactagaagtatcctcacaacatctaggttgctgaaaatttgttcccagtagaaagccaggagaggatcaacctcgggggtttgttttcgttcccaagatggcctttttgaatgataatggtctgagaccatacttgctgatgactcagggcctggctttggcaggaggacagcatcagacacaggaatcagtgatgagatgagcttatgtagtgtagcagggggtttcataccagtacagttcccagttagcactattgacattattattaggtcacaacaatacttgtcttttgagagcaatatttagattttacatgcattcacatgg

SEQ ID NO: 41351 - DNA, 344 bp, Gossypium hirsutum
  Clone ID: LIB3196-013-P1-M1-F8
cctctgcccccaactccctcaggtcatcttgcttgactgcaattatctggtacgaatgtaaagaaagaaatcatcagtaaggataaaaaatctgacaaaaattacttggataaaggagtaaagacgtcaactttgagccttacctccccttgcattgttaaagctgcaatccctgatcgatttacaagcgctattgccaaggccccatcatctcttggatcttttaagagcatctccaaatctcttggcttgaaatattcctccaattgcagaacccttatggcgacctacaagattaagcttgtaggaccaaagggtgaggtgacggagtttgaagcccccaa

SEQ ID NO: 41352 - DNA, 382 bp, Gossypium hirsutum
  Clone ID: LIB3196-013-P1-M1-G10
atcagcctcctacaagagtttgatgtccaggagcaggacatcgagactttacatggctccgttcacgtcacgctgtgtgggactcccaagggaaaccggcctgtcatcctcacctaccatgacatcggcatgaaccacaaaacctgctacaatcccctcttcaactacgaggacatgcaggagatcacccagcacttcgctgtctgccacgtggacgcccctggccagcaggacggcgcagcctccttccccgcagggtacatgtacccctccatggatcagctggctgaaatgcttcctggagtccttcaacagtttgggctgaaaagcattattggcatgggaacaggagcaggcgcctacatcctaactcgatttgctc

SEQ ID NO: 41353 - DNA, 415 bp, Gossypium hirsutum
  Clone ID: LIB3196-013-P1-M1-G12
cacaattccgaacgctggaacacgttgcagctccggcccggaattcctggttcggctgacgcattatcagggggggatatctgtctaatgcttgaaaaactgtgtctgcgaacactctgtaatggacaagatcaggatttgagcggaagaacgaatgctactttcttaaggcaggaaagacaaattttattcttcatcaagtgatgagcatataataattccaggcacatggcaatagaggccctctaaataaagaaataattaccctttagacaggttggagataatgatcagagtaaaaggtaattacacattttatcttcagaaagccaaggggctatatattgacagtgacctgaattaaaaaaagtactctttcacatttccacaggttgcatgttaactttaaatgctt

SEQ ID NO: 41354 - DNA, 371 bp, Gossypium hirsutum
  Clone ID: LIB3196-013-P1-M1-G2
ataaattttatgaatgtaagcagtgtgggaaagcattatcctctcttacaagttttcaaacacacataagaatgcactctggagaaagaccttatgaatgtaagatatgtgggaaaggcttttgttctgcaaattcatttcaaagacatgaaaaaattcacagtggagataaaccctataaatgcacgcaatgtggtaaagccttccctcattccagttcccttcgatatcatgaaaggactcacactggagagaaaccctatgagtgtaggcaatgtgggaaagccttcagatctgcctcacaccttcgagtgcatagtagaactcacactggagagaaaccctatgaatgtaaggaatgtgggaaagcc

SEQ ID NO: 41355 - DNA, 355 bp, Gossypium hirsutum
  Clone ID: LIB3196-013-P1-M1-G3
gaaacctaaaaacttcgagagaaattggagggagatcttcagtcttgaaggagatcctacttcctagctgaatccattggcgttctttgagtaatttatgtgttctactctgcgtgtctccttaggtcttcttctagtatgtatttatagacttttgaatgctcaaaaaccctaaaaattgactttttctgcgtgtttgggaaataggaagcgatatcgacacaagttggcacatgggtgtgtgacctgcccgtgtggatcacattggcgtgtggcctgcccatgtagatcctgaaaactccgattttggcccccttttcgctcctttttctcccaaatgctctcctaagtatag

SEQ ID NO: 41356 - DNA, 375 bp, Gossypium hirsutum
  Clone ID: LIB3196-013-P1-M1-G4
atcccgcctcgtccaactgctggtcaaggcccaccaggatgcccagcgccacgtagctgcaggcacacagcagccctacacggatggtgtgaggatggaggagattgtggagggctgcaccggagccctgcacatcctcgcccgggaccccatgaaccgcatggagatcttccggctcaacaccatccctctgtttgtgcagctcctgtactcatcggtggagaacatccagcgtgtggccgccggggtgctgtgtgagctggcccaggacaaggaggcggctgacgccattgatgcagagggggccttggtcccactcatggagttgctgcactcccgcaacgagggcactgccccctaccctgctgctgtcct

SEQ ID NO: 41357 - DNA, 385 bp, Gossypium hirsutum
  Clone ID: LIB3196-013-P1-M1-G6
atagtattattaaaatacaatgtttatatgtgtatttgtgtattatagatgtatcaagtgatttctaattttttctcatatgaatatgccagattactctagaactagatgcctcttctttaaataattttagttttcctgaataaatttgtaatggttaaagtaccaaggaaggaaggcgagaagggattctgtttttaaaatcacatctgaactgttcctctactaagattaaattaaatgtgaaatactcgtaattgcaattcttaaacttaggcacatgtgctcactgtgcacctgctcctggactctattcaccagagtaccagtaaatgtgtgtcccaagattcacaggcttttgattaatcaatattcttttcaagtt

SEQ ID NO: 41358 - DNA, 369 bp, Gossypium hirsutum
  Clone ID: LIB3196-013-P1-M1-G7
atcgtcaacttccgcctctaccagttgctcaacctgcactaccccccgaagctcgaggggcaggcccaagcagaggcaaaggccagtgagggcacctacgcgttggactccgagagctctatggagaaactggcggccctcagtgccagcctggcccgcgtggtggtgcctgccacagaggaggaggccgaggtggatgagtttcccaccgatggggaggaagaccgcaggaaggagctggaggcacaggagaagcacaagaagctttttgaaggcctgaagttcttcctgaaccgagaggtgccccgtgaggccctggccttcatcatcaggagttttgggggggaaagtgtctgggacaagtctttg

SEQ ID NO: 41359 - DNA, 193 bp, Gossypium hirsutum
  Clone ID: LIB3196-013-P1-M1-H4
gaagcacatatatgtctctagcttgcatgtctgcctttctcataatcatgtagtatatctacctttgttattgtacatttggcacatacttatatggcctcaactatgactagtttctaggatgtctaccttgtgcctccttttggagaaaagcttcggtcttctttttgaaatatgcagtaaatcattactc

SEQ ID NO: 41360 - DNA, 361 bp, Gossypium hirsutum
  Clone ID: LIB3196-013-P1-M1-H5
atgttctcggagcctcctccgttcaggggctgagtcaggggccggcggtgcctttgagaggggcctgctttgtccctgaagttccgaatggatagtttacactcttctccacttggatctgtttctttctcccctctttatctttttcaaatccgcaattattaagtacttagtgtgcacacaggactatgaacctgaactgaagaagaatcccattctgatttcttcctccagtaggccaccttaggcctaccggtggcttcccgggatcgtgcagaaaccaaagagctaagggaattgccgcccaacccacccctgcacacacactaagactttgccgatttggccgaaaagctgtgac

SEQ ID NO: 41361 - DNA, 294 bp, Gossypium hirsutum
  Clone ID: LIB3196-013-P1-M1-H6
attatgggcaaaaaagtggaagttaaacgagctgagcctcgcgacagcaagagccaagcgccgggacagccaggtgccattccagtgggggagcagggtcgtgcccaacactgccaatggctgggcaggccagcccccgcccacgtggcagcaaggatactgtccgcaaggaatgtgggtgccggcaggacaggctattggtggctattgaccgccccctgcaagtagaggagtccccccgacacccccacttgtcaaccttctacatggtatccacccctcctggaggctttt

SEQ ID NO: 41362 - DNA, 324 bp, Gossypium hirsutum
  Clone ID: LIB3196-013-P1-M1-H8
caaattgcataaaaaatgaatagagatgggaaaatcgcataaaatgcttctattctagaacaaaaaaacaatataaccccttttttatttatattccatacactatccagaaaaaaaaaagaagaatttgtatttaatttattggtacctttcttttttatatctccattcaaatctataggatagaataggatctatatctattatgatatataaatcgaattgatgaaatcaaaaaaacgcaaaaaaagtctttctttttctatctacgcccagttttttgttgtcttacatttataatttatacatctccatttatacatg

SEQ ID NO: 41363 - DNA, 371 bp, Gossypium hirsutum
  Clone ID: LIB3196-013-P1-M1-H9
atctcttttaatcctcatttaagtcttcattaatcccctcataatccattttgcagatgaggaagttgaggctcagaaagtccagatcctgtagccagaactgagatacaaaacaagatcttgttccaaaggctgtattcttagccacatgttgtattcacctgggaagctttaaaaacacacacacagtgtgcaggccccactacagatgagtttatcagttcctggcaccagctgtacttgctagccattgccccctaattctccaaggcaaggcgaggctcagagccccccagggtggctcagctggccccagagggcagcaggtgggcctttcttagcctatggaccctggcaactttccaaacaga

SEQ ID NO: 41364 - DNA, 361 bp, Gossypium hirsutum
  Clone ID: LIB3196-014-P1-M1-A10
atccaggtttccacagctgtagttgagccctacaactccatcctcaccacccacaccaccctggagcactctgattgtgccttcatggtagacaatgaggccatctatgacatctgtcgtagaaacctagatattgagcgtccaacctatactaacctgaataggttaataggtcaaattgtgtcctccatcactgcttccctgagatttgatggagccctgaatgttgacctgacagaattccagaccaacctggggccctacccccgcattcactttcctctggccacatacgcccctggcatctttgctgaaaaagcctaccatgaacagctttctgttgcaaaaatcaacaatgctt

SEQ ID NO: 41365 - DNA, 379 bp, Gossypium hirsutum
  Clone ID: LIB3196-014-P1-M1-A11
tttctgaattcgtatctatatgtttaatatgtcagcaagttaaggctaaacatcaagtaccttcgggtttgctacagccagtgacgatatcagaatggaaatgggaaagagttattatgggctttgtatcaaggtttccctgtctctgaaaaagaaagatgccatttgggtaattgttgaccgtttgacaaagtttgcacactttattccagtacgtatggatttttccctaaatagattagcagagttatatgtttctgagattgttagactgcatgaagtgccagtctccactattttagataaagatccacggttcacgtcctgattctggaacaagttgcaaaaaactttgggtacgaaattacatttcagtact

SEQ ID NO: 41366 - DNA, 375 bp, Gossypium hirsutum
  Clone ID: LIB3196-014-P1-M1-A12
cccacgcgtccgaaaaatcgattcgagagcaaaaataaaataaagaaaaaaaaaaggaacagagagtgaaattccacctttttgttttttttgattgcttaatcgtgtgttacaatttttttgtgtttgtggctatatagccgaatacaaaaatctattgtttgctactgttttggcactgctttttgctgtttccctttctttgccatgtttgcaggtccatggagggtcaacgggcgagggagtttccactttcatgcaagggcgttgatcctcaagccgagtggccgctgatgcacatggtcaatggctgcggcgcgagggaagctcgaaaaccctaaggtttctgagttggcttaatgttttgggcttatt

SEQ ID NO: 41367 - DNA, 318 bp, Gossypium hirsutum
  Clone ID: LIB3196-014-P1-M1-A5
aatatgcgtaaaggaggcctatgaaaaccatagcatctacccagcgagcgaagttacgtagctatagcctcctcatgcagtcttgagcgtgccacctatgtaaaagcgaaattgagaccacagcgccaagattgaggttgatggccggatggtctgcttagaaagttactgcgttcaacaagacgaggagaaccgatttgcacgacgccaagtcgacaaggtttggcgtatgagagataatgcgagttttaacaccgttctgtagtgaaactgctaatgctaaacccaccggtagggccaactgagtggatcacaaga

SEQ ID NO: 41368 - DNA, 351 bp, Gossypium hirsutum
  Clone ID: LIB3196-014-P1-M1-A7
atgcaaaaatgtatatatcaggaattaataagctaatggggaaattttaagactttgatgcctattagttttttcagtatgcttgtttgtcttcagaacatattttaagtcagaatgaacaaagatagtggtcaaagttgaaagaaggtgtaattttactgatttttttctttttgacttatttgaactttgatacgtgctatgggtgagtttagataggtgtgtacaaatatttcagcctgggatgccttactctaactatatcttgatttcttagcataacttaatgaaagcttgggttaagaaaccttagatttttaaatagtgtaaatttaacaggtggggggaaat

SEQ ID NO: 41369 - DNA, 283 bp, Gossypium hirsutum
  Clone ID: LIB3196-014-P1-M1-A8
cttgaaggcatggagtgctcagaaagctagagctgctgctattcttgaagctgacagcaaggatgagcccttgattaccatggatacccctgaagaagaaaatgctaatgctgtatacctgcagaacatcaccattctatcagcccttatcagtaaataactaggggacagcctaaagaaggcccttaacggtggggagatggttaatatgaatcttgactggagggaagtacttacttatcccgatgaacggggcgaagattatatttttacaaaaaacaac

SEQ ID NO: 41370 - DNA, 194 bp, Gossypium hirsutum
  Clone ID: LIB3196-014-P1-M1-A9
tccgctccgttatttcattcccgacccaccccacccatccagattgaatgtatggcagggtgaaaaagctgaagctgttaacattcttggagaatgacagtaaaggccgagcccttgattaccatgcatacctctgaaaaagaatcagatactgctgaatacctgcaaaccatcaccatgctatcaatccttat

SEQ ID NO: 41371 - DNA, 107 bp, Gossypium hirsutum
  Clone ID: LIB3196-014-P1-M1-B1
atctatgaactcccctccttcgactatgttggtgttttgaggtcttgccgttcattttagatcaagtacactctgcaaaatattatacacttctgaaacctagattt

SEQ ID NO: 41372 - DNA, 339 bp, Gossypium hirsutum
  Clone ID: LIB3196-014-P1-M1-B10
gaaaacctaacactcaattatttttgctagttgaatgtaatttactaatgattgagtaaatatgtgtggagttatgcctcatattttttggcttttattctcccaatggaactctgtttttagtttcccatttaaactctgattagtgtaggctattttaatattagtttctcacttaaactctgattagtataagttattttaatattatttgacctacaaatgtagcctataaattggcccatttttccacctagaaagataatcaatttcacatttaaggtttagcttttacaaggtttcaaagaaatatgtgttaacattttgaggggtcttatt

SEQ ID NO: 41373 - DNA, 269 bp, Gossypium hirsutum
  Clone ID: LIB3196-014-P1-M1-B12
atgcaggttgaagggaaattctctggggctttgggaagttttgtgcggtgggtgagccaagaaaatactaattaataatagtaagtgttggttaagttgttgcttggaagtgaaaagttgcttagaaaggttagaacttttagtgcatttataagataatgatattatcccattacaattgtttttctttgctgcatggtggggattgacctgtaaaatttgttaaccaaatttcttttttgtcagcatttctctactccttttttttt

SEQ ID NO: 41374 - DNA, 379 bp, Gossypium hirsutum
  Clone ID: LIB3196-014-P1-M1-B2
cggacgcgtgggctagctgctcaacaactccaccacctcctgttccttaactaattcccgtgattcctcaaggtacggaaccagtccgagttagtaagcctcttgttgttaagattcgtaagtaaggggttgaagatttctaagctactgctgaaaatgatcctgaaagagctgaattttggtttgagaatactattagggtttttgacgagttatcttgttccctgactgaatgtgtaaagtgtgcagtatttttattaaaagatttggcttaccagtggtggaatccattgactcctgtagtgccgaaagagcatttcacttggaagttctttcaaaccaagttttgtaagaaatacatcagccagaggtttctgga

SEQ ID NO: 41375 - DNA, 283 bp, Gossypium hirsutum
  Clone ID: LIB3196-014-P1-M1-B4
tcaagaagaaaggcatcaactacattgccaacaaatgtgcttgtaacgattcaagcaagaacaacaacattgccatcaggcactttccaggagtgtgagcaacatttccaccagcaagaacataggccggaaaagaagcaacactgcgtgacggaatgcatagaaaaggaccaggagaatccatggagggtagagagagaaaaagaatctcaaaaggtagaaactgacaatggagagcacgatcaaagacatatcccttttcattaacatagcagattatccc

SEQ ID NO: 41376 - DNA, 396 bp, Gossypium hirsutum
  Clone ID: LIB3196-014-P1-M1-B5
atatggacaggaactgaagcagaggttgggctgtggcttgacccctggatgatgctctattcatgaagcaaatgtaattctaatcatggaggaattctcaagttagatatgagtgaagcctgacagtaaaaagcctgcttgcttgctgtgcctccagggtggagccctcattctgaagtcactgtgcatcctagctgtttcctaggtttctgtgcactcaaggctccatgagatttagagcattgggattcccagagacttttcttccctatgtaatctgaggttgacaagatggagctgagcctagtcaatcttgaattgagagagaaacaaataccaggtaccagctgtgtctacctgctggcctctactggggcttttttgtgtgctttgctg

SEQ ID NO: 41377 - DNA, 395 bp, Gossypium hirsutum
  Clone ID: LIB3196-014-P1-M1-B6
atccggggagcgaatgaatagggccgcgcagaccaaggcgtccgatccacgcgcgctccacacccggaccctctccaagttggaaaggacaaaaagaaggcaataaatgctaaaaagggagagaaggggagctggatcgagcggcaactcccagcctctgctggaacagagaggggagggagggagccggagcgagcgagcgcgcgcgagggcgagccctgcacgtaaagaaactgacacccggaccccccacttctcctgcacgttgctggcaatcagatcgcgtttaagcaatttcctgagcccaagaatagcaatgagtcgggagactttcgcgggctgaaattgggagcttcaagcacttttgtcccccacattttttttttttttttttt

SEQ ID NO: 41378 - DNA, 245 bp, Gossypium hirsutum
  Clone ID: LIB3196-014-P1-M1-B8
taggtactggccctgggaggaatgaccaaggaagggtgcataactgaggactgggatagtatctttacagtggaggatcttggattctataaaatgaccaggatgaacatcaattttgagggcgtaaactagactactattgataggtgaagccacttaatagggacctgtatctctggttcgttgatagtttataacctcctgagtgcaggtatgaacaagttgctgataaatcatgtgccata

SEQ ID NO: 41379 - DNA, 330 bp, Gossypium hirsutum
  Clone ID: LIB3196-014-P1-M1-C1
atgccgcccgttcagcccatcaccccagctccccctcagccccgcgcagcccagctgaccccaccgactggggagggcagacctccccccgccgcactggcttctccttctccacccaggagcctagaccccagacccagaatcttggcacccctggtccagctctgtcccaccctcgaggtcccagccatcccctggacctggggacctcttctcctaacgcctctcagatacactggaccccgtaccgggcgatgtaccagtacaggccccagaacgaagactagctggagctgcgcgagggggacagggtggatgtcttgcagcagt

SEQ ID NO: 41380 - DNA, 254 bp, Gossypium hirsutum
  Clone ID: LIB3196-014-P1-M1-C10
aagaagcaaaaataaattaactaaaaaatttattaaaattggcaggaaaaaatttatatggagagtttatatatgttttggctaagccagactatcatctattcctaatctgcatttggggggtccttttttcctccttccttccaagttttaggagaggaaacccagtaaggagtggttgccttcctgcctaaaaggtgggggtttattgataaagccaggtgagaaaaacctcctcattggccaggtccatt

SEQ ID NO: 41381 - DNA, 302 bp, Gossypium hirsutum
  Clone ID: LIB3196-014-P1-M1-C11
cccaagcgtccgatgtggtaacttgaaaataagactcattaaagtgtttggaatatatatgtcatctccttaatagcttggtacaacagacgatgattttacaaagataaaacattggtactccattctgaccttgctctacaaaagctattatatatgataatctacaatgttggtgcttacatcatgttttacggacaaaattggactagataatatttaattgaatacttaattaacctgcaacttaattgctatgattttcggtgatttatcaaagtttagccactactactgtgcaa

SEQ ID NO: 41382 - DNA, 145 bp, Gossypium hirsutum
  unsure (1)..(145): unsure at all n locations
  Clone ID: LIB3196-014-P1-M1-C12
cactatanaacaagcatgtacaaaaaagcaggctgttcccgggcccgttaccccaagatcaggacctgccaacccactagagcccggttcttaagctttaccaggaacatgccatcgtgttttgtcaaataaacatgtccgatta

SEQ ID NO: 41383 - DNA, 277 bp, Gossypium hirsutum
  Clone ID: LIB3196-014-P1-M1-C4
caagtttgtacagaacagcaggctaggaccggcccggaactccagggattggtgagagaccatgccacgctgtagcagacctcctgacagtgagtgagactgccaatgagccccctcaagatgaaggtaattgcttcaattcaccccgcaacctggccatggaggcaacctacatcaaccacaatttctcccagcagtgcttgagaatggggaaggaaagatacaacttccccaacccaaacccggttggagaggtcgacataaagatgaatgaaat

SEQ ID NO: 41384 - DNA, 282 bp, Gossypium hirsutum
  Clone ID: LIB3196-014-P1-M1-D10
atacttgatgccctgaactgaatcttccttggagcccaccgcgcccggccaagtgatgatgatttaaaagaaagaaggaagtgattaccatgtaaatctggatattttttgttgtaggggtgtgaggatatggtgatcgggaagggcactattgggagacttttgggtactgatgattcttggcctgagtagcaattccacaagtggttgctttgtgatattaattgagctgtatgtctcaattttatgtattcttttttttaactattgacagaaaaggtt

SEQ ID NO: 41385 - DNA, 378 bp, Gossypium hirsutum
  Clone ID: LIB3196-014-P1-M1-D2
atggcaggggccttagcaatccaagaagcttaaaatgtctgctgaatcttccccttcagtgaccttatactgtggtggcaggtggaaacagtagatgtataacataaaccagtcaacagataccaaggaagcagcagccatcgaggccagaagaaatcgagaaaaagagcgacaaaaccgattcttcaatgtgcggaaccgagtcatgggggtggatgtccaggccctgaacaaccaggtgggagaccgaaagcgtcgggaagcagcagaaagaagcaaggaggcagcttatggtaccagccaggtgcagtatgatgtggtagtccagatgttatagaaggaagaggctgatcgaacacgtcagttttccaagaaagt

SEQ ID NO: 41386 - DNA, 181 bp, Gossypium hirsutum
  Clone ID: LIB3196-014-P1-M1-D5
gtgagtatgcgaacacttgtgaggagaaaaccgataggttatttgaggcccatgggcaactccatgaactttagatctgaatagtccatatttttctttaatagattgcatcatacctttataccaattattacttacttttgactgctgcatgttagtattttgttcgtctatgatacat

SEQ ID NO: 41387 - DNA, 381 bp, Gossypium hirsutum
  Clone ID: LIB3196-014-P1-M1-E1
gttatatatatgtgatttatttggtaataggaaatttgttaaaatgcttagtaaatggatatttggctaatgttgtgtatataaattacttaaaatattaactttaaatgagtactaaaggttgtatatgaattcggccttgggagatatgttagtataaaaatgcttgaaagttaaataggtgattgctttaatgaccaaatgttccaaagaataatgcatgatctagttgaccaatatgtgttaagggaacatgaatagatatattttgatgagctattcattcggttatagtatgaaatgcaatgttaatacttaagtgctaggatgtatatgggtgctagccgaaattgaacttgaataatgatttgaacaccatgt

SEQ ID NO: 41388 - DNA, 371 bp, Gossypium hirsutum
  Clone ID: LIB3196-014-P1-M1-E3
cccacgcgtccgtaactacaagacataaagaaacttaataaaacttcgaaagaaattaaaaggagatcttcgatcttgatggatatctgcttccgagttgattctaatggtgttcttctagtgttttctttgatcttctctaattgcccccgtatgtattcttctaatgggtatttatagattttagaatactcaaaaaccctaaaaattgggtatttccacgtatttggaaagtagggtgcgaaatcgacatgggctggcacattggcgtgtggctagcccgtgtgagcgtgtcaagcctgtgtgcaaatgcccagcctgcgtggatcttgaaaacaactctttttgtctaattttgacttgcttttcgc

SEQ ID NO: 41389 - DNA, 386 bp, Gossypium hirsutum
  Clone ID: LIB3196-014-P1-M1-E5
cgaaatcattctgactatatcttacaacaatttaaatatttcaaaatatgaaactattgttgttacatagtttcttctatgggaaactagactcattaagctggaattgcatattttatccaacctctaactcaatttccacaattttttgtggattttcaaaatcaaactatggctgctgtccaaaactattttagtgtcaattgatgagactaagtttatcacaccatattaattcattttcaccacactggtaaagatacatatttatacatcataagtatagacttataatcacaaggtcatcacaaatcattctcataggcatgaattacctatttacatcttcaccaaatgtgtatcataaaccgaaatcatttctcatg

SEQ ID NO: 41390 - DNA, 327 bp, Gossypium hirsutum
  Clone ID: LIB3196-014-P1-M1-E7
atggcaactacaagtcctttggtgacaccaagtttgttcccaacttgcccaaggaaaagctggaacaggtgatcctagggagtgaggctgctcagcagcaccccgaagaagtcaggggcctctggcagacctgtggggagcttatgttctctctggagccaaggcttcgacacctcggactggggaaagagggaatcaccacctatttctctgggaattgtaccatggaagatgccaaattggcccaggactttctggactcacagaacctcagtgcctataacacccggctcttcaaaagaggtcgatggagaagggaagccccac

SEQ ID NO: 41391 - DNA, 331 bp, Gossypium hirsutum
  Clone ID: LIB3196-014-P1-M1-E8
catttatggctcctacctagttcaccttgttttaattccaaccattaattcggattctaaagctgcgttagtgtatacaatctattatgctccaagcttagcgtgtagtgattttgtatcagatttcctagcataccattggacccaagagacattcacagctcgaaattgttgtggcataggacatcaaatatgaggcagtttcttgattgtagacaaccagtttttagccttttgtttaacttagatgacatattactgtcttaatctggacaaaaaaggccttcagtattttaaataatcccacttccaatttttgaattaatctttt

SEQ ID NO: 41392 - DNA, 336 bp, Gossypium hirsutum
  unsure (1)..(336): unsure at all n locations
  Clone ID: LIB3196-014-P1-M1-E9
acactatagaacaagattgtacgaagaagcaggctggtgccggggcgcggttttcggggtgggacctacgcgtccgcatttatgactaatacatagttcaccttgttttaagaacaactattaatagggattctaaagcgtgaggagtgtatacaatatattatactacaaggttaantgttagtgactgtgtataagatttcttagcataccagtggacccaagagaaattcagagtttggaatagttgagtaacagaatatcaaacttgaggcagttccatggtagaagaaaaacaggtcttatgactttcgggtaacacagatgctcaatgac

SEQ ID NO: 41393 - DNA, 383 bp, Gossypium hirsutum
  Clone ID: LIB3196-014-P1-M1-F1
tccacgcgtacgggttgatgatcagaatagggatgaatattctaggtggcggaaagacgaccggcctatgcatgaatattcttggcgggggctgagtgaccggcctaagggcgaatactctagatagtgaaaagatgactcagaataggacatgaatatttctaggtacgcagaaagatgatctgtgaccggatgaccattgtagggcagatagatctagaggcgatagtgactcgaacattcgttgacaacacgacagacttcaatgtatgatcaccacacctgatcatggatcgatgagagactatcaggattatgatttctacagaggatgtctgaagcgtgttagaaatgattcgctacctctgtggaaagaacatgtt

SEQ ID NO: 41394 - DNA, 411 bp, Gossypium hirsutum
  Clone ID: LIB3196-014-P1-M1-F12
ataagaaatcgtactcaccttcgaaaagatcaataaaagccgcaatgccagagcccagtgtgttggctggcactccaagaaaaggagatgggatgagaaagcatgccaaatgatatcggatatcaagaacgaagtgaaatgccgctgtaactacaccagtacagtgatgtctttttccattctaatgtcccccaaatcaatgacggacaaagttctggactacatcacctgcattgggctcagcgtctcaatcctaagcttggttctttgcctgatcattgaagccacggtgtggtcccgggtggtggtgacggagatatcatacatgcgtcacgtgtgcatcgtgaatatagcagtgtcccttctgactgccaatgtgtgagttatcataggctctaactttaaccctaa

SEQ ID NO: 41395 - DNA, 384 bp, Gossypium hirsutum
  Clone ID: LIB3196-014-P1-M1-F2
attgcaactcttgttggcagaggaaaacagcatgtgggtatttgtcgaccaaaatgatgccaatttgtaaattaaaatgtcacctagtggccctttttcttatgtgtttttttgtataagaaattttctgtgaaatatccttccattgtttaagcttttgttttggtcatctttatttagtttgcatgaagttgaaaattaaggcatttttaaaaattttacttcatgcccatttttgtggctgggctggggggaggaggcaaattcgatttgaacatatacttgtaattctaatgcaaaattatacaatttttcctgtaaacaataccaatttttaattagggagcattttctttctagtctatttcaagctaaaaagaaaga

SEQ ID NO: 41396 - DNA, 323 bp, Gossypium hirsutum
  Clone ID: LIB3196-014-P1-M1-F3
atggatgctccccacacaagatgacaacggtgaaccgcgcgccggacgcgaacatatgaaccgatgcagacgatgcgggggagaccatacacggacatttgtcgatgggagtgcaccaatgcggtatgggtccccccggacagaatgaccttgatcggtatcttaacgggcttttgacgttcatccagctgcaagagagcactcatgaccgctactacgacaagcttaaccttacctcgcggtcgctcgtcccgggctgtagatgcgagtgcctacccaaccaacggcatggagagacacagacttgtgggcctgaaccgcga

SEQ ID NO: 41397 - DNA, 261 bp, Gossypium hirsutum
  Clone ID: LIB3196-014-P1-M1-F6
aggtattgccgggagtggaatcgcagttcttgtttgagtgtcggtgtcatcgacactggacaatgcaaatcttcacaaagcaccgtaagtggcaagaccatcaccttggaggttgagcccagtgacaccattgagaatgacaaggcaaacatccaatataaggaaggtatttctcctgaccagcagagttttctctttgccggaaagcatctgaaagatgggcgcaccctatttgactacaacattcaaaatgagatcacc

SEQ ID NO: 41398 - DNA, 370 bp, Gossypium hirsutum
  Clone ID: LIB3196-014-P1-M1-F7
atcacgcctgcaactgaaattaatatcccttgtacacatttaactagagttgggcagcagcatctcagtcttgcacaagagactctccgatgaggatgagtatgtttttaaacttattttttcttaaacacaacaacaaaactcttgaaagacttcaaattcttcccccttctagttttacaaggagagataaatctttccagtctgttctttggttttgatctgttaccattgtcaatgctgatccctagatgaggccttaagagggttgtgtcaatgaaaattgtttgaggcaggcctttagaaggaggcacaatttaactcacattttattaaactttgaggattttttggaacttcacatgtgaca

SEQ ID NO: 41399 - DNA, 380 bp, Gossypium hirsutum
  Clone ID: LIB3196-014-P1-M1-G1
atggcggcaggaggccgtggaggtggtgggaagcacagctcgaaaagtgatgccgattctggtttcctggggctgcggcctacttcggtggacccagcgctgaggcggcggcggcgaggcccaagaaataagaagcggggctggcggcggctagctcaggagccgctggggttggaggttgaccagttcctggaagacgtgcggctacaggagcgcacgagcggtggcttgttgtcagaggctccaaatgaaaaacttttcttcgtggacactggctccaaggaaaaagggctgactaagaagagaaccaaaggccagaagaagtcactgcttctcaagaaaccccttcgggttgacctcattctcgagaacacatccaa

SEQ ID NO: 41400 - DNA, 381 bp, Gossypium hirsutum
  Clone ID: LIB3196-014-P1-M1-G10
gcccccacagctagaggaccagtggttcttcaaggtatcaattatgcttctgggggaggtgggattctcaaccacactggaaacatctttggtggtcgaatcaactttgatgcacagttggacaattttgaaaatacgaggcaagatataatctccaccattggtgtttctgcaactctagagctgcttcaaagctctcttttctcggttacgatgggatccaatgatttcatcaataactactttacacccattgtctcagctgaagagcaaaaattagtccctccacaagtgtttgtggcctccatgattgcaagattcaagctacagcttactaaactttacacttcgagtgctagaaagatttttgtggtaaatgta

SEQ ID NO: 41401 - DNA, 400 bp, Gossypium hirsutum
  Clone ID: LIB3196-014-P1-M1-G3
atggagagagcagctctgagctgtggtctgcaggccctgggttaaaagtgccaccagacctaagcgaagccactcagagggctgagcctcctaaggggcagagcagtcctattcctgttgctagggctgccaggaagcccaaagacatgcagtgtgctaggagctggcccttgagatcagccactgggtcccagcaggccagtgctggctccgtcccgtgccatggccctcgggaactgctgggcacactgctctgtggccgcgggaggtcatgtggaagaactaggggcatgaatgctcacaggatctcaaggcctgcctgttggtgaccctgggtccttgaagccgagggtcagagcctctgtctctggctgctgcctcagggcaggggcctgggaca

SEQ ID NO: 41402 - DNA, 292 bp, Gossypium hirsutum
  Clone ID: LIB3196-014-P1-M1-G6
tttctggatcggcccacgagaggtgctgcagcagctggagactcacaagtcacatatatagctgcctttgctgctgaacgcagaccgtggctcaaacacagagctgtttgcaagcgaacaactgcgttctgtagaaccgattctcacgatactcgctgctaggccgcctgcctgaacccaactgggcccgatagctggagctctgtgcccgcttcctggaagggaatgagctgaaccccgactggtaggactatctccagtttttgatcacacaggcagccataccccctgc

SEQ ID NO: 41403 - DNA, 392 bp, Gossypium hirsutum
  Clone ID: LIB3196-014-P1-M1-G8
atctgtcactctgggcatcctgattgctggccaggtctctggtcccatgtcccctctgcccagaggcccacctgaaccctgccgtgacctttggcatgtgcttcctgattcgtgagccctggatcaagctgaccgcctataccctggcacagacactgggagccttcttgggtgctggaatcgtttctgggatgcattatgatgcaatctggcgctttgtcgacaaccagatctgtgtttagggccccaatggcacaactggcatctatgctacctacccctttggacacttggatataatcaatggcttctttgaccagttcataagcacaggctccctcatagagtgtgagctggccattgttgacccctacaacaacccagttccccga

SEQ ID NO: 41404 - DNA, 383 bp, Gossypium hirsutum
  Clone ID: LIB3196-014-P1-M1-G9
atcggacactctgggcatgctcattgctgggcgggtctatggtgccatgttcactctgcccaggggcccacctgaaccctgctcctacggtgcgccatgagcttactggctcgggtgccgcggatcaagctgcccgagtcttccctggcacagacgctgggagccttcttgcctgctggaatcgcccttgggtcgcatcatgatgcaatctggggctttgccgacaaccaactttttgactctggccccaatggcacagctggcatctttgctacctacccctctggacacttgaatatgatcaatggcttctttgaccagttcataggcacagcctccctcatcgtgagaccgctggccattgttgacccctacaacaaccc

SEQ ID NO: 41405 - DNA, 385 bp, Gossypium hirsutum
  Clone ID: LIB3196-014-P1-M1-H1
ctttcatctcgtctcttctgctctcaacttggctgccttaatctacgattttccttctcgcgacgagcatggcctgggtcctccccttgcagacccgaagttgatctgaaggatctcttgtcaaaagccgcatcaaagaaggctgtaacgccccatacccgagaccgtcgccggagtcgaacacgaggtgttaatagacttaattcattacttaaacaactcaaacaatttatttttaaaattttcagtcaagctaacaatctgcgtcatagtcgcttaaaaattcatatatcgagttacgaaacttgaaatttaatttcgtaaattttcgttgaaactatactcatatatatatttacctaattttttatagaatttttggtcg

SEQ ID NO: 41406 - DNA, 388 bp, Gossypium hirsutum
  Clone ID: LIB3196-014-P1-M1-H11
atttaccgtaaaagtatttacatcaaatattccttttcttctggtatgataacaaagggatttgaaccatagcattgccttttggctatccaatagcactttttggcagcaaaagcaatgttaaacaaaggcttttgccatccaaaacacgttttacttttggaaccaaacaaagaaattgacagctaaatgcttttcaacatcaattttgaactgcaacagtattgctaaattagccttttataaggaactaagcatacaacacttttcaatcgcaactgttatgcattcataaggaattaagtatattgactagcatataatttgctcttgatttcgaagctgactgctaagtgcttttcaaatactaaactagtatacaatcttt

SEQ ID NO: 41407 - DNA, 485 bp, Gossypium hirsutum
  Clone ID: LIB3196-014-P1-M1-H12
aggtgacactatagaacagtttgagcaaagaacgcaagctggtgccggtccgggaccgcagggacggggaagtgctgaagtggctgtccatagccctggtgtcaaagaactagaacttaatacgacatttagggggccagcatgactgatcctcttagagttttgaagctatgctcacagcttctgagctccctcagtcaccaaagatgtgaagtatgattgctctctctctcctgaagcttaggaaactagatgatgcaatagaagactgcacaaatgcagtgaagcttgatgacacttacataaaagcctacttgagaagagcccagtgttacatggacacagaacagtatgaagaagcagtacgagactatgaaaaagtgtatcagacggagaaaacaaaagaacacaaacagctcctaaaaaatgcacagctggaactgaagaagagtaagaggaaagattactacaagattctgggagtg

SEQ ID NO: 41408 - DNA, 280 bp, Gossypium hirsutum
  Clone ID: LIB3196-014-P1-M1-H4
attgccggcagggttggaaacaggcaggtacggaagctgagccgcagagttagctggcatctgacagaaaaacgtttgtctacagattttgagcatccgaagttgatccctgactaagtatactttgctgctccctcagcctttgaagaaatgtctgtcacgtatgatgattccgttggagtagaagtatccagcgacagcttctgggaggtcgggaactacaagcgtactgtgaagcggattgacgatggccaccgcctgtgcagcgacctaatgtact

SEQ ID NO: 41409 - DNA, 352 bp, Gossypium hirsutum
  Clone ID: LIB3196-014-P1-M1-H7
cggacgcgtgggtttagagcaaacacaactacagccaattccaaatcatgagtaggataattattctcgtgtggcttaagttttcgagaaacataggcaatcacctttccatcttgcatcaatacacaacccagaccattcaatgaggcatcattgaaaacaaaaaattctttcccagatttagtttgagtcaaaactagagcttctgttaacattgctttcaactattcaaaactctactagcatttatttgaccaaaaaaaaagtgacattcttctgtagcaattcagtcaatgggagagctatcaacaaatttcctttaacaaaccactgataatatccaaccagccct

SEQ ID NO: 41410 - DNA, 154 bp, Gossypium hirsutum
  Clone ID: LIB3196-015-P1-M1-A1
tctaactatttggtacgctggtgcgcgtgggggccccgccgcggtttcccgggttcgacccatgcttacagacactgttaggtagcctgttgtgagtgtgaggctcagtcttcaaacttgccccgacagctcaagaaacggtcttgcttgttga

SEQ ID NO: 41411 - DNA, 233 bp, Gossypium hirsutum
  Clone ID: LIB3196-015-P1-M1-A3
gacattataatggatatgccgctttgaaaccgaagtattctctttggtgtctcgaacaacctgtcccgacgcctacctgtatagatgtgggtcactaccctcatgctttcatcgtcatggttcaaaatgctttctgtatccgagataccttgagaagcttctaagctttgcaactctgagatacatctgcttatcagtcgagagatttctatacctatactattgctactttg

SEQ ID NO: 41412 - DNA, 378 bp, Gossypium hirsutum
  Clone ID: LIB3196-015-P1-M1-A4
atcgggaagtcgcggagacttcggaggtggcggatgtggctgtgagctggcgggggagaggccaacacgcggctgaaccaggctgaactgaggaaagctagaacgtcatcgtggtttacgtcttgcccttgccacagcagagactctgcctgactttggaggtgctgctgctgcctccactgtactcagacccgggtagcacaagattgtccatcctccagcagttcagtgcaacggtgtgaactcagcctgtttcagagcctccccaccatgacctccaagaagctggtgaactcggtggctggctgtgctgatgacgcccttgctggcctggtggcctgcaaccccaacctgcagcttctgcagggccaccgcgtg

SEQ ID NO: 41413 - DNA, 331 bp, Gossypium hirsutum
  Clone ID: LIB3196-015-P1-M1-A7
ttctccttcagtcgaaacctaaatcaccactcaaaccgccgattctcatcccccaaacaacaacccacacattcaagcctaggggacgacttttcagccttgagatctcctcttggctttgatttcaacaaagcaaaaggaaatctatggcgtatttacaaggtgagaccctccttcttttttttccttttctatttttgctttcgaatacaaaaacaacaaatccaaaagaatggagccgaaaaaaataaaatatctagagatttgaaccggaaatcacctttcgattttgggggccctttgggtatttcaatatgcgtgaaaatttaca

SEQ ID NO: 41414 - DNA, 204 bp, Gossypium hirsutum
  Clone ID: LIB3196-015-P1-M1-A8
cccacgcgtccgatttattattattattaagcttcttttctttggctgctgaaatttcttttcttcctggtaataatggttgcaagaaccccaccaaagcaaaggaaacttgtggtggctcctcttgatcctgtcctactcagagaaactgtaaagaaagtggaaaaatgtatggcaagattgcaagagttgcagtatacagta

SEQ ID NO: 41415 - DNA, 330 bp, Gossypium hirsutum
  Clone ID: LIB3196-015-P1-M1-B11
atatccccactggggaggctgtgtgtgtctacactgcaaaagaccctgacaaggagaatcaaaagatcagctaccgcatcctgagagacccagcagggtggctagccatggacccagacagtgggcaggtcactgttgcgggcaccctagaccgtgaggatgagcggtttgtgagaaacaacatctatgaagtcatggtcttggctgtggacaatggaagccctcccaccactggcacgggaaccctcctgctaacactgattgatgtcaacgaccatggcccagtccctgagccccgtgagatcaccattttgcaaccaaagccctgag

SEQ ID NO: 41416 - DNA, 301 bp, Gossypium hirsutum
  Clone ID: LIB3196-015-P1-M1-B12
cccacgcgtccggtaaattgttcaattttattaatgatttcaacctcttgtcttattatgtgagaaatagaaaaattcctaaaagaacctaagtctaaaaacttaaaatatcctaaaaaataaaataaaataaagtaaagacaagatataccccttattttatttagttgcagacccctcatgattcgacccatcttttacttcatcgtccttgttttttcttaaatctcctcgtgcattcttcgacattcgagtccacgagaatataaagtctggaaattcagacacaaaagcaaatgga

SEQ ID NO: 41417 - DNA, 389 bp, Gossypium hirsutum
  Clone ID: LIB3196-015-P1-M1-B2
atggaagctattagaagtcaaacgtccagatgcattactgctatcttagtttaaagggggaaagaaaagggaagaagaaaggaaaagagaaatccaactcctttttcatgttttgcttttgaacgatgagggtttgtgtgacaggcattcctctttgctgaggtgatagcaatggcctgagattttagcaagctcctggagtctgacgcttttgcagcactctgatcgcaactaaacatttgtctttgttttattagaagctagcgaaacaaagcaggttgtcccacgtgtataaaatacagggcagctatttcgttttctttacggagaatgatccttttggcttgtaaggccctctggtttggacaaaaaaccccactggagacgag

SEQ ID NO: 41418 - DNA, 370 bp, Gossypium hirsutum
  Clone ID: LIB3196-015-P1-M1-B4
agagattgataattccacatttatcataactttgggtaccacataaatgatttgtactaaagaacgaatagtcatcttttaatgattatattcttgaaaacgttcagctacaaaatggaccactatatatatacacacatataacagttctttagctgaaaacaataagaaattaaaagctaacaaaaaaaaatcaatatatttaagatgatgtaaaggtcccatgtagaaaagaagtggagattcatgtgtaaatctatgagctgatggatgattacacactttaattagttttcagctaattaattaaaatttaatgttgttaatggttaggtttaggtatgtaatgagaaagtaggaccacgcccac

SEQ ID NO: 41419 - DNA, 301 bp, Gossypium hirsutum
  Clone ID: LIB3196-015-P1-M1-B6
gattcgcttcagttggaggatcgtcgggagaccattgaagattttgagtgggaggaagtggatggtagggttgatgagagggatgttttaagcgtgtttgttgatggtgatgattatatcaattcaacttcactttccattgtcgctttgattgcacctgaagatgcggcctagatcgagagcgcagctgggttggctactttggagtgtgaagttctctcccatgctaatcatttggaaacatcccccgaaatgtgtgagaacactgacccattttttgctgatcgtgatgactatcttg

SEQ ID NO: 41420 - DNA, 247 bp, Gossypium hirsutum
  Clone ID: LIB3196-015-P1-M1-B7
atgcagaatcagttgtctgggaacctgctgaggaaattcaaaaacagcaatgggtggcagaagctgtgggtggtgttcacaaacttctgcctgttcttctacaagtcacaccaggacaatcatcccctcgccagcctgcctctgctcggctactcgctcaccatcccctccgagtccgagaacatccacaaagactacgtgttcaagctgcacttcaagtcccatgtctactacttcagggcggaaa

SEQ ID NO: 41421 - DNA, 257 bp, Gossypium hirsutum
  Clone ID: LIB3196-015-P1-M1-B8
tcgatccatagtaaggccggtcttgccccggttttaatgattttcacgggtttgagatccttgtgacatgatctacctattgcgtccatttttttgagttatgatgaaagttcaagggttgaaccatgtgctaaaattgtgtattttgatgtttaatggtggagtatacatgtttatggttagagaaacaacttttgctaagtgatttttaatgacaatgcttaaaaggactaatttgtaaaagttataaaactttt

SEQ ID NO: 41422 - DNA, 344 bp, Gossypium hirsutum
  Clone ID: LIB3196-015-P1-M1-B9
ctatacccattttttttcacattttcactttcaaagttctttgttcaggttctttgttcctcttctgccgattgctaggctgcaatcattgggctctgatggttttgacttgaagtggattgaaggatttaatattggcagtgtcattgaggcaaaaattggagaggcaaaggatattggagtagttgtcagcttcgacaaatataacgatgttttaggctttatcacacactctcaattgatgcatttgctcggctatattatagaaggatgctgccaccattgacctcctgccagaaaagaatgttaccacctacttgtgttaattatttcggcccaatgca

SEQ ID NO: 41423 - DNA, 371 bp, Gossypium hirsutum
  Clone ID: LIB3196-015-P1-M1-C1
ctaatccctagattgaataaccgagacttttctctaattaccactctagggttgcattaactcgatctatggatccccttattaggtttcaccctaatccggcaaaatcttgtcaccctatttctaggcacgcaatcaactccgcttaattatgacaaaagtactcttagacagggtctattcctcctctgaataagagcatgtcttgaatcagtatcctgggatatcaaaacaagaattaagaacacataattaagaacaaattaaatatttatcatacgattcagaaaataataacaggattcgtcttaggttttattccccttaagtatttaagggatttagttcataactaaataagaaaacatctc

SEQ ID NO: 41424 - DNA, 208 bp, Gossypium hirsutum
  Clone ID: LIB3196-015-P1-M1-C10
acgggcacgcgtgggatgagccgatgctctctttcaccacccatttaactactaaaataacgtcggttatgcgggaatctcgtacactgtgtgccaacctgtggtccaaaccactactatctgatatgtgcgataacactctctttcaagccttaaatgggtctggtcacacaagttatcattcaagacgtatctacagaggcggtgc

SEQ ID NO: 41425 - DNA, 164 bp, Gossypium hirsutum
  Clone ID: LIB3196-015-P1-M1-C6
atgtcgtcccttcccccgagttctaaaatccaggggcggtgttgtgggcatcaaggtagacaagggcctggttaccctggcagggacaataggcgagactaccacccaagggtggatggtctgtctgagcgctggcccagtaaagaaggattggttgacttttc

SEQ ID NO: 41426 - DNA, 250 bp, Gossypium hirsutum
  Clone ID: LIB3196-015-P1-M1-C7
cacgcctcctagaggaggctaaagatgctgctatcctcggccaacctggaatgctggaccaaacaggggcactgaagctacatttggatgaacaaaaagcaatggagttacctacggcacgagcagacggtgcactacgaattaataaggatgctggcccaagagctgaagataaacgtggtattgaccacatggccatgactcagacatagtgcgtgcaaccatgcatgctgaacacagcaaagttgtg

SEQ ID NO: 41427 - DNA, 229 bp, Gossypium hirsutum
  Clone ID: LIB3196-015-P1-M1-C9
cccacgcgtccgataaacaattaaatattcacaaaatcatgcatattgtaacaccccaaacctggcccagacgttatggctgaatctgacgtgccacattaaagttaaaaatccatttttcattttagtgttttataaaccgacttttgttgagctaacagagtgaatggaagctaggcaccaggtaggaatctgtaacagaggaggtgagccatgaacgttgcttaag

SEQ ID NO: 41428 - DNA, 364 bp, Gossypium hirsutum
  Clone ID: LIB3196-015-P1-M1-D11
atgcaatacgcagcattaacttggatgatctacattgatagcatggattgtgataagcacattgtttccacttcttgatatgactgagatcatatgtatctgttttagactaaattgctgatactccatgtgcacgagcttgctgaaaacacttgtaatgcatgactcataaagctgaaagtagacatagtagcacccaaaatagacaaaaatgttgatcgatactgtgaagctgctcacttacaaatacaagctctggcacacttgattacatcagatcacaacagtaattttctgtgtgaccaaatgttgctaagagttgagcatcatggccacatttcacttgatattccactactgggac

SEQ ID NO: 41429 - DNA, 331 bp, Gossypium hirsutum
  Clone ID: LIB3196-015-P1-M1-D12
ctcgataatcatcataacattgttggatttcctccatttaatttcatgaaaaatagtacatgaatatatagatcaatataacatttaattaccaaataaacacgtctatttgcttataaacttacctcggacggtacaaaatgaaatcgggcagctagtcgacaactttcgtttttccccgatccaaatctgatttctttagttcttgatctaaaaatattcaaattaagctcattcaaatatattttcattcaatttagtctaaaagcacataaataggaaaattactattttacccctgacatttacaatttttacaatttaatcccta

SEQ ID NO: 41430 - DNA, 322 bp, Gossypium hirsutum
  Clone ID: LIB3196-015-P1-M1-D2
gtcttgccttaaaaatcgtttttgtgcataccgagctatcttgtgtgacggtgctgttttctaagttagagggggggcacatatattgtatcttatagccaaagctggttcggaacttgctgatgatcgcgccggtccgatctgtaatggtatcaagtacattataaaggcgcgaattcggaggaaaagattctatgatgtgaccgacataagtcttcattcgaatgcgaccacaaagttgcgtcaagatgtgcgtgtgagactgcattatacttatctgatgattgagtcttctgttcactatcaagatgtgctcgagtat

SEQ ID NO: 41431 - DNA, 353 bp, Gossypium hirsutum
  Clone ID: LIB3196-015-P1-M1-D3
atgggcgctgcgtttattctcagaacgatctttattgataagacctgagctggccttcctatcatggatgtggaatgcattggtgaccttacaaagttggtgggaacagatacttcccttaaacaggagtttaggagcagtgggtccccatcttttggactacctcataacgttaccttgtggtgtagcacagccactccccttcagtgggagacttcaatgagttggtcacgctctcttggccttacatgtggcagttgttttcttgtttgcaggtgcggccgggtgtgtggcaacattacttcatgatgcagccatgaaccctgcagaagtggtcaagcagaggatgcaga

SEQ ID NO: 41432 - DNA, 235 bp, Gossypium hirsutum
  Clone ID: LIB3196-015-P1-M1-D9
cacggacaaacctgcagatgtggcttaatgtaacagtgcagacttgaattcaaaggatgcatgccacataggcctcacattcggttcatagccgcgctaaaaccttgttgcacaaccactacttatgcctaggacatttgccataattaactccacccatgttcaagctcgtgcacataggattatgtcaggtggacacttacatattcctccaaaccccctggtttaaggtatc

SEQ ID NO: 41433 - DNA, 364 bp, Gossypium hirsutum
  Clone ID: LIB3196-015-P1-M1-E2
cggacgcgtgggctctttcctgcaaggaataaggaaatagttgcatcttcaaagcatcatcaggaacaccttgttgactaaaggaaacacaaatcaataaaaatgatttaagatgttcccgtgcatcttcatgtggcaatccaacatattgcccattcgaattcagcatttgaaacattactggcttgagttcaaaatttccaacttggattgctggcctaacaactcctgattgtaagtcatccacgacaggtactacaaaatctcgtatagtcctattttgtatttgaacgtcttgtggcaacggtgggtcattagtgttttggtttcgtatcgggggtatgacttcatagtttcttagtaa

SEQ ID NO: 41434 - DNA, 367 bp, Gossypium hirsutum
  Clone ID: LIB3196-015-P1-M1-E4
ctttccttttgctttgctttgccccctctgttaatggagatcaatgccgtaaaccagacaaatacacccactttttacagcaaaacccagcaaaaccctttgatgggaagtgcattgcatgaagcttttcccactttccaaacaacccggggcaccaccaggaaaaggacagtctacttgaagtctcaaaacaaggattctttgagagaggaagaagaagaagaagaagaagacgacgatgatgatgatgatgagaggatagaagtaaaaagaaagattgtggcattgcaaaagatagttccaggaggtgaagcattaggggtggataagctgtttgaagaaactgctgggtatatattaactttgc

SEQ ID NO: 41435 - DNA, 291 bp, Gossypium hirsutum
  unsure (1)..(291): unsure at all n locations
  Clone ID: LIB3196-015-P1-M1-E5
ctttgatatgttgatacaaggaaattatgtaagttgagactattattaaactcaagtgcgatatgtcgagaaaatagatatatcaatgttgaatttatatcagatatgtgcaagtatactaacaatgctgctgtttgatgcttatacaagtgtcaaaactgttgattgaatggcaatatatttatttatatgatgcattgaatcggtaagtatttaaattttttttaatgatctgtgaatggnagtaatgctctgaaaccctggtcttgcaacggataccggttatgggtg

SEQ ID NO: 41436 - DNA, 358 bp, Gossypium hirsutum
  Clone ID: LIB3196-015-P1-M1-E7
cgctaacagatggaagtcacaatttttaggtttatttggcactttaataaggtataaataaggaaataaaagagaaaagaagcagtcgtcaaaggatagcacaaaaatgacttaaagaacatcattgaaaccgatttccaagcaattttccatcaagattcaagggtccaagcttatttccaagggagttaaaatggatttcatttattttagtggtcatattgtattttaggtgtttattcttgcaatgaaataattctcttaacatctagggaagatgaaccttaagatgaattctattgtttgatttctagttttatgcaataaatcttagttctttggtttcaattatgaatgc

SEQ ID NO: 41437 - DNA, 383 bp, Gossypium hirsutum
  Clone ID: LIB3196-015-P1-M1-E9
atggaggcgctgcggctgtaccagcatgcggtggagtacttcctccacgccatcaagtatgaggcccacagcgacaaggccaaggagagcattcgagccaagtgcgtgcagtacctagaccgggctgagaagctgaaggattatttacgaagcaaagagaaacacggcaagaaaccagtcaaagagaaccagagtgagggcaagggcagtgacagtgacagtgaaggggataatccggagaagaagaaactgcaggaacagctgatgggtgccgttgtgatggagaagcccaacatacggtggaacgacgtggccgggctggagggggccaaggaggccctcaaagaagctgtcattttgccaatcaaattcccacacttgtt

SEQ ID NO: 41438 - DNA, 369 bp, Gossypium hirsutum
  Clone ID: LIB3196-015-P1-M1-F12
atcgtgtattatgttaacaatgtctgcagattttgtaggaatacaaaacatggccttttttataagaaaaaagggccaatgactagaataacacatggggcaatctgtgaatatgcattataagcagcatttcagaaaagtagttggtgaaataactttcaagtcaaaaagggatatggaaaggcacttatgagtaacctctatttttttaagccttgcttttaaattaaacagctacagccatttaaggcttgagggtaataaagcttgagagtaataatgttagcttagcaaaggtttagatgtattacttcatgcatgctaccatgatagtaatgcagctcttcgagtcatttctggtcattcaag

SEQ ID NO: 41439 - DNA, 386 bp, Gossypium hirsutum
  Clone ID: LIB3196-015-P1-M1-F2
atgaaccagcccgcgaacccaggccgggagggggtttcggcctggggggaaggggattgacatgtctctcgaagacccctttttttgtagtccgaggcgaggtgcagaaggcggtgaacacggcccgcgggctataccagcgctggtgcgagcttctgcaggaaagcgcggcggtcggacgcgaggagctggactggacgaccaatgagctacggaatggcctgcgcagcatcgagtgggacctcgaggacctggaagagaccatcggtatagtggaagccaacccaggcaagttcaagctcccggccggggacctgcaggagagaaaggtgttcgtggagcggatgcgagaggcagtccaggaaatgaaggaccatatggtcagc

SEQ ID NO: 41440 - DNA, 353 bp, Gossypium hirsutum
  Clone ID: LIB3196-015-P1-M1-F3
ggggccttttgggggattggggtaaatggaatttaacaaccctaaaggttctaagaagcccggagggggagcactttctggtttgcttaagaatggaggcacatggtgggcttggcctctatggagttgccaatagtctctacaacattgatgggggggaccccgcacttgttttcaatatgattttgggcatcaaagataaggtgtattcacaggggacgcaccttatgataccatgggttgagagggctatcatatatgatgtccgcgcaagacctcatttagttgagagtactttcgggagtcgtgatctccacatgggcaagattggggttcgtgttctcactcgcccc

SEQ ID NO: 41441 - DNA, 330 bp, Gossypium hirsutum
  Clone ID: LIB3196-015-P1-M1-F6
atggagcgatggcagccgggggtctgagccgctcggaacgcaaagctgcggagcgggtccgaaggttgcgggaggagcagcagagggagcgcctccgccaggtgtcgcgcatcctgagaaaggcggcggcggagcgcagcgccgaggagggccggctgctggccgagagcgcggacctggtaacggagctgcagggccggagccggcggcgcgagggcctgaagcggcggcaggaggaggtgtgcgacgacccggaggagctgcgagggaaggtccgggagctggccagcgccgtccggaacgccaaatacttggtcgtctacacaggcg

SEQ ID NO: 41442 - DNA, 314 bp, Gossypium hirsutum
  Clone ID: LIB3196-015-P1-M1-F7
atgcacaattggtgtggatttcaaaataagaactatagagttagacgggaaaacaatcaagcttcaaatatgggacacagcaggccaggaaagatttcgaacaatcacctccagttattacagaggagcccatggcatcatagttgtgtatgatgtgacagatcaggagtccttcaataatgttaaacagtggctgcaggaaatagatcgttatgccagtgaaaatgtcaacaaattgttggtagggaacaaatgtgatctgaccacaaagaaagtagtagactacacaacagcaaaggaatttgctgattccc

SEQ ID NO: 41443 - DNA, 161 bp, Gossypium hirsutum
  Clone ID: LIB3196-015-P1-M1-F9
ataggagtttgcaggagcaaagctggaggattcggaggtccggtccgttgcctcaaaccagtcagagatggagttctcttcacttcaagacatgcccaaggagctggatccctctgctgggctccccttggactggctgcttgcttttgtgttctttgatg

SEQ ID NO: 41444 - DNA, 261 bp, Gossypium hirsutum
  Clone ID: LIB3196-015-P1-M1-G11
atcttttgatttaggcgctagatccattaataaagtatcagctcctaaaagataaaagaataatcctgtgtttccaccacagattaaatttacttcgtatgtgttcctgaaaagttagatgtcagttataataatataaactcagtctagcatgataaagtgaaaacatttgttctgtatgttctggcttccggcggggggctttgcatgtatcctatattaattttgcatgtatcctatagataatttggctcttcatat

SEQ ID NO: 41445 - DNA, 347 bp, Gossypium hirsutum
  Clone ID: LIB3196-015-P1-M1-G12
atgccgcgggagacgtggtgccgctgcgggctcgctctgcggtgcgctaggcttggtgggaaggcctgttctcgagtccgcgcttttcgtcaccgccatgtcgggaggtggtgtgattcgtggccccgcagggaacaacgattgccgcatctacgtgggtaacttacctccagacatccgaaccaaggacattgaggacgtgttctacaaatacggcgctatccgcgacatcgacctcaagaatcgccgcgggggaccgcccttcgccttcgttgagttcgaggacccgcgagacgcggaagacgcggtgtatggtcgcgacggctatgattacgatgggtaccgtc

SEQ ID NO: 41446 - DNA, 365 bp, Gossypium hirsutum
  Clone ID: LIB3196-015-P1-M1-G2
cggacgcgtgggcaccaacccacaggttgcttttgaaacaatggctgaaagaagaagaactcattctcaacagaatatcctttaaggagactcaaatcgactccgtccgtaaagaaatcacgcagctttacatcttcttcttcctcttccactccatttctcttctcctcctcttcaactcttcttcccgggactctcctgtgggtgcctgccacaggtcttggatcccatctctatgttctttactatgctccatggggatcatttgggctgttaggtataaaaccgatgtggaagggcacttggagaagctgctggaaagggaaaaagaggatgggaagctgttgggtaagtgtgtggaggag

SEQ ID NO: 41447 - DNA, 366 bp, Gossypium hirsutum
  Clone ID: LIB3196-015-P1-M1-G3
cggacgcgtgggcggacgcgtgggcggacgcgtgggcggacgcgtgggcggacgcgtgggattttttatgatttttataaaaaatttataatttttaataaattttaaatattttttatattttttattaaaatttaataatttttagactatgacatgtgatagctttaactggagaaagttaggggcggttaactttaacggtcaactgctaaagttaatgatcaaatgacattttgacagttcaagtacccaattgagtaaaaaaacagaggcttaatttcttcttcttcttcttcttttttaaaaaagtttgaagacatttttgatgtattttgaaagttcaagtactcaactgagtgcaaa

SEQ ID NO: 41448 - DNA, 374 bp, Gossypium hirsutum
  Clone ID: LIB3196-015-P1-M1-G5
tttgtctcgagacatatgccaaattgtctagagattgacctattgtgtattgagaccacaggctcaagtaattatatttatgttcttcttgtctcgagataagggcattatgtctcaagacgcactgatgtaggttgcattaaatgtgcgaaataaatactctcaacgactagaaaaactctctcaaacgtcaaaaactctctcaaacatctccaaacatccataaattaatgaaaaaaatataaatatcattcaaagacactcaaatggagacatgaaacaaatttacaaagatcaagacctaaaacccaatcaattctcgttgttgtccttatttacaaagacaacatcccactttttgtaaaatgatttaa

SEQ ID NO: 41449 - DNA, 252 bp, Gossypium hirsutum
  Clone ID: LIB3196-015-P1-M1-G8
agctgcaccgccttgctcatttgtgtgctgccgctctcagtcgtcaccacagccagccggccatcgttccgccgctgcacctgctccagaccgccactgccttctcacgctcctgctccaggccgccctgcctagctcgccggccatcgttccgccacttcccagcttgtcaccacatcctgtcgattacagcagcagcttgttgcaccgacagttgtagcctcccgaccctgcttctagggaaaagaaaac

SEQ ID NO: 41450 - DNA, 370 bp, Gossypium hirsutum
  Clone ID: LIB3196-015-P1-M1-H10
atcaaaggtccaaggttcacttcatatactgggcacactgaagggggttcttccaccttcttaaagagcatgtggctttctttccttggttcttcccattctccaggctctggctacagttgtaccaggctgacacccgccggaagatcctcagctatgaacgccagtaccgcacatcagcagaaagaatggctgagctgagactccaggaagacctgcacattcttaaagatgcccaggttgtaggaatgacaaccacaggtgagaaactgtggagaaatttacctgttgcatctaagttcacttctggtgccagattatctaaggacaaggtaagaggaactttcttggtaggtagaggaaaatacat

SEQ ID NO: 41451 - DNA, 386 bp, Gossypium hirsutum
  Clone ID: LIB3196-015-P1-M1-H2
atcctattttgagaaggacttttcatcaaaaccaatttaattatcttttcaagggcatgtaagtgtttagaaaaagtagtatttctgtatttgaaaatttcaaagttacagaatgaaattcaatgttttgttatgaaaatgagaagagtaaatagaagaactaaactttttctgatttcctaatgtttacaatcaaggcctgttaaggacagcacagaaattaattacaaccaatagtaacgtgcagctttgtaatattgattgaattgggactttaacttttgctttttattagcattacactggtgaaatggaaatggaattgagtaaagataaatagccactctcaatcagatgtgaagcacgattcagatatgaaagaatga

SEQ ID NO: 41452 - DNA, 394 bp, Gossypium hirsutum
  Clone ID: LIB3196-015-P1-M1-H4
tgctgccttcacaggcagtcacgatgcagatgcttcttgtttttgttcttaaaacctgtagtctaacctatttggtgtaagaagtttgaagcaagtatgatgagtttttactttttttttttttttttttggcaggttaaacccatccagagtaatggctgcggccttacccaggaccctgggggagttgcagctgtatagaatattacaaaaagccaatctactttcttatttcgatgcctttatccaacaaggtggtgatgatgtccagcaactctgtgaagcaggagaagaggagtttttggaaatcatggcactcgtgggcatggctagcaagccccttcatgttagaaggctgcaaaaagctttgagagactgggtcacaaaccctggg

SEQ ID NO: 41453 - DNA, 313 bp, Gossypium hirsutum
  unsure (1)..(313): unsure at all n locations
  Clone ID: LIB3196-015-P1-M1-H6
cccacgcgtccgcaatggttaaaattcgggaggttgctactggtgaagttgttaggatcataggtgcgctaactcctgttagtgacgtgaatgcaacagaggtgattatcattagtgagactagtacaacaaaggtattggcaacgtctacgtccatgactaccttcactgcccttactcatgatttcttaaagaacttgggttcttttaggagtcagatgatgaggggaagtggacaaaaaatgcctctattagttctcaagggttaaagtccatcntantaaaaaacaccactggtaaaaaggacataatg

SEQ ID NO: 41454 - DNA, 367 bp, Gossypium hirsutum
  Clone ID: LIB3196-015-P1-M1-H7
atcggtgccgtcctttccatgaagtcaggggtggaccagacttgtgtgttctgttctgtgctgctttttgggtcttatcattgaatatcattgataactacttttaagagttccaaaatcttatatttataagtgggcagaagcaattctttgatatttgagtcacatagagacttttgaccgtttgctttctaaagccacacagtgaatggagagcttgccattgtctagttgctttcattttctttcaggtgttgagccagtgcaggttcaggaaactgtggaaaatcacttgaagagtttgctgatcaaacattttgacccccgcaaagcagattctatttttactgaagaaggagaggtgaga

SEQ ID NO: 41455 - DNA, 244 bp, Gossypium hirsutum
  Clone ID: LIB3196-015-P1-M1-H8
ggcttggaggcattaaaaagcctatttaaacaccctagaggaggactaaagaggagacagagagtagggagtaagaaattactccaagaaagtcgattgatctatctcaaaagccagattcatcatcaagattgaagatctctcctcaatttcccttcagaagttttgggttttctttatgttttgtattcattatttttctgagatgttttcctttttagttatgaactaaatcccctaaata

SEQ ID NO: 41456 - DNA, 374 bp, Gossypium hirsutum
  Clone ID: LIB3196-016-P1-M1-A10
atgtgcccgcgccagagactcagccgcgctcccaccacccacacccaccgggccctcgtgcgcctgttctctaggagccagtccgcgccaccgccgcagcccagcccatggccaccctacgcagccatgaccaccaggtggaccagctaaccaacgacaaagcccgcgtcgaggtggagcgcgacaacctgaccgaggacatcatgcgcctccgggagaaattgcaggaggagatgcttcagagagaggaagccgagaacaccctgcaatctttcagacaggatgttgacaatgcgtctctggcacgtcttgaccttgaacgcaaagtggaatctttgcaagaagagattgcctttttgaaggaactccatgaa

SEQ ID NO: 41457 - DNA, 345 bp, Gossypium hirsutum
  Clone ID: LIB3196-016-P1-M1-A2
atagaagagcggaccagggctgctgccagcacccgccactcagagcgcctctgtcgctgggactctccagaactctttgctcacgagttaccaaaaaaccaaaagccaagatgttggtattgctggctggtatatttgtggtccacatcgccactgttattatgctatttgtttgcaccattgccaatgtctgggtggtttccaacgcgggaaatgcatcagtaggtctttggaataactgtaccaacactctctgcaatgggaccctgtcatacgcccatgaagatgccctgaagacagtgcaagccttcatgattctctctatcatattctctgccatatctc

SEQ ID NO: 41458 - DNA, 361 bp, Gossypium hirsutum
  unsure (1)..(361): unsure at all n locations
  Clone ID: LIB3196-016-P1-M1-A6
atccaaatcccgcgacagcaagaggctcgtagcgacctgcggtgctaaggaacgcagtgctttcaaaattggcgtacgctgttcgcctctcctcccgggagtcttctacctcctcccagaagatgagggaagcacagtatgaagactttggagactcaaccgttagctccggactgctgtccctcagaccaggatccagctccggcccatccttctccccacgcttccccgatggataaaaatgcggaccctgaactgatgccaccgcctctcgaaagggaggatccgccccggttgtccccagatcctgtggctggctcagctgtgccccangagctaggggagggggacccagtttctc

SEQ ID NO: 41459 - DNA, 386 bp, Gossypium hirsutum
  Clone ID: LIB3196-016-P1-M1-A7
agcaatctcacgaccttctagtgcagcaccagttgggcaatcgatggcaccagccccacctgccagtacagttccagccatttcaaatcccgcttcagctggatttattgcttctcgggaagatgtgctaacaagagcggctgctcttggacgtggtgctgcgacaacagggttcaagaggttccttgctttaaccgaagctgccaaggaccgtaaagatggacctttcagaaagctcttcaatgcatgagtattgcaaatattcctgtgttatattctcttctctctttttggcatgtttcttttataaccttttttcttccccctccccccctctttttttctttcatacaattttgcattagaaaacaaaatgtattatgatg

SEQ ID NO: 41460 - DNA, 299 bp, Gossypium hirsutum
  unsure (1)..(299): unsure at all n locations
  Clone ID: LIB3196-016-P1-M1-A8
ggatgtgaactgtccgtaccgtgctcgagtggccaactaccagcgtgacggccccatgtgcatgcaggacaatcagggtggtgctccaaattactaccctaacagctttggtgctccagaacaacaaccttctgtcctggagcatagcacccaatattctggagaagtgcggagattcaacactgccagtgatgataatgttactcaggtgcgggcattctatgtgaacgtgctgaatgaggaacagaggaaacgtctgtgtgagaacattgcangccacctgaaagatgcacaaattt

SEQ ID NO: 41461 - DNA, 204 bp, Gossypium hirsutum
  Clone ID: LIB3196-016-P1-M1-A9
caagtattttcaagatgctctgggtttctgaagttgaaaatgcagagtacgtatggagctccagttgcatttgttgatttccaggatactgcttgttcaactggtgcaatcaactctctgcaagggacaattctatactcatcaccagccggagacggcatgcgcttggaatatgcgaaatcccggatgggattgcgaaggaaa

SEQ ID NO: 41462 - DNA, 287 bp, Gossypium hirsutum
  Clone ID: LIB3196-016-P1-M1-B10
gatggaacgctggacgcccgcatgcccgttccggaatcgcggacgagccacgcgacgcgtccgatcattgtactctttacctaccaagatcaagaaaccttaacaatcaacaactgcgaactccatttggattaaatgacccaaaacccattaaccaaccaagcaacctggaagcaaaaaaaatggacgctgattatggtattcccagaaaacgatctgatgttaagaaactactatctcaataccaaccacagctttctccttgcctcgagggaactactgtcaag

SEQ ID NO: 41463 - DNA, 388 bp, Gossypium hirsutum
  Clone ID: LIB3196-016-P1-M1-B12
gtgttttggtaaatctacaaaccaagggtatttcagtaattttgtaaaccaatggtatttctataatttttagaaagtcaagggtatttctgtaattttgtaaatcaggggtattttggtaattttacaaattgagggtatttcggtaatttcacaaaccagtggtattttggtaattttataaactaggggtattttggtaattctaccctataggggtatttcagtaatttcacaatcgagggtaaaatggtaattttgtaaatcgagggtaaaacagtaattctgtaaatcaagggtaaaaagtaattctataaatcgagggtactttggtaattttacaagtcgagggcatttctgtaattggtaaactaaaatattctaaaca

SEQ ID NO: 41464 - DNA, 368 bp, Gossypium hirsutum
  Clone ID: LIB3196-016-P1-M1-B2
atctggccaagctgggccatgccagtgaccgcatcatcgccctggatggagacaccaaaaattccaccttctcggagatcttcaaaaaggagcacccggaccgcttcatcgagtgctacattgctgagcagaacatggtgagcatcgcggtgggctgtgccacccgcaacaggacggtgcccttctgcagcacttttgcagccttcttcacacgggcctttgaccagattcgcatggccgccatctccgagagcaacatcaacctctgtggctcccactgtggcgtttccatcggggaagacgggccctcccagatggccctggaagatctggccatgtttcgatcagtccccacgtcaactgtcttt

SEQ ID NO: 41465 - DNA, 425 bp, Gossypium hirsutum
  Clone ID: LIB3196-016-P1-M1-B3
atgtttccacttcttgatatgactgagatttatttctctcttttagatgaaattgttgatactttaggtgaaggagcttttggaaaagttgtggagtgcatcgatcataaagcgggaggtagacatgtagcagtaaaaatagttaaaaatgtggatagatactgtgaagctgctcgctcagaaatacaagttctggaacacttgaatacaacagaccccaacagtactttccgctgtgtccagatgttggaatggtttgagcatcatggtcacatttgcattgtttttgaactactgggacttagtacttacgacttcattaaagaaaatggttttctaccatttcgactggatcatatcagaaagatggcatatcagatatgcaagtctgtgaattttttgcacagtaataagttgactcacac

SEQ ID NO: 41466 - DNA, 278 bp, Gossypium hirsutum
  Clone ID: LIB3196-016-P1-M1-B9
gtttaggattagattcacagactttacttcctgtcggcatcacgaatacgcacgaattttggcctcatcaatttgtcctggaaaagggaaccataggcaatagtcaaagatggggtgtggtgtgtggtatggatgcaaacgaacgcacagttaaggtacaggggagaactatagctgtgaatcaaataaatggttttgatgggaagccggtggaggaaactgctagtgcttatgaacttgttgagcacccagactactcttactgttttggggatatc

SEQ ID NO: 41467 - DNA, 398 bp, Gossypium hirsutum
  Clone ID: LIB3196-016-P1-M1-C1
gaaatatctagatttctcttcatttctcttcaattccagcagctaaaaatgccataggagggttctataagctggtactccataatttttgcaccaagtgagttaatccttacctttttcttgtaatttttgtgtttctaagacttttacaactaggtcctactattaaattcattagtttttgatttcatggatgaaattgaaagtcgccatggtttaatgctgtaattttatgatgaaatagaatgaaattaaagctttaatttgtttatgagatgattttattaggtaatttcaatagaaattgatttttaggacctaattgtgaaaatgtttggaattaaagtctattgctgaaattttgattcctaaaagcgtgaagctagtttaaggtgata

SEQ ID NO: 41468 - DNA, 374 bp, Gossypium hirsutum
  Clone ID: LIB3196-016-P1-M1-C2
atcagtgctggacttcttgactgatcagttggtctgtctagatggtgatgcatatatatcatcaccgaactgtgaaactggcctacgcttaaaataacattaactggcgtgttataactggtgcttcctgctaacacagagctttaattacaactatgagccaccacgcctgtgcctacagtaatgattcacataggcaagtatgtactgggattcccattcatgtgaaatgccgggtttgggggacacctcttgctggaagacctggatagaggcctggagattaaccagcttttgccacatcaaacggaaatacggggtcggactgagtggctctctataggtactgaaagcttcagggcaactgatgcatg

SEQ ID NO: 41469 - DNA, 405 bp, Gossypium hirsutum
  Clone ID: LIB3196-016-P1-M1-C3
accccattagagccgcgtgggagggttggtttccaacatcaaatgatgactatggcctgctactcgaggacgatatcgaagaatatccttactactatctatggatcaaatatgctctcttagcctaccattatgaccctcaaatatcacttaccgagctctcatcgatctctctttacactcctcggatagttgaagtcgtgaaagaaaggccgaaatggaatccaaccgactttttcaaacgcattcacccaaacacaccgtatcttcaccagctaccttgtaattggggtgctgttttcttccccaaacattggagagaattctatgtgtatatgaacatgagggtgacaaaagatgccaaatcaaatccagttcaaatcccaaagtctagaacaaatggat

SEQ ID NO: 41470 - DNA, 398 bp, Gossypium hirsutum
  Clone ID: LIB3196-016-P1-M1-C4
tgttgctcagaaaaaaaatagcttgtgctgaatttacgattatgttgtaaaccttgataaaactatttgagttgcttataagctatcgattaaatattggtaatcaagtaccaaatccgtactaaggtgaagatatgagccgggaatgactagtatacctagacaattttgttacgatgaatgtgaaagagaatgtatatgtgataaggccgaatggccaatgtgatgaatgtgaaagtgtgtgtatgtgataaggccgaatggccaatgtgatgaatgtgaaagtgtatgtatgtgataaggccgaatgttcaatgtgatgaatgtgaaagtgtatgtatatgtgataaggccgaatggccaatgtgatgaatgtgaaagtgtatgtatatgtgata

SEQ ID NO: 41471 - DNA, 356 bp, Gossypium hirsutum
  Clone ID: LIB3196-016-P1-M1-C5
atgggagctgggggagttccatgccttcattgtctcggacctgcgggagctgcaggatcaggcgggccagagcatcctgctgctgcggatccagaacccctggggccggcggtgctggcaggggctctggagagaggggggtgaagggtggagccaggtagatgcagcggtaacgtctgagttcctgtcccagctccaggaaggggagttctgggtggaggaggaagagttcctcacggagtttgacgagatcaccattggctacccaatcacggaggccggccacctgcagagcctctacacagagaagctgctctgccacactcgggcgctgcctggggcctgggtcaaggggc

SEQ ID NO: 41472 - DNA, 263 bp, Gossypium hirsutum
  Clone ID: LIB3196-016-P1-M1-C7
gcggaaatattttgataacgatgctgttgtcttgaaggacatcaccagatgaatgcaatctgagtcttgtgtgttgggttgctacctaatcacatgtgcccttgggagctaaacgtagcagggaggatctaactgaatggatgtgagactggtacgactaagttctactgacaaacaaacttcattctggacagttggggaaggtagtcaaggcacgaagcacagcacgtgcaaaggcatggaggcatgacaacacagggtct

SEQ ID NO: 41473 - DNA, 378 bp, Gossypium hirsutum
  Clone ID: LIB3196-016-P1-M1-C9
cggacgcgtgggcaaaattgaaaagaaaataaaagagaaaatctcacttagggttcaacactctgaattggtgaattaggtatgcgttttgcttggttttttattatttctatgtttctgtaatcggaggttcgagtattatcgaacccatgcctcaatttctaatttttttggtgattttgaaatgtgccgtggatgaattcatgagctttgtgatgttatatgatgaaataagaaagtctgatgttgggtttacatgttttgtctttggatttttgatgaaattgagtaatttgggctaaattgtaaaaatgttattttgagggactaaaatgtgaaataaatgaaatttttggacttgtatgaaagctatgaaaa

SEQ ID NO: 41474 - DNA, 409 bp, Gossypium hirsutum
  Clone ID: LIB3196-016-P1-M1-D1
ccaaaacaacgctatgacggtggtcgagtctagattgaaacttaggaattcataggaaacaaatgacatgtcattaggtatttcatgtttcgggtgctggtcttgaatgttctaccagtggctaaggtcctgcatttgttatggatactctacaactcatgtgagtagcatcgtgtagcttacattccaacctacagctcgtgtgagcaatgatataaaggaaaggttacgattatatgtttaagcacattttgtgtgagctttcctgagtatccgatgatattataggtggttcaacgggaaagaaaagatattgaaatggtaagtttcgaaatggaattattcatatgcttataaaaagatgaatgaacaaatgatgtatgttcatacagaaatgacttatcttaag

SEQ ID NO: 41475 - DNA, 401 bp, Gossypium hirsutum
  Clone ID: LIB3196-016-P1-M1-D2
atgccccaggggtctttggacagacagcctttgggcaggcctcagtctttgggcagtcagcgagcagtgccgcaagtggtttttccttcagtcagcctgggttcacttccgtgcctgccttcggtcagcctgcttcctccacccccacatccaccagtggaagtgtctttggtgccgcctcaagtaccagtagctccagttccttctcatttggacagtcttctgccaacacaggaggggggctgtttggccaaagcaaccctcctgcttttgggcagagtcctggctttggacagggaggctctgtatttggtggtacctcagctgccaccacaacagcggcatcctctgggttcagcttttgtcaagcttcaagttttgggtctagtaatactggttct

SEQ ID NO: 41476 - DNA, 408 bp, Gossypium hirsutum
  Clone ID: LIB3196-016-P1-M1-D3
atgccctgggctccgcggcccctgcgtcctccggttagctgtgccactgcatctgagtgtcttctctccccacggctccccgagtttctaactctttctgcctcctcgcctcgaagctgttccttccccgcactcgagaatccccggaggcccggaggcctgcagcaggagcgaccatgaagaagctgatggtggtgctgagcctgatcgctgcagcctgggcagaggagcagaataagttggtgcatggcggaccctgcgacaagatatctcacccctaccaagctgctctctacacctccggtcacttgctgtgtggcggggtccttatccatccactgtgggtcctcacaactggccactgcaaaaaaccgaatctttaggttttactggggaagcataaccttc

SEQ ID NO: 41477 - DNA, 379 bp, Gossypium hirsutum
  Clone ID: LIB3196-016-P1-M1-D6
tttagatggttttctaccccctgaacaataaataggatgaggttttactgtaattggataaagtttactcttggacattatttcaatgctaaattaaggattctatggatgtcttcagttacttaaagagaaaataatgagagcatgaagcatatctgagaatatctttcgcctttaaggtgattcattcttgtctagagggaaaatttggttgatttgggaataaagtataattgagtattcaacaccatgaagataaatcttattttggaaatctactgaccgtaataccccaagcttgccctgaatactttgattggaattggaatatatcaaaaaaagttattatttttgttgtagttaggatactaaaagaata

SEQ ID NO: 41478 - DNA, 389 bp, Gossypium hirsutum
  Clone ID: LIB3196-016-P1-M1-D7
atcggagtacgacttgactactcgcatcgcgcactttttggatcggcatctagtctttccgctccttgagtttctctctgtaaaggagatatataatgaaaaggaattattacaaggtaaattggaccttcttagtgataccaacatggtagactttgctatggatgtatacaaaaacctttattctgatgatattcctcatgctttgagagagaaaagaaccacagtggttgcacaactgaaacagcttcaggcagaaacagaaccaattgtgaagatgtttgaagatccagaaactacgaggcaaatgcagtcaaccaaggatggtaggatgctctttgactacctggcggacaagcatggttttaagcaagaatatttaaatacac

SEQ ID NO: 41479 - DNA, 351 bp, Gossypium hirsutum
  Clone ID: LIB3196-016-P1-M1-D8
aggtggtacatgaatcttgtctccataaatctgacatttatggcattttttggcgtagttgatacaatccccttccaaagtagaccaataatatccaaacctcatgatttgtctagccatcgcgaaaccattagcgtgcatcccacaaacgccttcgtgaacttcttccaagattaacttagcttccacggcgtcaatacatctcaacagtacttggtcctttcttcttttatacaagatgtccccatccaaaacatagtcgcaagctaatctccttaagttcgcttatcattttcagttacctgttctgggtatttacgatctctcacatatcgcaatatatcctgatac

SEQ ID NO: 41480 - DNA, 332 bp, Gossypium hirsutum
  Clone ID: LIB3196-016-P1-M1-D9
tatatgaaagatggtgcgccatgaagtaccggtgcgccgttcccggattgacccactcaaactggatggaagggacaccagaaccttgattaaataacatgacacgggcactgcttttagattaaaatgaatgtgatttaaacagagcttaaacgttgtttgaaaagttgttggtgattaaaataatttgaaggcgatcatttgaaatgagattaaatcgaaagtcattaaaagaccttgaactccatgacgcaaggagagttgcgtcatttaaagcctaattaatcttaacgcgtttgctaaacgcagacgaaaaattggaaagatttatt

SEQ ID NO: 41481 - DNA, 416 bp, Gossypium hirsutum
  Clone ID: LIB3196-016-P1-M1-E10
atctcaaaaaaaaagagtcaagggctgggaaatgatgcacggattgcattgtggtttcaggtctgccagggaaaaggaaggtctcatctttttgtatatacagatgtatatatctttatgtatatacatatatacatctatgtatataaaactgcctcagtttaaaaacactgagtacctacgatacctcaacactggagatctaagtggacactgagaaatttagaaaatgaaccacagttaagaaggaaatgaatcattaccggatcaaaagtcatctatgatgaagagtttcaaaatgagcagtatccgtccaccatgaacaacactgaacaaactcagtgtttttacagagtagctacagtacctcatactgtaggtatatgtatacataagggtatgtatacatagatgta

SEQ ID NO: 41482 - DNA, 410 bp, Gossypium hirsutum
  Clone ID: LIB3196-016-P1-M1-E12
atgctattttaagttaacttttgtataacgtgtaacgtctctgtctaggttcatttttttgcatatagttgttcaatttatccagcactttttactgaaggctatcttctctccattaaattgtctttgcccctttatcaaacttcagttgactatatttatgtggatctatttctcttctctatattctgtttcactgatctgtgtgactatcttcaattagtaatatgctgtcttgattactatagatgtataataagatttgaaattgggtagtgtcattcctccaaatttgttcttctttaatattgcgttggctactctagatctcctgccttttcatataaagtttagaattagtttgttgctatctacaataaccttctgggattttgattgggactgcattg

SEQ ID NO: 41483 - DNA, 406 bp, Gossypium hirsutum
  Clone ID: LIB3196-016-P1-M1-E3
cggtgcggcctttccgggattcccgggatggaatctggacgtgaactgtgtacaaacagcttccacatatatgctgcaaaggatcttgtgagctgacactgctttaaatgaaatatggcatcagtcttaaccaatattgcatccacagattgtcgttgctaatatgccaaacgctcttggaagtgagtggccatgatgcaccaagagcggaagttcaatttgactgttatcgacgacccgtcaatgaaggaacttgtgctcagatacaatggtggcataaacatgtacgttctgctgcctgagaatgacctctgtgaaattgaaaacaaactgacctttgagaatctcatggaatggaccaatccaaggcgaatgacctctaagtatgttgaggtattttttgctc

SEQ ID NO: 41484 - DNA, 427 bp, Gossypium hirsutum
  Clone ID: LIB3196-016-P1-M1-E5
atctcggattctctgctctcctcgacggagtcctccccgcaggccagcccagagcccctggtactccatgaggagacaccgcccaccaccagcagcgactctgaggaggaacaagaagaggaggaagaaatcgatgttgtttctgtggaaaagaggcaggcccctggcaaaaggtcagagtcgggatcaccttctgctggaggccacagcaaacctcctcacagaccactggtcctcaagaggtgccacgtctgcacacatcagcacaactacgcggcgcctccctccactcggaaggactatcctgctgccaagagggtcaagttggacagtgtcagagtcctgagacagatcagcaacaaccgaaaatgcaccagccccaggtcctcggacaccgaggagaatgacaagaggcgaacacacaacg

SEQ ID NO: 41485 - DNA, 411 bp, Gossypium hirsutum
  Clone ID: LIB3196-016-P1-M1-E6
atctccagtccgcggtgccatggcccccgcccgtctgttcgcgctgctgctgatcttcgtaggcggagtcgccgagtcgatccgagagactgaagtcatcgacccccaggacctcctagaaggacgatacttcttcggagccctaccagatgatgaggatgtagtgggacccgggcaggaatctgatgactttgagctgtctggctctggagatctggatgacttggaagactccacgatcagccctgaagttatccatcccttggtgcctctagataaccatatccctgggaaggcagggtctgggagccaagtccccactgaaaccaagaaactggaggagaatgaggttattgccaagaggatctcacccattgaaacaagtgaggatgtgtctaacaaggtgtgcat

SEQ ID NO: 41486 - DNA, 327 bp, Gossypium hirsutum
  Clone ID: LIB3196-016-P1-M1-E8
atggaatctggacgtgaactttctaaaacagttgccacattcatcctgcaaaagatcttgttagatgacactggtttggcttatatatgtcagacgtatgagcgtttctcccatgttgccatgatcttgggtaagatggtcctgcagctatccaaagagccttctgcccgtctgctgaagcatgtagtgagatgttaccttcggctttcagataaccccaaggcacgtgaagcacttacgcagtgcctccctgaccagctgaaagacacaaccttcgcccaggtgcttaaagatgacaccaccacgaaacgctggcttgcacaactg

SEQ ID NO: 41487 - DNA, 397 bp, Gossypium hirsutum
  Clone ID: LIB3196-016-P1-M1-E9
ttttcaatttgatttggtggttgtgctgcaaaactgttagacccattagtagtaagatttttaagcattgaggatattgatgatacctgagacgcgagtgaagtaagagcgtctacttcatgtattccagcaactcgtattcctgacactgctcggttggttgaccattggtaattgttgctggcaatcctctcgataatttcataagcctcattataagacttagaaaggagagcaccattagcaaaagcgtccactaccatcctcgtgtgagcattgagaccattataaaatgtctcaagttggatgcaatgtgggattccatgatgagggcaatttcgtaataactttttatacctttcccatgcttaatacaaggacttataatccatttgtt

SEQ ID NO: 41488 - DNA, 408 bp, Gossypium hirsutum
  unsure (1)..(408): unsure at all n locations
  Clone ID: LIB3196-016-P1-M1-F1
ataccgtgtaccactgtgaggtcgagagcggagtctatttgctgaccccacagcctgcatcctgcccagaagtgtccagctgcaggggtagcctcaggaaaaccggctgctgctactcctgtgaggaggactcctgtcaggtccgcatcaacacaaccgtcctgtggcaccagggctgcaagactgaggtcaacatcaccttctgtgagggctcctgccccggagagtccaggtactcggcagaggcccaggccatgcagcaccagtgcacctgctgccaggagaggcgggtccacgaggagacggtgcccttgcgctgtcccgacggctcgactgtnctgcacacctacaaccatgtggatgagtgtggctgcacgcccttctgtgtcctgccccatggctccatat

SEQ ID NO: 41489 - DNA, 367 bp, Gossypium hirsutum
  Clone ID: LIB3196-016-P1-M1-F11
ggtacttggagcttgggacgagcatgttgaaattaacgatactgctttaccttctaagtggatctgcgggatcggtcgatcaaaacatgtggtctctacttgtacccggtgaaaaaaatcggatcacttcttatgggttgattgagaatgattttgttataggtcatgacctattaaaagaagaaggagctctggtaggatcctgacggacagaaaaagaatgcggtaagcttgataatgatcgagtgacattgcttctttggtacgagccagggaataccttatatattatgcaaaatggatcttgttctattggcgatcatagaaatttatatgaaaaatacgaatcaaaggttgaagaaaggga

SEQ ID NO: 41490 - DNA, 444 bp, Gossypium hirsutum
  Clone ID: LIB3196-016-P1-M1-F12
acactatagaacaaggggaacgaaaaagcacgctggtaccccgccgcaatttccgggatagaacagatgctggcaaatacatgagaggagaatgaaggaacagtaccttatggctatttcagataaagatcagcagctcagtcatgtgcagaatcttataagggaattgaggtcttattcctaccaggctcagcccctcaaagcgcaataccaaagacaggcatccccagagacatcagcttccccagatgggtcacaaaatctgatttatgagacagaacttctcacgaaccagctcaatgacagcttaaaggaaattcaccaaacggaattaagaattcagcaactgaacagcaagttctctcaactactggaagagaaaaacaccctttccattcagctgtgcgataccagtcaaagtcttcgtgagaaccagcagcacta

SEQ ID NO: 41491 - DNA, 427 bp, Gossypium hirsutum
  Clone ID: LIB3196-016-P1-M1-F2
atgggacacaacatggcggccggatgctaacgctctccttcgagggaccaccacggagatcctagtgcgggaccccgcctcagggaagtggaaagcagggggacacccttcctgcgtttttcttttccgtccagtgtcggcaaggggttgtcgccagcttccgcatccaagatgaagaactataaagcaattggcaaaatatgagagggaacgttttctgaagttatgaagatgcaaagcctgagagatggaaactactatgcatgtaaacaaatgaagcagcgctttgaaagtattgagcaagtcaacaacctacgagagatccaagcactgaggcgcctgaatccgcacccaaacattcttacgttgcatgaagtggtttttgacagaaaatctggttctcttgcactaatatgtgaacttatgg

SEQ ID NO: 41492 - DNA, 366 bp, Gossypium hirsutum
  Clone ID: LIB3196-016-P1-M1-F5
atggatattttgaggggtaatgatgagactattggatttgaggatattcttaatgatccatcacaaagtgaagtcatgggagagccacacttcatggtggaatataaactcggtttactgtagtagtgtgctgttcatggaaactgagggctgcatcttgtttatagtcgtctttgtactgtaatttgatgtacacaacattaaaagtactgacacctgagaatttctgctcaagtagcatcagtgatcatttaaaatttgggggcatctttggtttacagccatgtgacaattaaaagcaactttaggggatcatgttaaagctcttaaattattttaaagacaaaggctatggctttaatataa

SEQ ID NO: 41493 - DNA, 364 bp, Gossypium hirsutum
  Clone ID: LIB3196-016-P1-M1-F8
atcaacaagtttgcagtggccctgctagatgactcagtccgtgtgtataatgccagcagcaccatagtcccctccctgaagcaccggctgcagcgaaatgtggcggctctggcctggaaacctcttagtgcctctgtcttggctgtggcctgccagagctgcattctcatctggaccctggaccctacctccttgtatacccgaccctcttctggctgtgcccaagtgctgtctcaccctgggcatacacctgttactagcttggcctgggcccccagtggggggcggctgctctcagcttcacccgtggatgctgctatccgggtatgggatgtctcaacaaaaacctgtgtacccctttcct

SEQ ID NO: 41494 - DNA, 310 bp, Gossypium hirsutum
  Clone ID: LIB3196-016-P1-M1-G10
cggacgcctggtttgtctaaaaaaaaaagctatgtggcggtgaaaatggcgactctatattgctcagcggatgtttctgtctctactgtggaagcgcagtaactttgtaacgcgtctgaagagggggtacgaatccgccactgattatctacattttgggtctcagaaaatgggttcaatgcaatgatgatgccttgaacggattgtgtagctaatgtggaagatctgattaagtttttgtataaggaacttttgagtaaatattagcgaactgatgtagtgattactttgtacagtgcagagcgtgatg

SEQ ID NO: 41495 - DNA, 395 bp, Gossypium hirsutum
  Clone ID: LIB3196-016-P1-M1-G11
atcactgagccagctcagcgggcagggctgggagggagtgggacagattctgggagtgcagtggggaggagtcccggctgggctgagtgcacggagctgcttggtagtgccagagcccaagccccagagccctgctggagcggaggcagaccgaggcagcaggccccaccagcaggcgaagcagggagatgtcagactgctacacggagctggagaaggcggtcattgtcctggtggaaaacttctacaaatatgtgtctaagtacagcctggtgaagaacaagatcagcaagagcagcttccgcgagatgctccagaaagagctgaaccacatgctgtcggacacagggaaccggaaggctgcggataagctcatccagaacctggatgccaat

SEQ ID NO: 41496 - DNA, 294 bp, Gossypium hirsutum
  Clone ID: LIB3196-016-P1-M1-G12
ctctggaagaatccaaaaccggtcaaggatctggccgttccccccgcagtggctccgccgtgccggccaccgtgaacggtagccggaaatcgcctcgaggaagaattttctccccttttttttttgccttctatatatttatatttaatatatatgctcttttaaataaagggaagattgtgggtatgaacagattcaaaagaaaaaaaggagaaattggggtaaccttcgatttttgctcttcgttctgattttgctgcgaaattgaatttttctctttttccttttttaaaa

SEQ ID NO: 41497 - DNA, 386 bp, Gossypium hirsutum
  unsure (1)..(386): unsure at all n locations
  Clone ID: LIB3196-016-P1-M1-G8
attggttactggtttcatcgccaccacttaatggatgtttagtttagaaccattttgtctgctccctctggaagccttgggcagagcttactttgtaattgttggagaataactgctgaatttttagctgttttgagttgattcgcaccactgcaccacaacttaatatgaaaaaaactatttaacttatttattatcttgggaaaagtatacaatgaaaattttggtcatactggatttatcaaggatgatgaaaaacaatagatatatattcttttattatgttaaaatatgattgccattattaatcggcaaaatgtggaatgtatgttcttttcacagaaatatatgccttttgtgactttaattggntattttattggaaa

SEQ ID NO: 41498 - DNA, 322 bp, Gossypium hirsutum
  Clone ID: LIB3196-016-P1-M1-H1
atcaatactacaacaaacttcaaggcaagtttggctgaaaacagttgacaacaaagggccccctataaacttatccctcaaattgtaagtgatatgaaacacttgtcatatctttggccaaatcagaagatactcaccctgcttcaagtcagcttcagaaatgttttaaaagggactttcgctctggaactcaaaatcaatttttaaagaatatggctcttaataaaaaaaaaaaaaactggataatattatctgtaatacttcagtcctttacaagccaaatacatgtgtcaatgttcctagtatttcaaggaagcaatta

SEQ ID NO: 41499 - DNA, 407 bp, Gossypium hirsutum
  Clone ID: LIB3196-016-P1-M1-H10
cgctggtgcacgctgcggcacctccccgattttcccgatcagcccccaccataataaaggtctgctatcgatcacgaacagatggcatttggtcttaacaaaagaaaactgattcatcttgctgtatttaaagaacttgtgaagctttgcgaccctgcagttaaggactggacacacactaaccgaaaacaaaatgtgactatgtaagatggattgcaacggagtggctaaacaccaacatgttcaaagtcagcgattattaccacaggcaaagttgcaagacctgttaatatgtcagacacttcactgctacgacttttaaccaattaaaacagattgctaccaacacaagaattaccttttattggaactatacataaatcggtcctggttcattgcttatgaag

SEQ ID NO: 41500 - DNA, 255 bp, Gossypium hirsutum
  unsure (1)..(255): unsure at all n locations
  Clone ID: LIB3196-016-P1-M1-H11
attctgtggaagggggccgggagcaaaccctcagcgctctgtcgagcccccctcattgggtttccacgtgctcacgcgcagccgatgactttaccgagccccgcgcgcagaataagaaacgtgttgccgttattacagcnaaacgtgatagatcggatatatatagattgttacctcctaagccggcatggaaccttgctctctcagaaaagacaaaaacatcaccgttgtgtgtctaacaacatgaacaaatcc

SEQ ID NO: 41501 - DNA, 426 bp, Gossypium hirsutum
  Clone ID: LIB3196-016-P1-M1-H4
atgtggccttgcgggcggggaagaagagttttctccgcgctctcagccgctccttcgtctgccgcggctgtcaactcgctccggagcgcggcgccgagcgcagggatacggcgcccagcggcgtatcaagattctgccctccaagaaagtcttgccatgactggataggacccccagacaaatattcaaaccttcgacctgttcacttttacatacctgaaaatgaatcgccatcggaacaaaagcttagaaaattaagacaagaaacacaagaatggaatcaacagttctgggcaaaccagaatttgacttttagtaaggaaaaagaagaatttattcacttgagactaaaaactaaaggcctgggcctgagaactgaatcaagtcagaaggcaacattgaatgcagaagaaatggcagactttt

SEQ ID NO: 41502 - DNA, 324 bp, Gossypium hirsutum
  Clone ID: LIB3196-016-P1-M1-H7
aaaaataataactttttaagttttagatgatggtgtgccataatgtgttatatcatcactttttttttatgaaattcaaatttaacaataaaaaaaatgttaaatttaatatcaaaatggataaaaaaaaagtacaataccaaaataaactatgttttatgctttttctcgaccaccgttttggcttttgattggctttgcgagacgtacctaagctctcttcagagttgagaacaaaacttcaaaaatgtgttgctttttaacaacataaaaaatgataatacttttacattattagcacgatatactctaataacacttatc

SEQ ID NO: 41503 - DNA, 387 bp, Gossypium hirsutum
  Clone ID: LIB3196-016-P1-M1-H9
tttgtgatctcagcctttcatctaatctttccttagcttctcttgctactcctccaagcttatcgtcttgataagtctgagttaatatgctcctttgcttttttccccaaataaaacccaagttagtcccaaacataatttcctcgtttgaattttggaaccggaattactgtatatataatcttgaaatttaaagaattacctgtgaagaaacagagctgtgatgagtttcgttgttgcttgtatacaaacaaaaagaggacctccttgttaaaccaatcactgccacacttgacgaatcaaatgaccctccgctttgatggaaccgtcttcttcttgcacattcaacaccaggaagcatgccagccattggtgaaacatataaat

SEQ ID NO: 41504 - DNA, 353 bp, Gossypium hirsutum
  Clone ID: LIB3196-017-P1-M1-A11
ataaccacagtactagttgaatcttatacactcccagatggacgtatcatcaaagttgggggagagagatttgaagcaccagaagctttatttcagcctcacttgatcaatgttgaaggagttggtgttgctgaattgctttttaacacaattcaggcggctgacattgataccagatctgaattctacaaacacattgtgctttctggagggtctactatgtatcctggcctgccatcacggttggaacgagaacttaaacagctttacttagaacgagttttgaagggtgatgtggaaaaactttctaaatttaagatccgcattgaagacccaccccgcagaaagcacat

SEQ ID NO: 41505 - DNA, 363 bp, Gossypium hirsutum
  Clone ID: LIB3196-017-P1-M1-A12
atggcggctgcaggccctgcggctggagcgagaggagtacgttctactgaaggccctggcccttgccaattcagactctgtgcacatcgaagatgctgaggctgtggagcagctgcgagaagctctgcatgaggccctgctggagtacgaagccggccgggctggccccggagggggtgctgagcggcggagggcgggcaggctgctgctcacgctaccgctcctccgccagacagcgggcaaagtgctggcccatttctatggggtgaagctggaaggcaaggtgcccatgcacaagctcttcttggaaatgctcgaggccatgatggactgaggcaaggggtggtcctggtgggggttctg

SEQ ID NO: 41506 - DNA, 285 bp, Gossypium hirsutum
  Clone ID: LIB3196-017-P1-M1-A3
ataaaaaaaaaaaaaaaatagggacacctatcgagtgctgaccctgccagtggggtggccacattttgcatacgtaatagtgaaaattactcagtgcttctctgaaatttaacattaactgggaatgctgaatttttgtggtctgaatttgacaatcctgtctacttggcacctgttcaagccgcgtacgtgtattgacttatttaatcctcaaagcagttctgtgagttaggtgctattactgcccacgttgaggccccaagagtaacctgcccaagatcacac

SEQ ID NO: 41507 - DNA, 372 bp, Gossypium hirsutum
  Clone ID: LIB3196-017-P1-M1-A4
cagctggtgtgttttcattaactaatcctgttattgctacgacaaattgagcacatattcatcgattcgacaatgtcggtgttctctccttgggatttgccgttcccgtatgcttcaaaccactcgaatcttcaatgctttcttcggtgcatcactcccgttgttcctactcgattgctacctaagaaatgtaatgaagattcaaattgtggcaatctggaaacaaatgagaaagaaagagatgaagaagggtacagtttgagtgaggtttgggagtcatatagcgagtggagtgcttatggtgttgatgtcccaattgtggtgaacaatggcgactgtgtcgttcagtactattctccttcattatcagct

SEQ ID NO: 41508 - DNA, 375 bp, Gossypium hirsutum
  Clone ID: LIB3196-017-P1-M1-A5
atgggaaactttgggtctcactgttgcctggctggagcactttggtttatagctggaatactgagttcagttcagaaggcaggaaagacagtcacaccgacgtgtcctgaaggtgtaggctctccacttaggcgcacaagctgatggccgcagccagcaggccccggtgacgagacacttccagcccccatggtggggacgcctctcagtgccagtcccgctactgctgaggtagcctggtgttcttgccttcttggaaaatactgctcacctggtatctgtatgttaatgtttcttgctgagttacggttttgataaagaggctctcatttcttgcctcttgtattttcagtcctttcaatatgtccacctgga

SEQ ID NO: 41509 - DNA, 318 bp, Gossypium hirsutum
  Clone ID: LIB3196-017-P1-M1-A6
atgcctggaccggggtcttaacctaagatctgacctcgggcctaacccaggtgcttctgacccttgtagggatgccaaggctgctgtggtgactggcatggagctgaaggacatgagctcggaacaggtggatgagatcttagccaactaccaggagattgtctttgcacggacatccccccagcagaagctgatcatagtggagggctgtcagaggcatgatgccgctgctgctgcgacagaggatggagctaatgactctacggctctaaagaaggcaaacatagcggttgccatggggatagcatgttctgacgc

SEQ ID NO: 41510 - DNA, 372 bp, Gossypium hirsutum
  Clone ID: LIB3196-017-P1-M1-A8
gtttattcaacgcttcagcaccatttcaaattctaattaaaagaccaggagaaagaaaaatcagctacgccacacttatggcaaggcttatcagaaattcgctgatgaaggcattgattcttattttctttgcatcagtagccaccgccacaggcgatgccccattcatcgtcgctcacaagaaggcatcgttgaccagactcaaatcaggttcagaacgcgtttctgtctccatcgacatctacaatcaaggcttttcgacagcatatgatgtgagtctcctcgatgatagctggcctcaagatatgtttgatattgtcagtggcaacacttcacggtcatgggaaagacttgatgctggtggtcttctat

SEQ ID NO: 41511 - DNA, 370 bp, Gossypium hirsutum
  Clone ID: LIB3196-017-P1-M1-B1
ccgaataacagtccttcctaatgcatcctcagatgataaggcctgcacgtttgtggggacagccgcttatgttcctcctgaagtcttgaactcttctccagcaacatttggaaatgacctctgggcactcggctgcatcttgtaccaaatgctttcagggacttctccctttaaagatacaagtgaatggcttatatttcaaagaattatagccagagatataagattgccagattatttttctgaagaagccagagacctcattgaaaagctattggtaagatttacgtttacgcatgttgtatttggtttctaatcttcacaaaacttgtttgcttaagactttttgtatatccttttagttcttgtt

SEQ ID NO: 41512 - DNA, 369 bp, Gossypium hirsutum
  Clone ID: LIB3196-017-P1-M1-B12
atcgctgacgctgctgcaggcggacacggtgcgcggcgcggtgctgggctctcgcggcgcttgggccgtggagttcttcgcctcctggtgcggccactgcatcgccttcgccccgacgtggaaggcgctggccgaagacgtcaaagcctggaggccggccctgaatctcgctgccctggactgtgctgaggagaccaacagcgcagtctgcagagacttcaacatccctggcttcccaactgtgaggttcttcaaggccttttccaagaacggctcgggagcagtatttccagtggctggtgctgacatgcagacgctgcgggagaggctcattgacgccctggagtcccatcatgacacgtggccccc

SEQ ID NO: 41513 - DNA, 399 bp, Gossypium hirsutum
  Clone ID: LIB3196-017-P1-M1-B2
atggacactagatgtagtattctgaactacctaaagctaattaagaagagagcatctggagaactaatgacagttgccagatggatgagggagtttatcgcaaaccatcctgactacaagcaagacagtgtcataactgatgaaatgaattatagccttattttgaagtgtaaccaaattgcaaatgaattatgtgaatgcccagagttacttggatcagcatttatgaaagtaaaatatggtggaagcaaaactgactcatgcaactagacgttctacagaaagaaaaatgcgttactgttttattgacgacactgacgggaggtccatgcctctcaggccatgtgtatgatacgaagacccaatgatagaattgttctgggccagggtaacagaaat

SEQ ID NO: 41514 - DNA, 396 bp, Gossypium hirsutum
  Clone ID: LIB3196-017-P1-M1-B3
atcttttcagtttctgtacactgtgtgactttgaagtttgacaattaaattgactcccaacttaaggagaaatagggaaagtgatttgcaaggagaggtggccaataccagaacaccccgacagcagggatatctgccctgtcaggctcactagcttgtgtgtgtgttttcagaacaagcgcgtgagtatcaataaagatgagctgaagtcaacgtcgaaagctgttgaaactgttcacaatttgtgttgcaacgagaacaaaggggcctctgaactagtggcagaattgagcacactttatcagtgtattaggtaagtaaaacgaaacttagttcttcaatcagtcctttggggaggaggtggtttgagtttcatattgaaagctcaaataacaa

SEQ ID NO: 41515 - DNA, 368 bp, Gossypium hirsutum
  Clone ID: LIB3196-017-P1-M1-B4
aaatctgtcattttatttttataggggattgtcctttgcatggtacctaccaaaagttcaaaaccaaaaaaagaataaaaaagaaaggaaaaaagctttgtaaggtgataatgattaatgaggtagaatgagagccataatgacttgaatgggtaggcagagaggattgtgcctctactttcacaaaggatgggagcaataaataccttgtttttgaaatttggggaaaaagtgtatataaatcataatctagaaacctctttgttatgcatgccataaatgataaaaccatggcacatcaaataacaggcagttaaaaaaactatctgtttgctttatcttttcacacttttgatgttaataatcaa

SEQ ID NO: 41516 - DNA, 258 bp, Gossypium hirsutum
  Clone ID: LIB3196-017-P1-M1-B8
aatagcttgtgtattcttgtgtgcttgagcattagcagctacttttagtttaagggaaaaaggtgccatttcctatatgggacttttggttgtataagtgtttgtggattgatggatccatatactgataagcttaatgaaggaaaaatagaaattggctccttatcttggccttatactaaaaaaaaaaaaaaaaagctaagaaaaataaaaaaaatttaatttgaaacaagaacaaagagacatatcaaattaatg

SEQ ID NO: 41517 - DNA, 369 bp, Gossypium hirsutum
  Clone ID: LIB3196-017-P1-M1-B9
tgtaaatattgtacaagattgcccttttttttgctttgcatgaaacattattcaagacgagcaatggattaagtttgggggtgtgtaagctttaaactatatagatttttttatagttgtttatagaacccttttacttagaatttttgttaatctcgagtgtttgatatcaaaatttttttgttaatctcgggtgattttaattcatattaaaaaattagacataaattaagtgaagttttcaattttatacaaataagtattaatttggcataattttattattttatgttggatgttaatttttactcaaatattccagatggactgttgaattaataaagaatgggagctgaataatatcacaca

SEQ ID NO: 41518 - DNA, 368 bp, Gossypium hirsutum
  Clone ID: LIB3196-017-P1-M1-C12
atccgggccatgctgcctgcagccacagcctccctcctggggcccctcctcactgcctgggccctgctgccttttgcccagggccagacccccaactacaccagacccgtgttcctgtgcggaggggatgtgaagggggaatcaggttacgtggcaagtgaggggttccccaacctctacccccctaataaggagtgcatctggaccataacggtccccgagggtcagactgtgtccctctcattccgagtcttcgacctggagctgcaccccgcctgccgctacgacgcactggaggtcttcgctgggtctgggacttctggccagcggctcggacgcttttgcgggacctttcggcctgcgcccct

SEQ ID NO: 41519 - DNA, 314 bp, Gossypium hirsutum
  Clone ID: LIB3196-017-P1-M1-C5
cccacgcgtccgaaaaaaaagaataatccctaaaaaccatgacaaagcccaaactaaaaatatatcctttacattttccaaaaataaattctgccgaaccctcacggcactttgtataaagacaactttcatgggcggcggctccttctgatgaatcctttcttccgatgggcatcaatggcattcttttttttttttttgtcccaccctaaattcatttgccggccgtttttaccccagagacgcttattacacctccctgctctcaccttattgatttccttggaaatgcctttcttctcatcttccttggc

SEQ ID NO: 41520 - DNA, 161 bp, Gossypium hirsutum
  Clone ID: LIB3196-017-P1-M1-C7
ttgattcacctgtccaactttttgtggacactgatgtctattctagaaatcgctgctttcgcctggctctatcatataaggcaggaaagaattcctttctcttacctactgggcgtttcaaatgtaaggacattggtgagggaggacatgttcatgacatt

SEQ ID NO: 41521 - DNA, 363 bp, Gossypium hirsutum
  Clone ID: LIB3196-017-P1-M1-D11
ggaaagtaccaacactctctatataaagaaccaattaccaaaactcaaatgttttcctttaacatcaccaaatttctttatcttttctcattgttgtaaggtcgttgtttatgattagcatggagaacagaggttttaatgttagatttatggtacttctgggtttatgttgtcttctgatttcttgtgctgctgttcctgctataagtgagggaaatctcaagtcaaataaggagctactcccttcttccgcccgaaatttacttacccaggatgtgaaaaaatcaagtgaagctgaggaaatgtttggggaatatttaggacatgaattcaatgaagaaaggatgctaatggaaacaacag

SEQ ID NO: 41522 - DNA, 392 bp, Gossypium hirsutum
  Clone ID: LIB3196-017-P1-M1-D3
atggacacaatgacagaagtactctccacagtaaagcagaccttccacaacagtcactctgtgtcctaaaattttccaacatagatgtgatttatataactttgttgatacataaattgtcttggggtttacggaaattaactattatgtttgcactaagatttgctgggagtggtaggtggacatatctatatatcaataaggactaaccgccttttttgtacataggagattgataatactgtatttgttttaaccccacagtgttttactccactttcaaaaagatcaatttggcactttttttcatttttttaatggaaataagatttggtctctcattttaggttaaatgataactagaaagattaaactagacagatagtttatgt

SEQ ID NO: 41523 - DNA, 384 bp, Gossypium hirsutum
  Clone ID: LIB3196-017-P1-M1-D4
atcttaaaaaacaagcatacaaatcccatttttcctcctcacttttagtatttgcatacaacaatatattattttcctattttgtgagatgcctttgtacatattgtgactattttgtgcggtacttgttttattttgacttgtatttactactcccacatagggaatcagcagtccccactgtattatcttatcctcattcccttcccatttatttttatcttacacttcgcctcctttggtgtttagcattctacatactatttattcagcatctgtttatttaatgccctctgcatagtaggtactgggaatgtagcaattagcaagatagatacagccctgacctgcacaatttactgtctgtctggagctaatgtctat

SEQ ID NO: 41524 - DNA, 395 bp, Gossypium hirsutum
  Clone ID: LIB3196-017-P1-M1-E1
atccgcgggcagccaccgagccgcgaagcgacatggtgctgctcaaggagtatcgagtaatcctgcctgtgtccgtagatgagtatcaagtagggcagctgtattctgtggctgaggccagtaaaaacgaaacgggtggtggtgaaggcgtggaggtcctggtgaacgagccctatgagaaggacggtgagaaaggccagtacacacacaagatctaccacctgcagagcaaagtacccacgtttgttcgaatgctggccccagagggagccctgaatatacacgagaaagcgtggaatgcctacccttattgcagaaccgttatcacaaatgagtacatgaaagaagactttctgattaaaattgaaacctggcacaaaccagatcttggcacg

SEQ ID NO: 41525 - DNA, 342 bp, Gossypium hirsutum
  Clone ID: LIB3196-017-P1-M1-E10
attgtgcgagatgtcataaaacaagctcaaaatgaaaagagctttttcaaaaggaaaaccgtcctttttattgatgagattcatcggttcaataaatctcagcaggtcaacgctgctcttctgagccgctgtcgagtgattgttcttgagaagcttccagtagaggcaatggtgactattttaatgcgagcgatcaactccctgggaatccacgtcctagactctagccgtcccactgaccctctgagccacagcagcaacagcagctcagagccggccatgttcatagaggataaagcagtagacaccctggcttacctcagtgacggtgacgcccgagct

SEQ ID NO: 41526 - DNA, 367 bp, Gossypium hirsutum
  Clone ID: LIB3196-017-P1-M1-E12
atgaggaaagttaaaaagatgagcaatagagtagaaaatatcttttaaactagttggcctagattgtattaataactacttgagatgtttcaaagataggaagctattacttggacagagaacttgaaataagtggacccatgtataaaacctttgacttaaacattgatatttcagaatgtgttaaatagattaagacatagtaagttaaccctacatgttagaaagatggcgactgttaacaaaggctgtaacagattaagtactattttatatccagaaagtcttctctatgtagagaagtcagagagactagatgctttcactagggaatatcttcccacccagccatcacaagtgtggacaa

SEQ ID NO: 41527 - DNA, 358 bp, Gossypium hirsutum
  Clone ID: LIB3196-017-P1-M1-E3
atcggcggccggcggggcgcgggcggccacgcggggctcctgcagcatggctgtcagcaggaaggactggtccgcgctgtccagccttgcccggcagtggactctggaggatgaggaggagcaggagcgtgagcgcaggcggcggcaccgcaacctgagctccacgacggatgatgaggctcccaggctcagccagaatggggaccggcagacctctgcttctgagagactaccgagcgtggaagaagcagaggtgcccaagccactgcccccagccttcaaagatgagggtgaggacatccagagcatcctcagaacacggcatgagcggaggcagaggcggcaggtggtggaggct

SEQ ID NO: 41528 - DNA, 368 bp, Gossypium hirsutum
  Clone ID: LIB3196-017-P1-M1-E6
aaacggtaaaagcatcaaatcggctggaaaacaggattctcggattattagagggcatctcttacacactttatcaacaagtacgtattgacccaaagggtttgacactcgaattacgaactcagtagactcgacaggtagagtcttactggatgctaaggtttcacatacgtatgaatgagtagagccagggtcaatcaatgcaatcacactagtatcaaagagagtgaaagtaccagtgataacatcaggggaggatgcctcctctcgtgcgcgaatggcatatgctctagcaggagtacgggtctcggttcgaatagccgtatcagaggcccctctctgactaccacctctacctcctgaaattc

SEQ ID NO: 41529 - DNA, 331 bp, Gossypium hirsutum
  Clone ID: LIB3196-017-P1-M1-E7
atgcaagattgagtccacatttttcaaggacccctttggcttctgttgaacggattggtcgggagcccctggaaggctgtggcagcaatgaagtcaagaaataataagcactttaattacagtggtgggacttcacttttccttgctcttcccattgaaatacagcaaaataccctgcacataactcatcaggcaacgaggaaaggagcttgagagttgacagcaagacagatggtctagagacctctggactggaaaaatagcaaggtggtgggtcccctggggtttctttttctctcgggtgttcctacactagtccccaaggaaggct

SEQ ID NO: 41530 - DNA, 342 bp, Gossypium hirsutum
  Clone ID: LIB3196-017-P1-M1-E9
cccacgcgtccgaaagaaaaccatctaagttgaaggcttacatctttctccaaagaggctcgttggttcactgaaatattcttgttgccataagcagagcaatcatgaagaggacttcgagtcctacaagcccttgttgataatggagattcctgaaactttttcacatttgaaaaacagtaaaagggtaaataaatagaaaaagaagtatgcataattctcatactcggtcaacactgcaaaacaagggctatttttattacctcaatccctttatataacatgagatggccctaagttggaattggtcaaaaaatggattcctaccatgaccttaatttg

SEQ ID NO: 41531 - DNA, 393 bp, Gossypium hirsutum
  Clone ID: LIB3196-017-P1-M1-F2
ataaaaaaaaaaaaaaaatccagaaagaaagaggaggcaaagacagagcaaggcatgtggtgcttgtggggaggtgggcaacacaggaagagcatgggggaggaactgggcagagaggaggcattcccctccccctgcccttctcattgttcccaacccccggtccgttctcttcagcccccctcaacatcgttcgccagagaggctggataccgggacagggtgtgtggaggagagtgagggaatgatcatgactgcacctcctgctcacttttacactcctgttctcacttcctgcctctggcagaaaacagccctgcccctctggcttatctcagcaaagagcagtgcccatcccaactcaaagggcaatgggacagatcccagaagccc

SEQ ID NO: 41532 - DNA, 354 bp, Gossypium hirsutum
  Clone ID: LIB3196-017-P1-M1-F4
gtctaatttaatttatgtttaattagtgtgtctaaattatattaatgtttgttcagctaaattttatgtgatttaattttggttcatgtgtttttgtaggtgagttgaatttggagagtaatgaaacaaggttcatgcatgataggttcaatgtatgggacggtgcatgtaaggcctctttcaatgaatggtggctgatccatttggctccccaaggcacctatttggccaaaaggtgtccagcaacttaaagcacaagcttggccgatcgtattcccaaggcagcatctaagccattcacacctcaatttgaccaatcagctcctatacatgtatgggtggattcatgaacgt

SEQ ID NO: 41533 - DNA, 369 bp, Gossypium hirsutum
  Clone ID: LIB3196-017-P1-M1-F6
ggtatatttaactcctcttaaatctttaaatctattctttccatgccggttcggttttagttcgactggcatgaacattgttgcttatacaagagaactgaccattcgaatgcattaaagtgcaatatcttcctataaataaattacaatgattagactgttaacaaatccatgttatccataaaaaaaacatctacttctagaatgagaattctagattgacagaatgctaaataatgaggtacatttgtacaagatatatatgctgaacaaaaaaaactattatattcttttgacatacacaaaactacaaggcaattgagtggccaattcaaaaatagatgaacattgctagaggatggctggatg

SEQ ID NO: 41534 - DNA, 380 bp, Gossypium hirsutum
  Clone ID: LIB3196-017-P1-M1-F9
atggaggaagccggcagccaggagcggcagcggcagcagcgtccggagcagccgcagccttctggaagctccaggcggtctttctgccgagcctcggtcccggcccccatcctccccgccccatcggttgttgtctgggcggatttaaacagtcaagtaaaatcaagctgggtaatcatggcagaaggtggattcgatccctgtgaatgtgtttgctctcatgaacatgcaatgggaagactgatcaatctggtgttggaactgaccaaaaaagtgcagagacatggtcaatcctgaccatttaacttcccggtggttctttaacatcggggtcttcttgggtggtcctcctttaacaacctaaaaaggccctttttttc

SEQ ID NO: 41535 - DNA, 328 bp, Gossypium hirsutum
  Clone ID: LIB3196-017-P1-M1-G10
atgtggcggctggtgtggggttgagtcagttgtgagacccggagctggtgacccagcgggtggcccaccgaaccggcgacacagcgacaggcgtcagggctcgggagctgcgagcctggcctcgtcttagagctcggccgagccgccgtcgacccccgcccccagtcagcaaaccgccgccgcgggcgcgcccccgctctgcgctgtctctccgatggcgtccgcctcaggggccatggcgaagcacgagcagatcctggtcctcgacccgcccacagacctcaaattcaaaggccccttcacagatgtagtcactacaaatcttaaa

SEQ ID NO: 41536 - DNA, 371 bp, Gossypium hirsutum
  Clone ID: LIB3196-017-P1-M1-G3
taaccattgaaagcagctatgcataattgaattggtacattaaaaatctatcacacaacctgtttaagtggagcctctctagtttaggtcacagctaatacaattttaaggcttatagttaaggcaacagctggtggctaatgtttattgcttattggctttgaatgcatagaggtaagctatctatagtagattacttgtataaaacaagatatttgaagaaattttgaacccaatttaaaaaaaaaaatcactaataatttcactcgataagatcactatcatcaattatttacattagaggtaaatctgaagaggatagataggagtgttggcctcccaaataaacttgtattttaatctctaaaaga

SEQ ID NO: 41537 - DNA, 366 bp, Gossypium hirsutum
  Clone ID: LIB3196-017-P1-M1-G4
attctctctgacaccaccgtttaatcatcatcttgccctctctacctctttttgcatacctttcagaagggctcacaccttcaaaacacagggagggacactctcaaaagataatggaagattggataacaaaatttcaaaatgaaatattcttttttccccttcttttttccaaaatcgattccccccacttttttttcccaaaccctttgttccctaccccgattccctttattttttcccccaatttccccaaatcggcagcccttcttttattttttccaaaccattttttccctaccccgattccctttgtcacctcctttgtacgaccacccaaccttcgcctcatgtctccgcttccaa

SEQ ID NO: 41538 - DNA, 384 bp, Gossypium hirsutum
  Clone ID: LIB3196-017-P1-M1-G5
tcaccttgacttctttgttacaatgctaacatctttttttttgtgcagttatccatggttattaagcagggtggaagttcagtattttgtcatttaaaaagattagttatataatgtctgcttccagccagtgagaaacatctagccatacctttcttatgcaagccattcagttatcaggactgtgaattaacactgtatgaataaatttctgtacaccttattgtttggccagaaggccaccaagtgtacttatatgtgatccttaaattttaaagtagctgtaatcattaaatatttctaaacttttcttaaaccactaaaattaagctcttactacttagtcaactatcctcagctgtattcgtactcaattgtcagtat

SEQ ID NO: 41539 - DNA, 281 bp, Gossypium hirsutum
  Clone ID: LIB3196-017-P1-M1-G7
atcgcgcctcagaggccggtgaggcgccggcggccacgccgcggagggcgcgggccgagcagagccgggcgttgaggcccgcgcgcgcatggaggcgttgccggcaggcccctgagggcagcggggagacacgacccggcgacctcgcgcattcctcgagccgccacgcgctctcgccaccgggcggcgacgggccgcggagccggagcggccatggcgacgggcggtcagcagaaggagaacacgcttgttcaccttttcgccggcgggtgtggaggcac

SEQ ID NO: 41540 - DNA, 370 bp, Gossypium hirsutum
  Clone ID: LIB3196-017-P1-M1-G8
cccacgcgtccgacaaaatacaatgggaaatgttactactgcaagaagtgaagtaataatggaatgagcagagagttgtcagcatctacgcccctagaagatataatgtagctctcatttctcctgctgtcggattggtgttccataggataggagacaagacaaaattagacccatgtgaatgccagttaaacgacctttgctgcaataaaagactcaatttttcaaagagctggtactgggaatgtcatgactgctacagagggttggttgtttgtttttttggaccactagtgaacatgttcttagacgtatcaaaataatttcattatcaaaagcctatttcttttatggtcattaaaacctggtt

SEQ ID NO: 41541 - DNA, 365 bp, Gossypium hirsutum
  Clone ID: LIB3196-017-P1-M1-H12
atgccagggtcaggcctcagggcgtctgtcggcacggggcgtccactggcgcggggagacctgcccgctgccctgcaaaggccccaggagcagttcttcctggaccccctcttggtttgcaggagcctgggggcagctctgactgagacagggagagagagaacacaggtgaggtcccgccagggaacacctcgcagagccgtgcgtccctgtaccgtctccctccctcggacacaagccaaggccccacggaggacagacagtggcccccgcgtgccctctgacctgatcaggcccagtgtgagcaggaagcaaactccactgacctccactgagcggagagcctggcgccttctttctttccc

SEQ ID NO: 41542 - DNA, 391 bp, Gossypium hirsutum
  Clone ID: LIB3196-017-P1-M1-H4
atgcttgcttcaatattttccttaatttaatatgaggaaattcacagtttgctctggcctcttaattctttttaagtgaaacgaaattctttgtgcagagaaagaataagaatgctgataggcgaatgagacagaggtatgtatacacacaattacatatgttatcataatgtgtatatattacatatcacaatcaaataagcagtgcagtgatatttctaaagacacagaagtatctacagtgagaagtcatcctcccattcactcctgtctgcctagccagagatcctttctccagaaacaaccactttaaacagtttcttgtatagctttccggacataatctacttatatttaaataattatgtaaatattcattaaaacccacaaa

SEQ ID NO: 41543 - DNA, 381 bp, Gossypium hirsutum
  Clone ID: LIB3196-017-P1-M1-H6
atgccagggtcaggcctaatggcgtctgtcgtcacggggcgtggtgtgccatgggaaactgttacagcttgcataaagaccacgaaactgctctgaaaaatttccaacgagctgtgcaactgaattcaaaatttgcatatgcacacaccctttgtggtcacgagtatgttgccttagaggattttgagaatggaatcaagtgctaccagaatgcacttcgtattgattcaaggcattataatgcctggtatggtctaggaatgatctatcttcgccaagagaagtttgagttttcagagcatcactttggaatggctttccaaataaatccacgttcttctgttataatgtcctatcttggaactgctcttcatgccttaa

SEQ ID NO: 41544 - DNA, 369 bp, Gossypium hirsutum
  Clone ID: LIB3196-017-P1-M1-H9
atatttttttatctaaaatgaaaatatttctcatactgtttattaatacaaaaccatcggattttattttttaaaaataaataagattgatttactcatttcaagaaatgcattaatttaatggaaatgagtgaaggattcacgaccatacattaaactggaaaattaccttatacacatgaagattgtttaatatcatttcatgaatgcaacaataaaatcaaatcaaatcaaataagcttaaattaacctcaaatacaagaaaattggtcatgaattccaaaatatcataacacatacacaaagttgtttataggtcggatatccgttcaagtttgaaggcttgtttcaaaaatgaaaggatttaaa

SEQ ID NO: 41545 - DNA, 361 bp, Gossypium hirsutum
  Clone ID: LIB3196-018-P1-M1-A11
cccacgcgtccgccaagttaggcccacctattctgaaatctcactaatgctatatcggttacccacaatttgttcgtaacgaaaaacatggtgggtattttttccagattttctgttggcaggtctgcccatcgacgctccaagagtgcctttgtggaaaccaatgttatgccccaaaatgccgatgtagttgatgctgctacagctaccgcccatggaattgaagtagcagttgagttcaagcctgtcgaatgtccaaccgagcctttggacaatgaccgaccaattcagtgccccctacctgaacctttaattctaaacgatggaaggatctggaaggagcgagtttcggctaatgtaa

SEQ ID NO: 41546 - DNA, 313 bp, Gossypium hirsutum
  Clone ID: LIB3196-018-P1-M1-A12
gcaatagacactgttaaccaggtttttcatgtgctgactgattggcagaattactatgcaatgaaacattggttcctccggaatacttttagggatgctgttgttcaggtgttgaacattgaagatccagattcctatggtaaagcgactctatctcacctgacattacctgtggagtttcgagtttcctttcctagcaatgatagtgcaccagcaataaataatagaacacaatatgtatccattttttctcattctcattatcttcttcctgagatatttaaaaacttggagaaaggtgtggttttggatg

SEQ ID NO: 41547 - DNA, 386 bp, Gossypium hirsutum
  Clone ID: LIB3196-018-P1-M1-A3
attgcaactccaggacccaaataaatgataatgatttcccaagttctccccctaggaaacctctggagccatttactggatacccatatactagggaaatacaaacactcaaatatttcaaggacccttggaatctggatccaagttgcctatggtacgcagatcatggaaagtcatcataaaatacctgttaaaataggaagttagggcctcaaggttataaatgtagtcttggcccacatgaacttattgcaatacagtatttgtttcaaattaaaagctaaggtttgtttgaagacaaataccttgcttatttttctgtccatccccttgggagtatgttgaggcataagatgtgctaaataagcttcttttataaaaacaat

SEQ ID NO: 41548 - DNA, 279 bp, Gossypium hirsutum
  Clone ID: LIB3196-018-P1-M1-A7
aagtgagccttatatctctataaccgtacataagtctagtttcgtttaaaataggagatgagccttagagttatatattaagagttattaatttttgaatgagaaaaggttagaatgctaaggtagcagactgacacatctcattagttaatattttagctagaatgataagcaagttgaaacgagtatgagactcaaatgtaatgtcatggttgtatctttgtgactatatgtttgatgttttgtttacgctcagacttcgggctataacctaactag

SEQ ID NO: 41549 - DNA, 365 bp, Gossypium hirsutum
  Clone ID: LIB3196-018-P1-M1-A9
atcgcgtgtgtctgtgcgaggcctgcgccgcccaggagcaccgcggccacgagctggtgccgctggagcaggagcgcgcgcttcaggaggctgagcagccgaaagtcttgagcgccgtggaggaccgcatggacgaactgggtgctggcattgcacagtccaggcgcacagtggccctcatcaagagtgcagccgtggcggagcgggagagggtgagccggctgtttgcagaggctgcggctgccctgcagggctttcagacccaagtgctggccttcatcgaggagggggaagctgctatgctgggccgctcccagggtgacctgcggggacaggaggaacagcgcagcccgctgagccgagcc

SEQ ID NO: 41550 - DNA, 366 bp, Gossypium hirsutum
  Clone ID: LIB3196-018-P1-M1-B2
ggcagcttctgacaggcagaagtcttatgtggatctaaagagacacgagattgagtattccgtgaaggatttcgtgtttctcaaggtctcgccatagaagaagattttgaggttcggtcgtaagggcaagttaagctctaggtttattggtccatactgtattctgaagcgagtagggctagtcacctatcagttggagctaccttcagagttggatcggattcacgacgtgttccacgtctctatgttgaggcggtaccattctaatcccatgcatattgttcctgttggggaaattgagattcgatcagatctagccttcaaggtggaaccggttaagattctaaaacacgatgttaaagtttt

SEQ ID NO: 41551 - DNA, 240 bp, Gossypium hirsutum
  Clone ID: LIB3196-018-P1-M1-B6
atggatgagtgagtatctgcctcccttatgggcgactgcgtaacattgtttggtcgtgaataacctggactatgacacctttagactggccgaggcttcaacgatgtcgggtgagacagaaatagggtctaccccagaacccctctatggggaatgtggcgagagccgtattcaggctactggctcccgaagctgcagacctatgcaggattcaaccggagacctcaatggctacgtgga

SEQ ID NO: 41552 - DNA, 380 bp, Gossypium hirsutum
  Clone ID: LIB3196-018-P1-M1-B7
ataaacaatggaggtaaataccttcagtagggaaatgtatatatataatttcatatgcataggacgaagtaaaaacatagttctatgattgaggtgattggatctcaataatgttgaacaaaatgttggcaaatttttactggatcaaagtcctttcatgtttaaattttccagtgaatgattggagtacttgctaattaaagggatttaaatgcttttcatgtcatactttaaagtgaagactattgatattctgttacaaaaatatagaaatctcttaatcccacccagatgaagaattatcccttttccccatggagaaagtctataaacttgcccacctgcaagtctcaatttattttcaaaaagagcctttgcat

SEQ ID NO: 41553 - DNA, 346 bp, Gossypium hirsutum
  Clone ID: LIB3196-018-P1-M1-B8
tgcacattatgtattctctttacagaacattgattgtttttttttctgtcatgtgtttattttgtaataaacagaaatatttatatttgacatatgattatttatattattataatattttaattaagtggcatcaacttgattaaagtaatcatataaaattaaaatatatacatatttttataatttttttaaataattaatattttaatgatttgtctgtttcctaaaatagtatattttttttgctcataaatgagtgggatgagatttaatgtctaaaattatatagcatcattgaattgagtcatgtgagttcatttacgtaaaattatttaaaaataaa

SEQ ID NO: 41554 - DNA, 220 bp, Gossypium hirsutum
  Clone ID: LIB3196-018-P1-M1-B9
atccttgctgggcgtgccctgacctcccggtaccgtgtgccgcactgtgggccgggacgcctggtgctgccggctgggtgtgagccctgaggagctgagggtggctgtgacttggaggacgagtgggagctcaccaggagggtgtggagccggctgtttcatatcaggagcaacacggggctcagaaggcaggcacacttgctgtcccttcagagccatg

SEQ ID NO: 41555 - DNA, 382 bp, Gossypium hirsutum
  Clone ID: LIB3196-018-P1-M1-C1
atgtgaacgaagattcgaaaagccaattgaagaaaagggtgaaggaggcgaattttcagttgatcgaccgattattgaccgacctattcgaggtcgtggtggtcttggaagaggtcgagggggccgtggacgtggaatgggccgaggagatggatttgattctcgtggcaaacgtgaatttgatacggcatagtggaagtgatagatctggcctgaagcactaggacaaacgtggaggtagcggatctcacaactggggaactgtcaaagatgaattaactgacttggatcaatcaaatgtgactgaggaaacacctgcaggtgaagaacattatccagtggcagacactgaaaataaggagaatgaagttgaagaggtaaa

SEQ ID NO: 41556 - DNA, 317 bp, Gossypium hirsutum
  Clone ID: LIB3196-018-P1-M1-C10
gaattcagagacttaactagtgaaccaacaggatcattcttgacacagatttatactaaattaaatttaactatgtaattcatggattgaggtttgttttaaaataacaaaactactaacgatgtgactcgaactcttgacctcgatcccaaaagcaaagctcagaacctcagatacagagatttaattacttcaaaatgacacaaggtaacattcaaaattttgggacgttacagtgaatcattggtcgagtgaaataaagaaaggaggccggaaagcaatggttcggttgaattatttaaaggacttggctttct

SEQ ID NO: 41557 - DNA, 381 bp, Gossypium hirsutum
  Clone ID: LIB3196-018-P1-M1-C2
ataaggttggtaagggaggtgagtggtgtgactcttactccttaggtgcccagaatttaccatcatctctgaaggagttacagggaagtggtctccccaattgtcccctccctccagtattgcctcctctcactttagcatatattaattagcaggttgggctagagaaatcagctgctatgcgggttgattattattattatttttaatccttttccttatttgccttctactccccttaatctaatctaaaagctctgttccatgcaactttatccctctcttccccttcccttatatattgaggctatggggtaggagaaaagtgcacaacccaccaccccctttactcgtgcattaaaatttctcatttaccctttc

SEQ ID NO: 41558 - DNA, 383 bp, Gossypium hirsutum
  Clone ID: LIB3196-018-P1-M1-C4
atgcgggctgggccgccaaggcaagatggtggactacagcgtgtgggaccacattgaggtgtctgatgatgaagacgagacgcaccccaacatcgacacggccagcctcttccgctggcggcatcaggcccgggtggagcgcatggagcagttccagaaggagaaggaggaactggacaggggctgccgcgagtgcaagcgcaaggtggccgaatgccagaggaagctgaaggagctggaggtggctgagggcggcaaggcagagctggagcggctgcaggccgaggcacagcagctgcgcaaagaggagcggagctgggagcagaagctggaagagatgcgcaagaaggagaagagcatgccctggaacgtggacacgctca

SEQ ID NO: 41559 - DNA, 297 bp, Gossypium hirsutum
  Clone ID: LIB3196-018-P1-M1-C8
ggagtcgctggtcgtcggttgtggtaaactcgtgtgggacgcacgtgccatcgcttctcattacgttcgttccctcaaaggtttctggtttgatgtctttgtgattctgccggttcctcaggcagtattttggttagttgtaccaaaattaataatggaagagcagatcaagattataatgacaatattgttattaatcttcttgttccaattcttaccaaaggtttttccacatcatttgcttaatgagaagggtgcaaaaaggttacccggttaacatcttttggcaccaatttt

SEQ ID NO: 41560 - DNA, 370 bp, Gossypium hirsutum
  Clone ID: LIB3196-018-P1-M1-C9
atctgcggtcgagcggcagacgcaaacatgcagatctttgtgaagaccctcacgggcaaaaccatcaccctcgaggtcgagcccagtgacaccattgagaatgtcaaagccaaaattcaagacaaggagggtatcccacctgaccagcagcgtctgatatttgctggcaaacagctggaagatggccgcactctctcagactacaacatccagaaagagtccaccctgcacctggtgttgcgcctgcgaggtggcattattgagccttccctccgccagcttgcccagaaatacaactgtgacaagatgatctgccgcaagtgctatgctcgccttcaccctcgtgctgtcaactgccgcaagaagaagt

SEQ ID NO: 41561 - DNA, 330 bp, Gossypium hirsutum
  Clone ID: LIB3196-018-P1-M1-D10
atggagtctcttagtttagacaaaagcccatctgaccaatgacattggagcatcccaggagtgaaggtctagaagtattggagtccagtgcaggggtggggggagtgtttcgtatcatttatgtcttgctctttcaaaaaacatttttttttttttttcactattttaggtatgagaacgagctggccctgcgccagagcgtggaggctgacatcaacggcctgcgccgggtgctggatgagctcaccctgtctaagactgacctggagatgcagatcgagagcctgaatgaggagctggcctacatgaataaaaaccccgagggggtga

SEQ ID NO: 41562 - DNA, 256 bp, Gossypium hirsutum
  Clone ID: LIB3196-018-P1-M1-D12
gcgattcctcggaaccaatatgaaactgaccctaagcatcaagacaagtcctaagaaatgtaatacgaggatacaagagcaagtatgagtggtaaaaggcatacagtgcgtaagggcatattagagtgctggaaaaaagccttaaaacgagcggagcatgagtgtgagtgcacattcagtatttctttccaagtgaattagtgcagcttgtcttgaggtttgcaaatactatgttactaactgccgaaagaaacat

SEQ ID NO: 41563 - DNA, 312 bp, Gossypium hirsutum
  Clone ID: LIB3196-018-P1-M1-D2
atagttttgcgaacgctcttggcgcgtcccgggccggaagcattctgcacacgcctttttcccacggcaggatgcccaagaggaaggccagctccgtcgaaagggccgccaaggtagagcccaagaggaaatcggcgcggttggcaactaaacctcctgcccaagttgaagccaaaccgttaaaggcagcaactaatgataaatctttagacaaaaaagtgcaaacaaaagggaaaaggggagcaaaaggtaaacaagccgaagtggctttccgagaaactaaagaagatttacctgccgaaaaccgggaaa

SEQ ID NO: 41564 - DNA, 353 bp, Gossypium hirsutum
  Clone ID: LIB3196-018-P1-M1-D4
cccacgcgtccgaagaattctcatgtcccttatagaaacagcaaactggctcaagttctccagagttctttgggtggccaggcgaaaacccttatgtttgtgcagcttaatcctgatgtagaatcatatgctgaaaccataagtactttgaagtttgccgaaagagtttctggtgttgagttaggtgctgcacggactaacagagaaggaagagatatcagagaacttatggaacaagtttcatcgctcaaagaaaccatcacaaagaaagatcaggagattgagcgtttgcaactgcttaagggtaatggcaatagtactaagcgtggtatgagctcactgaggtacgagtc

SEQ ID NO: 41565 - DNA, 359 bp, Gossypium hirsutum
  Clone ID: LIB3196-018-P1-M1-D8
gttggccatgacacaacattactgaacaatctctttttcaatgtttctatgaacgcttgtttcatatggagttgaagatgattgatgttgtaaatcgaaggtgtaatagcccggtttagaccctagtcggaatagtggttttgagaccaaaaatttgaatcagaaaattattttaatattattttctgtgtttataatatgtgaatgagcatgtgtgaaagtttcgtatgaaaatttgatcttttgtgtgcttaatttgtgaaaaggacctaatcgcgtaaaatgtaaaagtggccttctatttgttaaagtgcttattttttatgtcttcttaaatgtgaggtccctattatgttatt

SEQ ID NO: 41566 - DNA, 337 bp, Gossypium hirsutum
  Clone ID: LIB3196-018-P1-M1-D9
atcaaagatgggaaaagactggcaataaacacatgtaaagaaatgctaggtgaattcaaagcaaaagttgcatgggtcaacagtagttccctgaattgatagggaatattggtaaagtgatccttgtttttactttgatatgcacaataacgcttagggtccagctgtcacatacagacctggaacttcatcggagaagggagcagatcgtacagcgcactcttagagaggctcagcttgctgccctgcaatatgaagaggtgaaaataaggaccaagcagattcatagagattctgttctggactttgtcaaagggagttctttgaatgacactgt

SEQ ID NO: 41567 - DNA, 280 bp, Gossypium hirsutum
  Clone ID: LIB3196-018-P1-M1-E11
atgccagaggtggaagagaccagcatgcccatgaccatggtgttccagaaccaggtggtggagctcatcctgcagcagtgcgcggacatcttcccgccgcactgactgcgggcctgcgactggggcggcggccgcgggcctgccacacaagctgggcggaggaggccacgcagcccggccttctctctgggaccttccggcagggcacaggcgcaggcaggtgtgacttttgcaccctcggcatttggggtgccgtgacccctactgtggcttttgcaaa

SEQ ID NO: 41568 - DNA, 395 bp, Gossypium hirsutum
  Clone ID: LIB3196-018-P1-M1-E12
gacactatagaacaagttggtacgaagaagcacgctggtaccgcgccgcaatatccgggatcacaatcatgcgggctagcactctgggctgggatcaacaggtcagagctgctgatcgcacctgagatccctaatggagataaagtaacttgaggacctaaactgatcttaggatggatataggatagcacacactcacttgcctgcaagaagacagcctaacggctggaggagataggttcatcttcatgcagccttttcagcaggatagacaaggcttatacacatgatagctaaaaggtttccagagagtgcaagcaaaagatgaaagacttcttttgttcttggcctggaacttgaacttagacaaggtttcttaagccaaaattattttt

SEQ ID NO: 41569 - DNA, 363 bp, Gossypium hirsutum
  Clone ID: LIB3196-018-P1-M1-E3
gtgatttgtcatatgtgaaaagatagatgtgtgaataagattcgtgctaagataagaccttggcccctagagtaaaccttagaaaaaaatttggtgtatgagtaggatctatcaaatgtgaatgaggtgatctttgcagtttttgaaacttatgaatgaaagtgatatctatgtttcttattaagtacatgtaactcattcttaagaccttatgatctttatttgagaaaagttgaatgtttggatttatggatatatatacatttgatgcaactttgagaatggattctgaatctgaaatatgtaaaagtgcgacatacatgtgtaattgatttgtatgaaagaatagcttcaactccttaa

SEQ ID NO: 41570 - DNA, 367 bp, Gossypium hirsutum
  Clone ID: LIB3196-018-P1-M1-E5
aagaacttgggcagaaacttgtaacgagaatgcgtgcaatggcaaaccgttttattgcagtccatttgagatttgaaccggatatgcttgcattttctggttgttactttggtggcggtgacaaggagaggaatgagcttggagagatacgaaagagatgggaaacattgacagatgtagatgctgatgaaaagaggaggcgaggtagatgtccacttactcctcatgaagtaggattgatgctgagggcacttggttttgcaaatgactcgtacatctatgttgcatctggagaaatatatggtggagaagagacgcttcgaccactaagagatctctttcccaacttttatacgaaagagatgct

SEQ ID NO: 41571 - DNA, 339 bp, Gossypium hirsutum
  Clone ID: LIB3196-018-P1-M1-E7
atggccaaatgcaggactctctcatgttattgtcattatgaatatcttatctaaattttagttcatgcatgttcttacttaatcctggtgtttctgctgttagatgttagagtttaataaattgtgatatgcatatatttttttacatgaaggattctagtttctaattttacttttctgatctcaaaaaaattaaacttgaaaaacagggttaaattcttcaactattgcctcaagatcagttttgtcctattgtccttaaaaaggagatttagacttgtctgcctaacaagtattttttagggcatggtcctattccatagaaagagttgagatacc

SEQ ID NO: 41572 - DNA, 343 bp, Gossypium hirsutum
  Clone ID: LIB3196-018-P1-M1-E9
ctttgttttttttttttctttcatttgcttataattatttttttatttttagttttcaatttctgaatggctaaatcttcgaatccggaagggaagcccggtgttcgaatcgtggtggccggagaccgaggcactggaaagtcgagcttgatcgtaacagccgccgccgagactttcccgacaaatgtgcttcggttgttgccgccaacaaggttgccgggagatttctaccccgaccgtgtccccatcaccatcattgatacctccgctaatccggaggatagaggtaaactagcagaagaactgaagcgagctgatgcagtagtgcttacttatgcgtgtg

SEQ ID NO: 41573 - DNA, 360 bp, Gossypium hirsutum
  Clone ID: LIB3196-018-P1-M1-F10
atagcgagtccggagcctggcggatgtggacgcgatcctggcacgtactgtaggagatgtgcgtcgtgccgagcagttattgcaggatgcacggcgggcaaggagccgggctgagggtgagaaacagaaggcggagacagtacaggcagcactggaggaggcccaacgggcacagggtgttgcccaaggtgccatccggggggcagtggctgacacacgggacacagagcagaccctataccaggtacaggagaggatgacaggtgcagagcaggcactgagatctgcaggtgaaagggctcggcagttggatgctctcctggaggctctgaagttgaaatgggcgggaaatagtctggc

SEQ ID NO: 41574 - DNA, 358 bp, Gossypium hirsutum
  Clone ID: LIB3196-018-P1-M1-F11
atcagcagatgagatgacaggcaggtaggtggacggacagatagcagcgacgcggacaggtcgaacagtgacggccacgtagaggatctggcagacaaagagacaagactttggaggtgacccgccatggggcccagcatgtttttgctcctgtgtgttcttggtctcagccaggcagccacaccgaagattttcaatggcaccgagtgtggacgtaacttcacagccgtggcaggtggggttgtttgagggcagcagcctgcgctgcgggggtgtccttattgacagcaggtgggtccttacagcggctcactgcatcggcagcaggtactgggtgcgcctgggggaacacagactt

SEQ ID NO: 41575 - DNA, 382 bp, Gossypium hirsutum
  Clone ID: LIB3196-018-P1-M1-F12
atccatcacgggagggaccgtcacagaatgtgggcaacaccttctgggaaaagatcttaggacagacgcctcaaccacctcaggcacatgttagaaagctacaggaatgtcttaagaatattttgcagtaatgtgtatagtactggatgcagtgactgctgcctgggccagagggtggcagaaggctttaggggcagaaacgttggaagaaagattgtcacaagtcaatctggggaagagaaaaatatttcccaaatcatttttctcacgcactccctctgacacgagagtttctcatctgccttcctccctccctcccgccctccttcttgctttctaaaatcagcatgtcctttacttacatagtttccccacggttgat

SEQ ID NO: 41576 - DNA, 380 bp, Gossypium hirsutum
  Clone ID: LIB3196-018-P1-M1-F3
atcttttctacgccttcccatcgttagaggagatgttactgagatgggtgcgttaaagtttaggcttttcagagtttattttactaacaactgaaaggaaaaaagctaactagaactgactggtctgatttgttttagattctgggctttactaggacttcctactctcagaatctctggattataaaatctgggtggggtgggagctggaaaattaatcacggatgaaaagaaaatcaactctaaggctccagttagaagatttttgaaaatggcagaacatgactggccttcattcaagtcaaaatatttaaagcaatccttgctaagaagaacttgattttgtataagcagtcccttaaatagagttgcttctcaag

SEQ ID NO: 41577 - DNA, 360 bp, Gossypium hirsutum
  Clone ID: LIB3196-018-P1-M1-F4
caacaaaaactagggaacaaaatcaaatttttcttaaagaagagcgaaaagtaaactgttttttctaaaacaacactattaacaataaaatgaatcctaaatatacatgatataatgaatgaatgcttttaagctaactcaaagtacaactacaattttctttaaaatgagtttattttaggtcttcaaaagtaacgtaagttagcttagccatttcggtggttaatgtagccttctcaatctagccataatgtctaggccggatttgggaggttacaattttcatcccaaagttaatatcgtgacacaccaggccttgtgttgcgacataacgaccaatatgctcttttgtagccatct

SEQ ID NO: 41578 - DNA, 328 bp, Gossypium hirsutum
  Clone ID: LIB3196-018-P1-M1-F5
atccgtttcccagctgaattaggttcttattttgcacaggtgcgtgcagtggccccagggatccggaaaaagtaacactgaacctcttgtaacatccagcaatggggcccgggaacctgggcgcactagtgtgccgcgcttaaggcttcagttcgctggcttcgcacttttttctacaaaggcgagtatctcctatctgcgggctcatacttactaccgcctgaggtgccatggcccccaagccgggggccgagtggagcacagccctgtcccatctggtgctgggagtggtgtctctggacgcagccgtgagcacagcccacgcaag

SEQ ID NO: 41579 - DNA, 320 bp, Gossypium hirsutum
  Clone ID: LIB3196-018-P1-M1-F9
taaaaaaaaaacttttttaaatggcgatgaaaaattttaggcgttttcttatttggttttcccttcctcggataggcattactttaagttgctaggtgtcaatcagaaatcatatgcagattgtgcataagctggtcaaggaggtgatctcagttttgtggtgtaagatgttcaggagtttggggaccctaatatcagatacggatgaaaagaaaatcaactcttacgctccctcaagaaaattccaaaatggcagaacatgactggccttcattccagtcaaaatatttaaagcaattcttggtaagaagaacttgatt

SEQ ID NO: 41580 - DNA, 382 bp, Gossypium hirsutum
  Clone ID: LIB3196-018-P1-M1-G10
atgtttggccttcttacctctatacagtctgataacggaccagcctttaatagtcaaatcacccaagcagtttctcaggctcttggtattcagtgaaacctttatatcttttactgtcctcaatcttcaggaaaggtagaatggactaatggtcttttaaaaacacaccttaccaagctcagtcaccaacttaaaaaggactagacaatacttttgccactttcctttctcagaattcaggcctgtcctcggaatgctacaggttacagcccatttgagctcctgtgtggacactcctttttattaagccccagtctcattccagacaccagaacaacttgaacggcaccccaaaaacttagagcctaaaaactcactaacc

SEQ ID NO: 41581 - DNA, 365 bp, Gossypium hirsutum
  unsure (1)..(365): unsure at all n locations
  Clone ID: LIB3196-018-P1-M1-G12
atctcgctccgaggtccccgcgccagagactcagccgcgctcccaccacccacacccaccgcgccctcgtccgcctcttctctaggagccagtccgcgccaccgccgcagcccagcccatcgccaccctccgcagccatgaccaccaggtccgtgtcctcgtcctcctaccgcaggatgttcggcggcccgggcaccgcgagccggccgagctccagccggagctacgtgactacgtncacccgcacctacagcctgggcagcgcgctgcgccccagcaccagccgcagcctctacgcctcgtccccgggcggcgtgtatgccacgcgctcctcttgggtgcgcctgcggagcagcgtgcccggg

SEQ ID NO: 41582 - DNA, 356 bp, Gossypium hirsutum
  Clone ID: LIB3196-018-P1-M1-G2
cggacgcgtgggcgctcgtgggttgcattatcttcactcgggtgcaaaacacatcatcattcatcgagacgtgaagacaacgaacatcttgttggatgagaagtgggtggctaaagtttcggattttgggttgtctagaataggccctaccaacatgtccaaggcacatgttagcacagtggtgaaaggtagctttgggtatttagacccggagtattatcgtcgtcaacaattgacggaaaaatctgacgtatattcatttggtgtggtactatgtgaaatactatgtgcgaggcccccaattagtcgaacggtcgagaaggcgcacataagcttaacagcatgggctcaacaat

SEQ ID NO: 41583 - DNA, 377 bp, Gossypium hirsutum
  Clone ID: LIB3196-018-P1-M1-G4
atggcctctgcagagatgggggcagctggtcaggatggccattcgggctcagcacagcaaggcagcccagactcagactggggaagcaaacaggggctggacaggccaggagagcctgtcggacagtgatcctgagatgtgggagttgctgcagagggagaaggacaggcagtgtcgtggcctggagctcattgcctcagagaacttctgcagccgagctgcgctggaggccctggggtcctgtctgaacaacaagtactcggagggttatcctggcaagagatattatgggggagcagaggtggtggatgaaatcgagctgctgtgccagcgccgggccttggaagcctttgacctggatcctgcacagtggggag

SEQ ID NO: 41584 - DNA, 385 bp, Gossypium hirsutum
  Clone ID: LIB3196-018-P1-M1-G5
atgtggacattggcgtcaagtactcggagaagcaggagcggaatttcgatgatgccaccatgaaggccggccagtgtgtcatcgggctgcagatgggcaccaacaaatgcgccagccagtcgggcatgaccgcgtacggcacgaggaggcatctctatgaccccaagaaccatatcctgccccccatggaccactcgaccatcagcctccagatgggcacaaacaagtgtgcgagccaggtgggcatgacggctcccgggacgcggcggcacatttatgacaccaagctgggaaccgacaagtgtgacaacttctccatgttcctgcagatgggctacacgcagggcgccaaccagagcggacaggtctttggcctgggccgaca

SEQ ID NO: 41585 - DNA, 365 bp, Gossypium hirsutum
  Clone ID: LIB3196-018-P1-M1-G7
atcgaagcgtctgcggccgtcgtttgagtcgtcgctgccggtgccactgccacctcgcggatcaggagccagcgttgttcgcctgacgcctcgctgccggtgggaggaagcgagagggaagccgcttgcgggtttgtcgccgctgcttgcccaccgcctgggagagccgagccccgggccacacggtcgcttgccaccgctcgtagccgttacccgttggccgccacagtcttcgggcgggagaggcgcgcgccatggcttctggagccgattcaaaaggtgatgacctatcaacagccattctcaaacagaagaaccgttccaatcggttaattgttgatgaagccatcaatgaggacaacagt

SEQ ID NO: 41586 - DNA, 335 bp, Gossypium hirsutum
  Clone ID: LIB3196-018-P1-M1-G9
caagaatcaaagatcttatgaatagatgtttttagaatgcaaaaacacgaaatcaatctccaagattgattttcaacaagccgaatctgtccaagaactaaaccgatgaataaagccccaaattccagcaacttgatttttcccaaaattccaacaacctaaaacaatcagttttgacaagaagaattcgacaagattaattggaaaagataaggttagtcgaatttggctaccaagaatgagtaccgatcgatctttttgaggaataaaaatgggtgtggattcacaagaagaataaacaagtttgatcaaaagaatctgcattaaccgaattt

SEQ ID NO: 41587 - DNA, 356 bp, Gossypium hirsutum
  Clone ID: LIB3196-018-P1-M1-H1
cccacgcgtccgcaaaaacttgtggagaatggactgcaatgaagatgatatgtgtcagattgacaaagatgattctatggtaagcaaagtgaggctttgttctgcttcgatgattgataacgttaaccagagctctaatcccacttgtggaacttctcatgatgggaagggcaaatttgatgatgatcctgaagtggtagcagttggtttccctactgcttgtgttgaagggggagatgacttttcatatactggtgggccatcgttctctgaagatgatgatgaactcactgaatcaaaaattagagcctttttagatgagaaggcattagaactaaagaagctacaaacaccat

SEQ ID NO: 41588 - DNA, 370 bp, Gossypium hirsutum
  Clone ID: LIB3196-018-P1-M1-H11
cccacgcgtgcgcccacgcgtccgaaaatattttttttaaaaattaaaaaattaaaaaattaaaatatatattaaaaaattaatatttttaaaaaaaattataaatctgtaaaatattattaaatatataaaaaaatttaaaaagttaaaaaaaataaaaacgatttaaaagttaagtccataacaaatctggacatatggttatttggatttgcattgaatctggacaaccatgtgaccagattcattcaagaagatttttctaaaattatataaagtttaaaaatattaaaaattaattttctttgaaaattgatggggataatgttttaattgtattggtagcttttaagatatataaaaaaatatt

SEQ ID NO: 41589 - DNA, 379 bp, Gossypium hirsutum
  Clone ID: LIB3196-018-P1-M1-H2
atgctgagagtgcggagtgtgtgctccgggctcggaacacacatttattattaaaaaatccaaaaaaaatctaaaaaaatcttttaaaaaaccccaaaaaaatttacaaaaaatccgcgtctcccccgccggagacttttatttttttttcttcctcttttataaaataacccggtgaagcagccgagaccgacccgcccgcccgcggccccgcagcagctccaagaaggaaccaagagaccgaggccttcccgctgcccggacccgacaccggcacccttcctccccgccggcagacggcagccagcggcagtggatcgaccccgttctgcggccggtgagtagttttcaattccggttgatgtttgtccctctgcgc

SEQ ID NO: 41590 - DNA, 292 bp, Gossypium hirsutum
  Clone ID: LIB3196-018-P1-M1-H3
atgccaaagggcctggattacaggcttgagccactgaggctgtgctgatttccttgtgctataagattatagtcccttccacttgcttatagactctgttgaggcacactatgcactctggtgttgatactgatgtggaatgccttgatcttaactatccaccaactatacctgactgcctgaagtggtgatattaccttagccctaatcctgtggagtatctgtgaccacaagtgtgctctggccttattttaagtttaatgaaaaatgtcgtctatacacaccttctaca

SEQ ID NO: 41591 - DNA, 339 bp, Gossypium hirsutum
  Clone ID: LIB3196-018-P1-M1-H8
gccaagttcacttcctacaccccttggccatacctcgggatctctctccacgcacgagatagagctttcggaagattatacttgtatcatttctcatggtccgaacccaaaaacaactcgcatttttggtgactgtattttggaatgtcacaacgatgagttgaccaattttgataaaacagctgaacaagtgcctcgattcggtaagaacacggagccatcaactgcttacccttctgatgagttcttgagcttctgttactcttgcaagaaaaagttcgagaaagaagacgacatttatatgtacaggggggaaaaggcgttttgcagtacttgatt

SEQ ID NO: 41592 - DNA, 367 bp, Gossypium hirsutum
  Clone ID: LIB3196-019-P1-M1-A1
gaaagatttccttgtttaatatgatgacattcaagacaatggcgactttcatgccaccaccaccactagcgacttttcttgcattccaccctcaagataacaatattattgctataggcatggacgattcaacgattcagatatataatgttcgtgtggatgaggtgaagagtaagcttaaaggccactccaaaagaataactggccttgccttctctcatgtactgagtgtgcttgtctcatcaggagcagattctcagctttgtgtatggaacactgatggatgggaaaagcagaggtctagattcttgcaggttccatctgggagaacaccaacggcactgtcagacacacgtgtacaattcca

SEQ ID NO: 41593 - DNA, 311 bp, Gossypium hirsutum
  Clone ID: LIB3196-019-P1-M1-A2
attgcccaccgacaggatgggccttatgacctcactgaagggggcagttgagcacagactgctctgtcctgctctcctgcccattggtttctcaagccccttctcctggttgctttcttcttccccatcaagccccatcccctgccagtgccacctgggtagtttacacacatatccctccgctccccaagctgctgaagatgaaatggggaacagaccccgaggcctcatgcaggagcttaccctgcccagacccggctgtcaagcgagggcttctgtttctgaagactctggataccagggagccagga

SEQ ID NO: 41594 - DNA, 353 bp, Gossypium hirsutum
  unsure (1)..(353): unsure at all n locations
  Clone ID: LIB3196-019-P1-M1-A4
cccacgcgtncgctctcctgaaaaactccttatatattaccatttctgaattttcttctcttgcttcaaaatccgaaaatcactcaaaggtataagttgtagaatcatctttagtgatggacagaggcctttcgatcattcctatgtaggcagagaattgagacttgctctgttgaacctgatggcaggttttgatccttcaagtaaatgataaaacaagccggatatggcatccaaaaagccgcagagtggagtggatgacaaacattgtgaagttaaacacacatctaagacaaccctcatggaaaccgatattccttatttgatttcagccacaccttgatccaaaccat

SEQ ID NO: 41595 - DNA, 335 bp, Gossypium hirsutum
  Clone ID: LIB3196-019-P1-M1-A7
attccagatcctgctcctgctcagactgaatgctctcctgctcctccagattcagatgctgataaacttaaagaaaaagaacctcaaacccaaggagagagcacaagcctgagtttagctttgagtttgggccaatccacagatagcttaagttcctatccagctgatccacaagcaggaggagataatccagaagttcatggtcaagtagaagtgaaaaccgagaagagaccaaacttggttgatcgacaagcattcacagttgagtatcttccaagcatgctacattcaaattgccctaaaggtctgctacccaaattctccagctggtcttt

SEQ ID NO: 41596 - DNA, 349 bp, Gossypium hirsutum
  unsure (1)..(349): unsure at all n locations
  Clone ID: LIB3196-019-P1-M1-A8
gcaccagatccagagccggagccgaaggcagagacggaactacattctagggatagttcttatcatccagatttggggggcgatactatttcccaggctcgccaggccacggatatcattcagagtttgacatcttctgcccactaccaccttagtactccagtcatcctagctcgtatccacctcagtactccgctccttccggcccgtatccaccgccatactccactcctgccggctcaagttcatcaatggcatttgagacatatgatttttcatctatgtttcgcacacccctacataccgatgacgagatacgtgatcaccataatcgtncgcaacgtgaacg

SEQ ID NO: 41597 - DNA, 199 bp, Gossypium hirsutum
  Clone ID: LIB3196-019-P1-M1-A9
gaaaaatggagtgccaacaccgaggaggaagctcttcttttgatgtgcaagcttatgatcccttcagtgacagcaatgctgggcaacggctcatgggttaaagcgcctggcgagcatatgaagcctaaaggaaagtcccataaaggtacaataactctgcctacccttgtgagacccgcaaaaatgttggcaccggttg

SEQ ID NO: 41598 - DNA, 374 bp, Gossypium hirsutum
  Clone ID: LIB3196-019-P1-M1-B11
atcgcataacatgggaactattcacatgtcagaaatttgtactgaattaaaaaatttaagatctttagtccgagtatgtgaaattcaagcaactttgcgagagcaaaggatactatttttgagacaacaaattaaggaacttgaaaagctaaaaaatcagaattccttcatggtgtgaagatgtgaataattgcacatggttttgagaacaggaactgtaaatctgttgcccagtcttaacatttttgagctgcatttaagtagactttggaccgttaaggtgggcaaaggaaatgacaaggggatggggtctgtgagagtcaattcaggggaaagatacaagattgatttgtaaaacccttgaaatgtagatt

SEQ ID NO: 41599 - DNA, 378 bp, Gossypium hirsutum
  Clone ID: LIB3196-019-P1-M1-B5
atctgctgccggagccctgccagctgtccgacgatgtcgtcccacctagtcgagccgccgccgcccctgcacaacaacaacaacaactgcgaggaaagtggccagtctctgccgcagccggccggcctcaatagttcctgggtggagctccccatgagcaacagcaatggcaatgataatggcaatgggaaaaatggggggctggaacacgtaccgtcctcatcctccatccacaatggagacatggagaagattctattggatgcacaacatgaatcaggacagagtagttcaagaggcagttctcactgtgacagcccttcgccacaagaagatgggcagatcatgtttgatgtggaaatgcacacaagcagggac

SEQ ID NO: 41600 - DNA, 361 bp, Gossypium hirsutum
  Clone ID: LIB3196-019-P1-M1-B7
atgggatcaatagcctcgtgtcatgcctgctgtttttgttttgttcagaaagtccattgcattcagaagcaacgaacttcttaggaagctcagagctgctggtgttggggataggccggtggtttggatatcacatagcatgggaggtcttctcgtcaaaaagatgctgttggaagcctctaagaagccagaaatgagtgctgttatcaacaataccagaggaataattttttatagtgtccctcatcatggatcacatttggctgaatactctgttaatattcgctatcttctctttccctctttggaagtcaaagaactcagcaaggattctcctgcacttaaaacactgcaagatgac

SEQ ID NO: 41601 - DNA, 355 bp, Gossypium hirsutum
  Clone ID: LIB3196-019-P1-M1-B8
aaatttttaatctttctttttgggtgaaactaattaattcaccatatgtaagttttcatatataaaatacctctgtaattttctcttatttgatttctaactttttctcctagaaaggtaggaaatcctactagaaacttttatttccagaatggttgttggttatcagatctttgcataactctagtcataaagatatatttgtaccatttaaaatcggttatttttttgtattttaaatttgataataattcttaatttctatctttaagatgagaaggatctcctataaagtgcttagagattgagaaaaataaagttgctactgcatattggatttctcttccttgttcat

SEQ ID NO: 41602 - DNA, 369 bp, Gossypium hirsutum
  Clone ID: LIB3196-019-P1-M1-C10
atggcagactcctctcagcctgccccccagctcagctacccccaggaagagggaggaccttttaagacacccattaaggaaacgctgcccatctcctccaccccgagcaaatctgtcctccccagaacgcctgaatcctggaggctcacgcccccagccaaagtaggggggctggatttcagcccagtacaaaccccccagggcgcctctggccccttgcctgaccccctggagctgatggatctcagcaccactccactgaaaagcgttcccccctttgaatcaccgcaaaggcttctcagttcagaacccttagacctcgcctccgtcccctttggcaactcttctccctcaaatatagaagtcccc

SEQ ID NO: 41603 - DNA, 356 bp, Gossypium hirsutum
  Clone ID: LIB3196-019-P1-M1-C11
tcgcccacgcgttcgcggacgcgtgggtttgaatacaaaaggtgattttccattttattttctcagtgttcttcattcttagtttcgttttgttattttttttcttttttcctttttctttttttatttatttttcgtttgaagtataaagaaaggaggaagagacttacttggttgccggggtcgtcaagccaatgtcttctccgtcgaaatcggggcatgagcactaggcatgatcggcggcgcaaagagtgggttaaaaaaaaaccctaacagagccactactctcctttaaaaaaaaaacagaatggttttctaatgtttttttctttctgttttgtttatttttgaataaa

SEQ ID NO: 41604 - DNA, 343 bp, Gossypium hirsutum
  Clone ID: LIB3196-019-P1-M1-C12
ctgcaacaaatgagacttttgcagcaagaaatcagaagttctctgatctggttgtcaaatgccttatcaaactcacaaaggttcttcaaagcacaatttatgatgttgatcttgaccgcatccttcaaagtgtccatgtctacctgcaagaactaggaatggaagaaatccggagaagagctggagctgatgataaaccattacgaatggtaaaaactgttctacatgaacttgtcaaacttagaggggctgcaataaagggtcacctatctttggtgcccatagacatgaagcctcaaccaattattcttgcctatattgatctcaatcttgagactttggc

SEQ ID NO: 41605 - DNA, 362 bp, Gossypium hirsutum
  Clone ID: LIB3196-019-P1-M1-C5
ctcagaggtacccattagggcacataatcaggaagcacactctcgagccacatatcatgatacttagatgagccatgtaacaggacgtttatccaggctaaacaagaaactcataagagttttaattagggagcttatagagcttaacagataactccggagagttaatatcaaggagaaccgtataagctaacagagaattcaagcgaaccatgtcagaaagcccacaagagcttagattaagacgctcatgtagagttgcgtttgtgtccgaattatctactagatcacaatcgatcaagtcatgtaacaggacactcacacacaactgcgatagtgtgcaacacgtgcaaaatcactac

SEQ ID NO: 41606 - DNA, 355 bp, Gossypium hirsutum
  Clone ID: LIB3196-019-P1-M1-C8
cccacgcgtccgtgctttgagatgaatatactgctctcgtccctcttttcacttgtgattgtgaggtcgcccagcaaaattcgagccatcttcatcaacaacgattgtttcagttcttgatgggtctcaatgagacctatgctgccgttcgtagtcagatcctcttgatgcagcctttaccttcggtaaatagagcttattccatgatcgtccaagaagaaggtcaacggagtctttcctctgttctacctcatgcttccgaacctatcgatttgctttctaccgtttctggcaaccataaaaaattcaatggtacttgtgatttttgtaaagtgaaagggcataagaaggaatc

SEQ ID NO: 41607 - DNA, 231 bp, Gossypium hirsutum
  Clone ID: LIB3196-019-P1-M1-C9
caggggaaagtgggcgcgcggggcaccggcccgacatcccgggtatgcccagcgtccgccacgcgtgcttatgtgcggggttgggatattattgtgtatgaacgtttactctatacttggggaaatgatgcaaaacagtactggagtctttggaccggagaagaacatttggactgtttcacagtgtttaaaaattatttctttaattgtgaaatcatggggagagaaatg

SEQ ID NO: 41608 - DNA, 339 bp, Gossypium hirsutum
  Clone ID: LIB3196-019-P1-M1-D10
agcaccttcctttgtttaaaccaactgctcactcgctcacctacgtgctaaacaccatgaccacctgcaggcacctgttcacctcctccagctccatgcagggctactgcggcatcaggcgcggcatcgggggcggctccagccgaatctaccccgtcctggccggagagtactgccgcgcccccagcacctactgcgggggcctgtctgtctcctccttccgcttctcactctgggggagcctgcgggctggggggcggctatagcggtggcttcagcagcagtagcagctctggttgtggcttcaaaggaggatatggtgctggcttttgttctggc

SEQ ID NO: 41609 - DNA, 268 bp, Gossypium hirsutum
  Clone ID: LIB3196-019-P1-M1-D11
caatatcagagccgggtcccatgactatgtacaatgtttgtgggtctgcgaaatgtgttgttgttgtcatctgtggtcggccggttgttgtacagccatttgtctagtcggttgatgcacttgtagctgctcggcttactgagaccgatggccaaggtgtctctcatggcttgtttggtgactccaggttcaccgggcagctagcatggacatggatgaagaccggtgaccagcttgcaatgaatgtctgagatccacattatgaccc

SEQ ID NO: 41610 - DNA, 365 bp, Gossypium hirsutum
  Clone ID: LIB3196-019-P1-M1-D4
gacccacaagagggaaagctggtccccctggtggccccgccccggttttccgggtttgacccacgcgtttcgtcacacgtacgtgttaacatagtgacaaatattcgaggctcatgtactaaataaacttggcagtggaccgattccatgtccgtgtagggactgtagcaaagtcaagtgagatgcaagcacatgtagcccttgcttgacgaataaatctaactctcgcgcatgaactacaagatcaaggtgattatttccttcttagtgttatgagtcttctgtggcatggtgcttcagttcatgattctcggttgatttatgcttcaaatcaggttgcttaaggtctattaacactgacatac

SEQ ID NO: 41611 - DNA, 377 bp, Gossypium hirsutum
  Clone ID: LIB3196-019-P1-M1-E12
atcggggcgtgggccggggggccggcggcggggaggccggggcctgcaggccgccggtacgtcaagatccggactccggcccggactacgaggcgctgccggctggagccactgtcaccacgcacatggtggcaggcgccgtggcagggatcctggagcactgcgtgatgtaccccatcgactgcgtcaagacccggatgcagagtctacagcctgacccagctgcccgctatcgcaatgtgttggaagccctctggaggattataagaacggagggcctatggaggcccatgagggggctgaacgtcacagcaacaggcgcagggcctgcccatgccctttattttgcctgctacgaaaagttaaaaaagacattg

SEQ ID NO: 41612 - DNA, 359 bp, Gossypium hirsutum
  Clone ID: LIB3196-019-P1-M1-E3
attttgcgagtgttaaacattgtttgcctttcatttctttctctattccttgctgcttcctcaggcagcctttcggtttctgagtaacccaagattaaaaaggatggggctgtctgttgctaacctgattagtcgactgtttgccaagaaagagacaccaattcttatggtgggtctagaggctgctggtaacactaccattttatacaagctcaagctcggtgtgaatgctactaccattcccaccaccggcttctacgtggtgaccgtaaaatataataacattaacgtcactgtttgggatgttgatggtcacgacaagattcgaccatgtggatgcactatatacaaaacactca

SEQ ID NO: 41613 - DNA, 380 bp, Gossypium hirsutum
  Clone ID: LIB3196-019-P1-M1-E4
atgcatgcagtcttgggaaagatggtgttggtttgagatatatcattaagtatagtaagaatatattaagagaatatgaagctttagaaaaatttagaaactctcattatagttatctttgttctataagaaggagcttctattcacctcagggtcaattgcttttcctgacagcttgttttctgactgagttatgagatttttgttttctttttgcttgggtagtggggagaatttcattgagaagtcaccctcaatgaaattgatttgtatttcattgatttggatcatttaccttactagcctcttccctgtgaaatgcttactttggcctgatcatcctcaggactcagttcaatgtgatatgtctttgtataagc

SEQ ID NO: 41614 - DNA, 363 bp, Gossypium hirsutum
  Clone ID: LIB3196-019-P1-M1-E5
gaatttttagtttttttttgtttcagatgatcaaagaaaaacaacaatgtcacaaccagtgggtccatctttgcccctgaacaattcctcttgcatcttctacaagttaattgtggcttccatccttcaagacaagaagctaaggatcccgaataagttcgttaagaaatttggtaatgaactctcttcggttgctacgctcaccgtcccgggtggttgtcaatggctagtggaattgagggaagataacaaaagaatatggctggataatggttggaactcgtttgttgaatactattccatctgcatcgggtacttcgtggtctttaaatacgaagggaattcgcattttggtgttcatgt

SEQ ID NO: 41615 - DNA, 339 bp, Gossypium hirsutum
  Clone ID: LIB3196-019-P1-M1-E7
agagagcagagctggctactgaaaagtatgtccccctctcgcccatcctagagggatacgttattttggtagaaaataccgagtacatggaagataattaggttaatagctggaattttggaggcatggtaggctacgttagcttctagtttttggttactttatgatttgttgtgtatagtaaaattcccgttttttctttacaactgcccctctgcttataatcgcaaaaaaaaaaaaaaaaacaatttggaggaaaaaaatttagggtttttaagcgttacttaataggcttttttcaatgaaagaaataatataaaactcttacaatattatagt

SEQ ID NO: 41616 - DNA, 352 bp, Gossypium hirsutum
  Clone ID: LIB3196-019-P1-M1-E8
gatttaacaaaagaaattcaatatgaatattttcaagggatttcccactattttccttttcatttgctttgttttaattattgcagattgtttcatggttgaagcagatacttgcaaacccagtggcaagctgagagggaaaaagcctccgccagggcaatgcgattctaattgttgtgaagacggaaagttttatacaacgtataaatgttcaccgcctgtgtcgagccatacaaaaggaaaattgacaattaacagctttgcagctggtggggaaggtggaggaccgtcggaatgcgacaaccgttaccactcggatgatgaacctgtggtggcactttcgaccgggtgg

SEQ ID NO: 41617 - DNA, 359 bp, Gossypium hirsutum
  Clone ID: LIB3196-019-P1-M1-F10
gtgatttgcattcccgattaatactcttgaagtatgaacctttgcattttggtatgctcggttttgtcaaatcaacatgtgtgttaaaactagactcaactcaccaccaagctttaaacaaacatggcctactcataccagcaattgctagtgtttctgccatttcattaccgttaagattagctattgaaaacgataacttttcaacacaggcaatcctcctatctaagtctgcaaatgaagcttgtcgcctatctaagtctgcaaatgaagcttgtttcgacgatggtctccttttttttatccaaaatccagtgtagactgttggtacaatcgacgtggtttaggctcaagaattg

SEQ ID NO: 41618 - DNA, 359 bp, Gossypium hirsutum
  Clone ID: LIB3196-019-P1-M1-F11
aaaaaatcttacagggactcccttctaggtagtaacatggaaaatctacgccaagtgatcttgtaataggaggttaactccatggaaattaaagttcttagtgatgatggtgaggattctttggaggaaacactagcgactcaagtggctcatatctcgcttacacaaggtgaaaaaggaagaaccaggtagaaacgggaaaaagcgttaattgtgaaggtctttgggaaacctctaggttatcattttcttaatcaaaagctggcttagttatggaatcctttagggattataaaaatgattgatcttgggtgcaacttcttcttaataaattccagcaacagaagtggattatgata

SEQ ID NO: 41619 - DNA, 378 bp, Gossypium hirsutum
  Clone ID: LIB3196-019-P1-M1-F12
atgacagtacctttccccccccctttcatggcccattttattgtctacctttcactactaagtatgaccgttcctgtctcagatcttaataaaaaacaaaacaaaacaaaaaaccaaaacaaaaactcattcaggttaaatttggccttaatttaatatacttgttagcaagcgtgtgtgacagagagtggggaaagctacatcactgaatattttgataaactttacctacttgagtttggtttatttttcccttttcctaaattgactagcactgactgtaatttatttccctgtttcatgtctctctcttccattctgcaggagttttagctatttgagattgtggaccatcagttttgcactttagagagcgtt

SEQ ID NO: 41620 - DNA, 376 bp, Gossypium hirsutum
  Clone ID: LIB3196-019-P1-M1-F2
atcgccacttcagggccgtcccccgcagcttttggcaggcgtccttgtccctgtcaccgccacgtcgcggacatggtgatttcagaaagtatggatatactcttcagaataagaggaggccttgatttagcttttcagctagctactcctaatgaaatttttctcaagaaggcactgaaacatgtgttgagtgacctgtcaaccaagctttcttcaaacgcccttgtgttcagaatttgccacagttcagtgtatatatggcctagcagtgacgtaaacaccattcctggagaactgactgatgcttccgcttgtaagaacatactgcgctttattcaatttgagccggaagaagatataaaacgaaaattcatga

SEQ ID NO: 41621 - DNA, 295 bp, Gossypium hirsutum
  Clone ID: LIB3196-019-P1-M1-F3
cggacgcgtgggtaattttccacttcattatgtattggtttcaaaccaaaatatgcaatgtgtctgacacaatcaactaacatttgccatgtatgtgacaaatcaaaagtaattttccattagttttagatagttttcaaagttaataaaagaggatttgagtctgtatcaatcctaagaacactatgtctatataatgcgaacgcggcccacatagtattttttatacaaattttcaatccaatataaaatgcatatatgacccatagtgagacttttttctgtcacaacacac

SEQ ID NO: 41622 - DNA, 364 bp, Gossypium hirsutum
  Clone ID: LIB3196-019-P1-M1-F5
ggacttttatgaatatgggtaaaattcggcctaacttgggtatattgaaattttgcatattttgtgttttgtgcaataaggactaaattgtaagaaaatgtgaaatgttaggggcaaaagtgtaattttcttatttatctatttttggactaaattgagtgaaaatatgtttgaatgagtttaatttgaatatgtttaaatcaagaatcaaagaaatcagatttggaccggggaaaaactaaagttgtcgattagtcgttccgtaccgattactgttgtccaaggtaagtctataagcaaatagatgttattcatttgattaaatatgaattatatgtgctgaaatgtataatgtgataatata

SEQ ID NO: 41623 - DNA, 303 bp, Gossypium hirsutum
  Clone ID: LIB3196-019-P1-M1-F8
cggacgcgtgggcccagttatcaaccggtgacatatttgttgtaccagcatgccatccaatcacattctttgcctgacaaatcaagaacctaagattggtcgagttcggactctacatccgccaagacaacatgaggatcttggtggctgggaaaaccaacaatgtgagacagtgtaatcgacacgccaaagagctgtcgtcaggagtggagatcaaggttgttggatgaggtattcaacaacaacccgatcgaatctaacttagtgaatggacagaatcgtcgtggatttccttagaggtgg

SEQ ID NO: 41624 - DNA, 381 bp, Gossypium hirsutum
  Clone ID: LIB3196-019-P1-M1-G1
atgagaatcgttgtcagagccttactgaggacttggagtttcgcaaaaacatgtatgaagaggagattaatgagaccagaaggaagcatgaaacacgcttggtagaggtggattctgggcgtcaaattgagtatgagtacaagctggctcaggcccttcatgagatgagagagcaacatgatgcccaagtgaggctgtataaggaagagctggagcagacttaccatgccaaacttgagaatgccagactgtcatcagagatgaatacttctactgtcaacagtgccagggaagagctgatggaaagccgcatgagaattgagagtctttcatcccagctttctaatctacagaaagagtctagagcatgtttggaaaggt

SEQ ID NO: 41625 - DNA, 363 bp, Gossypium hirsutum
  Clone ID: LIB3196-019-P1-M1-G10
ctagcttatacatgccatacttaaaaaatatttacactttcaaaagtaccaaaataaggtttgatagtgtggtgacaatccttgactatccccgagatttcagcagctttgatatctataaaacaatgcaaatacacataaagtaagcattccaaagcttagtaagctcgtactaaaattatcaacaatatataaaacataaacatcaaaccataagtatataaacattttcaatctttatgttcataccaatccactaaacttcatctaccacctaagtatcatacatacttgaatcttcccatacctattagttttcattcttacctcttgatgaatattttaagcctttcatacattatt

SEQ ID NO: 41626 - DNA, 343 bp, Gossypium hirsutum
  Clone ID: LIB3196-019-P1-M1-G11
atgagattccaggcccgatgcctcccctaatccgagagatgctggagaaccctgaaatgtttgaggatgactcctcgcagcctggtccccatcccaatgcctctagcgaggatgaggtccccgggggccagggcaaagggggcctgaagtccccagcctgaccagggcccctgacctctccgctgtgggggttggggctccaggcagcagactgaccatctcccagactgccagtgactgggggaggacctgctctgccctctccccaccccttccaatgagctccttgtttttgccaaagtttccaggggtgcctctgtgttcatccccttcccgatctaac

SEQ ID NO: 41627 - DNA, 369 bp, Gossypium hirsutum
  Clone ID: LIB3196-019-P1-M1-G12
attgcagggattacaggcttaagccaccacgcctggcctgtttgagatctttatttgtttttgttctgttacctttattgtgtatcctttggtgataatactttgtgtgtttttgtgtgccagaaggaaaaaaacccatcatattgggctttttttagactgtcaggaagttcgaatatttaccctacttaagtcaatgtgtttaatttttggaaagatgaaccttttctcagattattgtaagcccttgttctttttatcctttagcatttcaataggtgaagcaccataccggctttatcttttggagagcttgaaccctcccatgaactgaagagtccctccaggtttccctaggagtccatattt

SEQ ID NO: 41628 - DNA, 363 bp, Gossypium hirsutum
  Clone ID: LIB3196-019-P1-M1-G2
ggaagtcactgctttggaacaggattcagttgttccaaaagaaaagaccgatgaacataatttagaaaacggggttgaaggcattcctgatgaattgattcttaaaagagttaactctagaaaagaaatgaagtcctatcaattagggaagcagttgtcatgcaagtggactacaggagcagggccccggattggttatctgagggactatcccttggaactccaattccaggctttggagcatgtgaaattgtccccaagaagtgcaagctattcaaaattgtactttttcttctgggtctactagtagcctcagtcaaaagtttccacaccagcaagtgcaagtgaagaaatgagaaccct

SEQ ID NO: 41629 - DNA, 379 bp, Gossypium hirsutum
  Clone ID: LIB3196-019-P1-M1-G3
atgccgggctggcggcgggagtcggcgcctcaggttcctgcctcgcgtccctaggcggcggcggccgggcgtcccgggatggccttcatggagaagccgccagccggcaaggtgctgctggacgacacggtgccgctgacagcagccatcgaggcgagccagagcctgcagtcccacacggaatatattattcgagtgcaaagaggaatttctgtggaaaacagctggcagattgttagaagatacagtgactttgatttgcttaacaacagcttacagattgcaggcttaagtctgcctcttcctcccaaaaaattgattggtaacatggatcgggaattcatagctgtgaaggcagaaaggtcttcagaactatctc

SEQ ID NO: 41630 - DNA, 363 bp, Gossypium hirsutum
  Clone ID: LIB3196-019-P1-M1-G4
caagagggtacgcaaaagcacgctggtgcccctccgcaatatccgggattcgaccctttcgtccggtgtgacactcgcttgtacgtgccttgcgtaaataaaaggctgagggctgactttcaccattactgaccatggagcatgggccttcctagtgagatggatgctatacagacacgggaactcttcgacaacaaactagtcgctaagcctgatactggatcaccaaggtgttctctcggctcgctaacagggactattgcctcgactccgaaggtactggcactaacagctttcaatctttatgttcataccaatccacgggcgcgcgcttcactgctgtacttaacgagtgaattaact

SEQ ID NO: 41631 - DNA, 368 bp, Gossypium hirsutum
  Clone ID: LIB3196-019-P1-M1-G7
ataaaagccagttctctcaggcccctctcgagatccagtgagacaattttccaggggtaggccccagaaatctattttaagagctcctcagagtaattctaatggtcaggtttaggaaccaactgatgtatcttaaaatactaatatcaaaagcataaactagtataaacttgtcactctctcctccccaccccacccttttttaaaaaagatctcaaatcatgttatacccccagaactctcacctctgggcaagtaatttcaattcaagatacagagaaacattttataaaaatgtatcctaattagtgagacttggattccaataataacttaagtagcatttcaatataagatacccaattttg

SEQ ID NO: 41632 - DNA, 355 bp, Gossypium hirsutum
  Clone ID: LIB3196-019-P1-M1-G8
aaaaattaaaaaaaataaagaaaagaagaagaagagataattgacacttttataaaaagtaataatggacccaaaattaatggatgaaatcaaatcatagtttaatttactccatggatgggaccaactcaatctgattcaacccatattaaaacgatttgggtagtgatgggttaataggaatgtagtcgagtaagttgcgaggtttatgtttcgagtctatcatatataaactcgattagattttggtttggatgcatagatggatttaatcaaatgtgtatgatattgataatatatacaataacttgataaatggacaccaaatgagtgatgttgggtggggatgaaggtg

SEQ ID NO: 41633 - DNA, 367 bp, Gossypium hirsutum
  Clone ID: LIB3196-019-P1-M1-H11
atcaaggaactggtctgtatgaaggacttgactggctgtcaaatgagctttcaaaacgttaaatgaaactggatatctaaccaaggacatgtttgataaaattggcctaggcttgttacaacaaaattagtttgtatcttggttattaaacagtatctgggactcgtttgggcagaatattattttgttgccaattattgtttaccaagtataatgttgctatttagcaattgtgcttggttttaaagaaattctccttgggaaaaaagtatcctttttaaattttacttcccataagtgtaaatgcctggacatagctattgtgaaacctttaaataaattggtttgagtgctttttaagccccag

SEQ ID NO: 41634 - DNA, 314 bp, Gossypium hirsutum
  Clone ID: LIB3196-019-P1-M1-H12
cccacgcgtccggccggttaagtaatgtgatcgtatatggagcaaaaacaacttaccgtcaagtagtttgtgacaaatctgtcacgcaggaaatgtgcaatgcgaggtagcaaagaagttatgctaaggcgaacaaggcgatctcgatgctctaggtatctaagcacaatttcagctacttctctgtaccttgacatcatgaactcaccagtgttcctgataaagatgaagtttatgtcactaacaacacatatacacttatatatcatttcatatgacaataaaatatttcctaaatgaaatggataatcttc

SEQ ID NO: 41635 - DNA, 378 bp, Gossypium hirsutum
  Clone ID: LIB3196-019-P1-M1-H2
atcaaagtttaaatacccctttctagtaatgccaaagacatacattgttttaaattctctactttatagataacaaaataatgtttagctcagtaagaaatgaagtaatgagtgatcaatttgaaggatttttagattatttaatctttgcttatgttgctttttcacatgattaatgatgaaaatgaaatgttaaatcaacaaaataacatccagtgtttcataacatttttagtaagtttggtaaactttagtcccattatatacttttgggggacagtgttataaatcagaattttacaacagtttgcagcacactgatttgaaagtttccactgcaaaatgagaaagggttcaaaaatattaattattattaag

SEQ ID NO: 41636 - DNA, 394 bp, Gossypium hirsutum
  Clone ID: LIB3196-020-P1-M1-A1
aacatatcaagaggatgttttatacttgttagcatgctagaatggttaaatcatactaagtttagatgaagatgcttcggtaacgaatgtggcatactatagctcatactcgatgattgtgtcggttaaaaggtcttacacaaaagcttgcattgtaatcgatcgcaactcgtatgctagctgctctattaaaaatgatgcatctcctatcttgcggcatgacattgcttatcaagttcgtgcatgagacatctgaagcattcgcggattcctgttcaacaatagtaaatgctattggtcggatgtggcgagtagtgtcttatgcaactactaacagtcggtgatgctcatatcatttgtactcgagtgtaccatgtatatgcacgaatgactt

SEQ ID NO: 41637 - DNA, 398 bp, Gossypium hirsutum
  Clone ID: LIB3196-020-P1-M1-A10
atgagaaaacaagcatgcaacctgcacacttttccggtctgccccacgtgtagaattagtctagcgatagaaaactggtgactgacaaggatctacacacgtggtcatgcttgaagcaaaaattctgaccttctttgggcttggcatctgggtacagaatattaattaactttcttacttcctttctttctccatccttagttattccttttcaacatttagagttgccaggtaaaatacaggatacccagtgaaatttaaatttcagataaacattattcctttagtgtatttctcatatattttatcagaaatattttcacttaaaaaaagtttatctgaaattcaaatgtaactgggtgtgtcctatatattttttcttaaatctcacagttcta

SEQ ID NO: 41638 - DNA, 286 bp, Gossypium hirsutum
  Clone ID: LIB3196-020-P1-M1-A11
cccacgcgtgcgggttgatgaacaatgccgaacgatgcacgaaaagtgttgttggagatccttcttgctcaagttgtcagaatgttgcagaatctattcttcatgttatgtgagattgcgataatgcacgagaggtgtagacgtacgtacactccttcgaggatttggggcgcatttttctttgttctgttggacgaggggctctagctaaattgaactgatgctagcgcctcggttgttactcatgttgaatgacagtcttgctttggaagtatttgctgtaatc

SEQ ID NO: 41639 - DNA, 168 bp, Gossypium hirsutum
  Clone ID: LIB3196-020-P1-M1-A4
gtgctcggctgaggcgaccggctaattacaaatgcacgttcaatgcatgaacatatataatcaaattcaagcatggaagttaaactcttttggcattgctatttacacaataggattcaaaattatacaaaacatcctcaagcctatacatgccataggatcgagttc

SEQ ID NO: 41640 - DNA, 470 bp, Gossypium hirsutum
  unsure (1)..(470): unsure at all n locations
  Clone ID: LIB3196-020-P1-M1-A7
actatagaacaagtttgtacaaaaaagccggctgggcccgcgtccgcacttccgggaattcccgcgatatctttcttgatttaattgtaagaatctgagttgctttccactaccatttcctaagtccaaacatcggtgtcttcctgggggctaatttgcaagggaaagaatgaggaacagcaggactcttacgagctgcaaaggtaatttgcttatttaactattactaagggcaggaggaacagccaggccaaaatggtctgtgcttttgcatagcaacgtggctattagaatattagaataggggcctaccatcccattttaaaaagtggggaagaaataaaacaggataagagacaaagaaaacctgaaattgagcgcatcttgaagacaattatgagaatagaatagctattgacttagaaaaatcctattcatttcattgctttttctttaaaacattntctact

SEQ ID NO: 41641 - DNA, 406 bp, Gossypium hirsutum
  Clone ID: LIB3196-020-P1-M1-A9
attccaagatctgcagcgaggacatcgagtgcagtgggctgaccatccccaaggctgtgcagtacctgagctcccaggatgagaagtaccaggccattggggcctattacatccagcatacctgcttccaggatgaatctgccaagcaacaggtctatcagctgggaggcatctgcaagctggtggacctcctccgcagccccaaccagaacgtccagcaggccgcggcgggggccctgcgcaacctggtgttcaggagcaccaccaacaagctggagacccggaggcagaatgggatccgcgaggcagtcaccctcctgaggagaactgggaacgccgagatccagaagcagctgactggactgctctggaacctgtcttccactgacgagctgaaggaggagct

SEQ ID NO: 41642 - DNA, 354 bp, Gossypium hirsutum
  Clone ID: LIB3196-020-P1-M1-B1
gcggccacgcgttcggttgagcgagaataagattgacggggttgatttaagtggccagacacaggaaaaagtgcaattaattccatataattcgaaagtggcgtcagatcgacagaaatcttacgcatatttgaaactgaaagatattgagtttcacatcggggataaagtgtttttaaaagtgtcaccgtggaagaaaataatctgattcaatcgtaaatgcacattatagtcccagattcatcagaccatatgaaattatcgcacgagttggactagtggattatcgaatttcattaccgattgaattagaaatgatacataatgtatgccatgtgtcgatgcttccatcat

SEQ ID NO: 41643 - DNA, 378 bp, Gossypium hirsutum
  unsure (1)..(378): unsure at all n locations
  Clone ID: LIB3196-020-P1-M1-B11
atcggccctgcaggccaagtcagtagctgtcaagaccacacgatttgcctcattccctgactacctggtcatccagatcaagaagttcaccttcggcttagactgggtgcccaagaaactggatgtgtccatcgagatgccagaggagcttgacatctcccagttgaggggcacagggctgcagcctggagaggaggagctgccagacattgccccacccctggtcactccggatgagcccaaagcacccatgctggatgaatccgtcatcatccagttggtggagatgggcttccctatggacgcctgccgcaaagctgtctactacacgggcaacagcggngccgaggccgccatgaactgggtcatgtcacacat

SEQ ID NO: 41644 - DNA, 386 bp, Gossypium hirsutum
  Clone ID: LIB3196-020-P1-M1-B3
atgtgcagagcagcagccgccggcgtcctcggatgttgtgttacccgccatcatgagctacacaggctttgtccagggatctgaaaccactttgcagtcgacatactcggataccagtgctcagcccacctgtgattatggatatggaacttggaactctgggacaaatagaggctacgagggctatggctatggctatggctatggccaggataacaccaccaactatgggtatggtatggccacttcacactcttgggaaatgcctagctctgacacaaatgcaaacactagtgcctcgggtagcgccagtgccgattccgttttatccagaattaaccagcgcttagatatggtgccgcatttggagacagacatgatgcaag

SEQ ID NO: 41645 - DNA, 352 bp, Gossypium hirsutum
  Clone ID: LIB3196-020-P1-M1-B4
cccacgcgtccggagatgacatcctcattaaagattcactcaaatcactcaaagtgtttaaggttcaagattaagcactcgattgtctaacatgaaaagttattaccataggcttgcatgaaaatcaaatctccaccacttgtaaatgatatgatacactaatcaaaaggtctttgcatggttgttatggggtttaggttacaggtatggatacaagctgaagagacaagggttagaattgagataatttcaatatcttaccccactatcagaaacttaattactgaaccacaaacaaatatctagaactattttacatgagttcatgacaactttagcttgttgagaatta

SEQ ID NO: 41646 - DNA, 269 bp, Gossypium hirsutum
  Clone ID: LIB3196-020-P1-M1-B5
accgaccgcctgtgattgtctgcttgcgatcagaacaccctagctctgtgaatgcgagatataagtactggcttgtgctgttagtcaatcgctttcgcttggccttcacgattcgtgctttgggggcagcgctttctgggaactttcaccgtgattgctacgaaataatttcccttcagaaataacaccttcaactgaaaaaagaacaacgtacggctaggataagtacgaagaacgccgggcaccctaatactatactcattcatgtt

SEQ ID NO: 41647 - DNA, 343 bp, Gossypium hirsutum
  Clone ID: LIB3196-020-P1-M1-C10
atcgtccctcagccatgctgcacttgggccacacagagctatgtactgcttcccaggcgtgcctccaggtccttgttcatgcatgttcctgctctccctcctctgcctcacttccttgtatatcaaaatcctactcaacctgtaagtcccaactcaaatacattttcccagctcaattagtccctgttagagttaatgacagagcacagtctgggttgtgtatgtcaccaactgtgtacattgaggtctctgatagattgagaatgtgaggaggggagagagaccactttgtattcacctttatccttgcgtacctcacatgacacctggcacgtagctcatg

SEQ ID NO: 41648 - DNA, 377 bp, Gossypium hirsutum
  Clone ID: LIB3196-020-P1-M1-C11
taaattgagtatacaaatggcgaaaattttttaacgaaatttttataccataattctaacatgacatagaccataaaataatattaaaataaattttacgatatcaaatttgtggtctcaaaaccactgttccaatttaactgaaaacgggctattacactctatggttaggattggaagaaatttaggaatggtgttgagtctctttgaaaatttgcctaatgctactactagtcttgcacagatggataaatggtcgatttctagatgtttagagaactacaatgattctggtgcttagattcttataattgtctttggcaaccaaagagaaactctaggttaaccttgaactaagcaatcaaagaaaatgttgt

SEQ ID NO: 41649 - DNA, 383 bp, Gossypium hirsutum
  unsure (1)..(383): unsure at all n locations
  Clone ID: LIB3196-020-P1-M1-C12
cccacgcgtccgtaaaaagtaaataaatttggaagaattaaacaaagacttgatgatcaaattagttaaataccttgaatttgttatgtgatgagactggttcgtcgtccttgatatatatatatatggggaagaaaatagatgtcagaagctaactgcgaacaggtccaagagagttggataaaatagtaccgatgaataattgtcacctagtgtcggatttactttcgccgtggtccacggacacacaaatatatataatagttttaatgtcaataatcgagttggagaacaagggcagggatgtgaacgggaggaagcatggttaaggagtgagaataccacntgtttggagtggagtggaggtgatgataaggttataa

SEQ ID NO: 41650 - DNA, 388 bp, Gossypium hirsutum
  Clone ID: LIB3196-020-P1-M1-C6
cggacgcgtgggttggttgggatggttgaaatgaaaaatgaaaaggcctatttatagttgaagttcagggactaacttgcaaatggcctaaaaaattagggaccaaaattgcaattatcccattcaacttttctacatttggtgcaacttgctcaacctttttaacaagttgcttcctacctttgttgacctttcaacacaaaatccatattagcaactatgagaatattctaaaatgataacattgtccaaacttccactgtaacaggacactcccaaagtaagtggtcaattgtttcagctcgttctccacaccaagggcagcttgagttattagctaacttcctatactgcatatttaccttcataggcagatagttccatgaaa

SEQ ID NO: 41651 - DNA, 380 bp, Gossypium hirsutum
  Clone ID: LIB3196-020-P1-M1-C7
cggacgcgtgggtttcattttaactggtctttcaactctttctataaacctgaagaaaggaaggaagctagccgaatcctgacagcctaaacccaatggctaaaacctgtatctcaaactgcatcaatgacaccagggtccctctcccagtcaggccaacctacgtgaacctctataagtggccggaatctgatgctgagtttgtaaggtcactgagctctgactggcgcagtaatggaggtcgtgcacaccccacggttgttgatagcatttcatgcaggcaaatatacctgaggagctacacgtttcataggaacaaccaaaccgagactgaaaacacaaaatgttttggcagatcatcagttaataagaaggaaaag

SEQ ID NO: 41652 - DNA, 378 bp, Gossypium hirsutum
  Clone ID: LIB3196-020-P1-M1-D1
atcacggctgcagccttggctacgggtgcctgcatcgtaggaatcctctgcctccccctcatcctgctcctggtctacaagcaaaggcaggcggcctccaaccgtcgtgcccaggagctggtgcggatggacagcaacactcaagggattgaaaaccctggctttgaggcctcgtcacctgcccaggggatactggaggccaaagtcaggcaccccctgtcctatgtggcccagcggcagccttctgagtctgggcggcatctgctttcggagcccggcacccccctgtctcctccaggccccggagacgtcttcttcccatccctggaccctgttcctgactcttcaaactttgaggtcatctagaccagctggggg

SEQ ID NO: 41653 - DNA, 371 bp, Gossypium hirsutum
  Clone ID: LIB3196-020-P1-M1-D10
ggagaaactcacagccggtgagaacaccaatttattcctttctagacttgaatttttttgtatataatttaaactcagagagtaactctcaataacagcaaacatcttggtaacagatcaaccattctgaaacttgcatttctttttcatccaagaataggggaggaataaaacatgtgaaaaatatcaaattatgacattctaaactataatttagttagaacaaaatccccctctaaggttcttgtactgagcgtacttggcccataataagatgatttcagaatcgcatttgtattcgaaatacaaattccataatcaagaggcgcacgttggaagaagaaaaagatcaaatgtgcagctatacacaa

SEQ ID NO: 41654 - DNA, 397 bp, Gossypium hirsutum
  Clone ID: LIB3196-020-P1-M1-D2
atccgcccctcacgccctctcttcctctcagccttctgcccggtgaggaagcccggggtggccgctccgccgtcggggccgcgccgccgagccccggccgccccgggccgtccccgcacgccgcccccatgcattccttctacacccgggccgacaccatgataggcgagatcgccgccgccgtgtccttcatcttcaagttcctccgtaccaaggggctcacgagcgagcgacagctgcagaccttcagccagagcctgcaggagctgctggcagaacattataaacatcactggttcccagaaaagccatgcaagggatcgggttaccggtgtattcgcatcaaccataaaatggatcctctgattggacaggcagcacagcggattggactgag

SEQ ID NO: 41655 - DNA, 238 bp, Gossypium hirsutum
  Clone ID: LIB3196-020-P1-M1-D3
atcggcgggggaggagaggggaaagacacgtttgcttggtttagtgaaacacacgtgactttatagctctgtggtcagcctacctgtctgttctgagggagagtgcgtgggagggaacccatgctcaccgtggcaaacaccggaaccccatgactagcccctcacctggcatggagctgcctggtttgggctggagcagagctggtttcccagaatgttcctttggctcacatgtggt

SEQ ID NO: 41656 - DNA, 364 bp, Gossypium hirsutum
  Clone ID: LIB3196-020-P1-M1-D8
atgccgccggcaggacgtccggcatggaaaccccatcaggcagtgccgtgggttcaactccaatgccaacaagaatgccgtggagtctgtgcagtatggcgtggccggcagtgcagccttcctggagtgccagccccgctcgccccaagccactgttaagtggctgttccagcgagatcctggtgaccggcgccgagagattcgtgcagaggaccgcttcctgcgcacagagcagggcttgttgctccgtgccctgcagctcagcgatcgtggcctctactcctgcacagccactgagaacaactttaagcacgtcgtcacacgagtgcagctgcatgtactgggccgggaagccgtccatgct

SEQ ID NO: 41657 - DNA, 343 bp, Gossypium hirsutum
  Clone ID: LIB3196-020-P1-M1-E10
atgccgggttctgaggcgttggttctctttacttttccacttcaggccacgatgccgcagtaccagacctgggaggagttcagccgcgctgccgaaaaactttacctcgctgatcctatgaaggcacgtgtggttctcaaatataggcattctgatgggaacttgtgtgttaaagtaacagatgatttagtttgtttggtgtataaaacagagcaagctcaagatgtaaagaagattgagaaattccacagtcaactaatgcgacttatggtagccaaggaatcccgcaatgttaccatgggaactgagtgactggtttgaaatgaagactttgtcatgtact

SEQ ID NO: 41658 - DNA, 400 bp, Gossypium hirsutum
  Clone ID: LIB3196-020-P1-M1-E11
atgcggccacatggcgggttcgggagctggtgaccctctggatgctaagcgtggagaggccactttcgctcagcgtatcgaccagacgcgggagaagctgacatcctagcaactgtattgcatgcggcgggcgcaattagcccagtggcagaaggtcctaccgcatcggtggacccggaacatcgtgaccggtctaggcatcgtggccctggtgttagctatttatggatacactatctactcgatctcccaggagcgtttcctagatgagctagaagacgaggccaaagctgcccgagctcgagctctggcgagggcatcaagatcctaatctggatgggtattgatcatgtccaacctgctggagcccattcacatggtggatgatgccccatgaccc

SEQ ID NO: 41659 - DNA, 267 bp, Gossypium hirsutum
  Clone ID: LIB3196-020-P1-M1-E4
cccacgcgtccgctcgaagtcgagagttccgacacgatcgacaacgttaaggcgaatattcaagacaaggaagggatcccaccagaccaacaacgtctcatcttctccggaaaacagctcgaatatggccggaccttggccgattacaacatccagagggagtacaccctgcatctcgaacttcgtctacgtggtggcatgcacatctttgtcaaaacagtgaccggcaaaaccataactttggaagttgacagctctgataccatt

SEQ ID NO: 41660 - DNA, 380 bp, Gossypium hirsutum
  unsure (1)..(380): unsure at all n locations
  Clone ID: LIB3196-020-P1-M1-E8
caactgtgcactactctactctactcaactcaactcaactcagcgccatctttgctctattttctcaccacacgaaaaatggcagctaatattataacccaatcatctctgcttcagccaaaacctgcactttctgctaaaacccttcaaatcccatctctgcatcgcttatccggcctacctcctccatcaagggttggcttttttctggaaaagaaaacggggattgttggaaaagctccattaaaatcggctgtatcggactcaacctcgtcagttttggagaacatgaaaaacagcaagaatcccattgtcgtcattgacaattacgacagtttcacttacaatctttgccagtatattggagagctnggatgtta

SEQ ID NO: 41661 - DNA, 375 bp, Gossypium hirsutum
  Clone ID: LIB3196-020-P1-M1-E9
gcggtttttcttctttcttctttttcttcatagaaaggaccccattgattgaggggaaacagcattgagggcctttgttttgattagcacgagagagagagagagagagaaagaaaatgaatgttttggcctctgagtgtagtaatgggtgtgaatctggttggactagatacttagaacaggcttttctttctggtgatatttctcataaatcaagtggtttttgtgatgaacgtggcaagtataaaggtaaagaagaggttgttgatgaagaagaagaccttgccatggattctgatgcatcttatgggccttcacacttgaacgtagataatggttattttaatgatgataatcattttcaatatactgtac

SEQ ID NO: 41662 - DNA, 373 bp, Gossypium hirsutum
  Clone ID: LIB3196-020-P1-M1-F10
gcacgaaattgcacatactgtagttttatcactttagattaccaaaaatattaacccacttatcttacgagcattcgcacactcgtaagttcccaaaataccgacttttcgacatttcggcttttcggcttttgccgatctagtctataagagggtgtcagttacacacctatttgcgatgattcgttgacgagatccacgcactaactacctgcaattatattactaccacgttaatctaactaccgaaacgaactacatattaaccccttaccctattcggccaataacagcttaggcactagcaatcctacctttgcctgaattagcgactagattaatatctggttgttccccttgcccaagcccttga

SEQ ID NO: 41663 - DNA, 334 bp, Gossypium hirsutum
  Clone ID: LIB3196-020-P1-M1-F11
atgcggccgtagcgagcagccctctacatcctcggggacaaagcctatattaagggtgtgcggccagacccactgcagcatggggagctggtgcccattgaggtatttgaggcacggcaggtgaaggccagcttaaagaatctgctgaaggcgtgtgtccaaggctgccctgctgctgagcccaacccagcctccttcctgcgctcgctggaggactcgtaatggctgatccagatccacaagctgctgcaggtgtctgtgctggtggaggagctcctggattcacgctcctctgtgctggtgggcctggaggacgactggaacatcaccaccc

SEQ ID NO: 41664 - DNA, 167 bp, Gossypium hirsutum
  Clone ID: LIB3196-020-P1-M1-F12
gcggtgaattacaagattcaggacaggggctttatagacgattctaacactgttccaccgcaacttcgatatctgatgccaaatcactcatttacctgtttggatccatccataagaaaatagactctgcaagcgttgtttatataactcagtcatgcttgaatgcc

SEQ ID NO: 41665 - DNA, 351 bp, Gossypium hirsutum
  Clone ID: LIB3196-020-P1-M1-F2
gttctttgggccttttgtgtttatttggaagcagtttcagtgatgccacagcttcgtatgatgcagaatgcaaagatgattgaaccatttacagcccattatgtgtttgcacttggtatggccagattcctagcctgcgctcattggattatccaggtgtatgagacaggagggaggtatctgttcttggtgggatatggttacctttggtttcccatggctatacttgcagaaattgttcaaacattcatcttggttgacttctgttactattatattaagagtttcatgcagggccaactgataattagaatgccagtttagatgtattgaaattatgttagacaaaga

SEQ ID NO: 41666 - DNA, 382 bp, Gossypium hirsutum
  Clone ID: LIB3196-020-P1-M1-F7
atctttaaagcgctatagatttggaaaggatactgttggagagcgatataagcataaggaaaagcaccgttgtcacatgtcctgccctcatctctctccttcaaaaagcttaataaacagagaggaacagtgggtccaccgagagccttcagaatctagtccattggctttgggattgcagacacctttacagattgactgttcagaaagttctccaagtttatcccttggaggattcactcctaactctgagccagccagcagtgatgaacatacaaaccttttcacaagtgcaataggcagctgcagagtttcaaaccctaactccagtggccggaagaaattaactgacagccctggactcttttctgcacaggacact

SEQ ID NO: 41667 - DNA, 385 bp, Gossypium hirsutum
  Clone ID: LIB3196-020-P1-M1-G10
tagagctttattttagccaaagacaaatgcaagatttaaaaaaaaaaaatcaagtaattcttcgtgtggtctccgtatgaaaaagaatttctataaatacctattaagcgttagatgttaaaatgcacccatccaacggccaccaatacacacatgaatcgctctatgaaaaacagcgaaagcagacggtaatttgcgtcctcttatttcttccggtccgcggcagcatcttcatctccccttacccttaaaagaacaggttagctatttattttgaacctaaaaaacaaacaagaaaaaggaaaaaaaaagcctatatatgttttaattggttcagttttctgggattttggtgtttctattttcatcctttatttttgaaggg

SEQ ID NO: 41668 - DNA, 249 bp, Gossypium hirsutum
  Clone ID: LIB3196-020-P1-M1-G12
gtccagcagatgaaaagtgtatggttctttcggaagtaatacatagccttgggaggtcaatgtcaacaactagtgacaatcccggtcattcactgtggagatttgctgataagggcttaaattgtgtgctagttgttgatatcaagcaaacatccgtggacagcggaccaaatacaaaattgagttgcctgcaaggttgcgtatatggaaaaaagttgctgatgtctatcaaattttccttgtgggtga

SEQ ID NO: 41669 - DNA, 370 bp, Gossypium hirsutum
  Clone ID: LIB3196-020-P1-M1-G3
cccacgcgtccgatatggtgccaaagtatatacatatgcacttgaatgaagtgatgattaaaactcttgttagacactcgtttacgacggattcaaaccgtgtggccccatctcttaccatatatattgtatataaaaaagtacatacatatacatatatagtgtgaaagtattacataaaacagtaactctgaataccacctgtataaacatgtgaattcttctatatatttgttctaattattagtcaatttcaattaaattaatttttgacttaaatatccagtttaatgcttggaattattgattctattaaagctataataatttttttaaaaaaataagtaatttaatttttctcaaaaattac

SEQ ID NO: 41670 - DNA, 337 bp, Gossypium hirsutum
  Clone ID: LIB3196-020-P1-M1-G7
agaaaatgagggaatccgatgatatagcagtggacaccaacagcagtactccactgcttgaagaatcagaggttaaagataaaaaagaagtaagtggaatggagcagtggagaggagagattgttaagagcatcgtatatgcgggccttgaagccgttttcacttgcttctttctcatttcctccgtatctgctaccaatctctcatcagtggaggtgttggcgctgggcattgcgaacctcgttgcagatgggatatcgtcgagccttggggattttttgtcttccagcaccaaggaaggcttagctatcaaggaaatggcggtgactcaatggga

SEQ ID NO: 41671 - DNA, 276 bp, Gossypium hirsutum
  Clone ID: LIB3196-020-P1-M1-H1
atcgtgcacagtcacctaaaaaaacctttgaagaagtactgaaaccaccgttaccgatttataagtatatgatcttgtcaacctacataattctagacgaagcatggggtataagaaaaggaaagagcaagaaccgttgaatctagagtgtaacaaacaaaaaccttgatgaacgtcagggctggtattgagttaggagtcgggtacgagtacctagagatagatcaacagctgaacaatactacatactctcttgctctttaccaagcaattaac

SEQ ID NO: 41672 - DNA, 242 bp, Gossypium hirsutum
  Clone ID: LIB3196-020-P1-M1-H12
ctgacgcatgtgaaaaaactaaaaaaacctctgaagaaagggctcccaccctcagggctacgacctcatggacggactggctcgttctatggcttggcgtgcttggtcttcacgcgcttaacgagccgccacctgaggcacccaatacggcggttagggtttcaaaaacccttccttttatttgccgattctgaagggtcaaccttatcccataagagttgaggatgtatatcaaagatctc

SEQ ID NO: 41673 - DNA, 361 bp, Gossypium hirsutum
  Clone ID: LIB3196-020-P1-M1-H3
cccacgcgttcataatcactacacatcggattgtttccagaaatgaaagaggtttaatctataaacaatttgataggagtcctgtcctaaccgtaccccaaacacgtgcggtagttattatatgggtagttattacatgcaaagaaacatcttctaataccaaggctcatgctaagatatgtcaaattgcttgacgtttctccaatcatctaggattgcctgtcgacgtgctggccaacttcttttgtatatccccggaggaggccatgaggtttaaacataacaaacatgaagtgttggtttttaacccaatgccatgcccatgtcgagttcatacacagttccccagatgggagacaca

SEQ ID NO: 41674 - DNA, 401 bp, Gossypium hirsutum
  Clone ID: LIB3196-020-P1-M1-H5
aagaatgccccgggggagctgaagctcaagctggagcgggtgatgaagaacccggacaaagcagtaccaataccagagaaaatgagtgaatgggcacctagacctaccccatgaatttgtccgagatgtaatggggtcaagagctggggctggcaatggagagctacatgtgtacagacatatgcgccggagagaataccagccacaggactacatggatgccatggatgccaagcaaaaataggatgcatagtttcagatgagactgcaaaagaataaaattgctgtataggagcagactgcaaagcgccggaagaagcgccagacgttaaaagagaagaaattactggcaaagaagatggaacttgaacagaagaaacaagaaggaagccggggaggga

SEQ ID NO: 41675 - DNA, 398 bp, Gossypium hirsutum
  Clone ID: LIB3196-020-P1-M1-H6
atgcagaatacagcactcggagtgatcctaaacgtgtttttcagggcaaataattattcacatattgttataagcacatgacttctgatgtttattaaaaccacaaaactaagccctgagaagcaaaatacaaaggactgaagagaaaatttgcgaataaaatgagaaaccagatctcttcagacgtgaaccaaaggagcccgcgtttctcagcagacaggagaagcacaggaggcggcttgtcgacatttcatccatttggcgctggaatggccagatctactttttactttttcttgggttttgtaatacttggctcatgataaagggacttttcagcgttcgtttatactactgggctgggggaacactgctcacatgatccacatgattacttt

SEQ ID NO: 41676 - DNA, 197 bp, Gossypium hirsutum
  Clone ID: LIB3196-020-P1-M1-H7
gcggttgttcatctcgtgatagagtcggctcattttatagcacacacagctgattgcacactacacaagatcgcaattacttctacccaactaattctgagactgtatggtataatggtctcagtagactatgaccgcattacacaggttacctcatcgttttagacgtaagcccatggatccctcggttctagact

SEQ ID NO: 41677 - DNA, 371 bp, Gossypium hirsutum
  Clone ID: LIB3196-020-P1-M1-H9
atcaccactattattattattaataataattacacataggattgttgtaagaattgaaagaggttaaatatgtcaaatatttgttaagagtacttgtcatataataagccataagcgtgtggtagttattatatgggtagttattacatgcaaagaagcatttgctaatttcatgaatctttttattttatgttattttaattttagtcacagcaacagtgaaagtaaatttgccatttgggaagcctagggtactgcagaagaacgtggacaactgtctcctttaccacatggaatatgtcagtcgatttggaaaagctatgacgatgcgcatgtggagttcatacacagttccgcagttatgagacaca

SEQ ID NO: 41678 - DNA, 379 bp, Gossypium hirsutum
  Clone ID: LIB3196-021-P1-M1-A1
atttgccccttggaaattataagataattcattttgttgttgtgcaagttgaaaggagtttaagtaccgaactgatgtcgattcttgggttaatttgtaggaatgttgcatttgcctttctgcttacgatgatggagttgagctacgggaacttcgttgcggtcaccattttcattgtgcctgtgtagataagtggctacgcatcaatgctacctgtccactctgcaaatacaacattttaaagagtagtagccacgaggaagtgtagtaagaagggaaacaaatatttagggtcacatctacaacctctgattgctattttagctcgacagaatatatgcacggcattcaatattggcctttgtgggggtcttatcat

SEQ ID NO: 41679 - DNA, 246 bp, Gossypium hirsutum
  Clone ID: LIB3196-021-P1-M1-A12
acgagcgagcaattttagaggctacacatgcgctaatggatcatcgctgataccgagcatttggcatgattttacaataacccagagctatatgaatgtggcgcttgatgatatgcagatacattttatagctaaaagctatatttgttgcatgtgcatgatttattgaagtacttgtatttgctgatcttatttaatgcatctccgaatatatgtatctaaatatggtacggataaaactcttta

SEQ ID NO: 41680 - DNA, 391 bp, Gossypium hirsutum
  Clone ID: LIB3196-021-P1-M1-A2
cccacgcgttcgcacgtcgcctgcagacctcaagtgcggatatatttctagcatataacctgcggatctcatgtccggatatttttccagaatatagcctgcggacctcatgtccggatatatttccaatctcatgtatatttgatcatattttaacacatctcaatcatcttatcacttaataatcgtatattacattcgaatataaactcgatacgcacatcatcattcacattttagctcaatggttatatctcatatcactcattctcttcaccatttaatcttaaattcaaagtgaccatcaaactataagtcatatacatgcattatctattatccatctgaattcaagtgcaagccaaagatcacaatttacttactatactct

SEQ ID NO: 41681 - DNA, 380 bp, Gossypium hirsutum
  Clone ID: LIB3196-021-P1-M1-A3
tgcaaatgtgggagtcttgaacttgcagtgagagttttcaatcaggtgaaggaaaggaatatagtgacatacaacacaataatctctgctcatgggatttatggacttggagaacatgtttttcagttctttgaggaaatgaaggaggcaagaattaaacccaataaagtcacatttatcgcgctcttgacagcttgcaatcattgtggtcttcttgatagaagctggtcaatgtatcatgctatgatgtatgattacaatattccactaggcatggaacattactcgtgcattgtggaccttcttggtagagcagggcaccttgatgatgcatatgatctcataaaaaaaatgccagcggaacctgacatgaacatttt

SEQ ID NO: 41682 - DNA, 388 bp, Gossypium hirsutum
  Clone ID: LIB3196-021-P1-M1-A4
ctcttttagaacggataacaacaccacccttttcaagaacatcaactcagcttacttagatgccattaccatagccgatgaaaatgaaacacccccatccgacgactgtttagagactgtcatccgtggtttaaggtctgataggctgttcttcaagcctggtgaaaccagttcaatcatggaagaagcaacaaaaccaagtgaagaagaagaagaagaagaagaagaagaagaagatggggtgccttttaaagaaagtgtggtcttatcaatggagtcacgagatccatacgttgatttcagggaatccatggaagaaatggttgaagctcaagggttaaatgattgggaagagcttgaacaactcttgggttggtatttaaaagct

SEQ ID NO: 41683 - DNA, 290 bp, Gossypium hirsutum
  Clone ID: LIB3196-021-P1-M1-A7
cccacgcgtgcgcccacgcgtccggttggactctttttttgctttgattatttattgcaatccaaagcacctatctagagtgtgcaatcccccaaggctattagcaataaacattgggaagagatacctcaaattattgcagatttcaacttttacttcccttaaactttggaagcttatgtttgacacatttgagctttagattatttcttcttattggaagccaacacttatctgcgtggtttgcaaactttactaaagctattagccatagaaatttgggagagaga

SEQ ID NO: 41684 - DNA, 275 bp, Gossypium hirsutum
  Clone ID: LIB3196-021-P1-M1-A8
acgcggacgcgtgggcggacgcgtggggagagattagaggatcaaaggcttattgatgatatatgtaagcataatgatgctgtattgcatttgttggtcccgaaatctgccaaagttagggctaagcctggtgccaagaatttcgagttgtctatcatggcaccaaaatcgaaaggtaagcgagataatgatgttggtgagacaaacggtggagtacaatatgaagctgatagaaagtttgtaccaagaaaaccttccgagagggatgttatatt

SEQ ID NO: 41685 - DNA, 397 bp, Gossypium hirsutum
  unsure (1)..(397): unsure at all n locations
  Clone ID: LIB3196-021-P1-M1-A9
atcaaaaactctataatggaaaacactaatttagagtaatcgaatatattttttccattgatttattatttttgtgttcccttgtctctagggtactctttcttggtatgggagtacccaagaaacagaatcagtaatggaaagattgctcgaggagcaagaaattgaaaagaatggaaaattagtagatgagagacactaagtctgggccacagttgaggctgatcaactagctactgtcttctaaagcacctgccttgctagtggtcagaatcatgtcattccacctaatctgtcttagcatagctggagagacactagcattattacttttccactcttttcctatattccttngggataaaaccctataaacatgagttttttctttgttttt

SEQ ID NO: 41686 - DNA, 324 bp, Gossypium hirsutum
  Clone ID: LIB3196-021-P1-M1-B12
atgttttaaactctaatcctcagaactgttctctgaaataggtactaatactaaagcttattgtttaaggaaggcagaaattaagtaacttggcctaagtttgcataattatgatctgggatcaatatttgaacccatacaggctgattgcagagcctgcactcttaattgagtgtgatatttatgtgcagtacctggctataagtacccacaaaacatttcaaattctttataaaatttgcttagttaaaaaaaagtaccaattgcatagtatggttataagtctggtagtagttaggctttttacgagacatgcctcttact

SEQ ID NO: 41687 - DNA, 402 bp, Gossypium hirsutum
  Clone ID: LIB3196-021-P1-M1-B2
atgacttggtgtgtctcgccccaggaaggagctgaaggaccccgaccagctctacacaaccctcaaaaacctgctggcccaaatcaaggtggggagaccaggttgcctttccggggcccctgcaccaatggctgtggcctcttgatgcagtgtgaggtgggtggcgttctcgggctggcgtgggtgcagcaaggctgtccccagctcggctcttctctccagtcgcaccccattgcctggcccttcatggagcctgtgaagaagtcggaggcccctgactactacgaggtcatccgcttccccattggtgaggaccctccattccatcttcttcccccctcttccatccccatacctgctcctgccctcactgggccctgcagccccatggggcccaccccg

SEQ ID NO: 41688 - DNA, 391 bp, Gossypium hirsutum
  Clone ID: LIB3196-021-P1-M1-B3
aatcggtcgaaacttttctgacatttttttgagcattcaaactcaacatctttttgaagtagtttcgtcatcggtgtagctatcatcgaaaaaccctttacaaaccgttggtagtaaccagcaagtcccaaaaagctcctaacttcagtagcattccttggaggcttccaatcgagtatggccgaaattttgctcggatcaactctaatacccgatacggatactacatgccccaaaaagctaacctctctcaaccaaaactcgcatttattgaattccgcgtataactgcttgtctcgtaaaatctgtaatactaatatcaaatgcttggcatgttcagtttcatctcgtgaataaatcaagatgtcatctataaacacaaccacaatcc

SEQ ID NO: 41689 - DNA, 370 bp, Gossypium hirsutum
  Clone ID: LIB3196-021-P1-M1-C1
atggatgagtcatggagggaggagcagcctggcttctgacagcatcccagcctccctgggccaggtgtgtgcatcctgtccccctgatggatccctccctccatcagtgccatctccctcttctacgagctctcggagaatgacttgaacttcatcaagcagagcaaggacggcgccggcttcctcattaacctcatcgactcccccgggcacgtcgacttctcctcggaggtgaccgctgccctccgagtcactgatggtgcattggttgtggtggactgcgtgtcaagcgtgtgtgtgcagacggagacagtgctgcggcaggccattgcggagcgcatcaagcctgtgctgatgatgaacaagatgg

SEQ ID NO: 41690 - DNA, 396 bp, Gossypium hirsutum
  Clone ID: LIB3196-021-P1-M1-C5
atcggactgcggcccgctgatttctgtggtcatgcatgttagatagtcttccggcctccactgcctcatcttcctgcccactgacgacacgtgggactggttactggccaatatacatgtgcgcaatgtccagttcttcttccatgaagccctcacacatctgatgcacttacacctgatacatagtgacttaaccctgactaccctgcgccagttgtgcgactgacacattgtcttcaagatgctgattccgcacacccggtacacgctacacatcaacatgctcgcacgtgagcttgtaatcgtgacactccatgatgcggacaaattcacaggcatcgaggtcgaacgcttctctgagattgttccaacgaacatgctgcagctcgactatta

SEQ ID NO: 41691 - DNA, 215 bp, Gossypium hirsutum
  Clone ID: LIB3196-021-P1-M1-C7
atggggtggagtaggacactggtccttaccttggagatcctagtttgatggaggggacaggttcctgctgtgcagattgtcatttggtgggtagacaggaacatggtgccatgatctttgcttttgacaacattatggtgaccaaaagcagatctatctgtggggactctggcctggtaggagttaggtacatggaccttgaaacccaaagttct

SEQ ID NO: 41692 - DNA, 330 bp, Gossypium hirsutum
  Clone ID: LIB3196-021-P1-M1-C8
cggacgcgtgggacaaaacgtagatagtcattgggctttattgtatcttcaaggttcacttggcagtaacttttttacacatcataatataggcaggagcggatagaactttaaagaaagtggcattgatacatgccttgaaaccttcattaatttctcctaagtttattttatccctacacaccaaaaatgtatgtctgtgtgtattattttcatgaatataatatttttctattgtagataatatttagtcatttttactgaatcagattcattatatgttatattaccttatgtcaaaacctttttgaaaatcgactttttattttt

SEQ ID NO: 41693 - DNA, 402 bp, Gossypium hirsutum
  Clone ID: LIB3196-021-P1-M1-D1
atcatgtgcacgcacaggaagcctttccacatatcacctcatttctaagaaataaactgcaaggtgccaagaaggttttatttcctttttttttttaaagatgacaaatgtacagatgttaatatatttttggtgccaatggcgatgtttttaagagcgggacggagctggcttttctccattcccatgcgcttctatttatcctggacatttcaaacctcctctgtgccttggctctgggcaggggctgccccagcccacccccattctttgtacgtgctgagacagtcactggaagatcttcctccagcggtgccctggatggctgctcctgcaaacagcacgtggcatcttctgctcttccctccaggctctgccctgcacatcctgtcaaggcaagcc

SEQ ID NO: 41694 - DNA, 288 bp, Gossypium hirsutum
  Clone ID: LIB3196-021-P1-M1-D11
aaacgatgttatcccaaattttgcttttggatgtattaacagcatctctggtaattcaatcccaccccaagggctattgggtatgggccggggacccatgtcactactttcacaatccgggtcgctatacaaaagtgtgttttcctattgtttgcccagtttcaagtccaattacttttcgggctcccttatactcgggcctgcaggtcaacccaagaatattcgaaccaccccgctgttaaaaagcccacaccggcccttcctttactacgtaaacctaaccgaggt

SEQ ID NO: 41695 - DNA, 378 bp, Gossypium hirsutum
  unsure (1)..(378): unsure at all n locations
  Clone ID: LIB3196-021-P1-M1-D12
atttgaaagaaaaaattcgagttgattcgaataactcgattaactcgaataactcgattcgtttaatttgaaatttgaatttttttcattttttcgagtcaaatcgagttttgctcacccctagttttgagatgctcgactaatggagtttttacggttaactcagcttatagttctctcatggaaaatattttacatcttattgagggaaaatggaggctttcttggcatttcgatggcccattacctgtcagacaattcctttggttggttattagagaacggttacttactaatgctgaacactacataagaggtatgtctgataacgcttcatgtaagctntgtggtactgctgatgagtctattatccatgtt

SEQ ID NO: 41696 - DNA, 363 bp, Gossypium hirsutum
  Clone ID: LIB3196-021-P1-M1-D3
atggtgagcctcgccacgcgaatattggaccgcgtgtgcattcaaaacctctggcattacaggtctgagcacctgacccctggcgtcaataattaattagtacttagatgtatgcaaactgtatctattatataagaacgtattgttttaccgttacacacctcctggcatagctagtaaggctgccttaggcttgaaatatgacatactaaaagcattcttttaaagatacagacacggatagggtgattgaaaatgctctatctacaaacaaatagctccttgcgcatatatgtctaaaaccagaacaactggatcgaaagattgactgcatacgatctaatacgatcaagcttatttatc

SEQ ID NO: 41697 - DNA, 385 bp, Gossypium hirsutum
  Clone ID: LIB3196-021-P1-M1-D4
cccacgcgtccgctcacatttgagctactcacgggcccttttatcaagtcaggacctggacccccataattatcaggtaacgctcactcattgagctactcacgggactgtacacagagtcagtacctggacccatgttacgtacaacattcatctcatgaactcaaagtcaactcatgagttcagactagataatttttgtagcatgcccctttgtatcctatgttatgtctaaggtttaacgggattccacatctaaccgaataacattgtatttgctcgcaatgtaatttactcagacaacatgtcatttacacattcatggcaacaaatagactttagatacatgacaaaaataagccaattacgcatgtatattatcaaa

SEQ ID NO: 41698 - DNA, 402 bp, Gossypium hirsutum
  Clone ID: LIB3196-021-P1-M1-D5
atgtggattcgagaagtgacaggctatgtcctcgtggccatgaatgagttctctactctaccattgcccaacctccgagtggtgcgagggacccaggtctacgatgggaagtttgccatcttcgtcatgttgaactataacaccaactccagccacgctctgcgccagctacgcttgactcagctcaccgagattctgtcagggggtgtttatattgagaagaatgataagctgtgtcacatggacacaattgactggaaggacatcgtgagggaccaagacgctgagatagtggtgaaggacaatggcagaagctgtcccctctgtcatgaggtatgcaaggggcgatgctggggtcctggaccagaagactgccaaacattgacccataccatctgtgct

SEQ ID NO: 41699 - DNA, 365 bp, Gossypium hirsutum
  Clone ID: LIB3196-021-P1-M1-D6
atccgcctgtccgctcgcgccgctcttcgctctgctcaacaactgggtggagatccgcctggacgcgcgcaagttcgtctgcgagtaccggcgcccggtggccgagcgcgcccaggacatcggcatctggttccacatcctggcgggcatcacgcacctggcggtcaccagcaacgccttcctcctggccttctcgtccgacttcctgccgcgcgcctactaccagtggaccagcgcccacgacctgcgcggctttgtcaacttcacgctggcgcgcgccccgccctcgttctccgcggcgcacaaccgcacgtgcaggtatcgggctttccgggatgatgatgggcattattcccagacctact

SEQ ID NO: 41700 - DNA, 394 bp, Gossypium hirsutum
  Clone ID: LIB3196-021-P1-M1-D8
atctttggattccaggaacagctaagcctgggcgctggacttacacactgaacaatacccaccattctctgcaagccctgaaagtggcagtgacctctcgtgcctccaactcagctgtgcccccagccactgtggaagcctttgtggaaagagacagcctccattttccccagcctgtgatgatttatgccaatgtgagacagggattttatcccattcttaatgccactgtcactgccacagttgagccagagactggagatcctgttacactgagacttctcgatgatggagcaggtgctgatgttataaaaaatgatggaatttactcgaggtattttttctcctttgctgtaaatggtagatatagcttgaaagtgcatgtcaatcactc

SEQ ID NO: 41701 - DNA, 295 bp, Gossypium hirsutum
  Clone ID: LIB3196-021-P1-M1-D9
acggttattttattaattaggtttaatttttattagttacttgtgagattaggatttgttggaggcctatataagtattggccagccaccctttgtaaacaacatcttattattatttttttctatcaaatttcaaatttgatgagcgcgggattttctttggggatttctccaagaatgctcttttgagtgctctataaaagaagttgaacaaacttttgattgggggcgccattttataacctaatgctgccattgatattatttggaggggagatttaagccgcttgaagga

SEQ ID NO: 41702 - DNA, 365 bp, Gossypium hirsutum
  Clone ID: LIB3196-021-P1-M1-E1
gggagatagagtttggtattgagcttgtacctgggactacgccgatttcgatggctccttggaaatttcggcaatgagggaggaagatggacacaatttttgacttattttccctttttattcttttattaaccaaatgacaaaaatgcccttaaggcatttctttcaaaattttcctattcatgtccatttttgtccaaaaatatgaaaattggtcaaatttccattaaggccctctaattaataattcaaagctatttcatacttaaagcttctagaatctcatattttgcaacttttgcaatttaatcctaaaaagtaaattggacccttattcaaaaaatttgttcatggaactttcacac

SEQ ID NO: 41703 - DNA, 380 bp, Gossypium hirsutum
  Clone ID: LIB3196-021-P1-M1-E10
cccacgcgtccggaaattacttgaatttattttaataaaatttaatgacatgttataatctaattcatatattgtcaatttatcaaatataagcttttatttttcataaaaaagaaacatctctctctccttttctttttttagaaagaataacgggatgcttgataaattcataaattagcatttaaatatgaagtattaagtgtttttttgttttcattatatattttttacaaaataaaactaaataataacaatattaataatacacatcgataaaagtagatatattctttcttaccttttattgacgataatcatgcctaaaatcaataaataggatttttctcaaagctactgaatgtcactttttagggatg

SEQ ID NO: 41704 - DNA, 396 bp, Gossypium hirsutum
  Clone ID: LIB3196-021-P1-M1-E12
atgtcctttctcctccactcctcccagcctccaccgcaaaagaatggctacgagaacccccagcctggagctccccttgccctgggcacattgttcaccacgtctttgtttttcatacccctcccctctccatggcagcatcttggtgaacatggatgacaacatcatcgagcactactcgaacgaggacaccttcatcctcaacatggagagcatggtggagggcttcaaggtcacgctcatggaaatctagccctgggtttggcatccgctttggctggagctctcagtgtgttcctccttgggagagacagaagccccggccccagaacccggagacccgtctccctcatctcacaactgctgttacaagactatgctggggagtggggcaag

SEQ ID NO: 41705 - DNA, 406 bp, Gossypium hirsutum
  Clone ID: LIB3196-021-P1-M1-E3
atgaagctacaggaagccagaattcttttgacttggtgggtaccggagggttggaagaatctagattgagtattccttggcctttggggagcttgctctatgcaaagtcacctaggaaatgatacttcccccactgtgaaacactagctagagatgacagacaaaaagcacatttgttgtaatctccctttgacgggatctaggttggaatagatgtcgaagcagctgcttctaggtagtcaacgaagatgtcaactagtaaatgacagcagacaaggaggatcacagcagagttgtaagattctagatatcaaaaagtgcaagcagtctattgtactcaccatcgcatcctcagctgcccagtgcccggttttaacttgctgctcaatgtatgtgtcaagtttta

SEQ ID NO: 41706 - DNA, 379 bp, Gossypium hirsutum
  Clone ID: LIB3196-021-P1-M1-E5
atgtgaatgggaaggggtcactcaagggacagcccggagacatctaccaccagacctgggccagatactttgtgaagttcctggatgcctatgccgagcacaagttacagttctgggcagtgacagctgaaaatgagccttctgctgggctattgagtggataccccttccagtgcctgggcttcacccctgaacatcagcgagactttattgcccgtgacctaagtcctaccctcgccaacagtactcaccacaatgtccgcctgctcatgctggatgaccaacgcttgctgctgccccactgggcaaaggtggtactgacagacccagaggcagctaagtatgttcatggcattgctgtacattggtacctggactt

SEQ ID NO: 41707 - DNA, 321 bp, Gossypium hirsutum
  Clone ID: LIB3196-021-P1-M1-E8
attgcgggaccagactattgtgacctggagaatgtacaggaattattcactgtgcaggatcaacacgatctcctcactctaggatggattcatacccatcccactcaaactgcattcttatccaccgttgatcttaacactcactgttgctatcaactcatgtcaccagcggccattgccattgtttgctcaccaaagcataaagacactggcatcttcaggctcaccaatgctggcatgcttgaggtttctgctcgtaaaaaaaagggcttgcatccacacaccaaggagcccacgctgctcagtatatgcaaacatgtg

SEQ ID NO: 41708 - DNA, 401 bp, Gossypium hirsutum
  Clone ID: LIB3196-021-P1-M1-F1
atgtttttatgtggatagtgatatggtcaatgaattcaagttggaattggtagaaaaactttttgctgaagacacagaagcaaagaacccattttccactcaggacacagatttagacttggagatgttagctccctatatcccaatggatgatgacttccagttacgttccttcgatcagttgtcaccattagaaagcagttccgcaagccctgaaagcgcaagtcctcaaagcacagttacagtattccagcagactcaaatacaagaacctactgctaatgccaccactaccactgccaccactgatgaattaaaaacagtgacaaaagaccgtatggaagacattaaaatattgattgcatctccatcttctacccacatacataaagaaactacta

SEQ ID NO: 41709 - DNA, 339 bp, Gossypium hirsutum
  Clone ID: LIB3196-021-P1-M1-F10
cccacgcgtccgttcatttaatattgtgcagatgtatacaccattaatgtttcaaaagggaagaactatcttctcagaatcatcaatgcagcccttaacatggagcactttttcatggttgctaaccatactatgactgttgtggaaactgatggagaatacacaaaacccttcaaaaccacgttcctaatgctgactccaggccagacatacaacgtcttgatcaaagcagacctgtccattggcaaaaacatggcaatggcccctcacatgccagccaaaaacgtccccttcttgatgaaaacttcttgtgggattctccgttatgcatcacccaca

SEQ ID NO: 41710 - DNA, 354 bp, Gossypium hirsutum
  Clone ID: LIB3196-021-P1-M1-F11
atgacatttctatcatccaaaagcccactgcagcagtgggagctggagccacaaaaccagaagggatcgcagtacagcaagagagagagaaatgatcagctccactcaatttctcagaagttgcaacttaccaaaataaaaagatatggcatatgaaccatttacacttggcaaatgccatactgttggctcctataaaaggtcatcagctccaatggacatttctcatcttgaggactgggttgaaagcagatggtgacaaaggtggtaaggtgagggagatggtaatttggcagtggccacaataaaacctaacataaaaattgtactttacagtttttgaacattttcctg

SEQ ID NO: 41711 - DNA, 382 bp, Gossypium hirsutum
  Clone ID: LIB3196-021-P1-M1-F12
catcacttatgagttttacgtacataccagtaccaacttgaaacattagcacatcctttcacaactttgacattcctgatgaacacttggaatattaacggatactcagaaatcttgcacataagtgccatatatgtagatgaagctacctcatatctcacaatacatatggactcgttttcgagctactcacgggcctgctcacacaagctgttagtcaggacgtagctacacagtgttgctcacacaagctgtcaggtatctgcaacacatgctgaactacccagccgctagtaggacgttcgagaccagcacccggattacataatcacatatagacatgggttcctagtgacatgtcactcgtatcctattatattct

SEQ ID NO: 41712 - DNA, 202 bp, Gossypium hirsutum
  Clone ID: LIB3196-021-P1-M1-F2
ctctgctgcattttttgtttgtgtctgtaggtacggcgtacagagggtggacgtggcatgtatggaggtagccgtacggaggcgtgcgtggctggggcagcagactagggtttctttgtttgcacattaatcgggctaggttaattgggtttaggtttgggctaggttaatgtgcaacccagtacaaaaattaaataaaaca

SEQ ID NO: 41713 - DNA, 403 bp, Gossypium hirsutum
  Clone ID: LIB3196-021-P1-M1-F6
attgctagtctgtcccaagtttttcttcacctatccaccttggatcgtagtgtgatttggtctaaatctatactgaatgcgcgctgcaagatatgtagaaagaaaggcgatgctgaaaacatggttctttgtgatggctgtgataggggtcatcatacctactgtgttcgaccaaagctcaagactgtgcctgaaggagattggttttgtccagaatgtcgaccaaagcaacgtcctagaagactctcctctagacagagaccatccttggaaagtgatgaagatgtggaagacagtatgggaggtgaggatgatgaagttgatggtgatgaaaaagaaggtcaaagtgaggaggaagagtatgaggtagaacaagatgaagatgactctcaagaagaggaag

SEQ ID NO: 41714 - DNA, 288 bp, Gossypium hirsutum
  Clone ID: LIB3196-021-P1-M1-F7
acactgtcgaacaagttggaacgctaaagcgcgctggtgcccggccccagtttccgggatgtgagacttgtacctgctcacttagaattatctctgcaccaaccatggccacctttgtgcagctcagtaccaaacccaacatgcctattgtgggcctgggcacttgtacgtctactgttcataaactgaaagaagcagcgaaggtggacactgatgcatgggctcgacacattgactgagcctatgcctatgagaatgaacatgacgtggcggatgccatgcacgaga

SEQ ID NO: 41715 - DNA, 380 bp, Gossypium hirsutum
  Clone ID: LIB3196-021-P1-M1-G10
atttctcgcataataaaacaagaggttgaaatcataaataaaaattgaacaatttacaaagcaggttaaggtgaatagaagttttgcaccaggtaggaaaccaggaagaagaggaggtgagtccgtcggactgcttaagtaccaagctcccttcggatccaatcctagacatgcacaccaccattgccacaccttaacgactcgtataattttgagaaaaccgtctggttatgtctatcttaagaaaatgattaagtttgaaaacgtttgcttagtggaagtcttacttgtaatcgtgttattttgaagtcccttaatgtttttgaaaacacgtgctaaagctaacctaatttgctttggcaacaatattttttttaata

SEQ ID NO: 41716 - DNA, 396 bp, Gossypium hirsutum
  Clone ID: LIB3196-021-P1-M1-G11
atcgttgggctggtggggaggccaagtttgggagcaaatagggtctgattgagcttgtgttgcactggagggacagccctgggtctaggggagagaatccctgagtgtgagacccgccttccctggccccagcccctcccagttcccccagcgacggccacttcctggtccccgacgcaaccatggctgaagaacaaccgcaggtcgaattgttcgtgaaggctggtagtgatggggccaagattgggaactgcccgttctcccagagactgttcatggtactgtggctcaagggagtcaccttcaatgttaccaccgttgacaccaaaaggcggaccgagacagtgcagaagctgtgcccaggagggcagctcccattcctgctgtatggcactg

SEQ ID NO: 41717 - DNA, 331 bp, Gossypium hirsutum
  Clone ID: LIB3196-021-P1-M1-G4
cccacgcgtccgcagaatactgatagattacagatctgtaaccttcattccaagtgtttgttaatcatctacaaatggcgctgtgggcaacttcttgttcgtcttctgagaagcttttcctcgcatcttcagctgcaacaagaagaaggatgggaagcagaagaagagatttagttcatgttgggatgacagaccaggctgagacggagactatatcaatagcctacaaggagggagatcgtgaaaggcctaaatgggcagatgagacccctttctctcgccttgttgaagctctcatttcatttaaacccttttactccctgcttaagct

SEQ ID NO: 41718 - DNA, 407 bp, Gossypium hirsutum
  Clone ID: LIB3196-021-P1-M1-G5
atgcggctggctcaattaagatgaggcttctgctgcttctcctagtggcggcgtcggcgatggtccggagcgaggcctcggccaatctgggcggcgtgcccagcaagagattaaagatgcagtacgccacggggccgctgctcaagttccagatttgtgtctcctgaggttataggcgggtgtttgaggagtacatgcgggttatcagccagcggtacccagacatccgcattgaaggagagaattacctgcctcaaccaatatatagacacatagcatctttcctatcagtcttcaaactagtattaataggcttaataattgttggcaaggatccttttgctttctttggcatgcaagctgctaacatctggcagtggggccaagaaaataaggtctatgcatgt

SEQ ID NO: 41719 - DNA, 408 bp, Gossypium hirsutum
  Clone ID: LIB3196-021-P1-M1-G6
ataacgaaccgcagtgttcaccggcgaggagccagccctgtcccggtcagagaaagacgacgaggatacctgggagcgggcgtcggccgggctgggccgcgccggtgcgggctggcgactctgctcctacgcttgctgctgtctctgggaactgggtgccagcgctgaggggcttccagcggacagggacccccttccccggctcccctgcccaccctgccggggagggcggaagatgccggtgaagaagaagagaaaatcccctggggtggcagccgcagtagcggaagacggaggcctcaaaaagtgtaaaatctccagctattgcagatcccaaccccctgctagactaataagtggagaggaacatttttcaagcaagaagtgcctggcttggttttatgaata

SEQ ID NO: 41720 - DNA, 272 bp, Gossypium hirsutum
  Clone ID: LIB3196-021-P1-M1-G9
cggacgcgtgggggataaaggcaccagtggtttgcttgttgttgcaaaggatgaacattcccatgcccatttgtcggaacagtttaagcaacacactatccagagggtctacattagtcttacttgtggagtgccttcagcttctgctgggcgtgtggacattcccattggccgtgattcaaataaccgcattcggatggttgctgtaccatgattaagtcatcatggtcgggctcgtcatgctgctagtagatataaagtaattgaagtgc

SEQ ID NO: 41721 - DNA, 387 bp, Gossypium hirsutum
  Clone ID: LIB3196-021-P1-M1-H1
cccacgcgtccgcacatattgattgcgtgctttcagagataagttctaattgttacaccggtttaataattaaaagaattaaaagctttttcctagcatcttttaaatgtctaaaactaaaaattgatatatatttattatttaggttgaatctccagaaaagatacttcaatatctaactccacatccaagagaaaacggtaaaaggatggcattgatggaaaataatttcttgaacatttgaaagtaagcttattatatttaaactttgcaatttggcttgtttatttcaaagattccttttaaataccaaagaataatattacatttttaatcattaaattagtttatatcatatttatcacatggtattattatatcatcccc

SEQ ID NO: 41722 - DNA, 397 bp, Gossypium hirsutum
  Clone ID: LIB3196-021-P1-M1-H11
attacctggcctctgtcaaagccatgcacgaggcttccaagaagctgaatgagtgtctgcaggaggtgtatgagcctgactggcctggtagggatgaggcaaacaagattgcagagaacaacgacctgctgtggatggattaccaccagaagctggtggaccaggcgctgctgaccatggacacgtacctgggccagttccctgacatcaagtcacgcatcgccaaacgggggcgcaagctggtggactacgacagtgcccggcaccactacgagtcccttcaaactgccaaaaagaaggatgaagccaaaatcgccaaggccgaggaggagctcatcaaagcccagaaagtgtttgaggagatgaatgtggatctgcaagaagagctggcctccct

SEQ ID NO: 41723 - DNA, 401 bp, Gossypium hirsutum
  Clone ID: LIB3196-021-P1-M1-H3
attgtatgcgtccgtggtggaggacatgatcctgaaggctacagaacagctggtgaatgatatcctgagacaggctttggcagttggataccagacagcttctcacaacaggattcccaaagaaattacagtgagtaatattcaccaggccatttgcaacattccttttctggatttcctcacaaacaaacacatgggaatattgaatgaggaccagtgagcggagtgaggtgccctggagaagcaagctttgaaggcgcagcgaagctgtaactgaggaccctgctgctcgggaaggaggtggtttccagtgcgcctcgggatgtcatggctacccaaccattggcgcttctgttcccgcgtgccaccaacatgctccactccagatgaaatccattgga

SEQ ID NO: 41724 - DNA, 364 bp, Gossypium hirsutum
  Clone ID: LIB3196-022-P1-M1-A10
cggacgcgtgggtttgaaatcttttctgttgggggagatgtatccgatgctaatgttgtgaagttcagcaatgatggacgactcatgcttttgacaactatggatggacatattcatgtgctcgattcatttcgtggcacgcatttatccacttacaatgtgaagccagttcctagcaattgcacgttagaggcatcatttagccccgagggaatgtttgttatatcaggttcaggggatggtcgtgcatatgcttggagtgtacgcagtggaaaagaagtcgcaagctggatgatgaatagtgaaccttctgtaataaactggaattggatgaacaccgacactgagcctcccgtcattaagt

SEQ ID NO: 41725 - DNA, 384 bp, Gossypium hirsutum
  Clone ID: LIB3196-022-P1-M1-A12
atcatcatccaagtcatcctcaaggcagctaagcgagagcttcaagagcaaagagtttgtgtctagtgatgagagctcttccggagagaacaagagcaaaaagaagaggaggaggagcgaggactctgaagaagaagaactagccagtactccccccagctcagaagactcagcgtcaggatccgatgagtagaaatggaggaaggttctctttgcgcttgccttctcacacccccagactccccacattttggtaccagtttctcctcatgaaatgtagtccctggattctgtgccatctgaacatgctctcctgctggtgtgtatgtcactagggccgtggggagacttcttaactctgttgcttcccaaggatggctgttt

SEQ ID NO: 41726 - DNA, 331 bp, Gossypium hirsutum
  Clone ID: LIB3196-022-P1-M1-A3
acgcggacgcgtagggttatttcacatttgcattgtttctttttttcttagaaactcaagaaatgttcaacacaatgtccatggaggaatcacttataactccaataccaacaggtacaatggagtgttatacctagtacaaaccaagaatgcctgcctttttcctaatccctaatgccaaacgaccgactgttctatgacacttacagaattgcccctggcggataccagactatacagcacggactgtacagaatttaaacacctcttccgaaattcaaagaatcgaacgtcagttcactaggcgcttgagagttcttaggtccctttt

SEQ ID NO: 41727 - DNA, 363 bp, Gossypium hirsutum
  Clone ID: LIB3196-022-P1-M1-B1
atcacagctcaaatcgataggcccaattgcattatcatttcccctgggcttctgaattttccagtttaatggtgaattctacataatctctctccatatcttttgccccattacattttgcaatttcttctaagtatgtttcgatattactgtaaatgtgaattcatgctatctaatcaactcaccaaaggacatgatttgcatcgttgtgaaaattcttcagtatgacagatatattattgttcgttcactgaaaatcctcaaatagaatcttttttggttaggcatatctttcgtcaaaaccaagagcgataaaagctttagttcttcacctagcaattcaattattacatctccatgttg

SEQ ID NO: 41728 - DNA, 395 bp, Gossypium hirsutum
  Clone ID: LIB3196-022-P1-M1-B2
atcgccgatggcggagggaacggcggaggcccctctagagaacggtggtggcggcgactcaggagccggagcgttggaacggggagtggcgcccattaagcctcaataccttaccaccaaggagcagtttgaccaattcctggaagccaaagggcaggagaagccttgccgggaaaccgaggtaggagactcagctggcaatgacctggctgagcctgaggctaagcggatccgactggaggatggacagacggaggacgggcagacggaggaggcagcagagcccagggagcagtcgcagactcagaagagggcccggggacaaaacaagggccggcctcatgtgaagcccacacactacgacaagaacaggctgtgcccctccctgatccagg

SEQ ID NO: 41729 - DNA, 362 bp, Gossypium hirsutum
  Clone ID: LIB3196-022-P1-M1-B5
gtttcttataaatgggaacaaaaagttttacgataaattagtttgtattcttgtgcgatatacggatcatttgtgtatatatacttttttagttttatatattatttggtattcgagtttgacattttttttaatgtgatgcctatgttattttctggtccaatttgatacctatatttgataaaagtaacgtggtacctatgttaactttttagtgtttaattcaagttctaaggttgatttgatggatgttaattggtaattaggtttgaatatttcatgattttattaatagaataaatttagtgttaattgtaaatttgtttagtttttcatttaatttgtcaaatacagtatgatag

SEQ ID NO: 41730 - DNA, 383 bp, Gossypium hirsutum
  Clone ID: LIB3196-022-P1-M1-B6
atgtttggtggttttcttcctgtttccgcattcagtccttgtggatgatgacggcatcaaagtggtgaaagtcacatttaataagcaagactcccttgtaattctcaccatcatggtaagccttagggtctcattctctgggttatgcacctgccaggctgggacccgggacacttacattcgtttcctgacttgccctgatgtaggccaccctgaaaatcaggaactcgaacttctacccggtggcagtgaccagcttgtccagccagattcagtacatgaacacagtggtcggtacatatgtgactactaacgtctcccttattccacctcggagtgagcaactggtatgctgttcttttaggaaccttgccccacaggcc

SEQ ID NO: 41731 - DNA, 392 bp, Gossypium hirsutum
  Clone ID: LIB3196-022-P1-M1-B7
atcagattagaatattggaagataaagggacaagtactgaattagttagagaaaatcagaaacttaagcagcatttggaagaggaaaagcagaaaaaacacagctttcttagtcaaagagagactctgttggcagaagcaaagatgctaaagagggaactggagagagaacgactagtaactacggctttaaggggggaactccagcagataagtggtagtcaggtacatggcaagtcagattctcccaatgtatacactgaaaaaaaggaaatagcagtcttacgggaaagactctctgagctggaacggaagctaaccttcgaacagcagcgttctgatttgtgggaaagattgtatgttgaggcgaaagatcaaagtggaaaacaagaa

SEQ ID NO: 41732 - DNA, 371 bp, Gossypium hirsutum
  Clone ID: LIB3196-022-P1-M1-B8
caagttcaaggttctgtacaatgcgtaaaatttcatgttgctgagaaaagatcaaagcttaagcttgagctaggtccagctttcaagaagttgaaatttgataagatgggtgaagacgttgcatctgcttggaaggaaggagaacagaagatgttttcgaatatagtgaagtcaaatccttcatcacaacagaaatgtttctgggatgagatctgcaaacattttcgtaacaaaagtagggaagaacttgtttgctattactacaatgtctttcttttgcagcgtagagcataccagaatcgggtcactccaagcaacattgacagtgatgatgaacctgaatctgcattagttgctaaaggcattgggca

SEQ ID NO: 41733 - DNA, 281 bp, Gossypium hirsutum
  Clone ID: LIB3196-022-P1-M1-B9
atctggaggtctccgggagtccccacgcaccaccagggaagcattcgctgggtccagaggttaaacgaagaggcctccctgcgccggctgctcgttcctgtgtgccggtgtcgtgatgctggggagcgctgagactcgcaagcgggacttctgaactgctggggagtcggggggcaggcagacagcgcggacggtgggcaccggcccggccgccaccttgctcacaatctggccacttgggaagaaaacgtatattgtttccccttctctgcatcactttt

SEQ ID NO: 41734 - DNA, 369 bp, Gossypium hirsutum
  Clone ID: LIB3196-022-P1-M1-C1
gccaatcccacttggtgtcacctttgcttgaacccatatcttccttgttgccataacaatgttggcagaaaactcacatactatacaattaaaaataatctaaattgctttttttttaaatatctaaattgagtttaggggtgagcaaaatctgatttaattcaaaaaattttataaaaattttaaattttgaattaaatagttcaagttatttgagttaatcaaattattcggatcaactcgaataaaaatttaagtttttcggtttaactcaaatatgaattacacagttcgagttatccgaaaatccgaataagaaaatgaaaaactacgtcgttttgataaatatttaccttttctaaagttaaa

SEQ ID NO: 41735 - DNA, 355 bp, Gossypium hirsutum
  Clone ID: LIB3196-022-P1-M1-C10
atggcagccggtgtgtggtctcgcgcccgacctccggaggcctagtcgagccgtgacccttcctgccgcctgcaccccaccttgccttcatgcaccttagccggctagcgctattcccattcgtggcgctgtttatcgacaagtgccgaatgatcgctgcctccgatgtgttagaactcacggacgacaacttcgatagtcgcgtatccgacacgggctctgggggcctcatgctcgtggagttacttaccccctggtgtgtacactgcaagatacttgctcctgaatattaagctgcagctacctatataaaaggaatggtcccattagcaaaggttgagtgcactgtcaacac

SEQ ID NO: 41736 - DNA, 128 bp, Gossypium hirsutum
  Clone ID: LIB3196-022-P1-M1-C11
acttagaacgtgcaagcgctgtaccgtccatccggtcccattaccgcccagcgcaagggagcagcactcataggtgtgccaccgaatgcttggggcttttactagaactgttgtttagcttgcatcca

SEQ ID NO: 41737 - DNA, 366 bp, Gossypium hirsutum
  Clone ID: LIB3196-022-P1-M1-C12
cggacgcgtgggctagcttcgatttatctaaaaaacaaggaaagaacacacaaagtaagctttaaaagctactaagacatatacaaataaagtcatcataggaatatttacatatcaattcaaatatgctaagcatagctaaacacatacaagttcacaaacctttcttattaaatacatattcaatatcataattgaattcatcgaaatattcccatttcaatacttgtatgaatctcgtacgtacctaagtcacttagctcatttacacattctttctcgacttgactttgcccgttgaaccattcaaagttaaggatactcggaaatcacataaagctcatataatgccatatcccagatatg

SEQ ID NO: 41738 - DNA, 355 bp, Gossypium hirsutum
  Clone ID: LIB3196-022-P1-M1-C2
cacaattgaagttctgatcggtccggtttaaaaaattatttatattatcattcaagccactttattataaatattggatgcagatcaattaacattaatcggccatacctttgtgtgaaaatatggcccttgtgatagagatttcgcgtatccacactttgtttgcattgaagacttttcatttaactttgtaaaaaataaagccaaccgtggtgcatgtgatacgtcttgtcaaagaagaccgagggctttctctcctactgctcctggaagtgctgatgcagttacacattttgttaataggcagaaatgctacactattcttaattcaaagaattctggccatgtattcggc

SEQ ID NO: 41739 - DNA, 389 bp, Gossypium hirsutum
  Clone ID: LIB3196-022-P1-M1-C3
atagaggcgcaccggggccgccagctggggtcggagcggagcggggtcaggatggacgaggacgtgctgacgaccctgaagatcctcatcatcggcgagagtggggtgggcaagtccagcctgctcttgaggttcacagatgatacatttgatccagaacttgcagcaacaataggtgttgactttaaggtgaaaacaatttcagtggatggaaataaggctaaacttgcaatatgggatactgctggtcaagagaggtttagaacattaactcccagctattatagaggtgcacagggtgttatattagctcatgatgtcacaagaagagacacatttgctaaactggataattggttaaatgaattggaaacatactgtacaagaaa

SEQ ID NO: 41740 - DNA, 366 bp, Gossypium hirsutum
  Clone ID: LIB3196-022-P1-M1-C5
aaattttattagtgaaaatcaagaaaataatgaggtgaccgccattgatgagacgagcaagagacaggcaaaaaagaaagcaaaggaagagagggagagtgaaattagagctgctgaggaaagacaattggagaaggatgtaccaagaactactgatgaattcgagaaacttgttaggagctctcctaatagtagttttgtgtggattaaatacatggctttcatgcttaattcagctaatatcgagaaagctcgtgctattgctgaaagggctttgagaaccattaacattcgagaagaaacggagaagctaaatatctgggtggcttactttaatttggagaatcagtatgggaatcctccaga

SEQ ID NO: 41741 - DNA, 359 bp, Gossypium hirsutum
  Clone ID: LIB3196-022-P1-M1-D10
gtgctagatcaattttaacctaaacactagccacccttgggttttgtacatatgtacatattaggggaagggtgaggattgttcgatttatgtggtaatcgaatttgttaattgtaataatattgaaatggtgggattatgaatctattgtgatacaaaacgcacaagaacactaagaagattgaggtaatgttaaagtgattgggtagcttgcatgtttccaaatatcactgcaagaggtgcaggcattatgatatatgatgtcataaaaatgagaatgtagcattctatatgtactgggtgtttatgaattataagtcatgttatgctggtggaaataatttaagacatgagggaat

SEQ ID NO: 41742 - DNA, 366 bp, Gossypium hirsutum
  Clone ID: LIB3196-022-P1-M1-D12
cccacgcgtccggcgacaactacttattgaaattgttctaaggagcaggttgacagctcttatggttgatggtgacacgacgtgttgggttctggagcaggaacttcttcgttcttatggggttcaaactttaggtgtcgacaacggcagggatgcaatcgacctcattgcatccgatgcagcattcaatctcatcatcatcgaaaagattcttcctgtcctgaatggccttgaggtaacaaggcagatttgtgaaatagggatgcgttgtaagatgttggcggtcacagcttattcgggagaaagtgaaaggcaggcatttctggcaactagtgttgatgtgttcattgagaaacctttggatct

SEQ ID NO: 41743 - DNA, 381 bp, Gossypium hirsutum
  Clone ID: LIB3196-022-P1-M1-D2
atagttcctattcatacgttttattgaagttctgattggaccccttcagaaaattttttatattattattcaagttactctcttatttatattgaatgcgcattttatccattaatgtttcatactttctgagagtataatacccttttaaaagatatttggtgtatcaacacttttcctggattgaaaactttgtttttaactttttaaaatttgggccaccctctatgcatgtgtctggtcatgttaaagaggaagaaaggatgtgtgttatactgtacctgcgaatgctgatacagttacaattcatttgacaaggttgtaatgctagaatatgcttaattaaatgaaaactgggcatgactacagccagaattgcta

SEQ ID NO: 41744 - DNA, 206 bp, Gossypium hirsutum
  Clone ID: LIB3196-022-P1-M1-D3
atgcatgtgactcaggggcgtcctattttgatgatgcatgccgcaagctgatctaagtcgctggtactatagatgggctatatgttgtgtgtatgatgaagatgccttcaacagttgctattgctcatggactgaatataatgcagtgtttgaagaacatgctggtgttggacatgcgaggcgtaaccagtgatatgattcacttc

SEQ ID NO: 41745 - DNA, 366 bp, Gossypium hirsutum
  Clone ID: LIB3196-022-P1-M1-D8
cggcaaattttgtgtattttgtgttttatgtaatagggactaaattgcaaaaaatgtaaatattaggggtaaaatggtaattttaccatttatgtgtttttgaaataagttgaatgtaataatatttaatttatctcattttgaatatatttagatcaagaaccaaagaaatcggagttagatcgaggaaaagttaaagtcatcgactaatcgtccggtttcgattttacactgtccgaggtaagtctattagctatttaatgtcataaaaatcagtatataggtatgtatatgtgctgtatttttatgaattataatttaaaatatgttggttgaaataattaaaagtatgagtgaattatatgc

SEQ ID NO: 41746 - DNA, 379 bp, Gossypium hirsutum
  Clone ID: LIB3196-022-P1-M1-E11
atggccgctcggtgtagggggcttcgagcgccagaaatggcttctcagcgagggacacccaactccgccgcgtgggcgctggcagacgcctgcagcatgggtttgacagccgctgccgacacgaggtacacggcggacgcggtaacagctgacggcacctactacctcgagcacgtgaccataactgaagcatctgacgatgactatgaatatgaagagataccagatgataattgtagcatcccagaccgggtagaacatctgcgctaagcacttgacatcgcccaagaacacgctacacatactgaaatcttggaacgggaaacaggcgttgcttgaaagcatgcagtacctgaagtcatagcatacttcctctgca

SEQ ID NO: 41747 - DNA, 387 bp, Gossypium hirsutum
  Clone ID: LIB3196-022-P1-M1-E12
atcttggctcgctgtgtggcggctcggcggttagcagggagttcgctgagcgtctctgcctagccgcggtcatgagccggcacagccggctgcagcggcaggttctgagcctgtaccgcgatctgctgcgtgccggacgcgggaaaccgggcgccgaggcgcgagtgcgggccgagttccggcagcacgcgggcctgccgcgctccgacgtgctgcgcatcgagtacctgtaccgccgcgggcggcgccagctgcagctgctacgctcgggccacgccaccgccatgggcgccttcgtacgcccgcgggccccgaccgaggagcctggcggcgtgggttcccagcctgacgacggcgacggtccaaggaacccccacgacagcacgg

SEQ ID NO: 41748 - DNA, 366 bp, Gossypium hirsutum
  Clone ID: LIB3196-022-P1-M1-E3
cccacgcgtccgcccacgcgtacggagaaaaaaagggaaaacacaacaaacatgggcagaagtggtaacttgaaaaatgctatagtagcatttcttgttcctctcccttcaattctcttctatctttttttccttgaccatttccacagtaatagtagttctctttcttctctttggtcgtggtgcttccatcaccctctcctattagccaatgtcttctttttcttcaatgtcaacgtcctcttctggatcatcggtcacatccaatccagcaactggatgattgatttgtattggactgtgataccggtgttgctaattcattactatgcaacccacccttcggcgcaatttgatgggttgaga

SEQ ID NO: 41749 - DNA, 388 bp, Gossypium hirsutum
  Clone ID: LIB3196-022-P1-M1-E4
atcgggcactgatgactctgcaacagaaaatgacaccatcttcccaggcaaaagcaacatctggttgaccatgattttaatccagaacttcctcataaaatgcatgaaggactttgatcgtgaatttttttaggtgttaaatatatacaactgattaaattattgtatataaaccagaagcaggacccttatccgggtttgaccactttttatacatgttcatatgcatatggcagcaacaagagaaccctacttttcttcttcccatcaccagaaacatcttttcagggaatcgggggggtctataaaaacagcaatagaaattaagcataaagcatcaacctcgtagcaactgagtagcccttccattataaataactatgagagt

SEQ ID NO: 41750 - DNA, 381 bp, Gossypium hirsutum
  Clone ID: LIB3196-022-P1-M1-E8
atccaagatgctggatgccgaagacatcgttggaactgcccgaccggatgagaaagccatcatgacttacgtgtctagcttctaccacgccttctctggagcccagaaggcggagacagcagccaatcgcatctgcaaggtgttggccgtcaaccaggagaacgagcagcttatggaagactacgagaagctggccagtgatctgttggagtggatccgccgcaccatcccgtggctggagaaccgggtgcccgagaacaccatgcatgccatgcagcagaagctggaggacttccgggactaccggcgcctgcacaagccgcccaaggtgcaggagaagtgccagctggagatcaacttcaacacgctgcagaccaagct

SEQ ID NO: 41751 - DNA, 444 bp, Gossypium hirsutum
  Clone ID: LIB3196-022-P1-M1-E9
ccaactaacaagagggaacgctgaagcacgcgggtgcccgcgccccggtatccggggtctcgaactcacagcgctctcacgactctgtgacagggcactcttagtggttctgagaatccatgagccgagccacatctcagcacagacatcaaggatgccacaacgacctagactgcagagggctataagctgctcggtatcagcgcagagcttacaatgggagtcagacctggtcctggcgtttagacagacgtcctccgacgtgccagaatacaggtggcggtgcgcgagactgaagtggtgcatcgtggacgagagctggtcttcggcagctcggagtactgtatgagactggggggcatccaagaggatctccatacgaagggggcagcctggccatcgaatgggactctcgctgcagagccgcatgcagctctggctttg

SEQ ID NO: 41752 - DNA, 384 bp, Gossypium hirsutum
  Clone ID: LIB3196-022-P1-M1-F1
atctctgaagctcaagggcatattcatctgcttctccatgctgaaggctgctctcagtgggagttacgtcaattttggagtctttcgtctctatggagatgatgccctggacaatgctctgcataccttcatcaagctgctcctctctattccccacagtgatctcttggattaccccaagctcagccagtcttattattcactactggaagtcctgacccaggaccatatgaactttattgcaagcctggaacctcgtgtcatcatgtatattctctcttccatttctgaaggacttactgcacttgacaccatggtgtgcacaggctgctgctcctgcctggaccatattgtaacatacctcttcaagcagctatcacgtag

SEQ ID NO: 41753 - DNA, 368 bp, Gossypium hirsutum
  Clone ID: LIB3196-022-P1-M1-F10
gatatagagaaataaggaaacaagcatccgagtatgatgataaattgttaaatttatggttgtttggttgattagagttgtgaatattgagatacctaaggataacctaaggcgttgtttggtatatacccagactaaaaagctaaccctattatttatctttagtacctatttttgagcaagaaaacacttcttgatgaaccttcttacaaaacctaagccaaaatataaacttgtacttaccctttttttttgggtcctaaactgcacgactatagacgtctcgccatatgtattgagggttaagtaaatacattatggtggattttgtaaaaatagagtgaaataggagggatcagtgtgatata

SEQ ID NO: 41754 - DNA, 369 bp, Gossypium hirsutum
  Clone ID: LIB3196-022-P1-M1-F2
cccacgcgtccgcgtaatttgacattccgtacagggacatttccgtcaataccggccaaggtatgatacagcgaaagattagctcctgagagctgagagaaaaaatgagggagtatgtgaaaacaaaccttggatctggaaggtgcggctagtggggagcgtaagacttgtttactggtctcttcaaagccatcggcagcggaaggagatgcagcgccgccgccaccactccaagaaaggggcgtagtggggctacgtctagtgctaacgttgaaatctccgtctctcttggcgtcacaccgcatcaacatagatttagacctcggctgacgtatcccccatttaagtgcaaccaccgcagatttcgga

SEQ ID NO: 41755 - DNA, 381 bp, Gossypium hirsutum
  Clone ID: LIB3196-022-P1-M1-F3
tgcgttccatggttcaaaatttggtccacaacttccggagcctttttgttggggaaaatcccaaaaaccgggccttcttgaaaactgttttgacccaatttattgggaaattctttggattagaggcttccttagaaaacaaatttacaaacatttccctaaggttatatatgaaaacagacattttaatggtgttgctgaacttcttgaaatattaggaagtattatcaatggctttgcattgccctgaaagcagaacataaacaatttctaatgaagggtcttattcctatgcatactgcaaaaggattagctttgtttcatgctcagctagcatattgtgtcgtacagttcctggagaaagatacaacacttacagag

SEQ ID NO: 41756 - DNA, 390 bp, Gossypium hirsutum
  Clone ID: LIB3196-022-P1-M1-F5
atcgagctgtgaggggattcacttgtgtgcggaattcctcggaactatggcgtccctttcccttgcacctgttaacatcttcaaggcaggagctgatgaagagagagcagagacagctcgcctgacttcttttattggtgccatcgccattggagacttggtaaagagcaccttgggacccaaaggcatggacaaaattcttctaagcagcggacgagatgcctctcttatggtaaccaatgatggtgccactattctgaaaaacattggtgttgacaatccagcagctaaagttttagttgatatgtcaagggttcaagatgatgaagttggtgatggcactacctctgttaccgttttagcagcagaattattaagggaagcagaatc

SEQ ID NO: 41757 - DNA, 301 bp, Gossypium hirsutum
  Clone ID: LIB3196-022-P1-M1-F6
atgcgactggcccctgggctgcctctccccatggcttcatgctgactccataaacattctctgttgaggatgtccagtcagggcttgacaggcccaggctcagcttccagtggttgggaaggttccctgtagcacctgtgctccagcagggagagctaggcagaagcagcgagggggcccagctggtgggactccagccccctcccactcccacactcactcttgcagagccttgtgtctttaagcagctggcgtgttacatctctatttaaggtttccttcgaataaaaggtctgtgact

SEQ ID NO: 41758 - DNA, 385 bp, Gossypium hirsutum
  Clone ID: LIB3196-022-P1-M1-G1
atggcacgtggtgcggaaccggcgccgcgctttctgctgaaccttcaagatctgcggtctgggctttggttgaaagatggcggccctcacgaccctgtttaagtacattgatgaaaatcaggatcgctacattaagaaactcgcaaaatgggtagctatccagagtgtgtccgcgtggcccgagaagagaggcgaaatcaggaggatgatggaggttgctgccgcagatgttaagcagttgggcggctctgtggaactggtggatatcggaaaacaaaagctccctgatggctcggagatcccgctccctcctattctgctcggcaaactgggctccgacccacagaagaagacggtgtgcatttacgggcacctggacgtgcag

SEQ ID NO: 41759 - DNA, 302 bp, Gossypium hirsutum
  Clone ID: LIB3196-022-P1-M1-G10
cttctttaacttttcaaatgatttctattagtcccaaaatgttttcaagggaactttaaatttagaatttagggacaaatcgcattttaatgattgaattagaatatgcatatgattacttatgaattggttgttaaatgctttgattagtggtaatattccgtaaccctactccggcgacggatacgagtttggggtgttacataacaaatgtgataatatgtgatccaaagactctttgacatcatcttaaactcttaatccaatatcttcctccacccattatctagttaccactatca

SEQ ID NO: 41760 - DNA, 374 bp, Gossypium hirsutum
  Clone ID: LIB3196-022-P1-M1-G11
atgccgctcccagtcaggctgtggggtctgaccgcctggagcttctgaggttccccagggcgcccacacgtgctcccagccaggctgtggggtctgaccacctctgtcctgggctgtgtccaagaatcaggtgcccagtgggtcgggatgacagtgccaggagtcctggatgggcaccctgctcccatcatcccggaggtccggcttcatttctagctgggggcggggcctgtgactgccagctccagagccctgtagggagctccctgggagggcacggcaggactggcaagggagaggcctgggaccatcccagagggagccttatgcccagagacctgtcccacatctgctgaggtggagcaagccatggt

SEQ ID NO: 41761 - DNA, 379 bp, Gossypium hirsutum
  Clone ID: LIB3196-022-P1-M1-G4
atccggagatcaagtgagtctaggcgctgcatcttacatccaggctacatatgcgctgaggcacatgaacagcagctgcagcccctaatgttgttggaggacctacaggttgatgcggagaccattggcactctttcacacgcgggacctgtatagcattatccaccagtatggagaagttgtacagcagcctgttccagctgagctcgcacgtggaggcctgggcctgaccatctatgctgagccggagctgggaatgcgaagccatgcctgcagatgcggtcactgaactagcgcttgcaccagcagcagggtgacaccgaggacaagcggaggcctcaacctgaaatcatccgagagatagaggcacgactgattg

SEQ ID NO: 41762 - DNA, 366 bp, Gossypium hirsutum
  Clone ID: LIB3196-022-P1-M1-G8
catgtacaaaggggagaacgaatttagaaggtacatgcttccattcatgaaccagcccatcattaaagctttaattaagagagatacatgacccatgcacctagcatttgtccaagaggggttggatatgaattgaagatgcacattcatggaacaaggaagctttcttattggttaagcatgcattgatacggccacgcctcgggcacacttttggaccagctccctaagcattgcttgcaaatccatgcaagctgaaatagttcaatttcttttcgttgagctccgtttagctcgtttccagctcactcgagctcaagtcagctcaatcgagctcaatttagcttctttccagctcgttaattt

SEQ ID NO: 41763 - DNA, 343 bp, Gossypium hirsutum
  Clone ID: LIB3196-022-P1-M1-H1
gagatatgtgaaaatgtgttcataacaagttggaaatttgaaatgtttgaatcaatatgcgtaaagctatactgttgttgaatatgtatttgcttgagagtcaaaagtttagaggctttacaatcttcgcccccttaccagaacagagttataccatgagattcttgagagatatgttgcataagcttgcaaaagtgaaacttaaaagtattataatggaatagtatgggattagtgaagacagaattagttagaggaataatgtccgacttgcactgatgtttgagtatgtcggattcaatcaaataaaagtgatggctatctttctcttctaagagttcta

SEQ ID NO: 41764 - DNA, 369 bp, Gossypium hirsutum
  Clone ID: LIB3196-022-P1-M1-H11
cccacgcgtccgcactatttgggaaaggaattggtccaaaacctgctggttcttcgttttgcaaatctcttcttcttacccctttggaatcttgacaacattgataatgtacagattgtgttcagagaggactctggaactgaaggtctaggtggatattttgatgaatacagctgtgtttgatatcatatattttgcctagcatcttgtatgtgacttctatggtacagatttgcttattagttcattttccttttgcgctctttgtgcagcattatccgcgatattatccaaaatcacctgttgcatgtcctttgacttgttgctatggagaagcctgtatctctcatacctgatcgcattcgtgat

SEQ ID NO: 41765 - DNA, 283 bp, Gossypium hirsutum
  Clone ID: LIB3196-022-P1-M1-H12
agaacaagtttgtacaaaaaagcaggcctggcccgtgccggtacactggaatttccgggatcccagcttcctagctgtgggaccttaagcaacttgtagcccctgtgaagctgttttctcaactgtgaagtggacgcaccctacttcattgattctaagaggcacgcatttccacctggtgacttctctgaaattgaggtgcgtctttcagtcagtggcgtctcatagtcgctgtcagccagctggtattcgagatggagtcgtggaaaacccggggacacct

SEQ ID NO: 41766 - DNA, 383 bp, Gossypium hirsutum
  Clone ID: LIB3196-022-P1-M1-H3
atgcgcgcctaggctgccgcccagcgccctcaccgcggccatgcccgggccgtagagcgcctgccgcagcccgcgccccgcagccccgcagcctcgcgcccgccgccgcctcttcaatgggcaacctgctcggcggggtcagcttccgcgagcccaccaccgtggaggactgcgactccacctggcagaccgactcggagcccgagcccgaggagccagggccgggcggcggcagcgagggcccggcgcaggagcccgagcagcccgcgcagcccccggagcgagccggtggccggtcccactgcagccccgcgccggacgaggacgccgaggcggcgggcgcctagcatggcggtgatctcactgaagcaacagtctaacca

SEQ ID NO: 41767 - DNA, 392 bp, Gossypium hirsutum
  Clone ID: LIB3196-022-P1-M1-H4
atcaaccctgcttgcctccactttgggggcatggaaggtgacagtgctgctgatagaagtggctttctaatccctaggagacagcttctcaagtagaatcacaaagctagaaaaggcctcagcaacttctgtatagatgaggaaacgggggtgcagaaaggctgtgagatttgcttaagatcacacaggatcagaaccctagcctctgctcacttgttcttccaccccatgccgtctctgtaagtctgctgtttgattcttgaattccagaccctaaaaagtcagccagtcgccctgggagtcgggctgggagtcgagccgggagtcgagccagcagccggcgaggaagcgatgcctctgactttgacctcttagagacacagtctgcttgt

SEQ ID NO: 41768 - DNA, 273 bp, Gossypium hirsutum
  Clone ID: LIB3196-022-P1-M1-H6
atgcgacggaacgtcccatgcgcagcctggagtcagagtcacagccaggggcgcgccggcgaccagtccagaggggcccacggacccgctccgcgctccaggtcggccgtcccatgcgccgcaccccgcagcccccatggcctggctggctccacctgctgccagggaagaccctcggcctgagagccgagtgctgctgggaggtggccgggcgcggccgggctgtgctctgggaaccgccggggtcggcgcgctggctcgaccacgctcctg

SEQ ID NO: 41769 - DNA, 380 bp, Gossypium hirsutum
  Clone ID: LIB3196-022-P1-M1-H7
atcggagacacgcggcggtgtcctgttgaccatggccgactacctgattagtgggggcacgtcctacgtgccagacgacggactcacagcacagcagctcttcaactgcggagacggcctcacctacaatgactttctcattctccctgggtacatcgacttcactgcagaccaggtggacctgacttctgctctgaccaagaaaatcactcttaagaccccactggtttcctctcccatggacacagtcacagaggctgggatggccatagcaatggcgcttacaggtggtattggcttcatccaccacaactgtacacctgaattccaggccaatgaagttcggaaagtgaagaaatacgaacagggattcatcacag

SEQ ID NO: 41770 - DNA, 267 bp, Gossypium hirsutum
  Clone ID: LIB3196-022-P1-M1-H9
cggacgcgtgggtgacacctccatgcagcatattcaccaatccttctaagtctgctgtgataatcattcctgcaaatattggtcagtttttgtgcccagtcttacttagtgcgtgatttttggtgtttctggcattatcgtttcttttttgggttggagtttgttaaaaacccaaactaccccttcatgttgtgtgtgcctatggttaaaacatgattaataggtgagaaagttttagcctaaaaaaaaaaatataaataaataaaa

SEQ ID NO: 41771 - DNA, 385 bp, Gossypium hirsutum
  Clone ID: LIB3196-023-P1-M1-A1
gctgaccgtgtgtgagacaaatgcccgtgtgtctacccgtgtggacctttttggaggctattttccatgccaatggtcaccctcaacatccatacacatttataaacttcaatggtattttgcatggcctaaatatgtccataacctacctttgcatagtcttttgcatgttaacctcatctcattggtttagtacatgctaggttatcctttttgtattaatgattaccactccaataatcacattttatacttgaactcgtttataactcattgccaattatgacctaaccttctcctagtgattcgaccacattacacatatccttccggggtatatcatattaaccatctaatgaaatattcaagcctgacatgcataatt

SEQ ID NO: 41772 - DNA, 320 bp, Gossypium hirsutum
  Clone ID: LIB3196-023-P1-M1-A10
cccacgcgtccgatcggaagagatctcagtagcagtcgtcgcgaatcatgtgtgtaccagacaccctttcttagttcaatttggtaaaagccgaaatgccaaaatttccggcatttcatgggcttgtgagtatgcgaatgctctcaagacgtagagtaaattttagatctagcatcgcaaggtggtaagtaagtttgtgtgacgtcttaacatgcttcggaaaaagagggcctcgatgggccaaaattgggccaaatgggcttacggactaatatgggtaagagatgggcaaattagcctgttagttagatggtgggacc

SEQ ID NO: 41773 - DNA, 340 bp, Gossypium hirsutum
  Clone ID: LIB3196-023-P1-M1-A12
cccacgcgtccgctagactcatgtccccacctatatatttttttctagaatttttggtcgggcccattagtacagtttattagtcaaagtctctcatgttacaggggtcgactacactgaccttttcccattacgactgggatatctctctgcacagggcttcaatactaatgccgtttgtttctatggaaactagactcagagaggaatccatacatatatggtatgacccctaattatctctggtcaatttatagtgaaatttccaaaggcggaacagtgaatccagaaactgttctggccctgtttcacaagaacccgaatatctctttctgtactg

SEQ ID NO: 41774 - DNA, 390 bp, Gossypium hirsutum
  Clone ID: LIB3196-023-P1-M1-A5
atggcatgcgctatcacacctggctacttctgtatttttagtagagaaggagtttcaccatgttggccaggctggtctcaaattcttggcttcgcgtgagccactgtgcccgacctgctctgatctctctcaactctgcagcctgagagattggggctgataaagactggttgccaaacatcactagaaacgtgggttaggggtttatggaagacgaactgatgccccatggcttgtaaaggctgggcgttcccttatttctccttaaggcctcatggggctgaagaacctggaagggtgtgccagagccatttgtcctccaatttacttgatgccaaatttctcctgtgagccagttggactcgtaaaacaaggatcattgatgttgtc

SEQ ID NO: 41775 - DNA, 281 bp, Gossypium hirsutum
  Clone ID: LIB3196-023-P1-M1-A7
atgcaatggtgaaagactgcaggggcaagcgaggcttctggaaggaacttggacctcactgccactggcttgtctcctccagggtttcttgatcactgatgtttcaggttgatattggcagtttgaagaagcctttgttcttcatgaatgtgagagaaaaggaataaaaaggaggggaaaaccacaattgaagctgctaatcctgaacaagcccgaggctgtacaagacaaaaagcattgtgcaaaataaattgcataagataaacaagaaaacacacaac

SEQ ID NO: 41776 - DNA, 346 bp, Gossypium hirsutum
  Clone ID: LIB3196-023-P1-M1-B1
aactaatcctatgcacttgccacactttagaacatacattgcccttaatgaaaaataattaaagtgcaaggaagaaaactttcctgagtagggcaacctccttgttgttatgataatctcgagatttgtctgctccaagtagatgaaaaattacctaaaaaaatagtgcaacaagaaatatgaaatataatataaaaagaaaaagaaaaaataagaataaaaagaagaagtgtcaataatggatgacagaatgtctaaaaatattttgatgaacttgggcttttaatgttgcaaggtgcgttctgtctaggatgtcatgacattagggggatgtcatgacatcgac

SEQ ID NO: 41777 - DNA, 372 bp, Gossypium hirsutum
  Clone ID: LIB3196-023-P1-M1-B11
gcgaagcaaccagggttggtagattatacatatagagtcattgttgataggtaactcaagatgacaggataatcagattgtgaaaaccattattgttgggcaactcagagttgtaatatgtacatattttgagtcatcattgtcaggaaacctggggtgatagattcgtatatccattctaagtctttgtttgattagtaaggttgtaaaaacatgaaatttttataaagtatatgaaatgaaatgagttgaaaactagccctgatggccgattgagtttaatgagccaatacgctcggaaatggttgaaatgcttatatgtaatggaacatatgtgtacaaatgttgatcatggtaaacaaataattattt

SEQ ID NO: 41778 - DNA, 397 bp, Gossypium hirsutum
  Clone ID: LIB3196-023-P1-M1-B3
atcctggaggcccggcctggccgctcccggccctggggggcacatcggccctgagtctcgtcccaggctctgggctcaggcagctgccgccaccgctgcccagggcgtcgggcctcctgccttcctcccaggcccccacgctgctggccgcctggccgagtggccgccatgcgcctgccttgggccacctctgcccccggcctggcctgggggcctctggtgctgggcctcttcgggctcctggcagcatcccagccccaggtgcctccatacgggtcggagaaccagacctgcagggaccaggaaaaggaatactatgagcccaggcaccgcatctgctgctcccgctgcccgccaggcacctatgtctcagctaaatgtagccgcagccgggaca

SEQ ID NO: 41779 - DNA, 356 bp, Gossypium hirsutum
  Clone ID: LIB3196-023-P1-M1-B4
aatgacatatggggcacaaaataactggtgtcttgtaaatgttctggtttttttttttttttttttttttaaataaaacttctatactttagtctttactttaaaaatatgtactgcttccttttttgatttttttggtcgttttttttcttttgcactgagctcatcatatactaatactaccttaatgttaaaatttgaattttctttagcattttgcttaaaagcaatatgctatttccttattccgtgccctgacatagataatttttgaatttctgatagaatacaagtgtggtaaatgccatgttttgactttatctaacatcttctctttcaagaagcttggttttttt

SEQ ID NO: 41780 - DNA, 361 bp, Gossypium hirsutum
  Clone ID: LIB3196-023-P1-M1-C5
tacacgcgtacgaaaacattctcaactctgttgagcccaaagagaggatcaaccgggaactattttatgatgaatttaaataacagtgtattacaccaaaatccatacaccaaatgaatacagatttgctccaatcacactgcggacgcatgacagtgtcatattatgaacgagaaatctctaagcttctctagattccactagagtgcatatttatagaaacctgcatgtgacatatgattgaagactgtctatattaaaacatatgaagagctgatttaagagaggatgtaaccaacttttgaatctactgattcaaagtaaaaatggatggggaaatcacattcattgccatactaaa

SEQ ID NO: 41781 - DNA, 394 bp, Gossypium hirsutum
  Clone ID: LIB3196-023-P1-M1-C6
atcaggatcgtgtagatgcccaggacgagacagctgcagagttcacgttacggctgaatctcactgcggcccggctaggccaactggaggggctgctgcaggcccatggggatgagggatgtggggcctgtggtggagttcaagaggaactaggccgccttcgggatggtgtggagcgctgctcctgccccctgttgcctcctcggggtcctggggctggtccaggtgttgggggaccaagccgtgggcccctggacggcttcagcgtgtttgggggcagctcaggctcagccctgcaggccctgcaaggagagctttctgaggttattctcaccttcagctccctcaatgactcactgaatgagctccagaccactgtggagggccagggcgc

SEQ ID NO: 41782 - DNA, 345 bp, Gossypium hirsutum
  Clone ID: LIB3196-023-P1-M1-C8
tacaactagtaactaatcccaacattgaagtattgaacaaactcatataagcaaaaaatctcaaatatccttcatcatgagacatataattgtcactataaataagaacaaaaattccaacagtagtgattaatattgacataatagaggtaagtgaatcaataaagtagccaaactcgaaagaaaaatcattattgatggtccaagaccatacatattgatagatagaacttctatttatttgctgaatagacagatcgagtgaaaaaatcataactatacttaacaataaaatattgggaaaagcccacataccacgaaaattttttgttgccgtccgaaaaa

SEQ ID NO: 41783 - DNA, 384 bp, Gossypium hirsutum
  Clone ID: LIB3196-023-P1-M1-C9
atgcaactcaacattaggtttaagaaagccacagggaagagaaagctgatggtatgacacccacctcctgaagtataaactcttagattaagagcttgtgtctccacaaggcattctgagcttatttgttttctttgtggatcaaagggcagatatcaaatgatataaattatgccttggggtattactatttattctctactctttgccagtctgtgaggaaaacctttttagcaataaaaattggatggaaatgaataatagattgtgtagatgttgaccagtttgatattttgcaaaaatgtttgaactcaataaaaccatacaccataagttaatatatatctaggagactaggtcttctacatttgagagttctttcag

SEQ ID NO: 41784 - DNA, 377 bp, Gossypium hirsutum
  Clone ID: LIB3196-023-P1-M1-D10
atgcactcaaggccaagaacatcaagcagacggaactggtggctgacctccgggaagccatcctgcgcgtggcgcgtcacttccagtgcgcagaccccaaaaactgcagcgtggagctgactccagactacagcatggagagccaccagcgggaccacgagaactacgtggcatgttcacgcggccaccggcgccgagccaaggccctgctggacttcgagcggcacgacgacgatgagctgggcttccgcaagaacgacatcatcacaatcgtgtctcagaaggacgagcactgctgggtgggggagctcaacggccttcgaggcgtggttccagccaagtttgtggaagtcctggatgagcgcagcaaagagtat

SEQ ID NO: 41785 - DNA, 376 bp, Gossypium hirsutum
  Clone ID: LIB3196-023-P1-M1-D12
aacctatatgatatgctatgacatgagctataagcttgggatgactgttgtgaaagagaatatgtaggtatgttattcatgtcatatgacaataaatatgtgggtatgttttcataccatgtgtgtaacaccccaaacccggcctagacgttatggccagatccgacgtgtcacattgaagtttttaagaaaacccatgcctctttcaacgtctttcttcgtgtttcaaaagatagtctttgctaagttaataaagtgaatggaagctgtgcaccaggtatgtatccgaaacagaggaggtgagccatgaaggctgcttaagtgccaagcttttgattggatccaatcctagacatgcccacaaccattgccacac

SEQ ID NO: 41786 - DNA, 241 bp, Gossypium hirsutum
  unsure (1)..(241): unsure at all n locations
  Clone ID: LIB3196-023-P1-M1-D2
cccacgcgtccgcgatatctgaactcgcttgtgtgtgatggtgtagtgtgtgagagagtttgagattatattttgtaaaaaaatcttatatggatatgggtaaggtgcgttactagccatttgcaaatataaaaaaaaaaaaaaatataaaaaaaaaaaaaaatacaaaaaaataaaaaaataaaaaaattatgaaaagttgagggaatatgaagaaccncaaaaaagctttaggtgaact

SEQ ID NO: 41787 - DNA, 378 bp, Gossypium hirsutum
  unsure (1)..(378): unsure at all n locations
  Clone ID: LIB3196-023-P1-M1-D7
atggctggtcttgaactcctgacctcgtgatccacctgcctaggcctgtaaaagtgctgggattacaagcatgagccactgcgccgaccgctaggagattttttaactgtgtccattataggcactagaaatcttgactcttaaaattatagcatggttcacctggtccatgattccgtatttaacagtaccacaggaggtcgtaaattctggactttttgaagaccatgaaaaagtttgttgagactaacataaaacttcgcctctggccccggttgtcatagctaggagtggatttaggaagtttagtacacttactttgagaatggatntctctaagggcattttctattttgaaatgttctgagttctgtatga

SEQ ID NO: 41788 - DNA, 392 bp, Gossypium hirsutum
  Clone ID: LIB3196-023-P1-M1-E5
atgtcctcttataatttaggctggactgtcacagacactctggcagacacagcatacgtggtgcagccagagtgcaaacatgccagcagcagccatgctccccagggtgggggtccagttagtaagccacgcgcagccaagaggcgaggcatgccctccgccacacacggacttaccccgctcactgtgcccgtggtatcaaaatgtacctgcatgtttaattcataaaggagaggctgatgtcattgaaagaaaagtttgttacttgcatttctggagaaaaggagcgcaccaggccatgcagggccacaggaggaggaggcactggagtggtcaggaggcagaactaggcgcaagcatgggcaagcagctttcctttgtgtctccgtggc

SEQ ID NO: 41789 - DNA, 334 bp, Gossypium hirsutum
  Clone ID: LIB3196-023-P1-M1-E6
atcgcggctgtccggccaccgcaagtaggcttatctctgactgcctctccttctgccaggccggggagctgcttatgctgaccctgacttttccttacagggcaagcccccagggccattcctggcacacagagatgctggacttcaagccccaggccccttccctgccccagatggtgacaagggggaccttctgctccaggcagtgcaacagagctgactggcggaccatctgctgacagcgtaatggggggcagacccagtcccagcccaagctcctggagagggacacgagggtcttaccctgactggggcccgtgctggaggtgtgggc

SEQ ID NO: 41790 - DNA, 392 bp, Gossypium hirsutum
  Clone ID: LIB3196-023-P1-M1-E9
atgaggaactaccctaagacaagagggaaaggggagagatattgagaagagtgagccatccatgacagtggtttagaggatttctccagagaaataaagaattctaagatggaagagcaatggagaactatagaaaattatgagcgaaccaaaatgatcaagatatatgaaagtaaaaaggaagaataaaatattgtaaaaatcagaggcactgataatccaaaaaaaggaagataaatattaatagagaataaatattcattgttatcaaataaaaagtttaaaaataatatcaaaataagtattaaattaatactaactgaacactgagtgttaaatatttttgagaaacttctttataaaagaccatgtttgactggacatagtggctc

SEQ ID NO: 41791 - DNA, 314 bp, Gossypium hirsutum
  Clone ID: LIB3196-023-P1-M1-F11
atgcggcggcggcggcaactggggacagggcgggtggcgcatcaccggcgcggaggcaggaggagcagtctcattgttccgggagccgtcaccacagtaggtcctcggctcgctcggcccagcccctctcagtcctccccaacccccacaaccgccggcggctctgagacgcggctccggcggcggcagcagcagctgcagcatcatctccacccgccagccatggaagacctggaccagtcgcctctggtctcgtcctcggacagcccaccccggccgcagcccgcgttcaagtaccagttcgtgagggagcc

SEQ ID NO: 41792 - DNA, 373 bp, Gossypium hirsutum
  Clone ID: LIB3196-023-P1-M1-F8
ataaaattgatagatcttaggatctgacacaaatgtggctgtatcctaatactaatgttatgaaggtcgtgggtattattattatatttaagtgaatccatacattcccttctacctataaaatcataaaaccacagtgctcttttattatatattatttttgtaacatatagtgaaaagttaatttcagtattttttttcttattaggttactcctgattcagccattctaggagttcttcagtccaacattcagcatgtgctggtctatgaaaatcctgctcttcaggagaaagcgttggcttgtattccagtccaagaactaaaaaggaaatcacaagaaaagttatcaagagttagaaaattggataaa

SEQ ID NO: 41793 - DNA, 389 bp, Gossypium hirsutum
  Clone ID: LIB3196-023-P1-M1-G11
atgaaaacctcttgccatctgatggtgacttctggattgggctcaggaggcgtgaggagaaacaaagcaatagcacagcctgcgaggacctttatgcttggactgatggcagcatatcacaatttaggaactggtatgtggatgagccgtcctgcggcagcgaggtctgtgtggtcatgtaccatcagccatcggcacccgccggcatcggaggcccctacatgttccagtggaatgatgaccggtgcaacatgaaaaacaatttcatttgcaaatattctgatgagaaaccagcagttccttctagagaacctgaaagtgaggaaacagagccgacaacacctgtacttctagaagaaacacaggaggaagatgccaaaaaaacattt

SEQ ID NO: 41794 - DNA, 349 bp, Gossypium hirsutum
  unsure (1)..(349): unsure at all n locations
  Clone ID: LIB3196-023-P1-M1-G12
cccacgcgtccgattttctatttaacttatctcttgtctatttttgtccaacaagttaaccaatggtctaattaccatttaacgacctccaatttaaaatttcataataattggacacttctaacatgtagaactcaacttttgcacttttttacaatttagtccttttagctaaattgagtgccctaacgtcaaaatttttaaacgaaatttttacgaaatcattctgtgaaattgtagaccttaaaaatataataaaaaataaaattttcctcgtcgaatttgtggtctcaaaaccactattctgactaggcncaaaatcgaattgttacaacgtatatgcaattca

SEQ ID NO: 41795 - DNA, 396 bp, Gossypium hirsutum
  Clone ID: LIB3196-023-P1-M1-G5
atggcccagactggcggcggcgatggcctcggcggctgtggagagcttcgtgaccaagcagctggacctgctggagctcgagagagacgcggaggtggaggagcgcaggtcctggcaggagaacatctctctgaaagagctccagagccgaggcgtgtgtttgctgaagctccaggtatccagtcagcgcactgggctgtatggacggctgctggtcacctttgagcccaggcgatgcgggtctgtggcagctcttcccagtaacagctttacttctggtgatatagtgggcctgtatgatgctgctaatgagggcagtcagctggccaccgggatcctgacccgggtcacccagaagtcggtcacggtggcctttgatgagtcccacgatttcca

SEQ ID NO: 41796 - DNA, 379 bp, Gossypium hirsutum
  Clone ID: LIB3196-023-P1-M1-G8
atagaatttatttcttgaagttatagaggctgagaaatccaagatcgaggggccccatgtggtgagcaccttacttgtggggactctgaaggttcccaaggcagtgcagggtatcacatggggagggggctgagtgtgctaactgggtagctcggatctccagttcccctgatgggaaactgtgtaatttataaagaaatacgttaatccactaatggattaattcatttgtgagggtggaaccctcatgatccaatcacttcttaaagaccccacctctcagtgctgccacataggggattaaatttcaatatgaagtttaaaaggggacagatactcaaaccatagcagcatggaattcaaaagcactccaccgtgt

SEQ ID NO: 41797 - DNA, 324 bp, Gossypium hirsutum
  Clone ID: LIB3196-023-P1-M1-G9
atcctatctacaccccagggcagcaagtactccatggtggaactacaggatccaaacagcaacaggattgcacagtggctggaagtggcacctgagcaaggcattgtagacctgtccttccaactggcaccagaggcaatgctgggcacctacactgtggcagtggctgagggcaagacctttggcactttcagtgtggaggaatatgtgctgccgaagtttaaggtggaagtggtggaacccaaagagttatcaacggtgcaggaatctttcttagtaaaaaattggtggaaggtacacctatggaaggcccatgctaggggc

SEQ ID NO: 41798 - DNA, 377 bp, Gossypium hirsutum
  Clone ID: LIB3196-023-P1-M1-H3
atttttaatgcccattgtgacacactgctctcttttcccctttttcctctcgtaagttacttgaatgggcgtacaagaaacttgttgctccattaagtggttttgtgggtgcttgtgaggactcaaagtggagacacaagcaaaatggctgacttgtcggtaagcgtgtgtacaattgggaaggcatccaatacttgagcccctcgaaaacaagtggcacccatgcattcattatctgccaaaatgaataaaagaaaagcaacgcttgtggggttcaaaatttcaaacttttcagcttaagcagttataagttcttctaacgggccttttccttgcatgcttaactgcgtgtatataaaacccgaatatacgtagag

SEQ ID NO: 41799 - DNA, 398 bp, Gossypium hirsutum
  Clone ID: LIB3196-023-P1-M1-H5
atcgccctttttttttttttttttttttttttttttttaaataacaaacatttattggtgtcacttatggtagaaaaaacttcctacaccagatgcacatgacccaattgttaaatagaacattttgaaggtgaacacacaccctaacccaggttttttacccactttttaagatggccaattctttttttcccccccacccaaagacatgtgagcaactgctaatgaaaagcagtaaacagccgcttgggctatatcattttcaactccactctgaggtgaagattccaattacattcgagacttaagttctctcaattttttcctaacaaaggtcctgagtccagtatttacaatattacagcactagtggatcagtatctacaacttatcttttt

SEQ ID NO: 41800 - DNA, 316 bp, Gossypium hirsutum
  Clone ID: LIB3196-023-P1-M1-H9
cgacaccatagaacaagttggtacgcaaaagcacgctggtgcccctccccaattccccggattcttcccacgccatctggggcacacaataactggcgccttgataatgatcggaatcactccagttttctttatcacaaaaaaaagtcttgctctggaggcaactctggcaaaagatgtacctgcaacttttgcagtggctgtggaggatgcatgatgttcccacacgtgctcgttgtcgacatgacctcccctgatgctctagttctaggtgtcctcaccattatgctcactagcagggagctgttatcgtatt

SEQ ID NO: 41801 - DNA, 359 bp, Gossypium hirsutum
  Clone ID: LIB3196-024-P1-M1-A11
ctcagatgcttgaaagagaaattagtttccttgaggaagagttaaaatcggtagagggtcttcaaccggcttcgagattctgcaaagaggttacagattttgtgatggccaactctgatcctttaatacctacaagccggaagaatcggaagtcatgtcgattctggaagtggctttgtgggattccttgctttaacttatcgtggatctgttgttgctgttattcggcatgctcttgccatctgaaatgcctgcagtgttgtgattgcgatttatgtaactgcagctcatgcatttgcagcttatgtaaatgcaggtgctgcagttgcggctcatcggaacacagttcgtgcaaatgc

SEQ ID NO: 41802 - DNA, 353 bp, Gossypium hirsutum
  Clone ID: LIB3196-024-P1-M1-A12
atcaaacagcccccagaggcattttgaaattcatcccaactgtaggctgagtgatcggcaggtgggacggactgccaaagtccaaaagcttcagcatttcctcagtgtcaggatctacttcaatgatctcctgatccggggctgagaccttgggaacataatcgtctctcctttctctctccttctcctgcagcttaatggaaacacctctcaatgggcccctctgcatccgcttcatcagatgattgacacagcctgctatgttattacggagcttcttgctggggataatggccatctcctcacgcatgcatttgtttctgtggaagttgttacctacgcacatgtaatac

SEQ ID NO: 41803 - DNA, 289 bp, Gossypium hirsutum
  Clone ID: LIB3196-024-P1-M1-A3
ctctgccaagagttcatatcgagttccaacccccaagcaccgtcctgagaaatccagtgtctccctaactgtcatctcaccatggtgaaggtcatgttgacttatataagcacttgtcctttgagggatgaattcatgaaattcatgaccacaataagtaatttttcctgatacctattcaaggattgaacattgttcatcagtaaacttaaccaaacgtttcaaggcatgttatttataattattataattattattattattattattattattattattattaata

SEQ ID NO: 41804 - DNA, 376 bp, Gossypium hirsutum
  Clone ID: LIB3196-024-P1-M1-A5
aaaattcaggacaaataaattggaaccattaactattgactgcaaatttatggacgattcttcttcacttgtctttttctaatggtataagaaaataaaactggatacataactaaattgatttttttttcaataaaaaaaactttcttaatttcaagtatattataataatataacagcaattatgagtctatgtaaaccccagagcataagttgttacacagttatagttatctaatgaggtattttatctatctagatatgatgtccatagggaatcagcaagaaattatcgtgtttcaatttttcattgaatagattaaaataaaagaaaaaatcgaatttttgatagagcacgccatgtcttgtctccatt

SEQ ID NO: 41805 - DNA, 300 bp, Gossypium hirsutum
  Clone ID: LIB3196-024-P1-M1-A7
tcgaggggatgtccgtgctctggtggcatttccaaatgcctcttgactacctccagacataccaatgtctagagtgagaatcctacacaaaagatatgaaataagcagtgtctgcaagtatacttcaggttgtaattagttacaacgaagtaggtaattactctaaggatcgtacctaatgaaggttagcactaaattaattataacctaagcacaaataaatctaattagtaatttacataaattatagtacgataaaaaaaatatttttagatctttataaataatgaaatagaaaaa

SEQ ID NO: 41806 - DNA, 326 bp, Gossypium hirsutum
  Clone ID: LIB3196-024-P1-M1-A9
atgggagggtgagaagggcccaccccgcgcctgccctcagtgtctttggtggcgccttccttgccggcctccagggcgctcagcaccgcgtctgtaaggacccgcccgccgctctcagcctgacacgccagccaggaggtctgtagtcggtgaccagtaagggcacgggatggtgcaggtaaaagcacatctttctcacaccttgctctttggaaggcccaggagaacatctgtgaaggccgttggaggtgctctgagcaccgtggcatgtctggcacgtggtctccaagctgcaattgcccgggttggttggggaaagggagtgg

SEQ ID NO: 41807 - DNA, 166 bp, Gossypium hirsutum
  Clone ID: LIB3196-024-P1-M1-B11
gggggccaccgaaaaactgaccgatgtgtaaaactaaaaaaacaggcgcacactcccaaaccaccactttcctcgtagagaccggcaccggagccatgcaaagcttaacgcctatacaacaaatgcatcgacccctctgaccatcatatttctatggggaccccat

SEQ ID NO: 41808 - DNA, 395 bp, Gossypium hirsutum
  unsure (1)..(395): unsure at all n locations
  Clone ID: LIB3196-024-P1-M1-B2
atcatcactggagatgagggaggcagctgccacggagatccgccgagccatcacaggtcgcatcccagaaagcttaagaaactgtgtgaacaaggaattttttgtcacatcagcgccttggtcagtaatagaccagcaagcaattcatcctgagctcaatggtgccacatacagatatccgccaggcatcgtgggggtggctccaagaggacttcctgcagccatggaagggatcatccctggaggcatcccagtgactcacaacctcccgacagtggcacattcttnccaagcgccctcttccaaccagcccacaaaacatggggacaatcgagagcaccccaacgagcaatagcagagaatgccagaaggtaatcattcagatacacttggga

SEQ ID NO: 41809 - DNA, 180 bp, Gossypium hirsutum
  Clone ID: LIB3196-024-P1-M1-B5
accaggcggtcagggtttaacagacaaaccagctagctaaatcaaccgcatttcactcccagcgcagaaaaatctaaaaagcgctgggggaggctaaaacccccccacgcaattggatgccagacaaggttgggggcgcttttgcacccaagccatcatctggaccccacaaatccaggg

SEQ ID NO: 41810 - DNA, 292 bp, Gossypium hirsutum
  Clone ID: LIB3196-024-P1-M1-B8
cccacgcgtgcggttaaaaccctttcaagcaaacccccatttcttcaaagcaatggcggagtcaagagatagactcgggagagccgttgatatagcggaagtcttcgctcgaagacggtctgggcctttggggattctctcagatgaatcgatggatcttttaggctctcccgttcgacaatcagtcacgcgtaggtcaatgggtgttgttggtgttactacttcgacggcgcgtggtgtagggctccgacgaggtggcagttttgggactccgagaatcggtattcgacgt

SEQ ID NO: 41811 - DNA, 387 bp, Gossypium hirsutum
  Clone ID: LIB3196-024-P1-M1-B9
atggacagccccgggccccgcgggccgtccgttcggctccggggtgtgttacccaaagaatgataaagttggttttatttcaagaagtcgatcgaaaagaaagcctcagcgtctagagttcagctgacgggaaagggggtgcgcagcctccagtttgagagctatccggagccccaaaacaggggtgggcgccagctccctgcacgccctgagcttctatcgtaggccggaccatgggaaccccaaagccacggatcctgccctggctggtgtcgcagctggacctggggcaactggagggcgtggcctgggtgaacgagagccgcacgcgcttccgcatcccttggaagcacggcctacggcaggatgcacaggaggaggatttca

SEQ ID NO: 41812 - DNA, 184 bp, Gossypium hirsutum
  Clone ID: LIB3196-024-P1-M1-C7
caagcaaccgcaggcgcgtgaccttattttgctcaaattttcactactctctgtctacatgttatccccaactggacagacatcgatccacgaggataaaccaattctaattcgggatagtggaggggagcgccaatgtaccaataccccatttttgctctgagccgataaaaccaagcttggg

SEQ ID NO: 41813 - DNA, 368 bp, Gossypium hirsutum
  unsure (1)..(368): unsure at all n locations
  Clone ID: LIB3196-024-P1-M1-C8
gtaagtcaatgatgaagaaatatgagagtgtgctacgagttagtacaggtacttacttataactcatgagtaaaggactcggtatactatggaaatgtggtaagaatgcatacgattaaatatgtgactatattacgtgtggtataggtatgtacacagaactcatgtgaaatgaatttggtatatgatgaatcgttggtaagaatgcacacgaacaagttatgcttgtgagatactggtaaccatgtgattaatgatttacatttatgatgaatggatgcatgataagatttgaaaatgatcatatgttaagtttatgagcctaattgngttgtgatatagtacggtgtatgtacttaaaccgtgat

SEQ ID NO: 41814 - DNA, 345 bp, Gossypium hirsutum
  Clone ID: LIB3196-024-P1-M1-D10
atcagagggcttgtcccttgcattccggcacatggccagctccctgctgggccactgcagccaagtctcctgtgaaagcctccttcatgaggtcatcgtctgtgtgggctacttcactgttaaccacccagataaccaggtgatagtgcagtccggccgccaccccacagtgctgcagaagctctgccaattgcccttccagtatttcagtgacccacggctgatcaaaatactgttcccttcacttatcgctgcttgttacaacaatcatcagaacaagatcattctggagcaagagatgagctgtgttttactggccactttcattcaagatttggcacaaac

SEQ ID NO: 41815 - DNA, 252 bp, Gossypium hirsutum
  Clone ID: LIB3196-024-P1-M1-D11
atgctaggacatggtgcgtgggctgctgcccttgctcaatcctgaggtcccagatcagttctacaggctctggctgtctctttttctacacgctgtcgtggtgcactgcctcgtgtctgtggtctttcaaatgaccatcctgagggacctggagaagctggccggctggcaccgtatcgacatcatcttcatcctcagcagcatcacaggcaacctcgccagcgccatattccttccataccggtcagaggt

SEQ ID NO: 41816 - DNA, 141 bp, Gossypium hirsutum
  unsure (1)..(141): unsure at all n locations
  Clone ID: LIB3196-024-P1-M1-D3
cggtccaatgttttcccacatatgagtgagatttacacatataaggcttacgggcccattaagctcgtacgacccaactcggcccaacatggcctattatggccacagnccatgagttcgctcatggtggcctctactatc

SEQ ID NO: 41817 - DNA, 406 bp, Gossypium hirsutum
  Clone ID: LIB3196-024-P1-M1-D5
atgcgagtggcctggaccccgcgggtgactgctgcagggcttctccccagctggactgtgcgctactcgaaagcgctctctccactcgcacggcttgttgggctcatcatgaagcgcttgggctccgtgcagcggaaaatgccgtgtgtgtttgtgacggaggtgaaagaggagccttccgccaaaagggagcatcagccatttaaaggtttggcaactgaaactataagtcacaaggcattagatgcagatatatacagtgcaattccaacagaaaaagtggatggaacatgttgttatgttactacctataaagatcagccatacctttgggctcgactagatagaaaacccaacaaacaagctgaaaaaagatttaaaaattttctacattcaaaagaaaacc

SEQ ID NO: 41818 - DNA, 322 bp, Gossypium hirsutum
  Clone ID: LIB3196-024-P1-M1-D7
attgcgggtcagtgtacaggaagaggcaggcactggctggctcagctccactcggttggagtggaagtggccaaaccatttggatggacagggtcctcaccctacccctttcctgtgaggcaagggtgatggtggagttgctggaggtagaggagctatgtggagcaaaggccaacacaagggaaggaatggacctgtgagaggaagggaaggtggcacaaagtctcatttcacgaaggaggggaagaaagaaaggcagggagggaacaccccccccaaaaaaatcaaagcgcgaagaaaatcacagggaatggttagggtg

SEQ ID NO: 41819 - DNA, 366 bp, Gossypium hirsutum
  unsure (1)..(366): unsure at all n locations
  Clone ID: LIB3196-024-P1-M1-E5
atcgaggctgtcaccagggtgttccctcaggtcaatgtcacgaagatgggcagttggggacacttcaactgttcctactcctgctccttccttctggctccggaagaccccatgttccccgtcatcgggagcctcttcctgcgagagctggtcaaagagtttggcacagaccacatctatggggccgacactttcaacgagatgcaaccaccctcctcagcgccctcctaccttgccgcagccaccacgggcgtctatgaggccatgattgcagtggatactgaggctgtgtggctgcttcaaggctggctcttccagcaccagccccagttctgggggcccgcccagattanggctgcgctgggg

SEQ ID NO: 41820 - DNA, 278 bp, Gossypium hirsutum
  Clone ID: LIB3196-024-P1-M1-E9
cccacgcgtccgtctcactcaaaaatatatggggttaattgtaattgatagagaataattgaattaggcttaattgtttagacctaagctttccccattatggtcttaggttcgaactacctaccacccatttcctttccttttatttgcaagattccaatgtttttttttgcttgcaaaaaaaaaaatccaaatttaaacaactagcataatagcaaaaaatgtcaaaagggcgggcgctttcaaagagacacgctttcttactcgcgaatgggacg

SEQ ID NO: 41821 - DNA, 399 bp, Gossypium hirsutum
  Clone ID: LIB3196-024-P1-M1-F11
atggctcaccctgggggaaatggtgtatatccctgcaggcagaattcctgaattccccactctccaggctgcaaggtgttgaccaaaggcctgggtgtgtcctctctctagcaccaccacgcactggaatggctaacaggggacctgcatatggcctgagccgggaggtgcagcagaagattgagaaacagtatgatgcagatctggagcagatcctgatccagtggatcaccacccagtgccgaaaggatgtgggccggccccagcctggacgcgagaacttccagaactggctcaaggatggcacggtgctatgtgagctcattaatgcactgtaccccgaggggcaggccccagtaaagaagatccaggcctccaccatggccttcaagcagatgg

SEQ ID NO: 41822 - DNA, 380 bp, Gossypium hirsutum
  Clone ID: LIB3196-024-P1-M1-F2
ctcaaagtgccctttgcgggttttcactttggcccttttccatttttattaggtctcaaagcgccctttgtgggttttcactttggcttcttcccctcattttttcgagttttcactttggcttcttcccctcattaggtataatactttttgactaaattcgagttcactggattagacaagttttttcatctatttcagccaggattaatgctcctccgaagaaagcttttttcaccacataagactcctcccaatttggcatctattttcttctgaaatccttctgtataggaagaatctttttcagaaccaaatctccctcgtgaaattctcttgggtgaacctctttgtcataagccagcatcattcttttttgt

SEQ ID NO: 41823 - DNA, 314 bp, Gossypium hirsutum
  Clone ID: LIB3196-024-P1-M1-F3
atcgataatctgtgctttgctgggctcatctccatgattgaccctccacgggcggccgttcctgatgccgtgggcaaatgtcgaagtgctggaattaaggtcatcatggtcacaggagaccatccaatcacagctaaagctattgccaaaggtgtgggcatcatctcagaaggcaatgagaccgtagaagacattgctgcccgtctcaacatcccagtcagccaggtgaaccccagggatgccaaggcctgcgtagtgcatggcagtgatctaaaagacatgacctccgagcagctcgatgacattttgaagta

SEQ ID NO: 41824 - DNA, 362 bp, Gossypium hirsutum
  Clone ID: LIB3196-024-P1-M1-F5
acggttgatgaaacccttgaaagggattcttttaaaagtcaggggggttattaacaccaacctacagaaaggcacgaccaattcagactcaattaaaattcaagcaacatcaagttgaatatttcttcatttcaaaggattaatgatcctaaagcttaattagtgtgggaacgaatacgcttttctatcgccttaatcttttcaaggtgataaaggtgaaccttgctgctattgagctaactaactatgcttttatttggcggagatcaatttgatcttaacttggccacaaaatggtgaacgccctattaactcttgggaagaaatgaatgctgtgattctacaaaatgtcattctgaatc

SEQ ID NO: 41825 - DNA, 386 bp, Gossypium hirsutum
  unsure (1)..(386): unsure at all n locations
  Clone ID: LIB3196-024-P1-M1-F7
atgaattatagaaataaatacttttgggaaccacattcagtatttatgtgtcaacaaaatgagattataaaatcaaacatatattatagtaactgaaagtctgttcatagtttatatcaattggctaattcattttaaaaaacacataaaaacttctgagaacctattttactgtaggcatgatgtttataatatttagagataaaacaagtattttttcagtaaaagatgtagcagtaagcaataaatctgtattacactgaattcactgaacctcattttctatgctgaagaggcagatcacactcctcctaaattcattccatccctatgtatcaccgacccatcaatacagntattctgttatgattaattcagaagtatag

SEQ ID NO: 41826 - DNA, 362 bp, Gossypium hirsutum
  Clone ID: LIB3196-024-P1-M1-F9
aaaaattaaattttagagatttgtaaaataaaacaatatagcttatttaacatttatggaattaaaattttatattaaatatgtatgtcattataagtgaatagttaaaagttaattcggtaaagacaatcgaccaaaatatttggtaattaattaaaatgatagttagcaaataatatttttatttatagcaaatgatataaatggtaaaatgtatttaaaataatggacacagcataaattcatatttaaaaggtaaattcttggtcatacaattggtaaaagttttttttaatttgggcacttattttcaattgtatcacttaacttttagggattttttcatttaattgtggtaaatt

SEQ ID NO: 41827 - DNA, 372 bp, Gossypium hirsutum
  Clone ID: LIB3196-024-P1-M1-G1
atttagtggtgagagtatcaatcttcaaggtgcaaagctaagaaaattatcataagtgtgtgatatattaggataacttattataagtgttgaagatagtgaatatttctcgctaatctaggctctacaaacatagggaaattgaactacataaacaaaccttatgtcccctatttgttttctatttcacacagtactcggagtgcccactcccttaaccactccttccaagcacataacttatatctcagcaactactttaaagttttaattggtatcagggctaaccagttaaagtaattagtgaagaactctagtgttgctagattcaagccaaggaaggttcatttacttcaagaccctctaagctag

SEQ ID NO: 41828 - DNA, 405 bp, Gossypium hirsutum
  Clone ID: LIB3196-024-P1-M1-G10
ataccattttctaagccactactagatacattaaattgtataaattgtatacaaccattgtataaagtatagatataatgaataatcaatactgttttgcacagaaaaaaaccagaactcagagaggttaaggaacatgtcccatgtcacacagttagtgagtggcagcctggattcagctccacgcctgtctgacccagagcctgagctcttttctttcactccatccctcaactcttacctggatctgtgtcccccagttcccctcctactcagaccgccacctgctgtcatgctctccctctgtctagagactctctggactggacaaggagatccaggggcagtagcagggctggtaaagagtcaggcccttcaaggcaagggacttcaggctgagctggc

SEQ ID NO: 41829 - DNA, 389 bp, Gossypium hirsutum
  Clone ID: LIB3196-024-P1-M1-G4
attcactgaatcagttgatgcagaatccagctatttcacaaatgatgcgaagcctcctgtccagtcctcagtacttgaaccaggttcttagtctcagtcctcaacttcaaaacatgcttggatctaattctcaaccaagagaaacgatgcagaactctcaatttcttcgtcagttgacttctcctgagatgatgcagcaactattgactttgcagcagactcttttttcacaacttagtcggccacagtcaacccaggagcctgcccagactggtggaggtgcaggaacgctcaacatgggtttggaagcactgatgaccatgtttagcggacttggaactggcagcttgagtgttcctaatagattagatgtaccttcagagcaacta

SEQ ID NO: 41830 - DNA, 361 bp, Gossypium hirsutum
  Clone ID: LIB3196-024-P1-M1-G6
atggtgggcatcgtccccatgaaggtcctggtggaggcatgggcaacagcagtggacatcgtccccacgaaggccctggcagtggcatgggcagtgggcatcgcccccatgaaggccctggcagtagcatgggtgggggtggaggacatcgtccccacgaaggccctggtggtggcatcagtggtggcagtggccatcgtccccatgaaggccctggtggaggaatgcatggcttgtggagacatctatcccacgaaagccctggctgaagcatggctggaagtggaggacatcgtccccatgaaggtcctggacacggggggccccatggccaccggccttatgatgttcctggtcaccg

SEQ ID NO: 41831 - DNA, 359 bp, Gossypium hirsutum
  Clone ID: LIB3196-024-P1-M1-G7
gtacctctagcccgacctgaattcaatttaattataaaacataattttaatatgtatatttttaataatttattattttttaacaacaaaatgagctttttggaaccggaccgaaaatggacctaggcatggaatttttttggaaccgagcctcaacccagcctgacccatgggtatctctagatacatggtgttaataccggcaatgaattgccaaaccaaccaataaaaaattgaaatgttgattttctttttcaaatcatcaagtccatgtgaataacataacattaagtggaagactaaataaaaaaattaaattaaactaaaaacaaataattaaacatatggttaataaaaag

SEQ ID NO: 41832 - DNA, 356 bp, Gossypium hirsutum
  Clone ID: LIB3196-024-P1-M1-H10
atcaacagtcctcaggcccctctctggctgcagagccctctcctcaggttgcttgtcctcccctggcctccagtctcccctgccctcccaggcagagctgagatgccctcacttttcttctcatcagtacctgttcctctgagttcctgttgctcaccatcaggtcaacagttatcatcactcagacatgcaagtgttctttttatgctcccatattattacaggtatctgagtctgccataattctgagaagaaaatgacccatacacccatgagaactgaaactcagtctaagcccagctgcagacaaggagtcctctctttaattgctaactgttctgccccatatagctaca

SEQ ID NO: 41833 - DNA, 473 bp, Gossypium hirsutum
  Clone ID: LIB3196-024-P1-M1-H12
agtgacactatagaacagtttgcacagaaaagcaagctggcaccgtgccgccgttcccgggttggcgacggcaacagcgagatggctcttattctaatgaggcatagacaatggctggacggaatggcatttcctcctaggagtttaggacacaaagagcctcccgaaagcagagggactgagtgcaaccactggtgacccttgtcatctcagtcttttttattataacctctttccttctacttttttcacttgtcttctatttctaatatttaagatttatgctttagccagtttcttaaaacttgtgtacctaatattctcttggtcatcaattatttgaggataagaattccccctactgttaaaacattagcaaggtacattggtaattctcaggcttaaggatttcttgaaataacattatctgatttattgggatctgaagcatagttgactcgactagatacttc

SEQ ID NO: 41834 - DNA, 380 bp, Gossypium hirsutum
  Clone ID: LIB3196-024-P1-M1-H2
aagcaatggaagatacttcatcagcaaaggaagtaacgttgcaaggaactccagctaattacttcccaaggtccttccatgaagttgtaggcgccattctcaggtgtttgggacttgaaactggattccaacaaaaccctaatccatgtccaaaaaaagaagatgacagtaaagccaatcataatcaacctatttctccaaaggaaaatgcagatccaccttcatcaacagacaattcagatccatcaaccaccgtgatcgacccaccagctgatcctcctccttcccccactgtaagatatgttgctttgcttgctagctaacttctttgatatctttgaaactgacccagcagtgggtcacatttggtctccactatt

SEQ ID NO: 41835 - DNA, 124 bp, Gossypium hirsutum
  Clone ID: LIB3196-024-P1-M1-H4
ctcactcgttcggaaaatatatggatttaacctttattgcctattcaaaaatatatgtatggttatatgcctccaaaggaaactatgcatactcatttatatatgtacctttgtgtgttacaaa

SEQ ID NO: 41836 - DNA, 303 bp, Gossypium hirsutum
  Clone ID: LIB3196-024-P1-M1-H5
attaaaagttgcaactgttaattttaaataaaagtttaacactaaacaatataaactttatttccaaaagaccataaaatgaaaacatcgggtacaacatttaattacttttagaccgtgaagattgaccaaaatagacatttctattgggacacttgcttcgattatggccaactgctttatatatggtgcaatgctttggatcgacctgttttcttatatccatgtcgttctgaatcctcattgttggtggtcgacctttgactctcttacatagtgaccgatttggcaacatcttaaacg

SEQ ID NO: 41837 - DNA, 370 bp, Gossypium hirsutum
  Clone ID: LIB3196-024-P1-M1-H7
ggggtgatcggttgggttaggcgcgactctcgtctcctgctaaggtgtttttgtgttagcagaactttgttgggtaagccttagttccatttctttcctttcggatggtttcactttgttgacccttcttctaacttgggtctcttcttgccgattatctcctttgtcgtttagaacaattcttttacgggcttctgtgtgtgctactttaatagtctgtacgttgcttggttgttgtagttagtatggttcggtgatgatgttgatatgctttaagtgcgagtctaatgttggaaaattatgcctttcatgtaagtaggggtcaagttgatcggtacctcccctaggaccaagaggggcgaatttgggg

SEQ ID NO: 41838 - DNA, 393 bp, Gossypium hirsutum
  Clone ID: LIB3196-024-P1-M1-H8
attggagtcgcccggcccagtgagagcctagtcccggccagggtcgccccggcaagcacgagtccagccaatcagcgccctggactgcaccagcgccatggtcggcaaaagagcactgatcgtactggctcactcagaaaggacatccttcaactatgccatgaaggaggctgctgtagcagctttgaagaagaaagggtgggaggtggcggagtcggacctctatgccatgaacttcaatcccatcatttccagaaaggacatcacaggtaaactgaaggaccctgcgaactttcagtatgctgccgaatctactctggcttataaagagggccgtctgagcccagatattgtggctgaacaaaagaagctggaagctgcagaccttgtgat

SEQ ID NO: 41839 - DNA, 270 bp, Gossypium hirsutum
  Clone ID: LIB3196-025-P1-M1-A1
attgcattttatcaatgccagaatgcacatcacactgacaacagctctttgttaacaccggggagcccccaaagccccagggtaattccatcaccacccaagttgtaagactgtagaatgaacaggccagaatgcgataaagtaaaatgaaagaaaataaaaggaggcagggcaaaagagagagggagaagcagatagaaggaaggaaggaagaaggaaagagaaagggagggagacagggaaggaaggaagtctggcaagagggcacca

SEQ ID NO: 41840 - DNA, 294 bp, Gossypium hirsutum
  Clone ID: LIB3196-025-P1-M1-A7
tcgctctgcttcgagttaggctcattttgaggcttctctcgttttaaaaatagaaacaacttcaaactgtgcctaaccgccttagttcgctctttgacgacgaaattaccctttgagtattcactccagccaccatccgtttcttccaacttcttctccaggctttaagtggattgattgtattgagatagcagaaagatgtctactgaagcacccaccagcatggagactgaaacagtggcttctaaaactaaacttgaatccaatacattgcccccaaagccgaaattcgag

SEQ ID NO: 41841 - DNA, 263 bp, Gossypium hirsutum
  Clone ID: LIB3196-025-P1-M1-B2
acggacaaagtggacagagagagcgctgaaatggttttgaagctacggccgagtggtctaacaggctagaattggagcaccagcggctttgggcatactgcgcttcacgctccatcgtatgaaccacgcatgcacaagttgctaggagctataaaaactgatgtttctgtgaggaatgaacaggcctatacactatgatttcgacggacgagaggctgctgatacacgccttcgattggcgcgaaacatgatgttaactgctg

SEQ ID NO: 41842 - DNA, 384 bp, Gossypium hirsutum
  Clone ID: LIB3196-025-P1-M1-B4
ggtcccgattccgaattcccacctagacccacgcgtacggctcaactataactggggtctcgtgtggagcagatggttaaaaacaccctatattctaatattcaactcacctacgcaccgtgcaagcataatccatcccacctctagacgaacagtgtttgaagccacgtgtggaagatcagcgaccacacaaataactgacttcctcaaacaagcgttcatactcacgttgctttatcatccttctatgtcccatttttctattatttcgaaccataattcatcaagggggggagtgttcacccaccaataaggcactctagcttatattatacaccgccagacatgacagtcttaccctactcatttcctagttttaatagt

SEQ ID NO: 41843 - DNA, 395 bp, Gossypium hirsutum
  Clone ID: LIB3196-025-P1-M1-B5
cggacgcgtgggttaaaacacacatattaaaacttaaaaacttttttcacttaaaactaaaccctttttaacttctaaattctctcaaatctcttaaaaccatcttaaaccctaaacccctattctatcattccttattgttttgtttcaaatctcttcttttcatcttcattggtgcatgctacacatcaaacattcatacgagagatcacaacaactactttgtaggaaacaagatttcaaggaaaaagtgaaaagttccaactcttaaattatattgttctattacttttgaaatatattgtttgaatcgattagtttttctaggttttgaaattgaatattccttcttggaagagtagaaaacttagtgtgtgagaaccaccgacaatttc

SEQ ID NO: 41844 - DNA, 393 bp, Gossypium hirsutum
  Clone ID: LIB3196-025-P1-M1-B6
atgctgcccggggcttcaacttcctagggcctccagacatgtctgaggtgaagagccggaagaagtcggggcccaagggagcccccgctgcggagcccgggaagcggagcgagggcgggaagacccccgaggaccggggcggcggaggcgggggctgggcagacccccgaacgggcctgagcctgctgtcgctggggacgtgcctgggcctggcctggtttgtatttcagcagtcggaaaaatttgcaaaggtggaaaaccaataccagttactgaaactagaaaccaatgaatttcaacaacttcaaagtaaaatcagtttaatttcagaaaagcttgagtctactgaaagcatccttcaggaagctacatcttccatgtctttgatgaccc

SEQ ID NO: 41845 - DNA, 326 bp, Gossypium hirsutum
  Clone ID: LIB3196-025-P1-M1-B8
atggccactatggagcccgtgtgaccaactccagtgtgatcgtgcgagtccatctgtcctagtccaggactatccttcttgcaagacagcctgactgtgccttccagggcccgggaccattggctgggactcaccattaaccaattgaccacttgtacctccctggcatactgagaattcctgggtccaatcaaaggccctgacgggccccgtcttcaggttctagaaactaccagaagaagcttcttccatcttatctacctactgtagctgctgctttgggggggcctactctactgaggggaccccacagtgagccctggggg

SEQ ID NO: 41846 - DNA, 349 bp, Gossypium hirsutum
  Clone ID: LIB3196-025-P1-M1-C10
atatgccgcattgttcgtggcagtagaccccatgggttcgtctgcacagctatgaggcgacactgttccgtctgcacatgaaggacccccatacagcctctctcccacccctgacaacccgagaaggcatgtggggccctgccaacgccacttcctcagcagaaacccgtcatgacgcggctgcttcggaagcagacgtctggggacacagcctcagtacccagtcttttccctagttcctgaaacttccctaggaccttaagggaataggaggaggtcatatagcattcccaggggcacctagattttgaagaccaaaggaaagggggggtaagttgggggccttttt

SEQ ID NO: 41847 - DNA, 303 bp, Gossypium hirsutum
  Clone ID: LIB3196-025-P1-M1-C11
atggcgacttgcgccgaaatcctgcggggcgaggtccccgaaattgacggacaagtcttcgactacgtgacgggcgtcttgcacagcggcagcgcggacttcgagtccgtggatgacctggtggaagctgtgggggaactattgcaagaggtgtccggggacagcaaggatgacgcgggcatcagggccgtgtgccagcgcatgtacaacactctgcgcctggctgagccacagagccagggaaataaccaggtgctactggacgctcccatccagttgtcaaagataacagagaacttcgac

SEQ ID NO: 41848 - DNA, 377 bp, Gossypium hirsutum
  Clone ID: LIB3196-025-P1-M1-C2
tcggtttttgttggtcagtggtgtacttacaattcaagtgcgtctaaaatgggcaacctatcgtttaagggtcattggcttgggacacgagtgtgtgactcaactatctgggacatacgaccatgcgacacatggcttgtgtcccctgtatgtttaaagctcacagggctgacagttacacaggctcaaacgcggcctggcacacaggcgtctgaggctattttgagtgttgcacaacactacacacgagcgtatggctcaggcacgtgactcccatcactgcgttccatgggcgaggacatacgttgggacaaggtcttgtgtgcatattttgagcgttgcatatcctgagacaagggcctatgtcttaactatgt

SEQ ID NO: 41849 - DNA, 357 bp, Gossypium hirsutum
  Clone ID: LIB3196-025-P1-M1-C4
cgaacaccgatcggggcctcgggatccgaagcttcctaaagaacctaacctaatttgcggtcgattccaccattaacgtgtacctcaaaggtctcactggtgggaagaaactgtatcagacatttttgcatgaaacgtttaaagatgagccaagcactgtgaaactaatgatgatggaggaggagacacagtcaacaaaaatggaacacactgtaaacaaagctgtaggacgaacacatcctgtctagaagaagacgatgatggtacctgaagacttgaaggaaactgagctcgttgatcctaccaggaaaacagttttcattcgatctctcctgtgaaatactaggaaaggttaat

SEQ ID NO: 41850 - DNA, 380 bp, Gossypium hirsutum
  Clone ID: LIB3196-025-P1-M1-C5
atcgcgcgtgcgcgcggccgggcagcctgggcagggggtcctgcctgtgacgggcggcggcggtcggtcctgcctgtaacggcggcggcggctgctgctccagacacctgcggcggcggcggcggcgaccccgcggcgggcgcagagatgtggcccctggtagcggcgctgttgctgggctcggcgtgctgcggatcagctcagctactatttaataaaacaaaatctgtagaattcacgttctgtaatgacactgtcgtcattccatgctttgttactaatatggaggcacaaaacactaccgaagtatatgtaaagtggaaatttaaaggaagagatatttacacgtttgatggagctctaaacaaggtcaccggccc

SEQ ID NO: 41851 - DNA, 337 bp, Gossypium hirsutum
  Clone ID: LIB3196-025-P1-M1-C7
atcgaggacacggagttctgaggagaccaagctagtgtgggtgctgacctttgagtcaccacctaagaggtgacctctcccgcatctgttctgcagcttgataacaatgaagctgctaccaaccagagcccagccgcagtggacacgggagggaacgggatgggaaggcagggaccgcaggcagctttcccgaactggggcgggtgtggctgtgagaggctcccaggcccgcctgatgccgctttccctttttggcaggtggcaggatcccattttctcactggcgactcccctgcgtgctggcgaagaaggcagccacagtcggaagtcgctgtgc

SEQ ID NO: 41852 - DNA, 399 bp, Gossypium hirsutum
  Clone ID: LIB3196-025-P1-M1-C8
atgagcagggtagtgagtggcgttgtggggataggatgccctgggtgtgcacacaggccaggagccctgatggcatgaacaccccccaacagaggcagaggagtcgtttgaatttgtggtggtgtccctcaccgggcagacgtggcacttcgaggcctcaacggcggaggagcgggagctgtgggttcagagtgtgcaggcccagatccttgccagcctgcaaggctgccgcagtgccaaggacaagactcgactggggaaccagaacacagctctggctgtgcaggcggtccgcaccgttcgtggcaacagcttttgtatcgactgcgatgcacctaatccagactgggccagcctgaacctgggtgccctgatgtgcattgagtgctcaggcattca

SEQ ID NO: 41853 - DNA, 382 bp, Gossypium hirsutum
  Clone ID: LIB3196-025-P1-M1-C9
attttggatattgttgctagactgagtttttccatgaagcacattattttgctttcccagctctaaaacctacatttttcctctgcttccatgtgaaaaattcagtcattccttgaacagctgaaatcattcttcagggaaaggaagattccgttaggtgtatacatcttgattctttgccttgatattattcctctatttgagtccagcatgcattcataatcgtcatcaactgatcatcatgtggcttgaattgaatccaaacttttctgttccctacataaattgaaaactaaacgagtctgagttgacaaggttctttctctgtgtcagtctagatgagttaataatgaggagtcgagatcagtcaatatccgactat

SEQ ID NO: 41854 - DNA, 177 bp, Gossypium hirsutum
  Clone ID: LIB3196-025-P1-M1-D4
ggccgggttttttcggctctggtattgatggcaaggtgttttgggcttattttccgggaaaggagtattcaagggtaccccaagccattaccaaaacggcctttctttaaccaagaaaaataaaacccaacaaaaccctgggggccattttctttttgaactctagtcttggttcca

SEQ ID NO: 41855 - DNA, 395 bp, Gossypium hirsutum
  Clone ID: LIB3196-025-P1-M1-D5
cggacgcgtgggttcatttttatttttctgcttcatcaatggctgcttcttccagtagggaagctatgaacaagcaacttcttgactttatccattcaatggaacaagaaggtttggtcgactaccgtttcgctaaggttcatatgttgaaggaatcaagtggtcctttcttctttgcttcattgctccccacattctgccatgactcgacagcaaccttaagagacttgactgttgctttgggtcaacctctgctgaattatcacgatctgggtgaattgtgctttaagataaaagggggtgcggcatgccttggagtttgtcgtatggctcatgcctgtggtcaacttcatcaagctgttcagaacagagcaactaaagaaagcttaatcact

SEQ ID NO: 41856 - DNA, 382 bp, Gossypium hirsutum
  unsure (1)..(382): unsure at all n locations
  Clone ID: LIB3196-025-P1-M1-D8
atgaattatagcatatgtgtgagtcgttcaactctcattgttcttggtgattcaaattaacttatctagcttgctagtggcatcaatctatttcctttccaatcttatcactctttgagtgtggcattcacccctttataccgactgattcctatcttcctagatagagggtcacgatcctatccatctatccattgatcaccttaatagccttataagattcgggtctctattctttagtagaggttctttcttcccctgttaagttcaatttccatatttccatcattttatcttctgttgttatctttgttttaaactaccaacctttttgaaaacaaccaatttgtttatcaagactntgttacttaattntacgatc

SEQ ID NO: 41857 - DNA, 296 bp, Gossypium hirsutum
  Clone ID: LIB3196-025-P1-M1-D9
acactatctaactagtttgtacgctggagcacgctggtgcccctccccaatttccgggatggtgacggtgcccccgaagggttgagggagggctaatccgggctctgaggcctaacttgtttacagttacacacctattccaggaggctacacactgatgggggggacattcctgagactggcacaggacaaggactccaagggtgacaaggactgctgactggaggtgactggccatctggaggaggtgatgaatgtgtgcgtccgcgtagacttcaccttagacagggccttcc

SEQ ID NO: 41858 - DNA, 328 bp, Gossypium hirsutum
  Clone ID: LIB3196-025-P1-M1-E1
aaaagaatagaggtatctagtgtgtgacaattaaatttctgatagatctgcttcttgcttatttacatgttggggtttgtatttttggaataatatcttgaaaatctttcatgatctccaaattcaagctgtctggttcttttagtttcatgctttgattttcattattggaccaatcgttactttttactttgtcatgttttaaacagtcaggcagtgctctgccattatgagcagaatccagagggaaggggatgagaatattattttccttggatgttcttagatttggtcttggacttatcttctttcctcttgggttttaaaa

SEQ ID NO: 41859 - DNA, 263 bp, Gossypium hirsutum
  Clone ID: LIB3196-025-P1-M1-E10
gaaagattggcacaacgaggaccgggtaatggagaaagatcatcatcatcattatgtgctggaaataaccttaagctccgcacaaggacttaaagaaccatctggtcaactccgccgtatgcaaacttacgcccttgcatggatcgatccttctcttaaactccgtacttgtattgatcgttccggcggtggaaaccctacttggaacgacaggttccttttcaaaagctcttctgattttctttctaaagaaacttgcgggg

SEQ ID NO: 41860 - DNA, 295 bp, Gossypium hirsutum
  Clone ID: LIB3196-025-P1-M1-E12
atgcgccaccccgttctttccccatcatcatcgagtgtatccgcctcatgtgtgtctccatttggtgtaggctgtatttctctcggtgtgggtttgttcttcagtggaggttctgtcctgctgggtgctcagggcagtggctcggggtagattctgattgcttctgcgtgtgctctcctttgattggattaatgggaataatgaagcagcttacgcctctgagaagtgtctgtgaatcccaagcctgatctcaggtcatgctaactgctgttttcttacaagatgtgctaatgca

SEQ ID NO: 41861 - DNA, 239 bp, Gossypium hirsutum
  Clone ID: LIB3196-025-P1-M1-E2
atgtttttatgtgtaagcaatatttatttaactagtctataaaattattgagtgcctcctgaggcctttaaacacccctaacattccttttccttcattcttttaaatgacataaagtaattgggcaatgttcccgatgatgtaccccgcaagctgcattgaaactcaaatctcttggaatgagtgactcaccaaaatgtaattggaatcgaatcctaatccttggactatgggaaaaa

SEQ ID NO: 41862 - DNA, 227 bp, Gossypium hirsutum
  Clone ID: LIB3196-025-P1-M1-E4
agtttagagatatttcccccgggtccataccatctagtggtggatgtactccatctaacactctcaactgaaataaccaccgacatcattttagaatgacggattctagaaccttttcctacacagcggtcagatagcatcagacctgcattgaacagtcccgtggaaaggccaagcagtgaccatgaagagggagaaacttctgctcagaccgagcgtgtgccact

SEQ ID NO: 41863 - DNA, 313 bp, Gossypium hirsutum
  Clone ID: LIB3196-025-P1-M1-E7
gaacgagtcgtatgtgaccggatcaacagatgaagaaaaccgatacgtaatagacagaactttcattggcttcgttccgaatagtttacgcataattcttttacgaagttctatcaaatctatgttctggttaaaatccagtcgcactgttttctctgataaaaaacaacaccgttctcggtgtgacgaacctcaccatcatagtaaataacagcactaatacgttcactcatcttcaatttttatctttcttagccgttctaacttttttgctggaacttatgcaatctgagaaaaaaagttgggttattta

SEQ ID NO: 41864 - DNA, 307 bp, Gossypium hirsutum
  Clone ID: LIB3196-025-P1-M1-F1
acagggacgcttgatgttgatctgggaattcaattggcgagattttgacttggaaggagatcctgacgccccggattacatggaggttttgatgaggacagggattgattttgacaacgaataaggaaatggggatcgaatcgctttcgtacgcttagctgatgatggcgagaggactctggtgaaacgactcattgagaactgtgacaattcataccgactataatgtctggatatttggttaatatcctgacctgtcgagatctggccgcgaaattacaccagtttttgacgattgttaaagtgt

SEQ ID NO: 41865 - DNA, 403 bp, Gossypium hirsutum
  Clone ID: LIB3196-025-P1-M1-F10
atcaagggagaatgttttgtccttcatcttagcgtcctccttgttcagtttgaagaagctgtattgaaaagtaaggaaatttcagaccttagtaattcactagttctttgccgtttataataattacaaatactgaacagtgttctgtaccttggagagttatatattttaacgtggcccttataatagtgatactgaggcttaggagggttgattgaggcactgagtccggaagtggcagggaatctgtgtcttcggaatccaagtcccatgctctttatttcatactgtgccacctcccagccttcaagggtggagagctgagtatacccctcctctcttagccaggggcaggtgctcactgttgggccatggaaatttcattctgagatagggccctatg

SEQ ID NO: 41866 - DNA, 433 bp, Gossypium hirsutum
  Clone ID: LIB3196-025-P1-M1-F11
acactatataacaagttggtacgcaagagcacgctggtacccctccccaatttccgggatcaaagccaagcgttctgtccttcatgggagcgggctgattgttcaggctgacaaaaccgtattaccacgtcaggtcatttcagaccgtagataataactagttcttcgccgtttataatatttacaaatacttaacattattctgtacatcgaatagtgatctatcttaacctgcacctacttatactgatactcgtgctaactaccgttcattgacagcactgattcaggaagtggcactgaatcactgtcttccgaattcagggtgagggctgtatattacatactgtgccagctacaagtcttcaacggcagacacctgaggatacacttcctctattagacatgggcaccaactacaatcttggccttg

SEQ ID NO: 41867 - DNA, 364 bp, Gossypium hirsutum
  unsure (1)..(364): unsure at all n locations
  Clone ID: LIB3196-025-P1-M1-F4
gtttttactatacttcgactgtgtaatcaacttgttgattaacacaaaccatggtcctcttattctttgttgtaacagcaacgaccataccctgaagcaaatcccagaaaggggagctcaccaccccccagtttcttagaagaaaataaactagttaaagaacgagtaaattgtcttttaattgctactcccgccaaggaaaatgagcgcctacagattcataaagtgtgtcaccgtcnnaaatcatgccaactgcaggacctgtacactaatttcttataccagctatactttccctacggactatgtgcagacagtcttggacaatttcagcacaaatgttgccatggatcgtagcactgtc

SEQ ID NO: 41868 - DNA, 262 bp, Gossypium hirsutum
  Clone ID: LIB3196-025-P1-M1-F7
acgattatctcaagagcatgattacactggaatctccccaacaccttctacggcagaaatagagggtcctgccattgctcctaccaacagagctgctgggatgaaggctgacctcttggccacactggacggtgacgtcttggagttcttctacgatgtcaggggccttttgaagaggtaagatagctgtggaacggccaaacccaccagagaacatttcattctgattttaatgtcaacggatggaagagcaggggggggg

SEQ ID NO: 41869 - DNA, 395 bp, Gossypium hirsutum
  unsure (1)..(395): unsure at all n locations
  Clone ID: LIB3196-025-P1-M1-F8
atgtcacaaatggttcatatatttcagtttccatgttagctatttttggggcagaattttattttaatggaaaagatccttccactcagctgctaaaataaagattaaataagaatatcccagagtaattggagtttttctttaaaagagaaagtatgttttactgaggtatgatgattttgactacaactaaatgttatctattttagtttttgtaaattaatgttacagtaatgttgtaaacataagaccaagtgttcttatagttatttaaaaactacaactactcaatagataagaaaatagataaggtctccttattgtaccaggtttaccttatatgctttttttttctttttgaagtttatatgccagccnggcctttttgttttttt

SEQ ID NO: 41870 - DNA, 470 bp, Gossypium hirsutum
  Clone ID: LIB3196-025-P1-M1-G12
gacactctataacaaaagctggtcgaagggccagctcctacccctccattatttcctcgatcccagccccccttatataaaaatattgatgagggtgcactggaaggaggatagaaatccccccccaacctttttccaaccctaattaaccctaaccccttcaagggccttctttttgatttttgttaaaacaccatcatttatttcccttcctttaaaccctttatctcccaaggcttttcccttggtctacaacttcggtgtcaccaaattagattcaaaccttaaacttcaatatttcctgcaaattttttttttaaaattgtgtggtaatgacatcgaaaaaattattaaagacaatttttagtgtttgggttctaggtttaatgttcaagtttggcctaatttttttaaaattatatattaatgacatgaaaaaattattaaaatatcattaaataattaaaata

SEQ ID NO: 41871 - DNA, 399 bp, Gossypium hirsutum
  Clone ID: LIB3196-025-P1-M1-G4
catcatgtattaattttttcaactttttttcaagtaatgtacaattaaagggttaatactcatgtacccctgatagtattatacccaaaccacacacattaaattcaaagaaatttgctcaaataaaaggttaccactgtttctcgaaagttcaaacctgagtaggttgtatggtgaacaactttagtcaccatgtcaataaagggagctcatttaatttttccagttgattgtagattgagagtagggataacaatgggtccaacatatattatttttgtaaaatttgaattagaatctataaatttacttttaaaattagaaaatattaaatttgcagttacaaatttaatttttttcaaattaaattatctattggatatttaaattcacttaaca

SEQ ID NO: 41872 - DNA, 287 bp, Gossypium hirsutum
  Clone ID: LIB3196-025-P1-M1-G6
aatttaaaaaaaatagtaatttttgtgcaattttttctatgttatttacacaataatttgggtattaattcaatttggattccaaaatcttgaaccctaaatcttaaattttgagctgatacatcgagatttagggtttggattcaagatatatggttcagggtttgtgtttggggtcacgagtttggggtcacaagtttggattcagaggtttaaggctcagtgtgtggcgcaaatttttttttcaaaattgtgtgttgacgacatggaaataattattgacgaca

SEQ ID NO: 41873 - DNA, 319 bp, Gossypium hirsutum
  Clone ID: LIB3196-025-P1-M1-G9
atgctgaaggccccccgggcccggaccagcccaggggaggacgaggacgaccttctccccccagagcagaaggccgagcgggagaaggagcgccgggtggccaataacgcccgggagcggctgcgggtccgtgacatcaacgaggcctttaaggagctggggcgcatgtgccagctgcacctcaacagcgagaagccccagaccaaactgctcatcctgcaccaggccgtctcggtcatcctgaacttggaacagcaagtgcgagagcggaacctgaatcccaaagcagcctgtttgaaacggcgagaagaggaaaagg

SEQ ID NO: 41874 - DNA, 375 bp, Gossypium hirsutum
  Clone ID: LIB3196-025-P1-M1-H11
cccacgcgtgcgattgttaaatacacatgtttattattattacacatgaatttaccaacaccatctacttgtcaatttatggcttaatttcttatttagtcccttcacttttcctctaatctataattcaactttctctctatatgcaatctagtcattacacctaattactcttaatttaaacaaattcacctaatcaaaacctaattaaccacacaactaactttgtaaatgtttttaataaatatttacgaatccgttttacgaaaacagagacccgaaagtacactttccaatactcgtgactatcgagtcgttacataatcaaacaagtaattactctcataattttacactaaaatttggactataatg

SEQ ID NO: 41875 - DNA, 231 bp, Gossypium hirsutum
  Clone ID: LIB3196-025-P1-M1-H12
gccacgcgttcggtggagtggggcggacactaaaggtaggtctgatatttatcaaaatggttttctctcaaattatgactacggatcactttttctgctacatgactaagtggatgaaggttggagaatattatttatatataaaactaggattaaacttattgaaaataatcattaagatcaatcgggtgttggaaataaatcataatattttttaaaccagcttagttt

SEQ ID NO: 41876 - DNA, 350 bp, Gossypium hirsutum
  Clone ID: LIB3196-025-P1-M1-H4
atccgggaccgctttgcaggtcgctagtcagggccgagcaggggaggaggataggaatccccgccgcacctttgtacgagcctgactgagcctgaccgcctccaggggcttgctcttgggtcgtcgtgaagccgcggtctctcctcccccgcccttcagccccgcggtcgccaggggcggcgccctgggtctggaacgcggttgccaccgaggaggcggcggccccgggcgcgcctggaagccccgggcaaccggccagggccgggcacaggtggggtccgtcaagccgcccgggggtcctttgtcccagctctgcggcccggggggtgacgtgatggcggcagcggtgc

SEQ ID NO: 41877 - DNA, 354 bp, Gossypium hirsutum
  Clone ID: LIB3196-025-P1-M1-H8
atctagggagagccgtggaactgtcgccaggtcgctgtcgctccacgccgcccgtcgcgctgcccgcccgctcagcgtccgccgccgccatgggagtgcaggtggaaaccatctccccaggagacgggcgcaccttcccgaagcgcggccagacctgcgtggtgcactacaccgggatgcttgaagatggaaagaaatttgattcctcccgggacagaaacaagccctttaagtttatgctaggcaagcaggaggtgatccgaggctgggaagaaggggttgcccagatgagtgtgggtcagagagccaaactgactatatctccagattatgcctatggtgccactgggcacc

SEQ ID NO: 41878 - DNA, 339 bp, Gossypium hirsutum
  Clone ID: LIB3196-027-P1-M1-A10
atatccgaaaatagatacactaccatcacacacactagggggataacaaacatgtgaccttcatgagctatacatatatctatacctgcgcccgcacatcacataatgtgagactatactgtacaacaaacaaactgttttatgcggaagtgagatcatgaactacaataagatggtgcatgattactacataggcatacgaataaatgagcaagtcatctaccaatacatgaacacacacatagcagagatttaccgatcacacacagacattactaaacacacttgtggcactacaccagctttaccaatacacacagaattactatgacgagatca

SEQ ID NO: 41879 - DNA, 371 bp, Gossypium hirsutum
  Clone ID: LIB3196-027-P1-M1-A3
caaaaatgaaaatggaaacttacaatcctatatagaactacttaaaaactgatggaagaatgagtttatgtttttggactattttgaagcctaaaaatgaaaataaataattcagtcatagtgagcatgttgagttgtgacacattgaatggatttttctagaaattttaccaatgataaaatcatcaaaattttaccacgagtaaaattgtcaaaattttattaggataaaattgggatgagaaaattatttaatatgtaaatattaaagtttattttgggaaatagaaaaactgaatcaaattggacatattatagagtactaggtctaaaaggcccgagaagtactcgtaattggacctgatgcaaga

SEQ ID NO: 41880 - DNA, 349 bp, Gossypium hirsutum
  Clone ID: LIB3196-027-P1-M1-A5
gttagctcagaaatcacggtttgtgtttctataatccgaacttaatatttaattgttgaatttattatttaatgtgtaggttgatgcatagaaaagtgaaatttaattgttaattattatattatgattgaatgttatggtaagtaatccaggtaagcattattgtgttttatgattattgaaatgaatcaaaatatatattgtattgaaattaaatcgcatgttcattgatatggaaaaatgtattaaattgaattcaaattaaaatgcaaatgaaattgaaaatttgaaagttcacttaataccctattaactgtatcgggctagtcgaatatagctggtatgccat

SEQ ID NO: 41881 - DNA, 374 bp, Gossypium hirsutum
  Clone ID: LIB3196-027-P1-M1-B10
atgtttaaatagtgctggttaaacaaacacttctgcagctggatttagattgcaagctgccaagttgcaacctctttcattctagaaacttctgtcattttcatcatagcaaatctatgtggacaaaagcctccaaactttccaactgtgtaggccagtacagctggcaaggttcatagaatataatgactatccccctctgccaaataagactatccacaacccagctcagacacagtggttatatggattttgtgtccatacaggggaggccttggtgtcctcacatacattctcctagccaacatctatccagcagccctgacctcctgctataatttaagtctatttccttttagtctaataagagttga

SEQ ID NO: 41882 - DNA, 357 bp, Gossypium hirsutum
  Clone ID: LIB3196-027-P1-M1-B12
tcacatttgatcttaacttaatattcccgttgaaccattaggaatcaataaggatactcggatagctcgaaaagctcgtacaatgcctacgtcccagacgaggtcttacatataatcgactatcgataccactgtcccagatggggtcttacacgaactcatatacgatgccgatgtcctagacatggtcttacacgtaaactacaaatcgatgccaacatcctagatgtggtcttacacaaatcacatattgaaatcctatgtcatgacatatatacctgatagtcgctaaaactaactaaaaattcgactaaggcaagtgcacctatcgaacagtagtatagttatgatgagaca

SEQ ID NO: 41883 - DNA, 370 bp, Gossypium hirsutum
  Clone ID: LIB3196-027-P1-M1-B3
ctgaggatcaccatagcaaacaaccaagggagataggacttttatcacaaaaagaaatgagctctgaagaagcaaagagaagcatcaatggagctctgaaggccgtgaaaccgaaaaccgacgatccgaagctttctccggagtccaccacttcaccacccaaaaaagtcatcatcaaaagcgccgacatgaaggaagaacagcaaaaagaggctgtcaatatacccatctccgttacttcccttttctcttccttcccccaaatcttccatttttctgcccgttttggatttgatttcgttcctgggttttgttcattattgtaaatttattaacttggagtgttttggatttttttttctgggggcat

SEQ ID NO: 41884 - DNA, 339 bp, Gossypium hirsutum
  Clone ID: LIB3196-027-P1-M1-B4
gcttgtaataataaggatactaaattatgtgatttgcggattgatgatagagttttttcggatggtagggctcaacaaggaactcatatggcgggtgagactagtaacagcaaagatcacatttgggatgcatctagctgcacgaggataaaaacaatggatgggcatatgattaccacattgacgccttagctaggagctctactatgatatcttgtggaagtcgagataagagcaaccttcaaagagatatacgtgagcacgatgatcatcctcgtcaactgtctgaaaacaagtcacaggtctgcaggctgaagtggtcatatgacaaccgtgaac

SEQ ID NO: 41885 - DNA, 364 bp, Gossypium hirsutum
  Clone ID: LIB3196-027-P1-M1-B8
tgaaagttcaggtaaaagcataataaatagattcaggtgagttataatggttaagaatatctcagttatcagttgagaaagaaatttcagcaagggaagagtaagttatattcatgagttatttaagcaagtaagtaaacaagtaagagagtaagtaaagaagaagcaaagaccatgatacttgatgatgatttatgagtataattatttatgataaatattgttatttatttgcttgtaaacttactaagctttacgcttactccctttattttccttctttttttatagtatcaccaagcaaattcagggatcgtaaggacgtcagagatcatttcacactatcaacagaccaactcggtat

SEQ ID NO: 41886 - DNA, 371 bp, Gossypium hirsutum
  Clone ID: LIB3196-027-P1-M1-C10
atgtctttgactacctgcatgccacagcattccagggcacacctctagcccaggctgtggaggggcccagtgagaatgtcaggaagctgtctcgtgcagacttgaccgagtacttcagcactcattacaaggcccctcgaatggtgctggcagcagctggaggagtggagcaccagcaactgttagaccttgcccagaagcaccttggtgacatcccttggacatacgcagaggacactgtgcccgctcttactccgtgccgcttcactggcagtgagatccgccaccgtgacgatgctctaccttttgctcatgtggccattgcagtagagggtcctggctgggccagcccggacaatgtggccttgcaa

SEQ ID NO: 41887 - DNA, 368 bp, Gossypium hirsutum
  Clone ID: LIB3196-027-P1-M1-C3
tccatgtgtctttgatgcctttggaaattagatccgtataggattacctgtgttggtttgtgataggacatgatagagtccatgtgtcgcatgattagcgaagtattctagcaaattatagtcctttgacgagatacagaaagtatgacttggtatcttgatggacaagatgtgagccatgcgaggtacacttatgtctgaggtctaaccaactccaacattacatttaacatataatttatttatgtaattcgtataacacaaaatattaaatatttgtaacaatttctcttattacataaatattattaatgttgtaataatttgtgtaattaaataatattttataagattacactaaatacttt

SEQ ID NO: 41888 - DNA, 362 bp, Gossypium hirsutum
  Clone ID: LIB3196-027-P1-M1-C4
gggcgttcttcttgaagcagaaaagcgatatgtttttctcatttaagttttggaaaatcatgattgaaaaatagatggaaaaacaaataaaatacctccgtacaaacaatggcttaaagttctgttatgatgagtttaatagactgtgcaagtcagaagggatcgagagacacttgacagtttgtcatactgcacagcaaaatggcgttgcagaacgaatgaacaaaacgatcatggagaaggttcgatgtatgtaaatgtcaacttaccaaagtcattatgggccgaagcaacctctacttcatgttttttgatcaaccgatccccatccgttgccattgagaaaaagactccacacgaag

SEQ ID NO: 41889 - DNA, 378 bp, Gossypium hirsutum
  Clone ID: LIB3196-027-P1-M1-C6
ataacccccacttcatcttcgacgtgcacgtccacgaggtggtggacgcctcgctgtcagtcatcgcccagaccttcatggacgcctgcacgcgcacggagcataagctgagccgcgactctcccagcaacaagctgctgtatgccaaggagatctccacctacaagaagatggtggaggattactacaagggcatccggcagatggtgcaggtcagcgaccaggacatgaacacacacctggcagagatttcccgggcacacacggactccctaaacaccctcgtggcactacaccagctctaccaatacacacagaagtactatgacgagatcatcaatgccttggaggaggaccccgccgcccagaagatgcagc

SEQ ID NO: 41890 - DNA, 380 bp, Gossypium hirsutum
  Clone ID: LIB3196-027-P1-M1-C8
atgtcgcggcagtggtggcttcctatctccaaaaggcgccctccgactcctggcgccgcgctgctcgccgggccagtccggaaacaggtcgtggagccccgcaccactcccgctggttcccgaacgcggatcccttcttctgagagttgcgagcaactttcccttgtccccggcgctgcagcggctcggggaccgtggcagccgcaggtttctgaaccctgggccactctccccgtgcctcggcttcgcgctcgtgtagatcgttccctgtctggttgcacgctggggatcccggacctcgattctgcgggcgagatgcccctgggacacatcatgaggctggacctggagaaaattgccctggagtacatcgtgccctg

SEQ ID NO: 41891 - DNA, 378 bp, Gossypium hirsutum
  Clone ID: LIB3196-027-P1-M1-C9
atgcaagaactctgcgatgagaactgaaccaacaacggagagcaacagaaaggcagattccaggccggtggacgtgtcccctgacgggggttctcctccttcctgtgtgcctcaggcacttaacttttctccagaggaaagcgatactgttttctccaaaagcaccaccacagaagcagctcgggaggaaaccaagccgggtggagacgcagcccctagtgaggctcttcttgtagatatcaaactggacccactcgcagtcactccagatgctgcaagccagcccctcgttgacccccctctcattgacttctgcaataccccagaagcaaacgtggctgtgggatctgaaagcaggcctctgatcgacctcatgat

SEQ ID NO: 41892 - DNA, 141 bp, Gossypium hirsutum
  Clone ID: LIB3196-027-P1-M1-D1
attcaacacttttttattagtacttaacccacaacctgtgactacaattaagcttattccatctcttttgacgttttcccttatttcgttactccgcaatcattttgccttaagcacttaaactttttttcacactgaacc

SEQ ID NO: 41893 - DNA, 358 bp, Gossypium hirsutum
  Clone ID: LIB3196-027-P1-M1-D10
cgtacacaaggacgtacgcgtgggttttttatttattcactaataataacattcgtattcatactaataatacctgaaacattaacattatttaaccaagaaacgaaattccacataataggactaatatagtactaaaaacagtgtattggtgcatatttaaaaagaaatcaagggaaaaggatcaaaaagcaacacgcgcgtcacttggaaggaccgaaacagaaattattcctttctctcaaaacgcagtgcaacactgggagaccaaattgcggagcatatcgaatttcggtgccacattccaatctatagaaacttaattgctgaacctataaaaaaggggaagggcctaatg

SEQ ID NO: 41894 - DNA, 372 bp, Gossypium hirsutum
  Clone ID: LIB3196-027-P1-M1-D12
atcccggataggcagtggcagaagagcatttggcagtgggtatcgcagggatgatgactacagaggaggcggggaccgctatgaagaccgatacgacagacgggatgatcggtcgtggagctccagagatgattactctcgggatgattataggcgcgatgacagaggtccccctcaaagacccaaactgaatctaaagcctcggagtactcctaaggaagatgattcctctgctagtacctcccagtccagtcgagctgcttctatctttggaggggcaaagcctgttgacacagctgctagagaaagagaagtagaagaacggctacagaaggaacaagagaagttgcagcgtcagctggatgagccaaa

SEQ ID NO: 41895 - DNA, 366 bp, Gossypium hirsutum
  Clone ID: LIB3196-027-P1-M1-D2
ggaagaactaacttttcaatattcaaggttaaccagatattgcgggaacttagtagagagtggcctggaagttcctatgacttgttatccaaaaattgcaaccacttctgcgatgacttctgtgaaaggcttggtgtccaaaagcttccaggtaaacttaagtgtcatattgttgggttaaacagctttagatatatctactgattacttctttttctatcccttcaactttgtagcctagctttttagttgaactaaaaaaaacctctttttattcctgaattttcttttactaatattattccattattggatgcaattgttcagtgaatattaagtatgatctaaatagaactatatgcctca

SEQ ID NO: 41896 - DNA, 372 bp, Gossypium hirsutum
  Clone ID: LIB3196-027-P1-M1-D3
atggaccgccttaaaggctgctccattggaatagtagaaagaagtattgccttaaatgatgtcattcacatttaattgatgaaaaaaccctagaaccacatctgacatgtcatctgctcactagttatctgttttggttagtgttttcattcatctagagtcttgagatttaaactcttcaggactttagattctgaaaaagctcatgcttggaacgtctgatctcacatgatgatccaaaggtgctggccaagatccaggacattaataagcagtgccagacttttcaggcattccctgcttattcaaaaccagcttgtgaggaatgcccttaaagatgctcacagaagcgcatatagcttgagacttgcc

SEQ ID NO: 41897 - DNA, 231 bp, Gossypium hirsutum
  Clone ID: LIB3196-027-P1-M1-D4
tgccctaaggacctagagcctgtcttttgatgttctaatgaattggattaaatagctaaatgggattaaaaatgcgtatgaccattatgtatttgagctaacagtggccatataacccatcgaattcattgtcatgttcttccataagctagcatacatgcgactttaataagttaaatgtgatggaattagctcaagagcttagaggaccaaagttgtactatggcaaat

SEQ ID NO: 41898 - DNA, 377 bp, Gossypium hirsutum
  Clone ID: LIB3196-027-P1-M1-D5
atgacctgactctctgaggctcattttgcagttgttgaaattgtccccgcagttttcagccatgtctgaaccaatcagagtccttgtgactggagcagctggtcaaattgcatattcactgctgtatagtattggaaatggatccgtctttggtaaagatcagcctataattcttgtgctgttggatatcacccccatgatgggtgtcctggacggtgtcctaatggaactgcaagactgtgcccttcccctcctgaaagatgtcatcgcaacagataaagaagaggttgccttcaaagacctggatgtggccattctcgtgggctccatgccaagaagagaaggcatggagagaaaagatttactgaaagcaaatg

SEQ ID NO: 41899 - DNA, 314 bp, Gossypium hirsutum
  Clone ID: LIB3196-027-P1-M1-D6
aacatacaaactagttataactgaaactgacaatgggtagcctatataataatatacactatgcgaaaggcacaatccggctaatgcacaaacgatggggttacataccaaggctttcaaaggtaaatgggcgaacctccacaaacagcactaatacaattttaggaactatatcaaaataaaagtagccaaaagcctctttatcgaattaatagcactcatgaaaggattaactatatgtacactgcccctgaatactatacaaacaaacctcagtgcaagtatcttattaaaatgtaatgagattgatagac

SEQ ID NO: 41900 - DNA, 375 bp, Gossypium hirsutum
  Clone ID: LIB3196-027-P1-M1-E10
atggccaacttctctggactggaccagaagtttctagccggccagttgctacctccctttatcgcctccttcccctctggcaccgaggaggctatttccagacacttccacccctctctggccacgtcacccccgcctttaattcataaaggtgcccggcgccggcttcccggacacgtcggcggcagagaggggcccacggcggcggcccggccagagactcggcgcccggagcccgcgccccacacccgcgccccggcgggcagaccccgacccggcatgagcgccgccacccactcgcccatgatgcaggtggcgtccggcaacggtgaccgcgaccccctgccccccggctgggagatcaagatcgacccg

SEQ ID NO: 41901 - DNA, 358 bp, Gossypium hirsutum
  Clone ID: LIB3196-027-P1-M1-E12
cccacgcgtccggcacaagacgtgcacctgattaaatgcaccttgtctgaaaggtttgaggcgcttttgttatctggtgctaaagcgcaggtgcgcctaggcacacaccttgactacactggatgtcaagatcagctcaatggaagggtttgaaagtactgctacaaaattgttagaagagaaaagtccttatgaaggtattcatctttatatgggaagcatcttgaaaagaatttcaccatcaataacctttacaagagaacttccaagtagattgtggatggagcgcaattggttcaaattcctgtagggtttcttcagaaaaaaaattgatattatgcaatgctgggtgtctctt

SEQ ID NO: 41902 - DNA, 368 bp, Gossypium hirsutum
  Clone ID: LIB3196-027-P1-M1-E2
tacgagcctcaaactgacgattgaaaactattcaagactatgccgggtccttaaactaactatgaaaattttatccctaaaacagggcacacgcctgtgtggaagggcaacatgtccatgtgaccaactcgacatggttgtgctgatggcctatatgactcacacggcctaagtaacctgggacacgcccgtgtcctgcacccgtgtagaattaatttctaattcacacctacaggggttttcatgcggctagacacaagcccgtgtcattggcccgtgtccctcacacggctatgacacaccgtgtcctagcccatgtgcaaaaacatggacattttgtttctgacgtaagcatgctcataatgtca

SEQ ID NO: 41903 - DNA, 379 bp, Gossypium hirsutum
  Clone ID: LIB3196-027-P1-M1-E7
atggccgtgagtggtgcgagcgccgctttcgctttcccttcgcggtgcccactccgttcctcgtgcggcgctaggccccccgtcccggtcatggccacgctcagggtccagcccgaggcccaagccaaggtggatgtgtttcgtgaagacctctgtaccaagacagagaacctgctcgggagctatttccccaagaagatttctgagctggatgcatttttaaaggagccagctctcaatgaagccaacctgagcaatctgaaggccccgttggacatcccagtgcctgatccagtcaaggagaaagagaaagaggaacggaagaaacagcaggagaaggaagacaaggatgaaaagaagaagggggaggatgaagaca

SEQ ID NO: 41904 - DNA, 376 bp, Gossypium hirsutum
  Clone ID: LIB3196-027-P1-M1-E8
ataagcctttaattgagagccgctctctgtaagtgtttgcttgtgcaaaagggaatagtgccgtggaggtgtgtgtgtccatggcatccggagcgaggcaactgtcctgtgtgggtagccctcggccggggagtgaggccgccaaccaaagtcagttccttcccacctgtgtttttttttttttttctatatatattttttgttgaattctattttatttttaattctctcttctcctccagacacaatggcactgcttatctccgaaatggtgtgatcgtctcctcattgagcagcggctaccaccgcgctgtgggtagtgtgtgaccgtggctgtactgtatagtgaacatagttggcatatctttgtttgaag

SEQ ID NO: 41905 - DNA, 378 bp, Gossypium hirsutum
  Clone ID: LIB3196-027-P1-M1-E9
atctgccccagcacccaaatcagccacatccttgacaggtaggggtggctgtccactgggatggaggggggatctcaaaaaggcccccaacccacacatacagctcagcctgccccttccctaggcagctgccccggctgccccagctcttgtccagtgaaagtgtgaacctgcggatcgctgctggtgaaaccattgcactgctctttgagcttgcccgggaccttgaggtgcgagggacaaggatggggggtgcttggtgataccacctgcccatcacaggctggatgcagggggtgccacaaaaaacagagcagctttaggtcattatgcagaggaggtggccccaacacagattcatctgctagatgtcatgat

SEQ ID NO: 41906 - DNA, 353 bp, Gossypium hirsutum
  Clone ID: LIB3196-027-P1-M1-F10
ccttgaccttaacccaatattactaatgattgattgatatatgtacatatacatatacatatatatgtagctaagctaggctaagataagcttttgaaagatcttggttatggggaagaaaagagagaaaataggttcaagatcttaaacactacccttatcttcattccactcttagttttcatctttctctttcgactttgagttcaccatatgcctttccccacgcgccgccacctattccttcctatgtccagcctacgacctatcctacaaaggccagtctttacatctccacctttttccttgttttttgcatggtccgtacccttcttttagcttcctccagcact

SEQ ID NO: 41907 - DNA, 279 bp, Gossypium hirsutum
  Clone ID: LIB3196-027-P1-M1-F2
atcgccgaatcaggacatcgagtgggccaatgtcctgaatcaccaccttcatttggtccagaaattgctcctatagaaataaaaacaccagtatgtatagacttgcatgtaggatttttattggttccagggttggtggggcaaaacctggaaacaaagttaatacctgattgagaaatgactggcgtagaacacttacatatgtaatattgtaaaaccattggaaattcctttttgactttagaaactggctaattttcaatgtcactaagttgactt

SEQ ID NO: 41908 - DNA, 378 bp, Gossypium hirsutum
  Clone ID: LIB3196-027-P1-M1-F4
atgctggtccttaccgtttccgctccggcggaagtgaggaggagggtccttcgacccgtgcggagctggatggaccgcgagacgctcgcccttgctgaccgccacttccgaggcctggggggtggtgtccccggcgtcggccaggctccaggccgggtagccttcgtctcggagccgggcgccttctcctacgccgactttgtgcggggcttcctcctgcccaacctgccctgcgtgttctccagcgccttcacgcagggctggggcagccggcggcgctgggtgacgcccgcggggaggcccgacttcgaccacctgctacggacctacggagacgtggttgtaccagttgcaaactgtggggtccaagaatacaac

SEQ ID NO: 41909 - DNA, 379 bp, Gossypium hirsutum
  Clone ID: LIB3196-027-P1-M1-F5
atcattagtataggtttaggtggcgtgtttgtgtgtttttggtgaaacattagtataggtgtaggtggtggttgtgtgcttaactgaccccctaaaaacaagaccaaataagtaacttaagacacggaatgtattcctgtttatgacatggaattcaatacagcccgtcagtggtataaagacttttcctggattcctttaggatagggtcagagttggtttagtatctggccttcagtttttaaaagggcccattctttgatatagcagtggcgttaattttttttttcttttgcctttacaggtgagaaaccttaccactgtgactgggacggctgtggatggaaatttgcccgctcagatgaactgaccaggcact

SEQ ID NO: 41910 - DNA, 375 bp, Gossypium hirsutum
  Clone ID: LIB3196-027-P1-M1-G10
atgggacagcgcggctgggacacgccatactcggtgccacattcacctccagttcctcggtgtggtgagctgctggctgttaggaaggctttccctcggctccggccccccccccacggctcctggaccccagactgcagggtgggcgggcatgtcaggtgaggcgctctggccggcccacttggcagcagggccacagctcctcgcagggctttgtgggatttcgaaggatgaatcatcttgttccccattctccccctgctgcccatgcacgtcatgctctgtgtgaggatgaactggagggactggccatgctcggtggcttttttcgtggttggggcgggggggtgttgggtggaatgaacatcaagggaa

SEQ ID NO: 41911 - DNA, 383 bp, Gossypium hirsutum
  Clone ID: LIB3196-027-P1-M1-G2
attcagcatctgctcaaggacagtcctgcctcacctgctccttctgaccatcttcctgcccagggctcaggattccgctggaagaatctcagccagagtcctgaacagcagcggaaagtgctgacgttggagaaggaggataaccagacctttggctttgagatccagacttatggccttcaccaccgggaggagcagcgtgtggaaatggtgacctttgtctgccgagttcatgagtctagccctgcccagctggctgggctcacaccaggggacaccatcgccagcgtcaatggcctgaacgtagaaggcatccggcatcgagagattgtggacatcataaaggcgtcaggcaacgttctcagactggaaactctatatgg

SEQ ID NO: 41912 - DNA, 364 bp, Gossypium hirsutum
  Clone ID: LIB3196-027-P1-M1-G5
ggttgaagcatctgaaacatcataggtttcaattcaaactgcagtgcctcaatctctgatctcctaattcccagatttaactcattaaaaaagggtacatcgtactgtcttatagcccgatccctatcgtcagcaataaggattagattgtgagcttcattttgatttctaaggtccatttttatgacttgtctttgggctattctttctcgtattcattgtctaaatgtccgcttgatttcagggtctacaggtaataaattgatgattcgatctatgctcataaacacctaaaaataaaatcacaaaaaaattaattagtaaagtgaaaaatgaaataaaataaaataaaaaaaattgcaaa

SEQ ID NO: 41913 - DNA, 383 bp, Gossypium hirsutum
  Clone ID: LIB3196-027-P1-M1-G6
atgtaagtagagacctgacatttcagtcaatacgaggttataatagcaatagccttatagtaggaatagatacaactttcaatattccctgaggtactacatgccctgacaatcaaatcagcatgcaagttgagcaaacataactcttttgaacatcagagagacaatagatgaaacccttagtattcataagaagcagtggtaaataatatatttattacttaatgtattttccctttaatttgtttcctgttttttgtattttctaacactttcattgaggtataattgacataaaataaacttcaaatatttaaagtgtccaatttggtgttttaggtatatatgtgtgtgtgtatctccacaaaatcatcaatacagtc

SEQ ID NO: 41914 - DNA, 259 bp, Gossypium hirsutum
  Clone ID: LIB3196-027-P1-M1-H11
gccaaactaagaagacatgtacatgcatgtgagagaactgcgttatgatcatgttctatcaacatagaaaccgcctgatacatagcttcaatataaagatctacaggccagtgaattcatggccacctttaccgtcggaaaaggccaagcctgtgaggaaccgtaatgagcctcacatacgccctgtctacaggaataggctggcgagtcaactcggtggtaaaggtaagagtaagccagtgctgcttctctctgacta

SEQ ID NO: 41915 - DNA, 377 bp, Gossypium hirsutum
  Clone ID: LIB3196-027-P1-M1-H12
atgactggtctaggtgctgctcctgaacttggtctctgagccatggcttcccatagacactcaggtccctccagctataaggtgggcaccatggcggagaagtttgactgccactactgcagggaccccttgcaggggaagaagtatgtgcaaaaggatggccaccactgctgcctgaaatgctttgacaagttctgtgccaacacctgtgtggaatgccgcaagcccatcggtgcggactccaaggaggtgcactataagaaccgcttctggcacgacacctgcttccgctgtgccaagtgccttcaccccttggccaatgagacctttgtggccaaggacaacaagatcctgtgcaacaagtgcaccactcggga

SEQ ID NO: 41916 - DNA, 380 bp, Gossypium hirsutum
  Clone ID: LIB3196-027-P1-M1-H2
attccagattggaaaccaaatctgactcccaagcttgtaactatacatcatcagtcaatatgttctttattttctgtgaaaggaaaattagtatgttaaaatgtaatgagcctctgtctggcattctctaataatgaggacaggattgctaacaattttgtcaatggcttgcattataaaagtaccagcagaacaggggatagttgcaaagtaatttctttttacaataataacttttgtgaaaatggaagtttcaggtttttataattgtattttcctatttttaataggatgcctcaccaagagtcccaggaggctccccgcgaacaccaaatagatctgtatcatctaatgttgccagcgtatcacccatccctgct

SEQ ID NO: 41917 - DNA, 367 bp, Gossypium hirsutum
  Clone ID: LIB3196-027-P1-M1-H5
gtccgtttagtgagtttgcttcgcttcgataaatagtgaaaaaaagaagatgaagtaattgtcgatctctgtgtaacggctactttttagggtgttgttgtagaagtgaagactgggattgaaaaaaaagaagggtgttatttgattcagttttgaagggaggaagaagaagaagaagaagaagaaatggattacaactatgatcaggagccatggaattggcatggagatcaaaagaacaacgattttggtgcctccgaaggtgcatggactcaagtgaccttgaacgaggaagacctttcctacatgtttgttgaagcaacccctgttaaggaatgtggggatctgtcataccatgttactcaaa

SEQ ID NO: 41918 - DNA, 374 bp, Gossypium hirsutum
  Clone ID: LIB3196-027-P1-M1-H8
atcggacacctccagtagcactcaacagctccagaatgagctgctttagtcgtcctagcatgtccccaacacctcttgaccgctgcagatcacctggaatgcttgaaccccttggcagctctagaacacccatgtctgtcctgcagcaagccggtggctccatgatggatggtccaggtccccgaatacctgaccaccagagaacatctgtgccagaaaatcatgctcagtccaggattgcacttgccctgaccgctatcagtcttggcactgctcggcctcctccgtccatgtctgctgctggccttgctgcaagaatgtcccaggttccagccccggtgcctctcatgagtctcagaaccgctccagcagcc

SEQ ID NO: 41919 - DNA, 369 bp, Gossypium hirsutum
  Clone ID: LIB3196-027-P1-M1-H9
atgcagtacatccaggaccggattccctcctggactggagccggcttcgtccgagtgcctgaaggggcttatttggagtttttcattgacgacataccatattccatggagtatgacatcctaattcgctatgagccacagctacccgaccactgggaaaaagctgtcatcacagtgcagcgacctggaaagattccacccagcagccgatgtggtaataccatccctgatgatgacaaccaggtggtgtcattatcaccaggctcaagatatgtcgtccttcctcggccggtgtgctttgagaagggaacgaactacacggtgaggttggagctgcctcagtacacttcctctgatagcgacgtggag

SEQ ID NO: 41920 - DNA, 345 bp, Gossypium hirsutum
  Clone ID: LIB3196-028-P1-M1-A10
attgctctgaaagaacactctatgtctaatatagccagtgtcaagagtccttatgaggcagagaactctggggaagagctggatcagaggtattccaaggccaagccaatgtgtaacacatgtgggaaagtattttcagaagccagcagtttgagaaggcacatgagaatacacaaaggagttaaaccttacgtctgccacttatgtggaaaggcatttacccaatgtaaccagctgaaaacgcatgtaagaactcatacaggtgagaagccatacaaatgtgaattgtgtgataaaggatttgctcagaaatgtcagctagtcttccatagtcgcatgcatcat

SEQ ID NO: 41921 - DNA, 312 bp, Gossypium hirsutum
  Clone ID: LIB3196-028-P1-M1-A12
atgtcttcctcagggtgctccacagcaattcccctatccaccaaactatggtacaaatccaggaaccccacctgcttctaccagcccgttttcacaactagcagcaaatcctgaagcatccttggccaaccgcaacagcatggtgagcagaggcatgacaggaaacatgggaggacagtttggcactggaatcaatcctcagatacagcagaatgtcttccagtatccaggagcaggaatggttccccaaggtgaggccagctttgctccatctctaagccctgggagctccatggtgccgatgccaatccc

SEQ ID NO: 41922 - DNA, 412 bp, Gossypium hirsutum
  Clone ID: LIB3196-028-P1-M1-A6
tgtacgcaaaagcacgctggtgccggtcccggatttccgggatgagatctatgctctggttgacccgagctcgagttgcctgtctctgagaactggagacctatctacgagttgaactgtgtctcaccgctccagtcccatcacttgaaccatcagtttctctcatatgttacacgagagggctacggactctacccaccggtcccgggatgtcattcacggccccatcatattggatgctgccctgagtatttggcaggcatggtggaccacccacggccgctgagtagccacccaaagcttacccgttgttctagggaatagaaaagagctcatggccaagcatctaacctaaagtcccaggattggctgcaggcagcaattatatcataacttattgaacttttgagca

SEQ ID NO: 41923 - DNA, 158 bp, Gossypium hirsutum
  unsure (1)..(158): unsure at all n locations
  Clone ID: LIB3196-028-P1-M1-A8
atcagatggccaggaaaagaagttctgggaatcagcctcacaggcattcccggagacctccggcatcagctcggtcttcagcagcacctagtncttctcaggctccaccacacccgtggctgtcacacgcacccacaagcgctccgtctcagggctct

SEQ ID NO: 41924 - DNA, 293 bp, Gossypium hirsutum
  Clone ID: LIB3196-028-P1-M1-B10
tcgcggacacgtggggagcttagtagttttcttgtagcaatgggtgatatttctttgagaaagactggggtagatgagaagagggctaaagtgcacacagagtccaaaactcttcttgagtatactcgaaaagcaatagctaggttaacctatttgaaaaggacattagcacaactagaagatgatgtggctccatgtgatgctcaaatggaaaaatgggagaccaactctggtggtatggcatcaaaggagcggcagtgcatgcaacagtataacaactataaagcattact

SEQ ID NO: 41925 - DNA, 385 bp, Gossypium hirsutum
  Clone ID: LIB3196-028-P1-M1-B5
attcatcctctcagtgggcgaggaagatgaagggtccatcaatgaggcagcctaggcggttgtggaggccatttacttccatggggagggcacctttgatacatccaagtcggatgggcagtttaagaagacagccagtaacaacaagctgaggacctacctgcctgacttccggttcacacctttcaagcaggcggtgaaggagacctgtgcttggttcactgacaactactagcaggcccggaaatgaaactggaaggcaggagcaagtgccagtggaccatctgctggcatagccaccacccatcaaccctgccaggagctgagggcaccacctgggcccacattccgtgcgctctgcagccccaagcatatatccagtggg

SEQ ID NO: 41926 - DNA, 281 bp, Gossypium hirsutum
  Clone ID: LIB3196-028-P1-M1-B9
tttatttttaatttttaatcgagtgtcctgcttgtaaaattagtagctgaaattaatttgaaagaaaaattcttactagaaatagttgaaaagatgatggaggtaaagaatcataattctgacgaacttatcatatacttctaaattatgtgaattagattaagaattaagatggcttatgataacagtgctctcttgttcatagttgagggcattctttcaccacaagacttgacctttttcttcttttagatgtagatattttgatatagatattgtac

SEQ ID NO: 41927 - DNA, 379 bp, Gossypium hirsutum
  Clone ID: LIB3196-028-P1-M1-C1
atctactaatgaaaagctgttcttttttttttcatcttgcccctgcacttacgttactattatctgctcccagccttcatgcttttctaaaaaggagcaaatgcccactctacgctttatcatgttgactttgtcattacacttgacttggatctctagttttctatacaaacaccaatgggttccatctttctgggctcctgattgctcaagcacagtttggcctaatgaaggggatttcaactacacaatcctatcattgtggggactatgaccttgggcactctaaacatatgttttgtttggtcagcacagcgtttcaaaaaggggaggcactttataaatacatggcgatttttcaggaaaatctggatcccca

SEQ ID NO: 41928 - DNA, 308 bp, Gossypium hirsutum
  Clone ID: LIB3196-028-P1-M1-C12
atgtaacaggcaaaaatttccttgactgtccagatgagcttatggaaaagtcatttgatgtgaatttcaaagcacatttatggacttataaagcctttctacctgctatgattgctaatgaccatggacatttggtttgcatttcaagttcagctggattagttggagtaaatgggctggcagattattgtgcaagtaaatttgcagcctttgggcttgctgaatctgtatttgtagaaacatttgtccaaaatcaaaaggggatcaaaaccacaattgtgtgcccctttttttataaaaactggaat

SEQ ID NO: 41929 - DNA, 390 bp, Gossypium hirsutum
  Clone ID: LIB3196-028-P1-M1-C3
atgttaggacacacacaggagaaagaccttattactgcacagagccaggatgtgggagggcatttgccagtgcaacaaattataaaaaccacgtgaggatacacacaggggaaaagccatatgtttgtacagttcctgggtgtgacaaaaggtttacagaatattccagtttgtacaaacatcatgttgtccacactcattccaaaccttacaactgtaaccactgtgggaagacatacaagcagatctccacgctggccatgcacaaacggacagcccacaacgatactgagcccatcgaggaggagcaggaagccttctttgagccacccccaggtcaaggtgaagatgttcttaaggggtcccagattacatatgtaacaggtgtag

SEQ ID NO: 41930 - DNA, 385 bp, Gossypium hirsutum
  Clone ID: LIB3196-028-P1-M1-C8
atgtctaaaaaaaaaaaaaagaaaagaaaagggggcttaaataatatttctttttgtgtgttgtcatttagttttaaaaataataacgtggttctcagtacaccaagcccttgccaagattaggcccatcttcccagtagccttctcaagacaaagttgcctttgtgtaactacaactgggagggtttggtgacatagaaaactcaatggggcactgcaactttttattaacagaaaatgcaatggcctaatgtttttgtgggtttctgtttttgctttatgttctaccacttcatatctctgatctatttctccatgaggatgatcttactgttttagacttgtccagggaagagtgaggtggttgtggcttaaccttagaatt

SEQ ID NO: 41931 - DNA, 285 bp, Gossypium hirsutum
  Clone ID: LIB3196-028-P1-M1-D10
atctctcgccctagtgagggccccatgtgaatccactctgatgctggggaaccagtgctcccttattgggaagaggattccaggaccccttttttgtcgtggctgccatgaagccacaactcaccttagggaagtgacctgctctcctctggctgtatgcacgtggaagggggccttgagtggcaagttgctaacaggaacagatccataggcagcctgcaggctaggaagtggcctgggtcaagatgagctgggaacaagagaggagcgagcgggagctagggc

SEQ ID NO: 41932 - DNA, 382 bp, Gossypium hirsutum
  Clone ID: LIB3196-028-P1-M1-D8
atgtttttccaaaaccagtgactgcattggaatgtacattcagtaggtctgatccaacttcttatgcagggtacattgaagaccttaagaagtttctaaaaccgtatactttagaagaacagaagaacctcacagtctgtcctgatggagcactttttgaacagaagggtccagtttatgttgcatgtcagtttcctatttcattacttcaagcatgcagtggtatgaatgatcctgattttggctattcccaaggaaacccttgtattcttgtgaaaatgaacagaataattggattaaagcctgaaggagtgccaaggatagattgtgtttttgagaatgaagatataccaaatgtagcaggttatcctcataatggaat

SEQ ID NO: 41933 - DNA, 364 bp, Gossypium hirsutum
  Clone ID: LIB3196-028-P1-M1-E10
cccacgcgtccgaaagagtcctgttactactcctcagctccaaacagcttcattcacagcagatacttgtcatgtagtagatcatgtttcatctaggtaccccaaagcaagtatttatgctgttggttggtctcttggaggcaatatccttgtcaattacttgggaagggagcaccataggtgctctctctctggtgctgtatcactgtgcaatcctttcaacttagtgattgcagatgaaaatctccgaaagggcttcaacaatatttatgacagagcacttaggggaggtctttctagaacttttgacaaacatgcttccctcttcgaagaaatgcatgatgaatataatgtccaagcgggt

SEQ ID NO: 41934 - DNA, 315 bp, Gossypium hirsutum
  unsure (1)..(315): unsure at all n locations
  Clone ID: LIB3196-028-P1-M1-E3
aaacgacaccaaaaaacaaaaagcnacgaagaaaggcaggtggcgccccgcccgaatttccgggattcatttgtcacagttccgaaatattcattttgggagtctagcaaaaggggagtgtggggctttttataaacacataactttctaaggtatgtgttgctcactgtatctaaatacccaaccttaaaacgttcctgatgctaaattaccgcgttgattagaaaatgtagaacagtatggaagtatcatgtgactcccaaacattctgcggtttctctaaaatagaatttatttgtttttggtgcgaaaacc

SEQ ID NO: 41935 - DNA, 185 bp, Gossypium hirsutum
  Clone ID: LIB3196-028-P1-M1-E4
ccctcaccaaaatagttgataacgggtttctttttctagagacaactaaattaattgtcattgggggatggcgcaatggcactagttctatactaacgaacacctctagttttatttaatataggccaggttgccagtttcttatttgaatcatgggcctattggacctaaggagggattggaag

SEQ ID NO: 41936 - DNA, 357 bp, Gossypium hirsutum
  Clone ID: LIB3196-028-P1-M1-E6
atcagggtgggggctgtgcagtccggtcagggcgggaggggaaacgcagctctgcatgtgaaacttaccaacccaggcagatgccccttccccttagcactaccctggcctcctgcagcccctcacctcatgttcttcccacccccacaggatgaagagccccatgggcccagcccctgccctgggaaccaggcagccttccagacctcaggggctgaggtggacagttagggtaggccttactttggtgaccttgctctttccctcccaggccagctcaggtcacctgggccactgacccaggcctgtcactttgagaggggcaaaactgagaggggcttttcttagagaaagaga

SEQ ID NO: 41937 - DNA, 365 bp, Gossypium hirsutum
  Clone ID: LIB3196-028-P1-M1-E8
ataaaaaaaaaaaaaaaagaaattgggaagttgacagtatgatgtaatcaatctgtactttacataattacatatattgataaaatatatcatgctaattatatgcaaatagataactttttaatagttctcttatgctaagtacttgtctaaaatagtcacttttgtttggaattcgtatctcatgtgattccctagtacactgtactttttctattatagtttctataaaattatactacaattgcctggttattattttactagactttaagttttttgagggctggaatctgtcttggtgcctgtctactgccaggtatagagatgttcatgtagatcatataaaacttggattaatatga

SEQ ID NO: 41938 - DNA, 260 bp, Gossypium hirsutum
  Clone ID: LIB3196-028-P1-M1-E9
atgctttgacgagctccagcgcatccatttccgcagtgacaaagggcactgtgtggatctgccagacacaggactctgcaaggagagcatcccgcgctggtactacaaccccttcagtgaacactgtgcccgctttacctatggcggttgttatggcaacaagaacaactttgaggaagagcagcagtgcctcgagtcttgtggcggcatctccaagaaggatgtgtttggcctgaggcgggaaaaccccattcccaaca

SEQ ID NO: 41939 - DNA, 403 bp, Gossypium hirsutum
  Clone ID: LIB3196-028-P1-M1-F10
ggcggccccggccccaaattcccgatgtgcatattattaagagaggagtccccacacgagcgggtttaatgctcatttaatgcatatttacattagggcacctatgtaagctttaaatattttgaccacgactaaaaaattttgactagggcctatttcaatattttgattgagccatttggaggtttggaggaaaaaaataaaatctcctctaacaagagtgttaaaaaactctggaaagcactcctgtatggtcttttttcacataaccttatttttttttttaccttcatgtgttttagccgcacaatatttcattaacccaatctctcatatatttttttggtttccttgtaccataaaaaccaagaacattttttttaaaaaactgctcccgctttta

SEQ ID NO: 41940 - DNA, 362 bp, Gossypium hirsutum
  Clone ID: LIB3196-028-P1-M1-F2
atttgacaaacataattatcatacattcactcatccaacccaaacaagcatgcacatccatgtaatgcttcatcatagacttataacataacaaatattggtcacactaaatggccttatacaacaatgaccttgaattagcataggccaatattctaggccaactcataatttcatgtacacaataaccaaatccctgtacatgccatacacttaaaatgctagaaaatcatggatacccatcaatagcttgttagtgtgataggatctctgacgacctccaactcgagctagtatatgtgacactataggaaaaaggaaaggaaaagaaagtaagaatatagcttagtaagtaggtatgt

SEQ ID NO: 41941 - DNA, 388 bp, Gossypium hirsutum
  Clone ID: LIB3196-028-P1-M1-F5
atgtgcatcttatagagagatgagtacccacacagtgaatttcaggctcagggcatgcatatgtcttttgtgcagttggtttgctttagtcttttgagcactctgaatcttctgactggtcctatttccatttctgattgagccatttggaggtttggaggtaaaatttcagctctcctctagcaagtgtgtagaaccctctggaatgcactcctgtatggtcttcttccacatgaccttcttcttctttttcccttcatgttctttagcctcacaatctctcattcacccattctctcatctctctctttgctctccttgtaccatcacaccagtgaactgctttcttaaaaccctggcacctgctgtcactgaatcccaaattgat

SEQ ID NO: 41942 - DNA, 287 bp, Gossypium hirsutum
  Clone ID: LIB3196-028-P1-M1-G10
gcgaccacgcgtgcggggacaacaatgcccttgatgaagccatctatgggtctgatgaattccggatgtacgcttacaagatcaaacgctgtaccaggatgcgtagccacgattggacggagtgcccctacgcccaccgtggtgagaaggcttaacgccgggaccttctgaagatcccctacaccggcattgcctgccctgcctttcgtaacgggaaatgccaaaagggcgacgcctgcgagttcgctcacagcgtattagagtactggctgcaccccatgaagtac

SEQ ID NO: 41943 - DNA, 385 bp, Gossypium hirsutum
  Clone ID: LIB3196-028-P1-M1-G3
atctcaggctgcccacccccatcagtcacccagcctggtcaggcagcagacattccctcattacgaggcaagcagtgctaccaccagtcccttctttaagcctcctgctcagcacctcaacggttctgcagctttcaatggtatagatgatggcaggttggcctcagcagacaagcatacagaggttcctacaggcacctgcccggtggatccttttgaagcccagtgggctgcattagaaaacaagtccaagcagcgtactaatccctcccctaccaaccctttctccagtgacttacagaagacgtttgaaattgaactttaagcaatccctatggctgtgtatcttgtccataccagacagggagcaaggggtagaggtcaa

SEQ ID NO: 41944 - DNA, 357 bp, Gossypium hirsutum
  Clone ID: LIB3196-028-P1-M1-G4
cttaattatgtacctgctagtggtactgctatcatcaaaagtctcattgttcttagtttctttactagtaatcaccttgtcggtcgctgaaggagcaagctggtgcgtggccagcagtgatgcaagcaaccaagctcttcaaaccgcactcgactatgcatgcgcctctggagctgactgcacccctctacagtcagatgggcttggtttccttgccaacaccatccaagctcatgcttcttatgctttcaatagttactatcaacgtacagcaatagctcctggttcctgtgactttgctggcactgccactgttgccaaaactgatcccagttatggatcttgtatgtacccatc

SEQ ID NO: 41945 - DNA, 392 bp, Gossypium hirsutum
  Clone ID: LIB3196-028-P1-M1-G5
atggaatgcgcccgcgccggcttcccgcgcgcgcaccggcacaagctctgctgcctgcgccaggagctggtggacgcctttgtggagcacaggtacctcctctttatgaagctggctgccctgcagctgatgcagcagaaagccagccagctggagaccccctcctccctggaaaatggtggtccttcctccttggagtccaagtctgaggaccctccaggaccggaggcgggaagtgaggaggagggtagcagcgccagcggcctggccaaggtgaaggagctggcagagaccatcgccgcagacgacggcacagcagaccctcggagccgggaggtgatccgcaacgcgtgcaaggcggtcggctccatcagcagcaccgccttcgacat

SEQ ID NO: 41946 - DNA, 313 bp, Gossypium hirsutum
  Clone ID: LIB3196-028-P1-M1-G6
gaaagctggttcgcccccgtgcgccgttcccggattgccatgtggccccacccgttctccgaacacgggcgggggcaagctatgctggctgggccagcagctgcttgaagaatttgtggaagacatctacctcctttttatgaagcttcgcaaactgatgacacaccttgaaaatggttctcggcttttaaatgggtaacctctgtaaaaaggtgatccttactccttggattccaagtctgatgaccctacacgaccggccgcggggagtgaggaagttgggagcatcgccttggggctgcccaaagtgaag

SEQ ID NO: 41947 - DNA, 387 bp, Gossypium hirsutum
  Clone ID: LIB3196-028-P1-M1-H10
attggaattatataaaatgacagtaagactctctccaaagactaataaagatagagatgacaaagaagaagaagaagatgatgatgatatcaaagaaggagaaggacgaagaagaggtagaagaaaaggaaagaaggaaaagaaataatcataatgctaaaagtaaactaggattccacatgggccattattaaccaaagattctgtagtttctcatttccttatctctgcattgcgaaacaaataaaagagctttcttccttcctaggcttggataacattgtggagggttaacgtgtttggcacctatcagctgcttagaataacaaagttcagtatggactttcgggcatgagattttctccacaccaggtgtgctagtcacgc

SEQ ID NO: 41948 - DNA, 388 bp, Gossypium hirsutum
  Clone ID: LIB3196-028-P1-M1-H11
atggtcaatccaggttacattcctttttctaatttggggtgcaggcatgctgagaatggaatcacctcctctaatataattttaaatgaaaacaatattaagccataaaaactgtatgagaaacttcagtgagattctagtatttttgctctgatgactaattgggaacagttttgaaatatcaaattgaaattgtctcaaagtgtctaactgatagggtttggatctgtgtccccacccaaatctcatgttaaattttaatcctcagtgttggaggtggggccttgtgggaggtgatttgatcgtgggggcagatttctcatgaatggtttagcaccatccctcttggtactgtcctcacgacagtgagttctcatgaaatctgatt

SEQ ID NO: 41949 - DNA, 353 bp, Gossypium hirsutum
  Clone ID: LIB3196-028-P1-M1-H7
cttgtttccttttaaaagttcacctcttctctcttttttcttttcttcaactcaagaaaacataaaacccaatgctccaatctaatcacatatgatctcatctcttgcatcgagtttgagtttgcccttatgtgtcgtactttctcgatcttatcaccacctttctctcttcaaatccttctaaaactcagccatacaagcccaactcttcactcctttgctcctcccttttccactacaagatggttcaatgtagaaagcaactagttctacttctttggctcttattaatcttcactttccttgcttgtcattgccatggttcaagattaaccaccaatgtcttcaaaatc

SEQ ID NO: 41950 - DNA, 286 bp, Gossypium hirsutum
  Clone ID: LIB3196-028-P1-M1-H8
ctaactagagggaacgctgaagcacgctggggccccgccccgatattccgggtcaaacctacactttatttatatcctatatatgacttctttaacgaggtacatactattcagatctggagctgaccttgtggattcgagtgatttataaaaataaataataataggcagcatactattactaaggcagtgtgagttgtgtgcaggctctacagggcgggatgaattaaatttaccgctcgcgactaaacttagtgagtgaacatgacattattaatgaaaccaa

SEQ ID NO: 41951 - DNA, 381 bp, Gossypium hirsutum
  Clone ID: LIB3196-029-P1-M1-A10
attgcgattctacgacggcatctgcaaatgggaggagggcagtcccacacctgtgctgcacgtgggctgggccacctttcttgtgcagtccctaggccgtttcgagggacaggtgcggcagaaggtgcgcatagtgagccgagaggccgaggcagctgaggccgaggagccatggggcgaggaagcccgggaaggccggcggcggggcccacggcgggagtccaagccagaggagcccccgccacccaagaagccagcactggacaagggcctgggtgccagccagggtgcagtgtcaggacccccccggaagccccctgggacggtccctggcacagcccgaggccctgaaggtggcagcacggctcaagtgccagcgcc

SEQ ID NO: 41952 - DNA, 380 bp, Gossypium hirsutum
  Clone ID: LIB3196-029-P1-M1-A11
atggtgtgaaatatgtgacacttaagaacagtgatttttattgggaattttcttagggttataacacttaaagcaacaaccaattagtaacagccacagaaaaggggaatgaatcaactcttggttctttcctcaacccggcagtgttgtggataagtgcgtttgtaatgccctggcaatggctacatttgacactagaaaaaataaacatatttaataatttttgtttctccttaggaataagactttagaactgttttgtactgtgaattacggatgctctttgaaggaaagaaatatcgattctaatgttcttcagaagctggcagggataagcaggacatcgactggaacgtatgctaaatgaaagcagacaaatt

SEQ ID NO: 41953 - DNA, 381 bp, Gossypium hirsutum
  Clone ID: LIB3196-029-P1-M1-A4
atctttttcatacgtagacgcctcctgtataatagatttgatctggagctcttcactcccggtgacgtagaacgagagtgcaatgaagaactttgcaattatgaggaagccagagagatttttgtggatgaagataaaacgatcgcattttggcagaaatattcagctaaaggaccaaccacaaaatcagatggcaacagagagaaaattgacgttatgggccttctgactggattgattgctgctggagtatttttggttatttttggattacttggctactatctttgtatcactaagtgtaataggctacaacatccacagtaagtactaagtaaaattatttaattcattactagacattctatattattattttaa

SEQ ID NO: 41954 - DNA, 382 bp, Gossypium hirsutum
  Clone ID: LIB3196-029-P1-M1-A5
attcctgttgaatagtccaccctccttgcactctacctgagacagctgcagcctgcaattcactcccacctcctgggattgcactggatcggtgtgctcagaacaaggtgcccgcccagttgcagccatgaggatccgtagcctcaccctgctctccttcctcctactggctgctcaggtgctcctggtggagggagaaaaaaaaagtgaagaatggacttcacagcaaagtggtctcagaacaaaaggacactctaggcaacacccagattaagcagaaaaacaggcctgggaacaaaagcaagtttgtcaccaaagaccaagccaactgcagatgggctgcgactgagcaggaggagggcatctctctcaaggttgagtg

SEQ ID NO: 41955 - DNA, 379 bp, Gossypium hirsutum
  Clone ID: LIB3196-029-P1-M1-B10
atcctctacctcacgaaggttggaatatctccagataaactccgcttccggcagcacatggagaatgagatggcccattacgcctgtgactgttgggatgcagaatccaaaacatcctacggttggattgagattgttggatgtgctgatcgttcctgttatgacctctcctgtcatgcacgagccaccaaagtcccacttgtagctgagaaacctctgaaagaacccaaaacagtcagtgttgttcagtttgaacccaataagggagcaattggtaaggcgtataagaaggatgcaaaactggtgatggagtatcttgccatttgtgatgagtgctacattacagaaatggagatgctgctgaatgagaaaggggaat

SEQ ID NO: 41956 - DNA, 326 bp, Gossypium hirsutum
  Clone ID: LIB3196-029-P1-M1-B12
gcaaaccgactccataatcacgtgtattgggagcacagctgaatgactaaaacacacttaactatgggcttggcggaactaaaggtcataactggtaattgccaaagctacacatgaaatttattgcaatatgcactattatacatgaacttttctatgcaactctatgcattaaattgtatttgaggcaaggttcacagatagctagcacgagtggacgcttatatatattgcgtacataaggtattatatattcagtctgaagatcaagatatgtatgcattgttgtaaaagtatctgatatactgagagtgaagcttttttac

SEQ ID NO: 41957 - DNA, 282 bp, Gossypium hirsutum
  Clone ID: LIB3196-029-P1-M1-B2
cgggccaccaatccggccttccagggggggggtttaaggttattggccttggggaacctttttcttccatgtggataagggagaacttggtttcccttgacgagccggcatttttaacccacaagcccggcgtattttcacccttaacaagtttaaccttcccattcttcaacgacttgagctcaacgcccagaggggttgccttttaaaccaaacttgtttggttcccaaatggaaccttaacctttaaaaaatacttttcattttaaaaggctttgccaa

SEQ ID NO: 41958 - DNA, 387 bp, Gossypium hirsutum
  Clone ID: LIB3196-029-P1-M1-B3
atagacaagccccaggctgtgcccgtggatgtccatatatggcagattgcccaacgtgactacagctggcaccctaccacgtcccaggcgaagggaccaagcccccagagcaacaaggaactgggaaactttttccggagcctgtggggacctcatgctggctgggcccaagcggtgctgttcagtgctgacctgcaccaatcccaccgtgctcaggagccaccagcaaagcgcagaaagggttccaaagggctggaagtctagatggggcaccctggacaaaggaattcccccaagccccttcccctccattccccacttctctctccccatccccacccagtctcatgttggggaggggcctccctgtgaccacctcaagggcca

SEQ ID NO: 41959 - DNA, 130 bp, Gossypium hirsutum
  Clone ID: LIB3196-029-P1-M1-B5
taggccatacccatactgtgtcgggatcactacatgtatggtaaagttccgaaggttaatactctaagcatactaccacgtgctatgagaagggactaatctccaaaatcatcagatcactaagaaacat

SEQ ID NO: 41960 - DNA, 366 bp, Gossypium hirsutum
  Clone ID: LIB3196-029-P1-M1-B7
gaatctgataaactggatggattacctaatgtgatttcagcaatatcagcacagaaatatgtccaaaagggttatgatgcttaccttgcatatgtgctggatactaaggcatttgagttaaagattcaatcagtgctggttgtatgtgaatttcctgatgtattcccagaagaattacctagtttaccatcagatagagaagtggaattctctatagatctcatttcgggaacaacacctatatctatagcaccttacaaaatggctcttactaaattgaaagagttgaaagtgcagttgcaagagttgattgaaaaaagttttgctcgacctaatttctcaacttggggtgcgttggttctattt

SEQ ID NO: 41961 - DNA, 383 bp, Gossypium hirsutum
  Clone ID: LIB3196-029-P1-M1-B8
atggcaaccgcatcacgccgtcctatgtggccttcactcctgaaggggaacgtcttatcggcgatgccgccaagaaccagctcacctccaaccccgagaacacggtctttgacgccaagcggctcatcggccgcacgtggaacgacccatctgtgcagcaggacatcaagttcttgccgttcaaggtggttgaaaagaaaactaaaccatacattcaagttgatattggaggtgggcaaacaaagacgtttgctcctgaagaaatttctgccatggttctcactaaaatgaaagaaaccgccgaggcttatttgggaaagaaggttacccatgcagttgttactgtaccggcctatttcaatgatgcccaacgccaagcaacc

SEQ ID NO: 41962 - DNA, 367 bp, Gossypium hirsutum
  Clone ID: LIB3196-029-P1-M1-B9
agtttatctagatactgtatcagagaccaaaaattacagttgttatacccttgtctacccacattcattcacacatgtggtgtattcacgcactcattatcaatttccaaatagtcaagtgatatcatggggatcgagtacttcgatagtttggttgcatccagtatatctcaactccgccaatacagttggggaagatccaagagattaacaagagaggaaaatatggaaataattgggggttgtgcactagaaatatattgcagtgtgggataatcgaatggcgcggaaacctcaaatggatatttctttcgatttgcaaccatcgttagagtacatacaatggtactccagtacgggaaaacta

SEQ ID NO: 41963 - DNA, 356 bp, Gossypium hirsutum
  Clone ID: LIB3196-029-P1-M1-C11
gcacaattgaggttcaatggatggcatttaaaggggcacatgtatttgggatgttcatgcaagagggagctgtcgaatgtttatgtatttgaagatttatggattgtatttatggaggaaaatacattgggacgtttcatgcataatttatgcattttcaagatgacaaatcaagtattttaggcacattaaagcctcattcagccaagggagatgtatgagcattaaagggctgcatattcatggaattatggctattcttcaaggttaagtatgcatgaatacatcaagtgaagcaacatgatggttcagccaattcatgtaccatcttcaagcatgaacaaaatgttaatgca

SEQ ID NO: 41964 - DNA, 366 bp, Gossypium hirsutum
  Clone ID: LIB3196-029-P1-M1-C4
atcgatgcatgagctgactgtggagaaactggaatcagcctgcatgggtccgtgtcctgggtccgtgtcatttgcctcccttgggcctccctcagtgctgcctctctcctgtgacctggcaggcgggtccgcctggggagctgtgttattcatgtgctgcctggttctcccagggtgttcaggatgcatgatgggtgaccgcaccctggcgtgggaaccaggaggcctggcttccgttggaggctccactgcccctggtgtgatggggcccgtctgccctctccagactccttccagctccgtctgtaaagtgatgtggccggaaatgatctctgagggtccctattgcagttggaggcagaaatg

SEQ ID NO: 41965 - DNA, 383 bp, Gossypium hirsutum
  Clone ID: LIB3196-029-P1-M1-C5
atgccatgatctgctgcaccgtcttctccagatggcgccatggagggagctgggtgcagtggaaaagccccagcctgggagtccaggatctgggctcaagccccacacgccccacatcgctgtgtggccctggtgaggcactcctgcgagcctctgtgcccagtctcccacggcaccctcccatggcactgctaggaaggaacttgaggcccacagaggtcaagcacctaatctttgaggcccgaggtcaagttgagcttttggccacccaacccaggccccctctgctcggccctgcacgccccccaggccctccttccccacaccacaggcaaacctgcccttgctgcagcgggagctcctgcactgtgcacgcctggcca

SEQ ID NO: 41966 - DNA, 364 bp, Gossypium hirsutum
  Clone ID: LIB3196-029-P1-M1-C7
atcaagacatattaaacacttgtaataaattaagacatatttaaaagctgtaatgaaacttatttacatgcttatttaaatggtctaaaactccagcaaataaagttaatttagctaaagagctaataatgagctgaattgaatttaaaccaagctcaaacgagctgaattaagctcatgtgagctaaaataaaattcggtgagctgaaccaagctaaatggagcttgaggagctgaattcaagctgaggtcaagggcatccttgaccagggtcatatcagaaacccactgatttctttataacctctgtcaatggggcagcaatagtagagaaatctttcacaaatcgtctataaaaactagc

SEQ ID NO: 41967 - DNA, 382 bp, Gossypium hirsutum
  Clone ID: LIB3196-029-P1-M1-C9
atcacaaaacatgggcctgccccagaaccgtatcattttttcacctgttgctcctaaagaggaacatgtcaggagaggccagctggctgatgtctgcttggacactccactctgtaatgggcacaccacagggatggatgtcctctgggcagggacccccatggtgactatgccaggagagactcttgcttctcgagttgcagcttcccagcttacttgcttaggctgtcttgagcttattgctaaaaacagacaagagtatgaagacatagctgtgaagctgggaactgatctagaatacctgaagaaaattcgtggcaaagtctggaaacaaagaatatctagccctctgttcaacaccaaacaatacacaatggaacta

SEQ ID NO: 41968 - DNA, 243 bp, Gossypium hirsutum
  Clone ID: LIB3196-029-P1-M1-D1
cgtttctgcaattaccccgaacattttgaactatctatggcttagttcatacaaaacctacattcgagccctcaaccctcgtcacagttcactaaactgaagaaaacaacggtaactccgtgaccttcctttcatccaagccaatgggcaacacagcaccagcaacagatctacgccttcaagctcttccgagctctccgtcattctccttcgacctcctcttccttcgatgccaaacaagtc

SEQ ID NO: 41969 - DNA, 364 bp, Gossypium hirsutum
  unsure (1)..(364): unsure at all n locations
  Clone ID: LIB3196-029-P1-M1-D11
caaggcggagaaatcccgctccctctgtggagctatcaaaacccgcaggctatcacggagaccatcctcaaatcggacgcagcgctcatattcgattgccaccatgcccctcgcataacggctcaatctaatgaactcagcctcgtactcaaccactgaacagtcaccctgagtgacatttaggaactcctgtcgcctagcctcaatgtagctagctcccacgtacttattctgataagtggtcttaagcatatcccaagttagttggtcgggctgagtgccctccttaacggatagccaccactgatacgcctcatctcgcagcgacggtctcgggtacggngcgttacatgacctgagtcgt

SEQ ID NO: 41970 - DNA, 360 bp, Gossypium hirsutum
  Clone ID: LIB3196-029-P1-M1-D12
agcatagaatgcttagtaagttcgtaatacaaagaaataaacttataacttcactttataaacataatcctctttagccaatttaatatatcttagccttagcctaaacaacattagcctttcaatttttagttatcacataattagtaattttaatcaaagaatttgacgatctttaccttttcctcatattcgttgaactacaatttaagtgagtaaaacaaggtcacaatttaatttggcccaaaagcctaacacataatcatcaatcaagtttactattcaatcaccatttaagtaaaataacaaaatacactaccaaaccattaatcacaatattattacatattcattcccaca

SEQ ID NO: 41971 - DNA, 366 bp, Gossypium hirsutum
  Clone ID: LIB3196-029-P1-M1-D2
taaaggcataagttaaacttaatgattgcaacttaatcttgaataaggaaataaaatcaaattattaagggttaacatgtcttgttaaggaagcatttagtctaattgtgctatcataatagttgttgagattaatttgaaagatatgtatacttaagtagcataactataaaatttcttgtttttaagcataagtatattaaattcataattctgggaagaatgttattctgaaagaatttttcaaaggtgttttctgagtaattctttttaatttgtgcattacttgggatgagaaatgatttaagtttgggggttcagaaacatggaaatttacacatttttacataccctttttaacttaaa

SEQ ID NO: 41972 - DNA, 377 bp, Gossypium hirsutum
  Clone ID: LIB3196-029-P1-M1-D4
atggctgctggagggtatgaagggggacgtgttgacatgatcgctggctgctttgtggtgagtggattctaggaggtagaagtagaatcaggaagccgagggaggagactccctgagtgaagatgacggcgggtagggactgcgtgagctccgcaagcagcatagcccctggacctgggggccttcctatacctctctgctctccggggtctggctgctttccggtcagcactgtaccggggcctttactgactccctaagggccccatgagccccaggatggcaaaggacctgtgcccagactcaccctcattagctgctttgcagccctcaggtcctggtgccctcagagacctggggatatgggagcgggtctg

SEQ ID NO: 41973 - DNA, 362 bp, Gossypium hirsutum
  Clone ID: LIB3196-029-P1-M1-D6
ctgtaaataacaataatttgcctggactagcttcaattctcccacatcaattgtctaactctccaaagattgcacctattgggaaggatcaaagcaagaccaataatacaaacccaatttttactaattctggagcaatgcaaggagcatcctaccagcattcgagatccttctctgagcaaaaggtaagtgcaagccctggaccaatctctgccttcggtgaatctacttcaagttcatctggtattggaacattgactggtcctcagtttctatggggaagtcccactccttactctgagcgtgctaattctgcttggccaacaccatcagtgacgcaccctttttcatcaagtggacaa

SEQ ID NO: 41974 - DNA, 408 bp, Gossypium hirsutum
  Clone ID: LIB3196-029-P1-M1-D7
acactatataacaagttggaacgaagaagcacgctggtgccccgccgcaatatccgggatggaagccacgcggtaccagcggcgaatagatgagctactggcaggaagctttactgaggaggatgaacacaccatcctggaggagctgaacgcgatcactcaggaacatatagagctgacagaggctgcctccgagcccctttctgagaagataccacaaaacgtacctgacaaggccaggcccaggcacgcggagctggtggcagcttctttatgtggtcttcttttgcggtactcgcggtggtgccccaaggactgtggcccacagagagtcagagtcatcgccagcccctgtccgggttccctggagcccagcacgcacagtgctgagcatgagccacagccaca

SEQ ID NO: 41975 - DNA, 363 bp, Gossypium hirsutum
  Clone ID: LIB3196-029-P1-M1-D8
atgattcaatttaaagaaataattatagtaacatatttttgcataaattgtatttaaaaaaaaaagtaggttatgacatattcgtacgtattaatgtttttttttgttcaatgtatgataaatgtatggataagttttcgttttggtcacttaactagaaaaaagttacaatttgatcactgaattattcaaaagttttcatttaagtctttgagctattaaaattgatgctatatgattttctctatttgcactggttgcaccaattaaacaactttatttccccttctcttttaaaattttttttatgaaacaattttgaacgtcacaaatttgcttactaaaatttaatcaatttttttt

SEQ ID NO: 41976 - DNA, 385 bp, Gossypium hirsutum
  Clone ID: LIB3196-029-P1-M1-E2
atcagctccctccgatggggtctcagggctgtgtcccagctcgcctccctgtggcctccccctagaactcctgggtctgtcaggacatgccccacctggcacacacaccctgtgtgactcccactgcctgtgggaggacgccgggcccctgagccagcctctgctttcccctcctgcctttggggtgccccgtaccgcactgttcccccagactgccttccactttctctgcctttgcacaggctgttctcctgcctccagtgaactctgacttctccatagcctcctgaagggccccttgctcacaatggccccagccaggccctctgacccagccctcctgcatggccacgttggtctctgagccttaagcctttggatgtgt

SEQ ID NO: 41977 - DNA, 384 bp, Gossypium hirsutum
  Clone ID: LIB3196-029-P1-M1-E3
atggagaagaacggggagctagcatcatggcagaacaggatgtggaaaatgatcttttggattacgatgaagaggaagagccccaggctcctcaagagagcacaccggctccccctaagaaagacatcaagggatcctacgtttccatccacagctctggcttccgggactttctgctgaagccggagctcctgcgggccatcgtggactgtggctttgagcatccgtctgaggtccagcacgagtgcattccccaggccatcctgggcatggacgtcctgtgccaagccaagtctgggatgggcaagacagcggtcttcgtgctggccaccctacagcagattgagcctgttaacggacaggtgacggtcctggtcatgtgcc

SEQ ID NO: 41978 - DNA, 367 bp, Gossypium hirsutum
  Clone ID: LIB3196-029-P1-M1-E4
gaaaaaacagaaaaacaaacagtcactgctaacaaaccaaccttcccgacgatcaaaactactcttgaaaacgtgcagaaccgggaaatgctttatttttcactgctcgctagattcgtcggacctggaggcagaagcagaggcacctcttgctaagagttcacaactcctcaagaacgctgatatttaatcagcttgaaaccgagtgggaccatggagttaataattacgagaagatgattttaattatacatggacatgagctatattctaccttatttggacggaaaaggcaagcaaattgggtcaggagaatgtcactttgatctagttaaagttggtttaatcgaagaacaagtctgacaag

SEQ ID NO: 41979 - DNA, 317 bp, Gossypium hirsutum
  Clone ID: LIB3196-029-P1-M1-E7
cccacgcgtccgaaaaaaaaaataaaataaaataaaaactaaaaataagaatcaataaaaaaaataaaaaaatgaaaaaaacaggaacacacgccctgtgtggctcccactgtctgtgggggggctccggtccctttgagccagcctgtgctttcctcttatggctttggagtgccccgtgcctcactggtttgccatactggcttccagtttttctgcctttgtacaggctgatctcctgtctccactgaactctggcttttgcatagcctactgtagggtcccttgctcacattctacctagttaggccctttgt

SEQ ID NO: 41980 - DNA, 363 bp, Gossypium hirsutum
  Clone ID: LIB3196-029-P1-M1-E9
gccgaatatgtgcttgatcaatgaaggaattgttgaagaatataggtgaacttgttaaaaactataatttctaatactcatatgtgtaatagccgaacctagactttgcttaatgtcttgagcaaatgccgattgggtgttttgaaatggataaattaggtgcttgatttcctaaaggtacggcatagtacatgatatttttgttagtatgctttcgaagaatttgagtagtgttatgtataagtaagattattacgtaggtcttggcggtatatatgtacaattgatctatttagctaattatatctagggtgataaataattaaataatatgtatacaaagaatgtgtgaaagagtgaatt

SEQ ID NO: 41981 - DNA, 365 bp, Gossypium hirsutum
  Clone ID: LIB3196-029-P1-M1-F1
cccacgcgtccgataattttgatcaactgctagcgctgcgacgtgaacaaaatcctcggtttattaatgaactgatctctatgttcaccaacgatgctgaagcttacattgccgaaatcactaatgctctgagcttaactgaggtggacttttcaaccatcataagcaaactccatcagctcaaaggcagcacctctggcattggcggtcaccggatgtatcaagcttgttgcgagttacgtgtcgccgccgacgacggcgacaaagacaggtgcgatgaattatttctgcgagtgaaggaggagttcaatactttgaagcaatgcttggattccatatcccagatgcggagcaacatcatcagc

SEQ ID NO: 41982 - DNA, 365 bp, Gossypium hirsutum
  Clone ID: LIB3196-029-P1-M1-F10
aatccttgaagtatctctgtctgaatagtatgggtataagatccttttaaggtcctccaaatacatggaaatcttggaatatactagtgtcggatactcacacccgattccaagtaacatttgcttaaaattacttttagtctccacctgattcatcttatgagtgattctcgtaatccagctcccatacgaactcttatgtcagatggttcttctcttttccattgacaattcaggcaaaatacataacagatgctgaagagaggtatgacaatttattgaaaactttggatcctcagttgtcctcgaaataccagagaagatgcgaagaagccactaaagaaggtggcaaggtttcaggacac

SEQ ID NO: 41983 - DNA, 383 bp, Gossypium hirsutum
  Clone ID: LIB3196-029-P1-M1-F2
atcatgggaaagaaatcttaaatgaaaaacgcatctcattgtaggcattcttgcctcatattttactgggccatgtttgtttcctggtactcatgtattttttttttccagatctctttccccaagttgctattgtaggagtattctgctgcgtgtggatgcagttatactcattaaagcagatctggagtctgaagtagctataaagcagctataaaactgagaaatacattcatagctgcagaaactatgataggtagaggactttgttttgttttgttttttggttttacagagaagagatttttattagaaaaaaattccagtgaattgttgcagaaatgctggtttctacaccatcctaaagaaaagctaaagggtgt

SEQ ID NO: 41984 - DNA, 318 bp, Gossypium hirsutum
  Clone ID: LIB3196-029-P1-M1-F5
atggaaaggcttcaatgaagggctgtgggagatccagaacaacccccacgccagctacagcgcccctccgccggtgagctcttccgacagcgaggcccccgaggccaaccccgccggcggcagtgaggctgacgaggacgacgaggaccggggagtcatggccgtcacagcggtgactgccacagctgccagcgacaggatggagagcgactcggactcagacaagagtagcgacaacagtggcctgaagaggaagacgcctgcgctaaagatgtcggtctcgaaacgagcccgaaaggcctccagcgacctgaatca

SEQ ID NO: 41985 - DNA, 382 bp, Gossypium hirsutum
  Clone ID: LIB3196-029-P1-M1-F6
atcaaatacattccactgtgttctgatcacctgcagtatatagtacagtaacatgctgtacaggttttgtagcctaggagcaacaggctatcccatttggcataagtgtgtagtcggttacgccatcttggtttgtttaagagcagtttataacgttcgcagaatgaagttgcctaatatttctaagaacgtatccccattattaagtgaagcataactgtagttcagttatagtaaggtttacaaagtaaaatgatatctatttgcacatttcatgacaggccttcctaggagtgatagaggaaattactggcaacatgtgtgtgaagtagtttttgtaagtagaggaaatgcataggctacaaaactgtatggtagtttt

SEQ ID NO: 41986 - DNA, 361 bp, Gossypium hirsutum
  Clone ID: LIB3196-029-P1-M1-F9
cggacgcgtggggtgaacatgaaggcctgaagtacccggttttatcggtttgtatcgataagaagacggtgattcgagtaaagaggctgcaatggaattttagaggaaaccagacgatatttgttgatggattgtttcttcagccatatcgcctaaaacaaggcctatctcggaatcaaccatgactaaaacatagaacccatcaacaggttcgggtcccgtatcatacttagcagtggaaagatcccagaagacttcgatcttggaatgatcggattcgatcactttgttgcctttcttcttcctgaagaatctcaagttggtgttgagcttgaaagatgtggaagggtcatcaccgatg

SEQ ID NO: 41987 - DNA, 362 bp, Gossypium hirsutum
  Clone ID: LIB3196-029-P1-M1-G10
cgacactatctaacaagagggaacgctgaagcacgctggtgccccgccccgatatccccgatcggacccagccggcctactaaaccggtctacattgtggcctatgacctggaaggtgcattgatcgttgatgtaacagtcattgcaaagatgacatgccttgttacaagaagtgcctagacctccttaccgccaccccacttttttctaatgagaaaggaccactcctgtacgaagtccacacaaggaaactgtaagcattgtttatttgtaaatgatgaaaagcaaagactttttaatgtgactcatagcacttgactattaggtctgactatgaagagtgagccttgaagccccctatc

SEQ ID NO: 41988 - DNA, 388 bp, Gossypium hirsutum
  Clone ID: LIB3196-029-P1-M1-G11
attccaaagagagcatctcaccttgtcactgaaaatgtagagtttctgcacctgaattaaggcaaggggaaaaaataaaggtgcaagccctgagaccgtccatcatctgcacatcatgctgtgatgtggtgaaaatcctggggagatcctcaaccttcactgctcaccaccaaaccccgactcatgctctcactagctcataatgcagtcacactttctaataagaagaactaccaccagctcatcaatggaaaattgtgctgaataattgccgcgtgggaataaaaatacctctcccaatagcatcttctctcatgaaacaaagagaagcccttcccttaactattatcctttaggtgagacaacatagaccccacttgcatgggaa

SEQ ID NO: 41989 - DNA, 365 bp, Gossypium hirsutum
  Clone ID: LIB3196-029-P1-M1-G12
ctttaagctttctttccaaccttacttgtattactaagtgaaagaagaagattatgagtgcaggggtgtctctcctcactatgctattccttgagttgtttatgcttttcgcctgcttccatgaatgtttatccagccctgtggatcaacttaaaagttatatcttaacacaaagaggagctgatgctttcttacctgaaattactccgagtgcagctcctcagccatttcttcctcttcttgcaccttctccgttgtcaccatttacaaatagtactattccgaaattatcaagactttgtatgttaaacttcactgcttctcaaagcttaatgaccatgacctcaactgattgttgggctgca

SEQ ID NO: 41990 - DNA, 330 bp, Gossypium hirsutum
  Clone ID: LIB3196-029-P1-M1-G3
ctttgatggtgcatcaaatgcattgtggcatgggattggagcagtcttagtatcaccagaagggaaccattatccgttcactgccaggctgaatttcttctgtaccaataacatagcgaaatatgaggcctgtatcatgggactttgtgcagctattgaacgaaacatcgaaatcttaaaagtgtacggggactcagcattagtgatataccaaatcctgtgagattggcaagtgaaggattcaaaattagtcaaatacagcgatctagtggcaagactgattaaagaattcaaagaaataacttttaattactttccacgagaagaaaa

SEQ ID NO: 41991 - DNA, 358 bp, Gossypium hirsutum
  Clone ID: LIB3196-029-P1-M1-G4
atcctggacctgcctcccctccccgggtacctccgcgggagcccctgtcccctcaaggctcgaggacacccagccccctggtaccacctggtagctccccactgccaccccgactctcaagctcacctgggaagaccatgcccaccacccagagctttgcctcagaccccaagtacgccaccccccaggtgatccaggcgcctggcccgcgggccggtccctgcatcctgcccattgtccgggatggcaagaaggtcagcagcacccactattatttgctgcctgagcggccgtcctacctggagcgctaccagcgcttcctgcgtgaggcccagagccccgaggagccggcccccct

SEQ ID NO: 41992 - DNA, 123 bp, Gossypium hirsutum
  Clone ID: LIB3196-029-P1-M1-G5
attcccagctggggttccggggccgacctgtggggctcagacagcgacaccagtttgagaagccgcgcatggatgatgggctgctggaggtggtgggcgtgacgggcgtcgtgcacatgggcc

SEQ ID NO: 41993 - DNA, 364 bp, Gossypium hirsutum
  unsure (1)..(364): unsure at all n locations
  Clone ID: LIB3196-029-P1-M1-G6
atgagacatgcagctgatctgtgaggcataccacctgatgaaagacgtgctgggcatggcgcaggacgagatggcccaggcctttgaggattggaataagacagagctagactcattcctgattgaaatcacagccaatatactcaagttccaagacaccgatggcaaacacctgctgncaaagatcagggacagcgcggtgcagaagggcacggngaagtggaccgacatcttcgccctggagtacggcgtacccgtcaccctcattggagaagctgtctttgctcggtgcttatcatctctgaaggatgagagaattcaagctagcanaaagctgaagggtccccagaagttccagtttgat

SEQ ID NO: 41994 - DNA, 358 bp, Gossypium hirsutum
  Clone ID: LIB3196-029-P1-M1-G8
cccacgcgtccgcaggcattaacataggctaggacacaactgtgtgtccctacttcgaatgcccacactgcctgagacatgggctatttcttgatcttgtgagtcacacggcctggccacacggccgtgtgaccactacagtttgaaaacttttatatttttttgaaaaattctataagtttacgatttagtcctgacttgtttctgatgcatatttaggggcttgcgggatcgtttaagtgacaatatgtatgttttgaattggttttagtgtatttattgatatgatttgaaatgtttgaaatttatgtacgtttgatttgaaaactcctataatgctctcttaccctggtttaac

SEQ ID NO: 41995 - DNA, 362 bp, Gossypium hirsutum
  Clone ID: LIB3196-029-P1-M1-G9
tgttggtttcatttgatattcttaaaaaaaaaaaaactatttgtgcttttctgttgtttttagactgtttatgtcgtaatttgctatagtttacttcttttgctttcattagtaccctttctggtaagtttatatatgttgagcaagctttgtgtagaatataagttttatttcgaaaagaaattctctatgcaataatgtagagaggagtggttaaaaattgccatgaaattccagttacactgaacgtgaatgagggagttgggattaaaaagacgtgaaattattaaatatagggtgcaattcaagtcataaaaggttttgatttgaaggaattcaatccaattccatgttttcacttc

SEQ ID NO: 41996 - DNA, 351 bp, Gossypium hirsutum
  Clone ID: LIB3196-029-P1-M1-H11
actattgggaaagaaagcacgcctgcaccacccccccaatatccggggctcgacccacgcttccggatggacatcccgaggggaggtgcggtggcattaaagaaacttttcgtgaaccttcaacaaaaatgctgacgggggcagaagcctgtatggaacaaagtgcccattgtccaaccacggcgtaggcgataggtccctcgacttcaccaagttgagtggatcacagcacgtaccctgattactatttgcgtattaaaagcactgtgcacaacactgtgctgaaagagaaagaattgcacacgttcaaaaacttgttttccaaagggcctttagttccattttaatggg

SEQ ID NO: 41997 - DNA, 313 bp, Gossypium hirsutum
  unsure (1)..(313): unsure at all n locations
  Clone ID: LIB3196-029-P1-M1-H12
atgcaaagccataaggggcaggggccaccccacggcatctcctcggaagtacaggcctcaggaggaggtggaactgacggggggtggcactccccggagactgtcctcacgaggggactgggttcgctctcagctctgcagctgtctacagtggggggaaggttggggggtgtctnnnngcatnnttccctaaccaccccctgtgggtctcagggtggccgggtgcgaccttttctttctcaccaagctatcctagtgctatagcagttggtggttacctcccctttcactcaccatataggggtttgttgga

SEQ ID NO: 41998 - DNA, 363 bp, Gossypium hirsutum
  Clone ID: LIB3196-029-P1-M1-H2
ggttggagctcttttgcaaacatatcatgtgatgcatattatgagctaatatatgagttttacaccacatttagcttcaatgttagtgcattacagactattgaaacgcaaagcattatctgttttcgtctgcttggaaaggactttcaaatgtcggtatctaattttaatattgccatgggtttcgttgaccctgacaatattcaatccgactcctatcatactgctttgttagacattctgagcgactttaatgctcaagatgcctaccgtgtgttaaccaattctaatcaactgtataatccaaaaaccacaaaagacttattggtgcatgaacctaccttaagatatattcaccgattt

SEQ ID NO: 41999 - DNA, 422 bp, Gossypium hirsutum
  Clone ID: LIB3196-029-P1-M1-H3
acaacaaggtacgcaaaaacacgcggctgccgccccggaataaccgggatctgctctcccgccccagcatcagcatcactacctcatgctacccgctcccctccatctgcgtgcgggaccccgtgagcgactggtttgagagcctagcgcagtgcctgcactggaacgtccggaagaagcaagcccacttcgaggaggaggaggagggggagggctaggtcgagccctgtccaggccggaatccttccgctggcttcatttctgccctccaagctccctctggggacagaccaatctgtgtgtgtctgtgaccacctctgtctcaatggcgcggccacttccttcctgtagctgggtcagagcctgggtctgcccttttgtccagaacagcaggtttttttaacattttaagtcagactttt

SEQ ID NO: 42000 - DNA, 286 bp, Gossypium hirsutum
  Clone ID: LIB3196-029-P1-M1-H5
atgcctgcatgtcttgcgggtggagaagctgaagccagtgcccgtggcaccagagaaccagggcgatttcttctcggtggactactacctagtgctgcacaatggcccataagaggtttcccatttgcacctgtggataggtgagcagtgatcccgacatgagcagggggcctgtgccgtgctggctgtgcacctcaacacgcttgtgtgagagcgcactgtgcagcaccgtgaggcgcaggccaatgagtccgacctcttcatgagctactttccacaaggcctt

SEQ ID NO: 42001 - DNA, 315 bp, Gossypium hirsutum
  Clone ID: LIB3196-029-P1-M1-H6
atcctactacggctatgatgatggctatgcagtaagaggaagaggaggaggaaggggagggctaggtgctccaccaccaccacggtggaggggggcaccacctacaaaaagtacagctgtctatttacagatgtaggcacctcttgaaaccaccaatagtctatattgttaaccaatgaacatcctgctcaacaacagataatccttattctccggatatcttcattcaatcttagagactatgtaatcatcaagacaaagccaaatacctacaacctacctagtttcaatcttcgccagaccaccaaccaacat

SEQ ID NO: 42002 - DNA, 379 bp, Gossypium hirsutum
  Clone ID: LIB3196-029-P1-M1-H8
attttatagcttggacctttcttcactcaagtgcactaataaattatgtatgttgcttgaacaactagcattcctttggaccattggactatgaaagtctccaacaagaacttgctttaaaagagacagtatggaaaaaagtgtcacctgagtcaaatgaggacatctctacaactgtagtatatagaatggaaagtctgggagagaaaagctaaagaaatgggttctagtttcagaatgtttcttcatttaatctttcaaacacctttagctttttttttgcaagttataaatatttatttgaggtattttttgttctcaatcttgggtgctggagccataaagcttttttttttttccttttaatctttgtataaag

SEQ ID NO: 42003 - DNA, 182 bp, Gossypium hirsutum
  Clone ID: LIB3196-029-P1-M1-H9
aaggaccaaattaaataaattgcaaaacatggattctagaagcaatttgcatgaaattgctttaaattagtatttaaaaggtcctaaagagcaacttgcccaatttttaagtttttggacaaaaatagcatgcatagaaaactttggaagtttagtaaggagaggcattttggtcatttgat

SEQ ID NO: 42004 - DNA, 214 bp, Gossypium hirsutum
  Clone ID: LIB3196-030-P1-M1-A1
aggacgcgtgggtttagacacggtctaggacatgtgcgtgttatggccgggggagggacacatgcacattgacacagtcatgtgtgacaggcgggtgaaaacccatataggttcgtattgggaactaaattgatatgagtgtaggaaacacacatggccactatatgcttacgtcatgttggtggaacgagccattaacatgaccatgccataa

SEQ ID NO: 42005 - DNA, 355 bp, Gossypium hirsutum
  Clone ID: LIB3196-030-P1-M1-A11
cccacgcgtccggaaattcgtgttatggcatcagctctgtccaaggaaatgggaatgatggaagctcagttgaatcgctggaaggagactgctcacgaagccatttccttgcatgaagaagcccaagcactaaaagctttgttaagcgataagacaaatctacaaaagcgcttggcagaagagtgtgctgagcagattgcagaaatcaaatctctcaatgatatgattgagaaattgcagaaggaaaagttggaattgcagatcttcttggacatgtatggccaagaaggctatgatgatagagatgtgatggaaataagagaatctaaaaatagagctcattcgcaagctgaaa

SEQ ID NO: 42006 - DNA, 378 bp, Gossypium hirsutum
  Clone ID: LIB3196-030-P1-M1-A4
atgccagatgtgtggaatctttagctcagcattgagagaataaaatgtcactacctctcatcttatgaacaggataatataattctttaacagctataggttatctggctgaagtagacctaattttacatgacttgtggtgtaaaatgtcttgatgataatttttaaaacttaggcaacatttccaaatatgggaggaaaggacagatgtgtttacaagggagggtttcattacaacgtatttgctttattcacctccctgttttgtgttgcatctttccttgaatatcttactggcccagagttagcctttctcaattatgtttccagactgtggccgtgattctaaaggaaaatgtgtgctctttaatgggtaga

SEQ ID NO: 42007 - DNA, 385 bp, Gossypium hirsutum
  Clone ID: LIB3196-030-P1-M1-A8
atgctcagtaagaacactcagacttacgacctttaccatcagccaaagtgtgctggtcaccaacttgaaaccagcaaccatcaaggtctatgactactacctaccagatgaacaggcaacaattcagtattctgatccctgtgaatgaggacagaagctggaaagagactcaattagtcctctatgtcattactggagggtggaacattcttctgtcgcttgaagcagaactcattcaatcaaataatttaatttctctgactagtaaatgggtaacagatgaatatgtctgaacctcagctgtaatactttctagtacctttgcaaggagatgggataggaacaagcactcaaaggaggcactgtatgggcaaggtcacaaggg

SEQ ID NO: 42008 - DNA, 339 bp, Gossypium hirsutum
  Clone ID: LIB3196-030-P1-M1-B1
atcagggctggggctaccatgttctctcgcgcgggcgtagctgggctgtcggcctggaccttgcagcctcaatggattcaagttcgaaatatggcaactttgaaagatattaccaggagactaaagtccatcaaaaacatccagaaaattaccaagtctatgaaaatggtagcagcagcaaaatatgcccgagctgagagagagctgaaaccagctcgaatatatggattgggatctttggctttgtatgaaaaagctgatatcaaggttcctgaagacaagaagaaacacctccttattggtgtgtcctcagatcgaggactgtgtggtgctattcat

SEQ ID NO: 42009 - DNA, 368 bp, Gossypium hirsutum
  Clone ID: LIB3196-030-P1-M1-B11
atgctgtccccgctgttccgcctgaggcgagtgacgctggccgccaacgaggtatacgtcctgggtccctcgccctcagtctcgtctccggcgcggctgctcgccccgttttccctctgagctgacctgctccgagccgtgggccgcccatggcgggggccgctccgaccacggccttcgggcaggcggtgatcggccctccgggctcagggaagaccacgtactgtctgggcatgagtgagttcctgcgcgcgctgggccggcgcgtggccgtggtgaacctggacccggccaacgaggggctgccgtacgagtgtgccgtggacgtaggcgaactggtggggctgggcgacgtgatggacgcgctg

SEQ ID NO: 42010 - DNA, 354 bp, Gossypium hirsutum
  Clone ID: LIB3196-030-P1-M1-B12
cccacgcgtccgatcatttccaaccccatccaagcctgaacccagattcaatttcaaattaaaagccatcaaaattttacctaccggcgaattccatcgattctcagtatccttaagctccggttgaaatcagggtcaacggtttcaatttcctctcaacaaaaacacagcagttgatgccttttctcatatagatggtttatacaaccttaataaataggttttctatggcgttctccctagctacatttctagaaggtgtcaatctccaagataagttttttgtttgttaatgtttctataaatttagtgcagcttgtctttattgtttttattggtgaggcctacggttac

SEQ ID NO: 42011 - DNA, 434 bp, Gossypium hirsutum
  Clone ID: LIB3196-030-P1-M1-B5
cgacactatataacaagttggaacaaaaaagcacgctggtaccgggccgcaatatccgggatctgaatgaagggctcctgcagcattgggggcggtatcaggggcggatcaacccatatatccttcgaataggccggagggtactgccgcgcccccagcacactacagcggaacgcctgtctgcattctccttccgcttctgctaacaaggagactaccggctggggggcggatattgatgaagcttgaatagcacaagaaggtccagtagtgggtaatgtgaaggaaataatggtgactatgatgatgattatcatcatgatattcttgtttcgatgtctaggttcaagtcaatgattgaaccaaaaatgacggagtgatcacctactaaaaaaatatcctgtgatggcttgttgatcagaaaggctgaaatt

SEQ ID NO: 42012 - DNA, 324 bp, Gossypium hirsutum
  unsure (1)..(324): unsure at all n locations
  Clone ID: LIB3196-030-P1-M1-C11
atggcggcggcagggctgagccagcgacgccctccattcactctccgcgcccgctctccggctgtccgcccgttccgctgcccgccccgccaccatgacggaacaggccatctccttcgccaaggactttttggccggaggcatcgccgccgccatctccaagacggccgtggctccgatcgagcgggtcaagctactgctgcaggtccagcacgccagcaagcagatcgccgccgacaagcagtacaagggcatcgtggactgcatcgtccgtatccccaaggagcanggcgtgctgtcgttctggagaggcaacctggccaa

SEQ ID NO: 42013 - DNA, 380 bp, Gossypium hirsutum
  Clone ID: LIB3196-030-P1-M1-C2
atgggaagattccagggtcccaacagcttcagagttgcaaagcctgtagaggtgacgtgtgtttttcccctggctgctttggaaattatggaaaaaaatcaaataccaaggaagaaaaatctataatgaaattagatgtggatttctttttatgtattcagcttggggcttataatacttccagtacccaaagctctgcctgcttaggactctgcccagccaggaaggaaacctacaggaggaagaatggctgcagggtggctgacaacctggtcacagaactccgtgaccttccaggaagtggcagtggacttttcccaggaggagtgggcattgctggaccctgctcaaaaaaatctatacaaagatgtgatgctgga

SEQ ID NO: 42014 - DNA, 371 bp, Gossypium hirsutum
  Clone ID: LIB3196-030-P1-M1-C3
cccacgcgtccgattaaataactttttaaataaaaaagataaaaataaaattttaaaactaaaatattattagatttcttcttctctcactttgaacaaatagggtattaaaaagaaaagggaaatcgagggattatctattccctcttcgtttcctcctatgtaaaaatataatatccaaataagagtaatgtaaagctcaaatgctacaaaagggatgaattgatgattaaaaactttgtaataaagattgacaaataaaaattaatttaaaaattttaaagtgattcgactctaattgcctatatgtattaccttaactgtttacaattaaagatttttcaaatttactaatttgaaaaattttaaat

SEQ ID NO: 42015 - DNA, 373 bp, Gossypium hirsutum
  unsure (1)..(373): unsure at all n locations
  Clone ID: LIB3196-030-P1-M1-C5
atcggtatgaaggggacccagctcagttccggggcctctaagtctcctccagcagcagagcctggggggccgcaggagcaggctgggagggaagaagccttcaacatggactctgcctactcagaacaagctgcggtgctcctgcagaagagcaggccatcccagggaggcacctctgcctggggcaagtgttccctgccgaagtttaccatccccaaaggcagacttggcgtgacgaggataggagacttgtccctgcaggatatgaggaaggtaccttctctggccctcatagagctgaccgcgctctgtgacgtacttggcttggacctgaagaggagcaaggcggngaagtggaaagcggcagaaactc

SEQ ID NO: 42016 - DNA, 293 bp, Gossypium hirsutum
  Clone ID: LIB3196-030-P1-M1-C7
acactatagaacaagtgggaacgaaaaagcacgctggtgcccggccgcaatttccgggatcagcacatccaccaccatcaggagccacagcagctgccgcaggggcttcagtgccggctcagacaggctacctggggtcagacgctctggcttaagcagcgcatccgggtcccggtccaggggcatgggctgcctgggtcgcgcatgtggaagagctggctgtggcaaccctaacctgtatgggctgtagggctccaagaggatctccatcggagggggctaactcgtccata

SEQ ID NO: 42017 - DNA, 385 bp, Gossypium hirsutum
  Clone ID: LIB3196-030-P1-M1-D1
atgttaagtggaaaaatacacagtttggtaaaatagattccacatttatttgtgggttttttcccctcctttctttccacagcacttttgatatcaagcaagtggcttcctttttgagatattaaaaaaaaaaaaggaagaaaagtaaatgaagcccaactacctaaccctttcttatttgtatttgttttagtattgtgaagttgtgttaaatagtactagctagaaataccaatttctggttatcatttctcttccctgtggcacttgacattttaattgtcttaaactttttgaagtacatcttctggccccttgagtactgccagaggcaaaagatgtttgtttcttactcattccacttttgtctcctgggatcccttct

SEQ ID NO: 42018 - DNA, 371 bp, Gossypium hirsutum
  Clone ID: LIB3196-030-P1-M1-D10
atgcgaggccgggtctcacaccttccagaggatgtacggctgcgacctggggcccgacgggcgcctcctccgcgggtatagccagtacgcctacgacggcagggattacatcgccctgaacggggacctgcgttcctggacggcagcggacatggcggctcagaacacccagcggaagtgggaggcggcgggtgtggcggagcggttcagaacctacgtggagggccgatgtgtggagtggctccgcagatacctggagaacgggaaggagacgctgcagcgcgcggacccccccaagacacatgtgacccatcaccccgtctctgaccatgaggccaccctgagatgctgggccctgggcttctaccctg

SEQ ID NO: 42019 - DNA, 369 bp, Gossypium hirsutum
  Clone ID: LIB3196-030-P1-M1-D12
atgcacggcattatttttagtagttctgtttttctccaattctttgtctcattccctcctcccttcttttctccttgtcactcacagtagaaggaattcagactctgaggatgaggactcaggttctgccagaagcgccaccgtttttagtagagcacaaaaagcagagcgtaggctagatggcagctgccaaagaccttcactcttgctggaattagctaccaaacgggctgtaaaatcaccggactcccatgcagccaggagaagcagtagtgcttcggatgagcccaggtgcccctgtctgcatgagcctgcctgctgggggtctggcctcagacatccctctgcccgcttctgctgctccattaa

SEQ ID NO: 42020 - DNA, 385 bp, Gossypium hirsutum
  Clone ID: LIB3196-030-P1-M1-D3
atgatttccctctgtgggtaagtccacattcttgagtctgatgacctccacggccagcgaggcagcgtcctatgagttcaccactctgacgtgtattcctggggtcattgaatacaaaggcgccaacatccagctcctggaccttcctggaatcattgaaggcgcagcccaaggaaaaggccgtggccggcaggtgatcgctgtggcacgcacagctgatgtcgtcatcatgatgctggatgccaccaagggagaggtgcagaggtctctgctggagaaggagctggagtctgtgggcatccgcctcaacaagcacaagcctaacatctacttcaagcccaagaaaggcggtggcatctcctttaactcaacagtcacgctgacc

SEQ ID NO: 42021 - DNA, 358 bp, Gossypium hirsutum
  Clone ID: LIB3196-030-P1-M1-D6
cccacgcgtccgcaagtgtacaggtcaaatattaatatagttaaatttacaacgaaacactttggaagtattttcaaagatcgtacccaagggattgctaagttggtgaaaactattattaaattaattatctaaaaaattactagtctaatcaagttacaaattagtagtgcaaactctaaattaagatgaaaaaaaactaattaaactaaaactaaacctaagttaaactatcgaaacttcctattcctaatttcaacgatgtgagctacttagcctggaattgattgaattgttaattatcaactaagcaaataattacacttaattgagttatttaccatctttaactaagaac

SEQ ID NO: 42022 - DNA, 376 bp, Gossypium hirsutum
  Clone ID: LIB3196-030-P1-M1-D7
atgcctgtctttgacttccctcccgaattctacgagcatgccaaggctctgtgggaggacgaaggagtacgtgcctgctatgaacgctccaacgagtaccagctgattgactgtgcccagtacttcctggacaagatcgatgtgatcaagcaggctgactatgtgccgagcgaccaggacctgcttcgctgccgcgtcctgacttctggaatcttcgagaccaagttccaggtggacaaagtcaacttccacatgtttgacgtgggtggccagcgcgatgaacgccgcaagtggatccagtgcttcaatgatgtgactgccatcatcttcgtggtggccagcagcagctacaacatggtcattcgggaggacaacc

SEQ ID NO: 42023 - DNA, 315 bp, Gossypium hirsutum
  Clone ID: LIB3196-030-P1-M1-D9
taaacacgtgagttggacacactgagaacttgggccaccaaatcaacatgttaaagctaaccataccaattgctaaacctgacctgataataacccgaaacaattactaaacttcttgcctgctggacaggaaaaaactaaagcatacttaactaatgttcatgattgatattcttgatgctgtcttcaatacacaacatgagcaactagattatcctgtttgcgtgaggcataagacatataaggcagtatggacagagaaagccccgtataatctgcctagaacaaataaaaccatctagccaaggatctact

SEQ ID NO: 42024 - DNA, 383 bp, Gossypium hirsutum
  Clone ID: LIB3196-030-P1-M1-E1
atcaaaaacacagtaacagcagcagcggcagcctgactaacaccccagaacggggcagtgatgaggacattgaaccactgctgcaagatagcagcatttgggagctctcttcatttgaggagcctgggaatcagtgcactgagttgtaaactcggcagaaggtgggattctgcatacgccatctctgagagccatggagggagccacacccctggtgacttcatggtgctggatgggagatgctagcggcatccttcagggccaagtttgataaataccaccaccatcgttctgctcttcctcctcctgtttttttttttttttttttctcttacattttttttcctgtttatacattagaataagataagatttgaaatact

SEQ ID NO: 42025 - DNA, 349 bp, Gossypium hirsutum
  Clone ID: LIB3196-030-P1-M1-E11
atacttaaaatgatgtatagatcaaccaagctctctcttccaagactttctctgcttctctctccctcaacactcaatattctcaactcaactatcttttccttcttctacactaactacaggggcaaaaccctaaatttttgaaaattttcattctacattttaaattttttttaaaatttttaactaaactcttccaagttttttaaaaattctcattatgctcctaaaattttaaaaaaaaaaagtttagttaggcccccaacacttaccccccagatcccacactgtctaactacatcctactacactccacctatagatgaaccgaccaccataatctcaacct

SEQ ID NO: 42026 - DNA, 380 bp, Gossypium hirsutum
  Clone ID: LIB3196-030-P1-M1-E2
atgagaacttcaaattaaagattaaaaactgaacatttgtgattatcccttctgccctcctaagaacccactaaaactatagtaaagaagtaaaagagagaagagaatgaaaataaatagagaaagattatcagtgaatgaatgatttctacagttttctgggggacagaaagcagatagaggaatggtcattgaaacacagcagagcaagtcagtttcatctgttacttatttatacctcaaattgtactcacaccacaacagtggcttataaaatcacttatcattacaaattgcaatagaaagtgtcaagagtatgtctcataggataagtattattatgtgaaacatttattttgaggaggatgcagataaagaaa

SEQ ID NO: 42027 - DNA, 357 bp, Gossypium hirsutum
  Clone ID: LIB3196-030-P1-M1-E5
tatgcagtagtgaagaggagaggaagaaattgctccaatgttcctgttgtgggaaacttgtgcatcctgcttgtttagttccacctattacagatttagtccctgagaagtggtcatgttattcctgcaaggagaaaacagatgaatacatgcaagcaaggcgtgcatatatagaggaacttttaaagaggtatgaacaagctttgcagcgcaaatcaaaaattttggatataattcgctctttggatcttccaaacaatcccttggatgacattattgatcagcttggaagtcctgataaggttgcggaaatgacagggaggcgcggcatgcttgtaagggcttcaagtgggaaag

SEQ ID NO: 42028 - DNA, 356 bp, Gossypium hirsutum
  Clone ID: LIB3196-030-P1-M1-E6
gggaagcctatcacactggaggaagcagagccaataattagccgcctatcgtctctaatatacaaggcagaagatgctcattatgacattgcaactacgatagtgacgatgaaatctcatattcaagctcttgaagagcgagccaatgctgcaactgttcagagtacagtgtttggacaattggtagctgaggcatttcctaagagtcttcactgcctccttctcaagctttcggctgattggcttaaaaggccgccccttcaagaccttgcaaacgagcggagaaactctcctcgactcgtggacaacaatctctatcatttttgcatattttcagacaatgttctggctacctc

SEQ ID NO: 42029 - DNA, 356 bp, Gossypium hirsutum
  Clone ID: LIB3196-030-P1-M1-E8
atgatatttttatttattcatgagatgagtctgagcatgccgagcatttgagaattgtattgaaaactctgtgtgaaaagcaattatttgctaagtttagcaaatgtgaattttggcttcgggaagttggatttttgggacttgttgtattagtcgagggtatcagagttgatcctagcaaaatttcaactgctgttgaatggaaacctctgagaaatgtatttgaagttagaagatttctaggactagctggatattacagaagattcgctaaaggattctcgatgattgctacacctatggcaagattattgcaaaaagatgtgaaatttgagtggtctgagaaatgctagcaa

SEQ ID NO: 42030 - DNA, 370 bp, Gossypium hirsutum
  Clone ID: LIB3196-030-P1-M1-E9
atgccaaagccgttctctcagttctggcagcccctgctcaggggcctgcactcccagaacttcacgcaggccctattggagaggatgctctctgaactgccagccttggggatcagcgggatccggcctacctacatcctcagatggaccgttgaactgatcgtggccaacaccaagactggacggaatgctcgccgattttctgcaggccagtgggaagcaagaaggggctggaggctgttcaactgctccgcctcccttgactggccccggatggttgagtcctgcttgggctcaccttgctgggccagcccccaactccttcggatcatcttcaaagccatggggcagggcctgccagacgaggagc

SEQ ID NO: 42031 - DNA, 296 bp, Gossypium hirsutum
  unsure (1)..(296): unsure at all n locations
  Clone ID: LIB3196-030-P1-M1-F1
ctcgaactggtctttcctcgaaataagctcgaccaaggactcttccacgatcatggcttctgagattattggacccctcaacatttcaattcatgtttgacccatggcttcaacccatccatgaaatagaagaatgtctcattctcactaaaatccataatttggagtactaaactccttcacctacactcgaattgtgccttattgcgagaatcgatgtaacttacattaagcctnctccttggcatattgagggtaaaaattgctcattgaactctttatagaaatactcaaaa

SEQ ID NO: 42032 - DNA, 372 bp, Gossypium hirsutum
  Clone ID: LIB3196-030-P1-M1-F12
atgtttctttaacgatatgaataagtatataaactattgcaaccttaaacgagtcatacacgcatgtcgagaaccacagagtgttaataatggtcacctttcccaacttatccagtgctcactaggaatggcagctctgttttgatcggttaaaaacatgtcaccttacagtaacgactttccacaagcccaaatcatatggctgagctggcttctcaattcctaccctaattactcctcatgcttcttagagcttctacatttttgggagcatcatttcattgatcgctgactttgactgtatagctcttggcaattatactgtatactctgccaagagtggaatgtctgacgtcagtgcctacggattcc

SEQ ID NO: 42033 - DNA, 332 bp, Gossypium hirsutum
  Clone ID: LIB3196-030-P1-M1-F8
atgggcttcctggtcttcatcggacagtgaaatttgtttgggtgtccaaacaaaatatgaaagagctgtaatacttcctgtagtgtatttcaaaggattgtgtcctcctcttccttccctgtggtcaatctccacctgtctacccttccgtgacaatggttcaatggaagagactctgccggcagcattacttgtgggccctgggctgctatatgctgctggccattgtggctctgaaactttctttaaggttgaagtgtgactctgaccacttgggtctggagtccagggaatttcaaagccagtactgtaggaatatcttgtttaattcc

SEQ ID NO: 42034 - DNA, 370 bp, Gossypium hirsutum
  Clone ID: LIB3196-030-P1-M1-G1
atgagaaatactcttaaggtaggatcaagccacatagaaaacatttaataaaaagtaacaaattttgccacataaatgctgctagtcaagaagatgtatgcaaagtaagttgcatatatttttaaaaatcagaattgtcaaatctccagacatagatagagctagaaaggtcaacagcaggtggaacaggtgactgtccagaaggcagcaactgtttggcatcactgtgctgttatgtgggacctgtgtcgggttgggtaacagatcatgctcactgactgtggtggccaggagcttcagaggggcctgtgaatcacggatgggggatgagggtagagacgagacttttcagtttaaagagtgttcccct

SEQ ID NO: 42035 - DNA, 352 bp, Gossypium hirsutum
  Clone ID: LIB3196-030-P1-M1-G10
tttcactgatctaaacatcctcctcaacctagtttccatcggcactctctttgtgttctacatggtatccaatgctgtcatctacaggcgatatgttatggttgggacaacaaagccatggcctaccttatccttcctatgcttattctccctcacatccaccattttcaccctcgtgtggcattttacgccaccaggcaagcctaagcccttcttgcttggtgcttgtgttgtgattgccatttccatattacaagttttccattgtatggtaccacaagcaaggaagcctgcattttggggtgtccctttcatgccttggttaccgtccatatccatcttcttgaatgtt

SEQ ID NO: 42036 - DNA, 368 bp, Gossypium hirsutum
  Clone ID: LIB3196-030-P1-M1-G11
atcctttttaaaaaatagatttggtactgtgagatattgctaatatgtccttatggggatgggtgccacaaatagaaaatatgaccagatcagggatttgaatgcacttttgctcatggtgaatatagatgaacagagaggaaaatgtatttaaaagaaatacaagaaaagaaaatgtgaaagttttacaagtagagggatggaatgtaatgtttaatgttgatgtcatggagtgacaaaatggctttgctggcactcaaagctcctcacttagctatgttctgagacttttaagagttataaggtataactataaaactaattttttttacacactaaatgggtatttgttcagaatagtgaagtta

SEQ ID NO: 42037 - DNA, 377 bp, Gossypium hirsutum
  Clone ID: LIB3196-030-P1-M1-G4
atgttcatactctgtcctgactcctttgtaacctgggaggcagtctgcttgggcccacgtctctgaagctgctcagtaaatcagctcaacggaatccagggagctctgttcggttcctgagttatgtgcccagtcacagtgctgcggctttaggaggagctcctaagaggaccgtctgcggctcagttacaccctcctgacgtgagccccctccctggctgggggctcactccctccgctaaagcccttgttcgtcctctgccagggcccaagaggtgcagcttcacggaggccaggggcgagaggaggcccagctctccccggctgcccatgtctgacgcactgcctcggaagcacctgtggccactgggcggctt

SEQ ID NO: 42038 - DNA, 378 bp, Gossypium hirsutum
  Clone ID: LIB3196-030-P1-M1-G6
atcgtgaagcgttccatatttttgatgttagaattgatcatccttcagcctgtgagtgggaactgtgttctttcctctgaggggttgttcatgaggacctccgcctgctcttggagacccacctgccatccaaaaagaagaaagtactcttgggagttggggatcccaagattggtgctgcaatacaggaggaattagggtacaactgccagactggaggcgtcatagctgagatcctgcgaggagttcgtctgcacttccacaatctggtgaagggtctgactgatctgtcagcttgtaaagcacagctggggctgggacacagctattcccgtgccaaagttaagtttaatgtgaaccgagtggacaatatgatca

SEQ ID NO: 42039 - DNA, 356 bp, Gossypium hirsutum
  Clone ID: LIB3196-030-P1-M1-G7
gagaaatcagcttgaaaataaaaagtgttgtttagatcaaaagaagagattttaaacaatggcgtctaatgttaagccagtgttgggttacgccatattttacgttaaggacgtagcgaaatccgttgacttctatgcaaaagcctttggttataatgttcgtcgcttggacgagtctcacagatggggagagctggagagtgggcagaccaccattgcctttaccccaaagcaccaacacgagaccgatgaactaaccggtgaagtccaggttccaaaatctgatgtccaccgacccccactggaactctgctttatttactacgacgttgacgctgcattcacgcgggcagtgg

SEQ ID NO: 42040 - DNA, 355 bp, Gossypium hirsutum
  Clone ID: LIB3196-030-P1-M1-G8
aagaacaacaaagaatagcattaaaaaacttaaaaacgaatctgaatctcatttttttttcagatttcagatacttgataggcttgtctacatcagggtctaacgaatccatatctataggtctaaaaatctgcaactgaaagataaccaggatgcccaaagtcaaggatattattagattgagtagaggttatttttagaattgggaatgtatacatattttcgagctttttaaagcttcatttatattttcgatgattcatttatactccaatttctaatactctgtgagctcctttttgtttatttttccgaaataatttatgggtttgcttacgtaagctctctgcaagta

SEQ ID NO: 42041 - DNA, 173 bp, Gossypium hirsutum
  Clone ID: LIB3196-030-P1-M1-H2
cttgacacggagctgaggcggctctttcgcgagcgctatctgctggaccccaagggtgtggtgggggtgcgctacgaggcgggcaccatccagatttggctgggggggaacacgttacaaaaaggcgcatgtgacccggccatctgtgatacacactactacttctagagggg

SEQ ID NO: 42042 - DNA, 382 bp, Gossypium hirsutum
  Clone ID: LIB3196-030-P1-M1-H3
atgccataatagtagagttagaactgaagaaaaaagttacacaggaggtgacaaaaaaggttgaaagagaggttatcacctgaggccttcttaaagggagagaggaagagcagatctcaggaggaaatgtggcagaaatagaaactctggacagtgtaaagcatggctgttaatgaaaacagatttcagatttaaaaatcaaaaccttttctaattttctaagagtaaatgaatatttcaagaaagccttgctgcttttacacaggggaccaaatttttagttttgcgttagtgtatctttaatatcaaagcttaatctttagaaagacacaaatctcttttatagccaatttgatcacatgcagaattttctttcataaag

SEQ ID NO: 42043 - DNA, 362 bp, Gossypium hirsutum
  Clone ID: LIB3196-030-P1-M1-H4
cccacgcgtccgataggccattaatgttggctaatattgattattattaaatgaatttgatgcaaatttctcatggatgtggttgttttagttatatgtgttatgcttggattggttttggttgatgttgtgtaggttggtgcaagtgagggtggtaaaaaggcttggtaaaaagccttgtttttgtccacatgggcagacacacgggcatgtgtctagaccaagtgtgacacatgacttgccctatgggcgtgtggtaaggtcgtgtgtcccctatacttaaagttggcaaatcagaatgcccagtagtaaccacacgggcagagacactgccgtgtgtcccaaccatgtagaggacacga

SEQ ID NO: 42044 - DNA, 355 bp, Gossypium hirsutum
  Clone ID: LIB3196-030-P1-M1-H5
ctggtaatttccaagatagatctttattctggatatcatcagcttaaggttaaggaagttgatgttcataagacggcctttaggactcgttatgggcattacgagtttctagtcatgccctttggtttgacaaatgctctggctacattcatagatctgatgaaccagtttttctagccgtatttggattacttcatcttagtcttcattaacgacatcctggtatactctaagaccgaagatgatcacgatgagcattttaaagtagttcttcaaatgcttcgagagaaaaagctctatgctaagttgagaaagtgtgaattttggttaagagaagtaacatttctggggcatg

SEQ ID NO: 42045 - DNA, 318 bp, Gossypium hirsutum
  Clone ID: LIB3196-030-P1-M1-H7
acaaaaaagcacgctggtacccctccccaatttccgggatccaccatacaccgagtgcgcaccggggagcgggaacagatgatgactctaaacaacatgtacggctgcttaatacgacatggggcggttactgcagcagaacatcaagggtttggaaaccaatgggacccttttgcacgagcatcgtaccaagaacctgacacataacctgaatgcttggcacttactcttcatctgcaacccaaactggaatatgctctggcatacagaggaacggttgctatttttatacaaacgcatatgcttgcaggacctaat

SEQ ID NO: 42046 - DNA, 373 bp, Gossypium hirsutum
  Clone ID: LIB3196-030-P1-M1-H8
atcaaatgtagtttggttcgcacgtgtgcgccttccctcctccccgcccgcagggtccacggccaccatggcgtattaggggcagcagtgcctgcggcagcattggcctttgcagcggcggcagcagcaccaggctctgcagcggcaccccccccagcggcttaagccatggcgcttctcacggcattcagcagcagcgttgctgtaaccgacaaagacatcttcgaattaagcacattcctcgattccagcaaagcaccgcaacatgaccgaaatgagcttcctgagcagcgaggtgttggtgggggacttgatgtcccccttcgaccagtcgggtttgggggctgaagaaagcctaagtcttttagatgac

SEQ ID NO: 42047 - DNA, 354 bp, Gossypium hirsutum
  Clone ID: LIB3196-030-P1-M1-H9
cgaacatgtggtcaaggcatacgttcttatggtagagacacacgtccatatgtgcaacccgctgtcaattttcctatcaggagtcacacaacagtgtgaccagcccgttgaccaattttacccaatttctaaatggcacacgaccatgtgaaccgcctatttgccagcccgtgtggtccaaaaatctccccgaaactgctgcaaatcatgaaaattcaacacaaaattacccctaattacaaatgtacaagaacacacttgagagatgacaccatgcactaacaatcgattgatttccttatactctaccgtcctataacccaattgcacaatcgtactaaatccttaagaatt

SEQ ID NO: 42048 - DNA, 353 bp, Gossypium hirsutum
  Clone ID: LIB3196-031-P1-M1-A11
aaaaaaaataaatggagggactaaaagaatttttcaaaaagtcagaagactaaataagttgaaatcgtgttattttatattgataacaatactcatactaataaaattaaaattaatccacaagctaatattataaatgttaaagaaaaggaaaaataaatcattgcaattcttgttaaaaagaaaagaagatcgtgtggtgaagaaggtggcacgtggtctaggagataggtaaggatgtgacttatgagggggaccgccgattttagaaacgcaggcgcggtggcgggttttttattaaaataatacaaaaaaattaaaaaatatcaaaataagattttttttatttattt

SEQ ID NO: 42049 - DNA, 376 bp, Gossypium hirsutum
  Clone ID: LIB3196-031-P1-M1-A3
aaaaaggccaaaaccccaccactctccccgcctctctctctcccccctcccttgaacagaggctaaactcttgggggggataaagagataagagagaatccaagcaacacacatacacaaaacccttagctgccaccaaagcctcttttgaagatatagtttttaagggagcattcattctgaggggaatgttgtctggaccggggacacttgtgtttctaatccattttccctgcaatattgttctggccatggggatctttatattgcttatttttgtaatggattaaggttgtactagtgtcgtcggaccaggcttcattccccccaatcattgctcccatatgcaactcccatggactgcagcatgtaaaaa

SEQ ID NO: 42050 - DNA, 377 bp, Gossypium hirsutum
  Clone ID: LIB3196-031-P1-M1-A4
atgaaagaggcacgttcctggtgcacaggtggctctgcagcataatttaggccttggaggagctgtggttgtcacactctacaagatgggttttccggaagccgccagttcatttagaactcatcaaattgaagcgggtccaaccaactctgcaagtgatggatttaaggcaaatcttgtctttaaggagattgagaagaaacttgatgaggaaggggaacagtttgtgaagaaaattgtgggtatttgtgccttcaaggtgaaagatggccctgggggtaaagaggccacctgggtggtggatgtgaagaatggcaaatgatcagttcttcctaactcagataagaaagctgactgcacaatcacaatggctgact

SEQ ID NO: 42051 - DNA, 212 bp, Gossypium hirsutum
  Clone ID: LIB3196-031-P1-M1-B1
taaataaatgaattgaggtagtgttcacaagtatacatgttgagttgtaatacagttacaacaaagtaggatcgtactcacaagaggcgagtactaaattaatgttaactaaatgcaaatagaattaattagtaatctaaataaagtatattacgattgaacataaaaaagagatttttaggttttttatatttaaaaaacaaatatatact

SEQ ID NO: 42052 - DNA, 372 bp, Gossypium hirsutum
  Clone ID: LIB3196-031-P1-M1-B12
gcaatcttaccattgaagttaccaaaattatcaatacaaacaatcacacgagcattcgcacgctcgcaagttctcgagatgctggcttttcagcatttcgacttttcagcttttaccgatctagtctactagtgggtgtcgtttacacacctgatttgcgacaactgctaccgaaatctccacgatatcctacaatcggttgctagacatatcagattcaaagtataatggcaaacatcataaacttacttaccataatcggccatcaatacatatggcccttgagatcctacctttgccaaaactagtgactagatctcaatctagtcgttccacttgtccaagccttcgatcagcagcctctagatacac

SEQ ID NO: 42053 - DNA, 298 bp, Gossypium hirsutum
  Clone ID: LIB3196-031-P1-M1-B2
aaatgatttcctattgtaaaatattttacaaaacacgggaaaaggagttcttgtttgaggaaaatgtcttaccgttttgaattcggtaagacattttccggaaaatgacccattgttgttcgctttccccttcttcttgagttttccattctccttacttttaccgtttcgaaccctacattacactccaagccatggcggcgtccttcccagagaaatctctgtttctacctttgattttccctacggacccaatctgttagaacaagctgtcctcaaagctacgccaggatttcat

SEQ ID NO: 42054 - DNA, 374 bp, Gossypium hirsutum
  Clone ID: LIB3196-031-P1-M1-B5
tcgattccaagcactattttagccatagttttaaccacgaaatgaaaagtacaaaagcaataaaaagaacattgagattgtttacgtagttcaatctcagcctacatctggctttgctcaaagtaacaatttactatctttctcacaatacaaccaatgatttaagtcctaacactggtctaacactcaccaattcaacaacctcaccattgtacaaagactagatcactctccctctaagcttccccctcgaaagtttaactttgtaactcaagagactctcttagttgcttacagaaataatgcacacatttacactcctaacttaaataaattcatactctatcaaactcacaaaacattctcttaccctt

SEQ ID NO: 42055 - DNA, 385 bp, Gossypium hirsutum
  Clone ID: LIB3196-031-P1-M1-B7
ggtgcatatcagaaaccttagtttttgcaagttttgtcgttgaaaatggtggctgtcaacgccacacggtaggcacacgggcgtgtaactaggccttgtgtgccatacgaacatgtggtaggccgtgtgaacggttgtgtaacttactgtttattgaattaagaccacacggatgtgtgtttaggctgtgtgtgaccattttagtgcatggtctacatggccagggacatgggcgtgtgcccagaccgtgtaactcactgtttcaggtgtgaaaaccaggcccaggccgtgtggcaggatgttggatccgaaaaaatttttttgaggctgagaagggtgctaaactctgatattggtttcctttatttaggaatgactgaatttg

SEQ ID NO: 42056 - DNA, 346 bp, Gossypium hirsutum
  Clone ID: LIB3196-031-P1-M1-B8
atggagtgccctcgacaggcagggagggctaagctgtgcatccctccgctcgcgttgcagggagatggctcagcgacttctcctaaggaggttcctggcctccgtcatctccaggaatccttctcagggtcggtggccacccctcacttccagagccctgcagaccccacaatgcagtcctggtggcctgactgtaacactcaacccagcccggacaatatacaccaccaggatctccttgacgacctttaatatccaggacggacctgactttcaagaccgagtggtcaacagtgagacgccagtggttgtggatttccacgcacagtggtgtgggccctgcaag

SEQ ID NO: 42057 - DNA, 358 bp, Gossypium hirsutum
  Clone ID: LIB3196-031-P1-M1-C10
atgcggagagcggaccccagagagccctgagcagccccaccgccgccgccggcctagttaccatcacaccccgggaggagccgcagctgccgcagccggccccagtcaccatcaccgcaaccatgagcagcgaggccgagacccagcagccgcccgccgccccccccgccgcccccgccctcagcgccgccgacaccaagcccggcactacgggcagcggcgcagggagcggtggcccgggcggcctcacatcggcggcgcctgccggcggggacaagaaggtcatcgcaacgaaggttttgggaacagtaaaatggttcaatgtaaggaacggatatggtttcatcaacaggaatga

SEQ ID NO: 42058 - DNA, 177 bp, Gossypium hirsutum
  Clone ID: LIB3196-031-P1-M1-C2
cccacgcgtccgaaagcgtattcaagagtcgccaagtctctactttcttaaagaggctaatgagcataatggggatgagtgagcaatgggtcgcaacttggattaaacaaaagggagatagtaaatgtatcccttgaaaaattttgaggggtttgatcttggcacattcggatacaa

SEQ ID NO: 42059 - DNA, 373 bp, Gossypium hirsutum
  Clone ID: LIB3196-031-P1-M1-C3
cggacgcgtgggcttgcacacccatgcaagctaaattagctcaattgcatctcactgagctttgtttagctcgtttccagctcaatgggatcgttttgctcaatttgagtttattttaattcttttgatttcattttctgaaataaattgaataagttaatttatttatttatttaattcagctcaaataagtgttagtaaattaatatgtttaaatctgaacatctttaataatttttttaatttaattgattgtgttttatttattacatctatttaatatgctgaatttattaatgttttttattagtttcagccgaattaaagagtagtattaaatgtgtcttaagttctttaaaagtgacgaatttat

SEQ ID NO: 42060 - DNA, 390 bp, Gossypium hirsutum
  Clone ID: LIB3196-031-P1-M1-C4
atagaaaatgaacttattagcatatcactcaagtataactattaacgtgtttctttctaatcattttagactctatgcttcggtttggggttttcttttaaaagattatgatcaagctgtatgtagtgtgtgttctcttttccacttaaactttataatacgctttgagtaactgcatgtttctttgtaaacatttttgttggcagcaaaatattccattaagtgaatatctcataatttacttaactgtgatgccatttagagcaaaggaattttgaatggccagatgtgatttttgtctctttgttccctaattagatacgggcagctgtatgttctcttcttgaggcatcattctcggacctccaacagcacaggagcggaggtggt

SEQ ID NO: 42061 - DNA, 375 bp, Gossypium hirsutum
  Clone ID: LIB3196-031-P1-M1-C6
ggaaatatgaaaaaaaaagcctccatatttccctatgcttccaacgtgcaggagaaggatgaaaagagaaactttcatctttttacaattttgtccttttccataacattttaccttttcaacccaaaaccttaagaatttccatagcaattaaagagagaaagtgatgctgagaccttaaagagcttatgtatcatcttagaatcaagatatttgaagttggaagtgagagaaagttaagagaagtgtgagaaaccaaagttacaaggtaagaccttaagtgttctctcctggattttatgcttaatagaagtagaaacatgaaaaagcaatttttagtgtagattttaattaagttcatcttttttttatgta

SEQ ID NO: 42062 - DNA, 344 bp, Gossypium hirsutum
  Clone ID: LIB3196-031-P1-M1-C8
cggacgcgtggggctgcaaatggggattctaatttcagttgatttggtgcttcatagacctgtccatgggccgggccgggccagaattttcagcccgtttactaggcccgggcccggcccgaaatatgggcctgagattttgcccaggcccggcccgaagaaaaaatatggggcccgagcccggcccggcccgtttttaattaaaattaaaattaaaattatttttttaataaaattaaaactaattgttattaaaattaattggtaagtaaattatcaaattattaattgttaattggattaattggtggaataaaatctaacatttgattaggtaatttatc

SEQ ID NO: 42063 - DNA, 356 bp, Gossypium hirsutum
  Clone ID: LIB3196-031-P1-M1-D1
tgtatatttatttatgtacaacttactaagctttaagcttactccctctccttttctgttttcttatagtgctgcctatctagctcaaagaccaacggaagttagagatatcgattacactatcaatcaaagtattcggtatagtttgatttatatttttaaatatggcatgtatagggaactagacttgcgttttgtgtattattaatttggccaaatgtgttggattgagataaatactcattttttatgaagccttgaatgatggcaaatattgattttgatttatatgcaaatgaagttactctcatgaatgagtaattgcttaatcgatatatagactattggggctgatt

SEQ ID NO: 42064 - DNA, 330 bp, Gossypium hirsutum
  Clone ID: LIB3196-031-P1-M1-D10
atggcggccgcggcggcggcagcaacaacgggggctgcgggccgtcggggctccgggccggggcggcggcgccatcttgtgcccggggccggtggggaggccggggagggggccccggggggcgcaggggactacgggaacggcctggagtctgaggaactggagcctgaggagctgctgctggagcccgagccggagcccgagcccgaagaggagccgccccggccccgcgcccccccgggagctccgggccctgggcctggttcgggagcccccggcagccaagaggaggaggaggagccgggactggtcgagggtgacccgggggac

SEQ ID NO: 42065 - DNA, 387 bp, Gossypium hirsutum
  unsure (1)..(387): unsure at all n locations
  Clone ID: LIB3196-031-P1-M1-D12
ataattcctccatgcccaggaggaggtgaagcgaatccaaagcatcccgctggtcatcggacaatttctggaggctgtggatcagaatacagctattgttggctctaccacaggctccaactattatgtgcgcatcctgagcaccatcgatcgggagctgctcaagcccaaccctcagtggccctccacaaacacagcaatgcactggtggacgtactgccccccgaagccgacagcagcatcatgatgctcacctcagaccagaagccagatgtgatgtacgcggacattggaggtatggacattcagaanccagaggtgcgggaggctgtggagctcccactcacgcatttcgagctctacaagcagatcggcatcgatcccccc

SEQ ID NO: 42066 - DNA, 398 bp, Gossypium hirsutum
  Clone ID: LIB3196-031-P1-M1-D8
atattttaaattatattcgtaccaggagttcacgtgaaagcgtcagccccgcttggcgtttttgtgcaaagttttctcttctttcctgaggagagagaaaaggtcctgacggcggtgccatgactcacatctctccgtggcccttgcctggaggttccagggcaggtgggctgtgagtggctttgattctggagagcccctgactcaccattacgatacagagagatgaccgcacggtcagagcccagacctggaagcagaggggaaactgaggccagtctgggtctcacatagggagcgagagcagggcctgtgagccagccttggctggcgtcatgggagtgaccaggctgggtcgcctctctcggcagggggggttccgggcctccgttggcttt

SEQ ID NO: 42067 - DNA, 384 bp, Gossypium hirsutum
  Clone ID: LIB3196-031-P1-M1-E10
atcctttgcccattcgtctgccctcacccttaaaaccaaaactcggtcctgctgctcaccgacctagcattactctcgccatggctctcagcgatgctgacgtgcagaagcagataaagcatatgatggctttcatcgaacaagaagccaatgagaaggcagaagaaatagatgcaaaggcagaagaagagttcaacatagagaaaggtcggcttgtgcaaacccaaagactaaagatcatggaatattatgagaagaaagagaaacagattgagcagcagaagaaaattcagatgtccaatttgatgaatcaagcgagactcaaagtcctcagagcgagagatgaccttatcacagacctactaaatgaagcaaacagagact

SEQ ID NO: 42068 - DNA, 404 bp, Gossypium hirsutum
  Clone ID: LIB3196-031-P1-M1-E3
atcgccagcccgccgccctctgccgccgcaccctgcacacccgcccctcttctgtgccaggaacttgctaccaccagcaccatgccctaccaatatccagcgctgaccccggagcagaagaaggagctgtctgacatcgctcaccgcatcgtggcacccggcaagggcatcctggctgcagatgagtccactgggagcattgccaagaggctgcagtccattggcaccgagaacaccgaggagaaccggcgcttctaccgccagctgctgctgacagctgacgaccgcgtgaacccctgcattgggggtgtcatcctcttccacgagacactctaccagaaggcggatgatggtcgtcccttcccccaagttataaaatccaagggcggtgttgtgggcatcaa

SEQ ID NO: 42069 - DNA, 372 bp, Gossypium hirsutum
  Clone ID: LIB3196-031-P1-M1-E4
acgactagctgctgacgttgaagatgttaagtgtcgaattcacgaatatgaaaagggaaaaactgagttctctcctgaggaggatccacatgtcattgctgattgtatcaagtatgtcattcgagagttgccatcatgtcctgtccctgcttcatgctgcaatgcactactagaagcatatcgaactctgggtggtgatagagtcaacactatgcgtgaagcagtatcggacgcgtttcctgagccaaaccgtcgcctactacagagaattctaatgatgatgcgagctgtggcttctaataaaactttaaatcggatgagctcttcagctgtggcagcatgcatggcacccttgattcttcgaccccttgt

SEQ ID NO: 42070 - DNA, 224 bp, Gossypium hirsutum
  Clone ID: LIB3196-031-P1-M1-E5
gggtggggtttaaagggtttttcagagttttcaagaagtcccaaccttttcaacttcatcccaacccaacccaacccaaccttattttcaaatctttattattggtgaaaaaaaaatggtggagattgggttaatgatcacttgccttttctttctccggtttctgggtcttaccggcgccaggcaaaaatctattgaataccctaagccttattacacaactt

SEQ ID NO: 42071 - DNA, 363 bp, Gossypium hirsutum
  Clone ID: LIB3196-031-P1-M1-F1
cccacgcgtccggttaacccgttatgtgttgttgttgatgatagcattttcttaacacttctcgctgcaaatctttcaaaaacatctcatgtactatcattgtttccggggttgagagaaaaaggagcccaatatttggaaactgttgttaaggcaaactgtttctctatggaccgtgtagaagtacctgaaaaaaggaaaccttgtttgaccttgcaagatactcgtgggaaaaaggttgatatgttgattggagaaccgtattattatgcaaatgaagggatgcttccatggcagaacctgcggttttggaaggaccgtaccttgctcgaccctgtcctttcagaagatgcgttgataatg

SEQ ID NO: 42072 - DNA, 398 bp, Gossypium hirsutum
  Clone ID: LIB3196-031-P1-M1-F10
atcctctacattgctgatcggaaggctcgtgaagctgtggaaatgcgtgcccaagtagagagaaaaatggctcagaaagaaaaggaaaaacacgaagagaaacttagagaaatggctcagaaagccagggagagaagagctgggatcaaaactcacgtggaaaaagaggatggggaggcacgtgagagggatgaaatccggcatgacaggcgaaaagagagacagcatgaccggaatctttccagggcagctcctgataagaggtcgaaacttcagagaaatgaaaatcgggatatcagtgaagtcattgctctcggtgttcctaatcctcggacttccaatgaagttcagtatgaccaaaggctcttcaaccaatccaagggtatggacagtggatt

SEQ ID NO: 42073 - DNA, 357 bp, Gossypium hirsutum
  Clone ID: LIB3196-031-P1-M1-F11
atgttttggaggctttggggtagtttattatttaacacattttgttttattggccaccctcaatgatccaattcccaataggaaaagaatactagaatgggaattctgttttaggttaaagatgtggtaaaaaaaccatctgcaaaaggaattaaaagttccctttaaaactttttaacactgggagacaccaaattttatttgggggcttaataaaggcctttaatgggttctggttaaaaattttgggatggattccttaatggaccttgaacgttgtgtgtgagtgtgaatacacctgcatgtgtgcttgtgcctgtgtagttgcagtcttagacaggtagctactattttttg

SEQ ID NO: 42074 - DNA, 306 bp, Gossypium hirsutum
  Clone ID: LIB3196-031-P1-M1-F12
gctggggttcgtgtgatcgactatgttgtcgacagggtgtcccccaccgcttccatgatcgactactttaaccccaagcacgtagatatcggatgggtcattaagccttttatggctatgaaccgtcccaacgttaccataactggccgtgctgaccagatctacactcgggagatgactgaccctgatgcgccaagatcacatcatgccaaccatacttaaatgggttgactggaccgtgtatgacattcctgtgcgaaccaaccccactcaatggataggaaatgctggcatacactattccac

SEQ ID NO: 42075 - DNA, 383 bp, Gossypium hirsutum
  Clone ID: LIB3196-031-P1-M1-F3
gccaatccgaggattttgaagagattttcttgtccaaagatgtttttggaaatagttcagcttttccctcttgtgagagccctttccattttgtgcttcaaagaagcccttctttcggtcaccggacacccatcttttcttcgccggcgacatccccaggtcgccaccaaaaacaggacaaggaaagttataatgaagtagagagcttaaagaaagcgcaagtagtagaagaagaagaacagttcagccctgtatctgttctggaccctccattcgaggacgatgacgatagacatgtgaatgttgatgataatgatgggaacgacagttttgatcttgaatgcagctatgcagttgtacaaagaacaaagcaacagctactg

SEQ ID NO: 42076 - DNA, 305 bp, Gossypium hirsutum
  Clone ID: LIB3196-031-P1-M1-F8
gacaaatggtgggaaacccactggatttttctcttgactacattgatcaagctcctcggaaatcccgattctttgggtggctgcttttcatgtcaaggttccacgcccgaccacttagattatatgaaaagatgctgacatagaccgtcgaatgaaatccttttgatccacaagtccagccaaaaggagaacagattgtagctgatgaccagtcgagagtgaaggatgaaatctctattcttcgccgctcataggccaatagatagggtgctaaaccaatgctacttgactacagtcctgctatt

SEQ ID NO: 42077 - DNA, 356 bp, Gossypium hirsutum
  Clone ID: LIB3196-031-P1-M1-G3
atggagaattcaaccactctctcttccttccccttatggcccaggttatccacagccaccttcccaaccaagaccctatccacctggacctccattttcccctgtaatttctccacctgatcctgacctccctaatcctgcaccctaaatacagacaactgcaacaggtgccaccaccactgcaaaagacaacactaccctcataaccactgcttctactctccaaaaataagaatttcaacactacttccaagagacttttagataaaatggctttcatttttgaatgagaataaacatttccaaagcattgcattttgggagaaatatcttagaaattgtgaaacaatccccat

SEQ ID NO: 42078 - DNA, 384 bp, Gossypium hirsutum
  unsure (1)..(384): unsure at all n locations
  Clone ID: LIB3196-031-P1-M1-G5
gaaatcattcatatatttcccaattttcctccacctcctctccattcctcatccttaatgtgtataacacattnaaacaacattattcgcactttcactattttcttgtatgtaaaattcgagctgtccgtctgagttagagtcactaaattatttttccccagagctaaagaacttnnnaataagatccgtaaatttttcctgaaactagattcataaatattcttaccataaaaattttagaatttttggtttagtcaaatagtacaggttattctttaaagttttccttgtttcgctatctgacagttctgacctctcttcactaaaaattaattatctcattgtacagaattcagttgatgtttctgtttaattattttg

SEQ ID NO: 42079 - DNA, 344 bp, Gossypium hirsutum
  Clone ID: LIB3196-031-P1-M1-G9
ataagtctagttataatatcttaatggtaagaataacatgagtaagttctatatatgaaaatgattttgaaatctttggcttatatttgtgatgtataagtatgtggtgatatctacctttgtgcactcaagaatgttttgttgatttattatatgctatgtgttttaattatgcatggttgacattgttatttatttacatgcaacttactaagctttatgattactccctctcctttccattttcttatagtgccgccaagattgtatcggggatcaagggatgccggaggcatcgatcacactatcacctaaagctttggtatagctaggttaatatttta

SEQ ID NO: 42080 - DNA, 377 bp, Gossypium hirsutum
  Clone ID: LIB3196-031-P1-M1-H1
gttcggtccaaaacaaaggtgtacgacatttacgatcgtacaaagcctcgtaaggcgccatattgatgctcgattgaaaactattattatatgcgaattcaaccaaaggtaagtatcgttcccacaaggcactaaactcaaggatgcaacatctcaacatatcctcgagtatctgaataattcgctcggattgaccatcggtctggggatgaaaagcggtgctaaaatgcaacttagtacccaattcttctttccatttcttccaaaatcgcgatgtgaatctcggtaccccgtgtaaccttacaatctgagaaacatacaattcaactaacttatcaagtgaataatctgtacgtatgggaataaaatgagccgac

SEQ ID NO: 42081 - DNA, 376 bp, Gossypium hirsutum
  unsure (1)..(376): unsure at all n locations
  Clone ID: LIB3196-031-P1-M1-H10
cggacgcgtgggttcttttataatatgctttctgctaatagaacatagttctgtagttttatgccattaaggtctgaattttatgccatttatagatcatgaaaactgagaactaatgaagtttatgcttttgttatatagcacataatgcccctttttttctaaggttaaagtggtaaaaatcatttggtgcatagtgtgtgttattttattgttatcattaaagaattctattgtaagttggatcagtatgtgctgttgagacatacatgaaatacctgtcatggtcgtatatgttgacaaaaaataccggtataatttttactctgattagctgtaantatttttgtgttatatgtccagtttttagatctgc

SEQ ID NO: 42082 - DNA, 241 bp, Gossypium hirsutum
  Clone ID: LIB3196-031-P1-M1-H12
ggcatcatcagaaacgccattgattttaaatgtatcgcaaaattccaaaaggttcgctaaatgagcgttgggatcttcatcctgcaaaccatcaaattgaacgaattgttgtatcatctgaatagtgttaggttttagttcaaaagtatttgttgctatagcaagtctagctatgctagattcatttcttgttaaataaggtttagcataatcatacatagtacgtggagcaagattttga

SEQ ID NO: 42083 - DNA, 374 bp, Gossypium hirsutum
  Clone ID: LIB3196-031-P1-M1-H2
atatctacataaagtatatacacctcaacaattattccttttattttttaaaattgttaaaaatattatttagaaaacgtatttagattaaaagcctttaaaattagtttttgcattcaatacttcaattattgtcaaattattaattattaattattaaaattcacatgatatttttccagataatatatatatatttttcaaacacaaaagtacatggatgagaatgaaatatgaaaaaaaaggttaaaagatgataaatgtggtgaaagtatttaccagtggagtgtaatcaagttgggctgaactcgaatagtgccaacttgaattggactccgagttcaaggttcaatattcggtttaagttcaactcg

SEQ ID NO: 42084 - DNA, 234 bp, Gossypium hirsutum
  Clone ID: LIB3196-031-P1-M1-H3
gcaaaatgtgggctaatatatgcatgaaaaatattcgcctaggcttgggtaacctagacatttcgtgcatttaattatacgagccttaggactaaattgtaaaaagtgtgaaaggttaggggcaaattggtcattttgaccgggggtgagtttatgccgaagatgaacaatgtgaggtattaatgatctatttttactaatatagaccccgaggaaccaattgcggaggttcat

SEQ ID NO: 42085 - DNA, 406 bp, Gossypium hirsutum
  Clone ID: LIB3196-031-P1-M1-H4
attgtatatgcttttgcaagtttgaaaaattcaaattaaccccttttgactaggtaggtctttctaaaaaccatttaaagctaactgggtcttagcatcctcctgtgtatggaagggacaggtggccactccaggttgggtgctcacagaacccttttcctgactgtcatggaagatggtagaaggaaaatggactgtctcatcaatactgctgtgtcctctgaagcaatctcagtttttattaaccacctcttctgtgtttctggtagctatttaatctgtatttaatctgtacttcttatgccagcctcgattttatttgatttttaaaattagtctcttctaaccaatgaagtgtttgtcagtatgccccaaagcttgctcttttgtgcccccttttgaataa

SEQ ID NO: 42086 - DNA, 375 bp, Gossypium hirsutum
  Clone ID: LIB3196-031-P1-M1-H5
gggttacccttccagtaggcataaggttccctctttccccactttatcctctccctccctttctttattgctctcaacgtctcctcccatggctttatattcacctccgccctgccaggacaaagcaaagtaaatatgattaactagctaattgcagtaaaaagttataaacactaggcatttttttctccattaacgtcgtgtgaatttaggcaatatgtagcagaatttaccatccccagaaggtccaatcagggaacacaatgtccagtgctgctttctctccacagtaatgaaaagccggcggtggtgatgtagcattgagtcctttgtagtctcttttcatgatcatagtcttgtctccactatagaaca

SEQ ID NO: 42087 - DNA, 265 bp, Gossypium hirsutum
  Clone ID: LIB3196-031-P1-M1-H7
tttcgtctaggcggtggaggatgttcttctaatggctttggaaggccttggattaactgtgtgcccccctggagacattcaaaaggccaccgttaaccagattctactgactaccctcaacctgcaaatcgacccgaccatccaaagagtgccgaccgaggaacgtgaacagatcaagaccctaaacaacaatttcaactgcttcatctacaatgtgcggctcatgtagcaccagaacacggttcttgaaaccaagtgtaccctg

SEQ ID NO: 42088 - DNA, 284 bp, Gossypium hirsutum
  Clone ID: LIB3196-032-P1-M1-A1
gcggccacgcgttcgcggacgcgtgggcttccatctactagcaattgcttcaagggcttttatttgttttttatgatcaatgggtgaccactaccttcaaaacactgaaccaatgactcaccaaatggtgaaaggcgatactggcgcaacaggcggtgggtccctgctcattctctgcggattaatactagctggcaccagtattgggcttaccatagtcactgcactcttggttattttaagaccagctcttgctcctgctctcattgcagcaggtttcctag

SEQ ID NO: 42089 - DNA, 328 bp, Gossypium hirsutum
  Clone ID: LIB3196-032-P1-M1-A11
atcggatgacaacttctccaccatagtggctgccgttgaggaggggcgggcaatctacaacaacatgaaacagttcatccgctacctcatctcgtccaacgttggggaagttgtctgtattttcctgacagcagcccttggatttcccgaggctttgattcctgttcagctgctctgggtcaatctggtgacagatggcctgcctgccactgcactggggttcaaccctcctgatctggacatcatgaataaacctccccggaacccaaaggaaccattgatcagcgggtggctctttttccgttacttggctattggctgttacgtc

SEQ ID NO: 42090 - DNA, 371 bp, Gossypium hirsutum
  Clone ID: LIB3196-032-P1-M1-A3
atcggggatggcggttgtggcggcggctgcaggctggctgctcaggcttagggcggcaggggctgaggggcactggcgtcggttccgtggcgtggggctggcgcggggatttctgcacccctccgcgactgtcgaggatgcggcccagaggcggcaggtggctcattttactttccagccagatccggagccccgagagtacgggcaaactcagaaaatgaatcttttccagtcagtaacaagtgccttggataactcattggccaaagatcctactgcagtaatatttggtgaagatgttgcctttggtggagtctttagatgcactgttggcttgcgagacaaatatggaaaagatagagtttttaata

SEQ ID NO: 42091 - DNA, 303 bp, Gossypium hirsutum
  Clone ID: LIB3196-032-P1-M1-A4
taaataaataaatctcaaatgcacgattttaaaatacgattttaatcaagatgacataattgtgttagattaattacatttcttaacttagaattattaaactcatgtttatattgttacgaataagttcacaacaactcgataatttgctaacttatgaacttactcacctaccaaaattcatttatcacttgactatatccctatgtcaatccaaccgattaaacaaatcttaataggcaaatatgttattgcacatacatacttattaaatataaataatctcttgtacatatccctatg

SEQ ID NO: 42092 - DNA, 404 bp, Gossypium hirsutum
  Clone ID: LIB3196-032-P1-M1-A8
atgctgggttggggtccaaagtgtaaggaccccctgcccttagtggagagctggagcttggagacattaccccttcatcagaaggaattttcggatgttttcttgggaagctgctttggtccttggaagtagagctgggaagcttcctttgcctctaggtgagttgtcatgagggtaagttgaggttatcttgggataaagggccttctagggcacaaaactcactctaggtttatattatacgtagcttatattttttactaaggtgtcaccttataaacatctataaatcgacttctttttcttagttgcatggccaagcagtcccctttttaggagttggcttctgcaaactcaatccattgaactaactgttggggagcaatttggtagttgtagacatt

SEQ ID NO: 42093 - DNA, 372 bp, Gossypium hirsutum
  Clone ID: LIB3196-032-P1-M1-B1
attggtgtgttaaaagtagggtttctttgcctctctacagtacactaatctgcctaaaggtggttgtttcatatttataatgctaattgtcatacctacctactttaaattttaggtagaaaattatctgatttaaatacagacacatatttttctcacattgagtcatatgcataatgtagttccaaatgtatttcattactatagtcacaatatccaactaaaaattacgctatctagaattgtaccgaccaaaatctagtattggcagatcttgacaggctggacctgcaagatatggcttgaattttaaccatttattacataatctctagtgatcatgcatctagttatcataagaaataatttaaa

SEQ ID NO: 42094 - DNA, 352 bp, Gossypium hirsutum
  unsure (1)..(352): unsure at all n locations
  Clone ID: LIB3196-032-P1-M1-B11
atcaatgacctgcggcactttgaccctgagtttactgaagagcctgtccccaattccatcggcaagtcccccgacagcatcctcgtcacagccagcgtcaaggaagctgctgaggctttcctaggcttttcctacgcgcctcccacggactctttcctctgaacgctgatagggcttggttttaaagggttttatgtgtgtttctgaatgttttagttagccttttggtggagccgtcagctgacaggacatgttacaagagaatttgcacatctctggaagcttagcaatcttattgcacactgttcgctggaagctttttgaagagcacatactnctcagtgagctcatg

SEQ ID NO: 42095 - DNA, 393 bp, Gossypium hirsutum
  Clone ID: LIB3196-032-P1-M1-C1
atctctaaactttcacaggttcctggtatcatggaaaagccaattctaccacattttcttttgtacttttatatatatttatacttacaattttaaaaaattatatattttatagggaaattagtatgttctttgtcagagtggtgtcaggcatactcatgttctaaaaagtctaacagtgatcaacactgccttgattttacccgccctgcctcccccctcctgttttttttttttgctgtaatagaagacctttctaaaccttgccatcatataaatatgatctgatagcataaacccacaattaagagttttcaaaattttaaactgatcattaggcagttttaaagacacacatacagataaagcttgtttggtttggtttttcttttc

SEQ ID NO: 42096 - DNA, 276 bp, Gossypium hirsutum
  Clone ID: LIB3196-032-P1-M1-C10
atctccctctccaccactctcattttggctgccacgcccctcccctgcagggccggctgtactctgatcactatggcatgtaccacacaagcccctcgctgggcggcctgacccggcccgtggtcctgtggagtcagcaggatgtctgcaagtggctcaagaagcactgtccccacaactacctcgtctacgtggaggccttctcccagcatgccatcaccggccgggcactgctgcggctgaatgcggagaagctgcagcggatggggctggccc

SEQ ID NO: 42097 - DNA, 302 bp, Gossypium hirsutum
  Clone ID: LIB3196-032-P1-M1-C11
atctgagaccacgtgggcaattatctgggatgtgctggtgtcccttattatgtgctaaggcctgagaaccccacggcgtccatgtgaagaggtttttgcatatctttgtaaatttctgacacactctttttatatccagcgattctaacactgaggaattttttatagggacaacacctcccatgttaacgaaaggggttgatataatacttcgtgaaaaaaacaacttgtgataaccaaaatgtgcatcaataggagactggttgaaaagccataatgtgtctacgtgccatgcaagtgcg

SEQ ID NO: 42098 - DNA, 345 bp, Gossypium hirsutum
  Clone ID: LIB3196-032-P1-M1-C3
gcaaaatagaccacccctcccttttatcccttttgtttgggttttgacctcaaccttggagcgccaccgcaccaccatcggacttggtgccgaccacgcgcagaaaggacacgacgagaggccggaggtaagtattattctttctttttattctcttttgaaactggttttctttttttattttccgtttggtacatattttttcctttcccccttctccctttggagttcgaaatcgatgaaggagggaggagttccagcgacgtgattcggtaagtccctttcccctccctttttatttttcatatttatgtgaaaaaacaaaaattaaaaaattaacttaag

SEQ ID NO: 42099 - DNA, 252 bp, Gossypium hirsutum
  Clone ID: LIB3196-032-P1-M1-C5
atctgattctacaccactaatatgttgggatgcgggcgcgtccatgtgaaggtgcgttgacagctgatcactatggcatgcaccacacaatgcgcttgcacgtcggtcagaacccgcccttgagtctgtgtattcagaacgacgtgtgcaacgtggttaaagaagcactggtctcacaactaccttgtttacgatagagtcctttcttccaacatgcctttatcgaccggccactgttgctaaataaatgcg

SEQ ID NO: 42100 - DNA, 325 bp, Gossypium hirsutum
  Clone ID: LIB3196-032-P1-M1-C6
cggacgcgtgggttgcttttaccgcattcaaaacaaaatatgtatattgtgaagaagactatttgtctttacctcttttttttttcttttttcaatctaaattggactaaattggggggggggggggtaattatattcctattgtcagtgtcagagttaaatgttacacaataggtcttgttttctaaattcaattcgagtagatactaaacataagataagtccgtggagaatataaaggaaggatgaattaaatgagtggaacaaacagggagtattcttcgtctttctagccttcgacacaagaaaaggaattttacacacc

SEQ ID NO: 42101 - DNA, 364 bp, Gossypium hirsutum
  Clone ID: LIB3196-032-P1-M1-C9
atccttgaagttgctgtcccttaactggcacctcctctctactttcatggacttgtttctttgtaatagtgcaatttggttttgttttatttggggttcattgtatgtttgggaatcaccaaaggcttttagagttctttggcaaaataaaaatatttgactaatcaatttttattatcggaatagttttaacctttcaaatacatgttctgtcctggagcaggattgtagaaactaacagcgtctattttcatgtctgatatgttcttcgtttagtcatcatgttaaatctgtgtaccctaaatcagcatattactcataaatcattaattcatgtaagtataggaaatggtcttaaaagata

SEQ ID NO: 42102 - DNA, 270 bp, Gossypium hirsutum
  Clone ID: LIB3196-032-P1-M1-D2
ccataggaattgctgggaatactatttcgagaacctttttgcttcaagaggaggacggaatcatgacttattttcaaggtcacagggacttaatttcattaatttattccaaatattgacgagattacatcaataatgggttaatttcaccaacccaaaagaagcactaattctatttataacaaagtgacaatatatcaccacacgttggttattaaattaacctaacccgatagtattaatgtgggaatgagttacgcccaagtcacc

SEQ ID NO: 42103 - DNA, 345 bp, Gossypium hirsutum
  Clone ID: LIB3196-032-P1-M1-E10
atgggtgagataagcagagtatacttgaaccactcccagcattcctgcatgccctctttttcttcaggtccagctgtagttcctccggacgttctcgaagatgctcttcctcttcatcatcatcttcctcttcgtcttcctcatcctcatcatccagttcccgaagccgctcacgctccccatccccccgccggagaagtgacaggaggcggcggtgagcacgtgtttagggagcaccatgcacctggcatgcaagtgtctaagagttctgagtcttgaattggcttatgtttggggggctgacgacaccttctcttgtcaagtacagctcttatcgttcacatg

SEQ ID NO: 42104 - DNA, 417 bp, Gossypium hirsutum
  Clone ID: LIB3196-032-P1-M1-E4
ataattaatttccgaaatctttgtaacagttcacacccactccgagttacgatggcagacaaacagaaagcattaatacaagcccctcctaacacccttaatttgaatctgaacatgttaaaattggagaataaagagacatttttcatctctttgtctggtttgtcccttgtgcttatgggactcctaatggcatttcagtctgttgctgaagccattatattttaatataaatgtagaaaaaagagataaatcttagtaacgtgtattttttagtattagcttgattattgactcttctatttaaatctgcttctgtaaattatgctgaaagtttgccttgagaactctatttttttattagagttatattgaaacttttcatgggaaaagttaatgtgaatactgaggaatttt

SEQ ID NO: 42105 - DNA, 274 bp, Gossypium hirsutum
  Clone ID: LIB3196-032-P1-M1-E6
taattgtttataccgtttcatgaatccaaactttttttttttgaaggtattaggtaggaaggtaacttttttgtttcatgaaaagttcaaaaataaaaacaaaattaatatattgttttaattttttttgacaaatggatgttcatatatttttgtaaattatggtgattgaaactttataaatagatatataaactttttggtatccaagtgaaagttgaattatcttttcatttttctacacttttctcttggcctttttataattctctta

SEQ ID NO: 42106 - DNA, 384 bp, Gossypium hirsutum
  Clone ID: LIB3196-032-P1-M1-E8
cggcgaaaggcgcatctcttccgaagctattgctttttaagctgaactctgctatcagactttgatattcgtagatctaagatttccggggtaaggactgacttaggcttagtgaatatctttgcttttcaatagtacgatcttcggcatatgaagagatatttttttttaagtttcttttcttaatcatctgggaatgaagaggatgataagttgacttctttcttcccttccatttcatccttttcacttagaagcgatccactttatatataaataacacctgtgctaatgatttctttcatgcagtaaacatggtcaagtgagtgaacaagacatttatttttcaagccaacagggaagactaactgaaaggagtaatat

SEQ ID NO: 42107 - DNA, 386 bp, Gossypium hirsutum
  Clone ID: LIB3196-032-P1-M1-F2
atggcaacggcaccggctccgcggcgcgcaggctaggctgcagactctcggcggcagcgttcggtggatctaggatctggcttccaacatgtggtggctctgggcctccctctgctgcctgctggcgttgggcgatgcccggagcaggccctctttccatcccctgtcggatgagctggtcaactatgtcaacaaacagaacaccacgtggcaggccgggcacaacttctacaacgtggacgtgagctacttgaagaggctgtgtggtaccttcctgggtgggcccaagccggccccagagagttatgtttaccgaggacctgaagctgcctgaaaagctcgatgcacgggaacaatggccacagtgtcccaccatcaaagagatc

SEQ ID NO: 42108 - DNA, 239 bp, Gossypium hirsutum
  Clone ID: LIB3196-032-P1-M1-F3
aatttgaatactgaactatttggaactgtttgaattgtgttaaaaaatcgattatttttatttttttaatatttttattttatgatttttttaataatttatttgattaaatgagataaactagtcggacaatcaaattgaaaattgatgatctgtttaatttgaccaaaacttcactgatttatttgactgttatggtttactttcattcccactcgtgtagtgaataaaaatgtgat

SEQ ID NO: 42109 - DNA, 400 bp, Gossypium hirsutum
  Clone ID: LIB3196-032-P1-M1-F4
tacaaaccatcaacttgtgtattgcatggatatatatatatgtatattatatttttactactccttcaaagatatgttaatcataaattcttggtggaatttttttttatcggtagcatatcaaattatttaatatatatatacatttaacagtaagaataaatgtatctatactataagatactatatttaaagggtttgacgtcactcattaatcgaattccaactcaagtgaacaattacctaaaactcatctttttataaagtaagaaacattgctatgaaaaagtttggtaaaagtaccacaaaactcctatcctatatcttgaattgcattttagccgctctactgaagaaatggacaaattagcccttatacattagataagtgagccaaatg

SEQ ID NO: 42110 - DNA, 345 bp, Gossypium hirsutum
  Clone ID: LIB3196-032-P1-M1-F7
atattttgaactgctgggatcccatgttgaaactgaaactcatgagttttcattttctcttcccctgcttcctatagctgactataaagaaagcttcaacactatcagtaacatcgaggagattgcatataacgccatttccttcacatgggacatcaacgatgaagcaaaggtgggtggtgaggtctgggcgccttatgtccagccatttgagaatgggaggagtttaatgatttgacaactgatttttttttttcccacagttttatgtgttttcattctcaggtgttatgaaactatcctctcccctttctattctcccctcctccaaaacagatcattttt

SEQ ID NO: 42111 - DNA, 370 bp, Gossypium hirsutum
  Clone ID: LIB3196-032-P1-M1-F9
attccacagttcctggtgtttttcctttttttggtataagtagctctcagacttttacccacatgagtttccattaaaattgtacaagctttgacttgaaatcagctgatgaatcgaaggagttggtgtgtgatcagctggtgccattgggaaaactgatgataagcagtggagcaggtaagaacgcattgttcctgagccattggaggaactagcagcaatgacctctgaggagccctgggaacaccctggagctcctgagcaacatgttgcttatgatcagtgacctggatatcatgactgtgtgagcaataacccccaacacctcagtagcaaaaacagagaacagtggcagcacatcgtgggctga

SEQ ID NO: 42112 - DNA, 389 bp, Gossypium hirsutum
  Clone ID: LIB3196-032-P1-M1-G10
gcggtgttttggtttcattgttggcgcttccttcactctccctctcaaacgatcgcctcttattttataatatgaaaatatatccttttgtttttctcttttgaattgagagagtcatcttctttcttcccgctctctacagatctttgggaaatatttatattttccgttcattactcgtcgaaacaactagttactgagtttttttatttgctacgatggcggcttctttacaaatttccggcgtaaaaaccgccccgtctcattcatttccaaagcagacttctttccactgtcgttcggcattttcgagccagcttcatttcgggtcattccggtctacggattcttgtaggaggctaaggcattgttgtaaaagtagagtgttt

SEQ ID NO: 42113 - DNA, 372 bp, Gossypium hirsutum
  Clone ID: LIB3196-032-P1-M1-G12
aatggggattggagaggaaaggggaaactgaaggcggaagctgttttacaggcggctacgttggcggccagcggtcagccgttcgaggttgtttattacccaagagcgacaacaccggagttttgcgttaaggcgtcgtcggtgaaggcggcaatgagggttccttggtgttgtgggatgaggtttaagatggctttcgagacagaagattcttcaaggattagttggttcatggggactgtgtcttctgttcaagttgtcgatcccattcggtggcctaattccccatggcgacttcttcaggtaacatgggatgaaccggatttgcttcaaaacgttaaaacgtggtaatccttgatggttgaattggta

SEQ ID NO: 42114 - DNA, 199 bp, Gossypium hirsutum
  Clone ID: LIB3196-032-P1-M1-G2
gattgtatgaatgaaaaacacccttggcagttaattaggcctcttcaaaccagtgtcgagattttgaaggtcgtatgctccccctttgagtttgaaattggatgccgcgacattgattgctatatgctcttattttgagtcgaagttggatgtgttggaaaaaatccatttcgaaaatggttttcttgcacagtgaaaa

SEQ ID NO: 42115 - DNA, 257 bp, Gossypium hirsutum
  Clone ID: LIB3196-032-P1-M1-G4
gcgaggacgcataggatcgtctgtcaggaattaaagaaacaccgctggctgatttaatgccattgtttgacaatgttctgctgcaagaaggttatgcagggatgaacattccatcaaaagtgaccctggcatgtcgaatggaacctcttattattagtgcttacccgaaatatttcgccaccctagacattgctccttttgcctttttcttagagcggaaaacaaggactaagctcaccatgccaatacttttacag

SEQ ID NO: 42116 - DNA, 269 bp, Gossypium hirsutum
  Clone ID: LIB3196-032-P1-M1-G8
ggaggggcttatcctatatcgatcaaccatatccctctatatagatcgtggtatatccaacatcagcatttatagaacaaccggttacaatgtatgtttgactgtatcaaaatatacaatcacgatgttgggataatgatgatctcaagtctgaggatcatatacatattaatcattatgagtaatgttgtgacaattacataataatccaagaaacatactcataacgggttagtccaatatgttgttctctaacatacatattcatg

SEQ ID NO: 42117 - DNA, 271 bp, Gossypium hirsutum
  Clone ID: LIB3196-032-P1-M1-H11
atccagcctggacagcagagtaagactctgttttaaaataaaataagtaaaataaaatatttattgtgggcataaatggcagagttatttttcacatgattgtacaaatgccctcccgttttttaaatagggatggaattaaaaaaagtttagagaatgtctcacctggtgaaaaacaagctattcacaagacttgcgataaaggggtttgccttttttttttttcttttcagtataaaggcatatttttatgaatggtgctacgtaacta

SEQ ID NO: 42118 - DNA, 315 bp, Gossypium hirsutum
  Clone ID: LIB3196-032-P1-M1-H12
attttgattttgaatgagaataacaaggaaggtttgtttttataagatttctggattttggtgaaatagggctagagcttattctaggatcccctgtttcaactttagaaattcaccatacattttgaaaaaataattatgtggggtactttatatggctagaatccttatttaatctaggcgtaataaaaataaactgaatagttatatgattcttggacagaaagaaaagtggtttgatgtaagtagagggctaggcagccaattctgaaacaagggcaatttgactaataaaaagtactaactctgttaagt

SEQ ID NO: 42119 - DNA, 414 bp, Gossypium hirsutum
  Clone ID: LIB3196-032-P1-M1-H4
attgcatttttaaccaacagaacccacagtagaggggtctcatgtctccccagttccacagcagtgtcacagacgtgaaagccagaacctcagaggccacttgcttgctgacttagccaccccccaaagtcccctcctcagccagcctccttgtgagagtgggtttctcctgcacgaagcctgtccctgggggagtaattctgtcattcctaaaacaccttcagcaatgataatgagcagatgagagtttctggattaccttttcctattttcgatgaagttctgagatactgaaataagaaaagagcagtcagaattgtgctttttctccctcctctattcctttaggaaatcatattcaatacacagtacttcctcccagcattgctactgttcagctgcttctttcattct

SEQ ID NO: 42120 - DNA, 306 bp, Gossypium hirsutum
  Clone ID: LIB3196-032-P1-M1-H9
aaacaatggaaaacaacttgaatttttcgttcaaggtgtttctaatgtgctaaattcatgaaatttaatatttttcgtcaccaaatttcacccatagaaatttttttcgactttttcacttttttgaattttttttagaggttgtttaagtaaaattggtgaagcacaaggaaacaacttaaaacgcccaaatctgataccatatgataaggggtagtagaagaaaatcatgttcaagttgtttaactcgagaaagaaagatttggatctgacctgcaaagaagaaacccaacagatttacggctg

SEQ ID NO: 42121 - DNA, 350 bp, Gossypium hirsutum
  Clone ID: LIB3196-033-P1-M1-A6
aaagatttgatcaaaagtgactagaaaagaggcggtcgagaaggaatgagtggaaactatgttgattgagtgcaatttctaaattaggaaagattagacagaatcctaccaatctaaatcaatgtttccaacagtgaaaggctgcccctgtcggcgggttgcttaggtccatgtagtccaaatctccgcttaggaaagaagtccaagttgactttttgcgaaagggaaaatggctttctgttagagagtgatcgagagaaattttcagttgggagccagtcttttgcagctaggagacattgttgttatgttttccagttatgagccattgttgtgtggtccctttcgag

SEQ ID NO: 42122 - DNA, 277 bp, Gossypium hirsutum
  Clone ID: LIB3196-033-P1-M1-A9
ctgggggagtccttaattaggcattgaaaggggcctaggaatagccattcccgactatcatgcttgatgctataaagcctgtgggctcattttaaatttagcaacactctatacaactctacagcgcttaaatgagggcaaactatttggagcgaggtgcattgttacaggatatgcctttaattggctttacaacttctttggtatatttccatcatgttgacccaatgccgttgcattactgacaggaagtgactgtttttttctaaggcaaggc

SEQ ID NO: 42123 - DNA, 352 bp, Gossypium hirsutum
  Clone ID: LIB3196-033-P1-M1-B1
tcgggagcactactcgccctcatcttttgatttttctctatgtcatttatttcaggacaatctcgaatgaagtggtctagcgacccacacttgaaatacctgtctcatttactcagcattcgcccaagtgacgtcttccacattgcgaactctctggcctatttgtccgagcactaccaacacttgcaactgaagtagtttgggcttcagatgccatgttctgatgattcttattccttcgcgaaaatcccactgaagtgttccatcgggcattaattcttttagacctcttggtggaggactaatgcgtctttcccatctaggttctctttaaatctcgcgacttgatggc

SEQ ID NO: 42124 - DNA, 212 bp, Gossypium hirsutum
  Clone ID: LIB3196-033-P1-M1-B11
attcgttcacgcgggcgtgtaaaaacacactagtatgcaccgctggcactgattacacacttactattaaggactgtgtaccatggccgaacacctgaggactgacgagggcatatagattcttccctgagggcctacaaacgggcaccgatatataactcatgataaaactatgtgaacaaattatttcattactagctcctacttcattt

SEQ ID NO: 42125 - DNA, 379 bp, Gossypium hirsutum
  Clone ID: LIB3196-033-P1-M1-B2
atgctgaaaaccgcagtgccttcagctaccattgcaagaccccagattgcaagggatggtgcttctttgaggatgatgtcaacgagttcacctgccctgtgtgtttccacgtcaactgcctgctctgcaaggccatccacgagcagatgaactgcaaggagtatcaggaggacctggccctgcgggctcagaatgatgtggctgcccggcagacgacagagatgctgaaggtgatgctgctgcagggcgaggccatgcgctgcccccagtgccagatcgtggtacagaagaaggacggctgcgactggatccgctgcaccgtctgccacactgagatctgctgggtcaccaagggtccacgctggggccccgggggccc

SEQ ID NO: 42126 - DNA, 302 bp, Gossypium hirsutum
  Clone ID: LIB3196-033-P1-M1-B4
ataatcggccaaggtaatgataagattggaggaggatactctggtggtggtagaggttgggttccacaaccacaacgtccagcgaagaggttatcgtggtggttaggctggacatggcagtcgtggagaaccttttccagtggagtttcgagttattaggtgatgatgagctttggagaaacgcaatgccttggtagagggaggggcttcggacgtcgatagtgatgctatggtcggcacacgagcgtggtaaggaaggcgtgggcaagagttgaggcggctagggttagggattttgggga

SEQ ID NO: 42127 - DNA, 238 bp, Gossypium hirsutum
  Clone ID: LIB3196-033-P1-M1-C12
gaagaggggggcaattcacgaaaaccaggctgcaatcacttacctaagacatcatgcgaggaccggcaatactaaaagtgacactctccttattctatataaggtaccggcgagtgaactgaaatcagagtttacacacctgaacatttaaccaaaccatatacagtagcacttattagatggtaccatcatgccttagagactatcagacagcccaagcaatgaatccatgcatatt

SEQ ID NO: 42128 - DNA, 349 bp, Gossypium hirsutum
  Clone ID: LIB3196-033-P1-M1-C2
accacactttcgttttcatctctccatatcggttgtgttccttggcgatcaacaacacaggagccgtgagctgtggaagaacaacaacacaaagtggtgacttcagtcggagccgataacgtttcctacaacaactacactaattgcccacatactttcaatacccaacaaactctttatttcatccctcacaatagcaagaggtatatgcatcgctacattgatgtggtacaagtcattgttggagtggctaccgctagagccgaaaccaatgctgagatattggatcacaacatgcgggatgtggtgcaaacagacagggatgataccatcgacatgtaagatgaat

SEQ ID NO: 42129 - DNA, 364 bp, Gossypium hirsutum
  Clone ID: LIB3196-033-P1-M1-C3
tagatcttccttatcatactgaacctccatggcctccaagtttgagagaatttctttaaacactgttaagtgttcgtgcacagatgcaccttcctccaaacgatgagcacaaagatgttgcttcatatgcagcttgctagttagagttttcgacatacatatttgttccaaccacttccataatccagcgacgatcttctccttcatcacatcctgcaaaatttcgttcgacaaatgcagatgtaactgtgttaatgcctttcgatccttgcgcttcttctattcttccgtcaatgttgaaggcatcttatctacccctagcagggcttcttctaagtccatctatgcaagaactgcctgcatc

SEQ ID NO: 42130 - DNA, 354 bp, Gossypium hirsutum
  Clone ID: LIB3196-033-P1-M1-C7
cccacgcgtccgtggacgcgtgggcatatatgttcatctccatatgtgaatcaatactccaaatcatcacaagttaccaaactcatcaagatgtcttatacatcaaggatagtgtaagcttcaagaaaattcggtttgacgtgattcgcaaggtgacgatctataaggaaaagagaaaacaaactaggtaagctaattagtttatcattaacaaccaaaaatcaattactatcgagttaaatttacagtttattcataaaatcctatttacatgctcctaatcaatcacttgtatttctacaagctcaagcacacataagcacacaaaattaaaattaattattaagaaaataa

SEQ ID NO: 42131 - DNA, 362 bp, Gossypium hirsutum
  Clone ID: LIB3196-033-P1-M1-D1
ataggcgtccaccatttccactcagcagtgctatatcctctgtagaggtagctgatgatgcgtctactagaattaaccagtcgtcccctcgtgcagctgtggaggcttcagagccatatggtaagaaagggagtgatgaagtgaacagaaaacttagcatgacagcatcaggcactcatgatgattctagcgatgatgacagtgaggaagagcgaccaatacagccttttagtagcactcgagaccaatacaacaaaagatcaagcttaagagtctctctcccatattttggttcaagaaatagtgattctgatgaagaccttcctaaaacaagtttaaaggctcattcaaacacgggtttt

SEQ ID NO: 42132 - DNA, 364 bp, Gossypium hirsutum
  Clone ID: LIB3196-033-P1-M1-D2
atgctgcgcggaggcacacaggccgggagaccgttctgggtccgagggtccgggcaggggttgagacaccatctgacctcaagcttcgtcgtgtcgccggttctgcaggcaccatgagccaggacaccgaggtggatatgaaggaggtggagctgaatgagttagaacccgagaagcagccgatgaacgcggcgtctggggctgccatggccgtggtgggagcagagaagaatggtctggtgaagatcaaggtggcggaagacgaggcggaggcagtagccgccgctaagttcacgggcctgtccaaggaggagctgctgaaggtggcgggcagtcccggctgggtacgtacccgctgggtgct

SEQ ID NO: 42133 - DNA, 354 bp, Gossypium hirsutum
  Clone ID: LIB3196-033-P1-M1-D8
cggacgcgtgggaaaatatgaaaaaatctatgtacgtaaaaatatatgtaagtatgtaagtatttatatatgtgtataaagttatgaaataaaaaatatataaaggtaggtatatatgtaaaaattaaaaaaacgtatgtagatacatatatatatattatgtgcatgtatgtattggaaaatatataaaaatatatgtacacatgaattataaactatagaaaatatataagaaaaatatagattttaaatataaagaatatgtacaagtatgtgtatatatatttatgaaaataaaaaaaaaaggatacatgtaagtatgtctatatatatataaaattaaaaatgcgcata

SEQ ID NO: 42134 - DNA, 356 bp, Gossypium hirsutum
  Clone ID: LIB3196-033-P1-M1-E1
cccacgcgtccggtttttaatgacgtcatacaaatatatatatatataaagaaaacgttgcatatagaaaaaaaaggtcataatttaattattttcttagtctcaaactcaatgtaaaatgtttaactttgtggctttcctagtcatactgtatacataattataaagacagcatatatgctaatggagatgtaaaagcattaaagttgacaccattccctggcctctcatactctccttccacacaaatgtagggtagggaatcttaaacagaacaaatcatcactttgttagttaattaatatatgtctcaaaattttgcacaaccaaaaaagaagctctttctattagaaaac

SEQ ID NO: 42135 - DNA, 353 bp, Gossypium hirsutum
  Clone ID: LIB3196-033-P1-M1-E10
attaatggcaacttgggaccatttattaataatgtacggagtcgtcctcactgatatatagaaggattcacttacagtaatagtctagaattgatcttacacgagcaatgaaaatttaaggatactatttcatgttttatttgtgtcaaattttaagtaaattaaaagtaatggattatttttatgataaataaagttaatgagaggatgctcaatttgtaagtgatttatagctagtgaggagggaggatgctaatgatctgacctagagctggcaaaatgatgaagcttggaggtgctggagaagataatcaacccaacttcagcatcgctgaggatggctaactctttag

SEQ ID NO: 42136 - DNA, 352 bp, Gossypium hirsutum
  Clone ID: LIB3196-033-P1-M1-E12
gttcaatgtttgttaagttattgtgttgttgattgttatgaattctttagcttgttttttttagaaatgttctctcaattattacgaataattgtttaattaattaagaagaatatatagaaggataggtagaaatagaagaccttgtacaatggccaccatcaccatccttcctctgtgttgtattgtttgtaagtttccatcaactttcaattttaaaatcctaaatttctttttattatgagtttaatttttttatcaagaataattactagtacttattctattaatttaaggttcctgatatagattgaagtttgaagcttatctgctttgttgtttgtgatttaaa

SEQ ID NO: 42137 - DNA, 363 bp, Gossypium hirsutum
  Clone ID: LIB3196-033-P1-M1-E2
tttcaaatgaggggacaattttgtaaaatggttgaaagtataaggttttgccatgagagaaaataggttgttttctaaaattttatggaagaatataaatcttaaataaacaacttttgtgaagagatttctcatgaaaaccctaataggaccattttgtaaagtttgttaaatagatagtaatattgtgaaatattggaaatttggggttgtcataagagagataattggtaggttaggcttggatgataaggaaattcgataaaaatccattttcagatctaggggtaaaatggtcattttgccaaattatagatttattgaatgcctagatcaataaaatgattaaatgtgtgaattttt

SEQ ID NO: 42138 - DNA, 375 bp, Gossypium hirsutum
  Clone ID: LIB3196-033-P1-M1-E3
atgtgttcaccatcatgagctgaccaacaatttctaaattcctgctcagaaacacagcaaggggaatgcagtcaagcacaaagggcttaaatgaccaggtaaggctgggctggatgaataaagaggaatgtcctatgagtgtgactgtatagttttacagtatcctgtttcaatggttaacatttgacttgtggccttgtagacagtgtattaatatcagatcttctttttcagaactgttttaatcatggacaaacaaaacacacagatgaatgcttctcaccctgaaacaaacttgccagttgggtatcctcctcagtatccaccgacagcgttccaagatagatcagatactgattcatcagcagattgaac

SEQ ID NO: 42139 - DNA, 358 bp, Gossypium hirsutum
  Clone ID: LIB3196-033-P1-M1-E5
cccacgcgtccggttaacttacaagctcatttagcttaagataacatttccttagagcattaaaaaagagtttagaaaaggggtgtcaatgttaaaattgtgtttcctttcggtcatcagatttggagcgaggaacccatgggtggcacagtttgtcaaacaaaaaatatgttgatatcagatattataactataaatagctcttcagttacattgacttgattagaaggcagggcaaaatcaggggctagcgctttgaaatttttaaaattttaaatttgtaaaagtaaaattgtactctactccccttaaaatgataaaaaaattgatttaatcctttaaaaagtataaatattga

SEQ ID NO: 42140 - DNA, 373 bp, Gossypium hirsutum
  Clone ID: LIB3196-033-P1-M1-E6
attgctgttttagaaaacaaaaataaatttaaaatgcgtttttgagttaatcctagatatcacaccagagtactgtgatttttcagttacaatccatttgatatattctgtagtaaaattatatttcatgtacagttttcattttgtattgttccttatatcacaatttgcaagtattttggttgttcttgttgatatgtaaagaactaattaactattccttatttgttcatggtgcagacatactgaaagacttcaatatagttgaaacaatctttcccacatgtgcctgcttttatgaaaatattcattcagagtacttgacatttgaatatgtgctatgaaacttcttctttgatactttctaattctc

SEQ ID NO: 42141 - DNA, 333 bp, Gossypium hirsutum
  Clone ID: LIB3196-033-P1-M1-F10
ataatattaaaggaaaataaaataaaaagtacttaaataagataaataaagataaaagtggaaataaaaataaaaataaaaagtctttaaacattgtcatcgtcggatggttcgcgaggtggtggtggcgatgagatgtgaaggtgctgacaaatctaatgaagagtagcatcaatgtgatcaaagcgctgaaaacactactactcaaatcgagtaaggcattcagagatgttagagtatgaagccaccgtatgaactggacgatggatgggtggtggttgagacggtgggtcctcatgacgtagagggacatcattagtaatgtcctctggg

SEQ ID NO: 42142 - DNA, 373 bp, Gossypium hirsutum
  Clone ID: LIB3196-033-P1-M1-F11
atcacaaatgtgtcgaaggtttagcaatataatagcaaagtcctactccagtaaataaaagttgatatgtttgtactaactttcaaagacattatgcgtttttatcattacaaggcatctaattgttcccttcatgtgataaaggtggtggaggtggatacagcagtcggagaacatctggcagagacaaatacggaccacctgttcgtacagaatacaggcttattgtagaaaatctttctagtcggtgcagttggcaagatttaaaggattttatgcgacaagcaggtgaagtaacctatgcggatgcccacaaggaacgaacaaatgagggtgtaattgagtttcgctcctactctgacatgaagcgtgc

SEQ ID NO: 42143 - DNA, 351 bp, Gossypium hirsutum
  Clone ID: LIB3196-033-P1-M1-F12
atcagggatccctagccctgtacaatgtaatttaaacttacagcatttttactgtgtataatatggtgtcctctgtgccagttttgtaccttatagaggcagattgcctccgatcgctgtggttcttattatcaaaattaagtttacttgtatacggaacaaccacaagaaatttgattctgtaaagaatcctctttagctgtggcctggcagtatataaatggtgctttatttaacagaatacctgtggaggaaataaagcacacttgatgtaaaaataattgttttatttttattgacatgactgattgctattctgtgcacttaattaaactgattgtgatgactttt

SEQ ID NO: 42144 - DNA, 344 bp, Gossypium hirsutum
  Clone ID: LIB3196-033-P1-M1-F2
cccacgcgtccgaaaacacaccaagcgtaaaaactatttgcgccccaaaatcctgaaaaccctcactaaacctttcccttcttccactcctatcaatcccataacccccatagaatcccaacctgaaactaaacctctcgacgtcgtcgttttcgagccgccttctgatgaaaccgataaagttgaagaatttcgggtttcagagacaccgggtgttcttaatggagaaaacagtggcggttttggtaaattttctccttattcagtaatgaaatttggattttattttgttgggatttttttgtttcagactttaattgctgtttgggtgatgggaaattggg

SEQ ID NO: 42145 - DNA, 357 bp, Gossypium hirsutum
  Clone ID: LIB3196-033-P1-M1-F4
ccgaaactcagtttggaaaaactcccaagttacttgctcccggggcacaacagaagtcagagtactccaccaatagtaggcagaatcacgtagcaaggagatagcacactttaggcattcatcgggtgtacaagatagctcatcgagtacccggatagtgttgtccaaccaaaattcagcttgctcggcatcgtcgctatccgtagctttaaattcagtagccccaggttttcagattctgtcaactgggggcttatttgaccttatttggtcagttaccggaggtattgtaggtgcgggggttgtgtttgtcgggaatggaggttgtggaacagccgtattagttcgaatgtattg

SEQ ID NO: 42146 - DNA, 351 bp, Gossypium hirsutum
  Clone ID: LIB3196-033-P1-M1-G1
aaccaaggccttggatcaaaagactccattcgaagcctggtttggattcaagccatcattggctcatttgaaggtctttggatgcatctgttatgctcatgtacctgctgtcaaaagggacaaattgtctgaaagggctcgacctggtattttggtgggctacagcactgttaagaagggctataggatcttggatccttcaacaaagaaagtgtcagtcagtaaggatgtggtatttgatgaaaagtcatgttggaactgggaaaaacatgaacctgagaaagtttcagaaggacttgcagcagatcaagctaagccagatcaaaatgttcctgaaatggacattgatga

SEQ ID NO: 42147 - DNA, 354 bp, Gossypium hirsutum
  Clone ID: LIB3196-033-P1-M1-G10
cccacgcgtccggccttaaccaattcttaacctttttccgatcagtttcctactttcattcttcttcttcttcttcttcttcttcttcttcatattcttcatctttatcagaaaaatggagctttgcatggaagccaaagcgttgaaatcaagtgtaagaggagaattcacgaagaacagccataaccagaaccagcatgttgcttttgatgatttttttagctcaaacggtggcgtttccagtgaagaattttcagttgattgtttttttgattttactaatggagaatttgaagaagaaaatgaagagaaaaattctgcgcttattttctcgcaagaagaaagagtaacaga

SEQ ID NO: 42148 - DNA, 294 bp, Gossypium hirsutum
  Clone ID: LIB3196-033-P1-M1-G2
atggcggagcggagccggacaagttggctgcccgtgttgggagcactagaggccgttgctgtgccgcccctgctctttaaactcggattcccaatggaagcagccgcccctgacctttacactgaaccattttgtaagagaacccagccgacccggctgttgtggggcttttctttgtagaatgccagggcacaaatgaataatttcagaatgtgaaaacttgacagactctaataaatgattcatacactacttctccatgaatatgaaaaccattaataggatgatgagaaa

SEQ ID NO: 42149 - DNA, 303 bp, Gossypium hirsutum
  Clone ID: LIB3196-033-P1-M1-G4
aactagggaaaaaagggataaagggcaaagcgaagagcagcaaccataggaactaaagacagaagcaaagccaatttagaaggggcccagatatacccgtggaaaaggcatcaaaagggggcggccgccattaggggcccatgcttctttccccgtgcatgcagcaagatggccttttttcagggcgccccaaaacataattaccggcccgggctgtcccgcacaggaggcgggaaaaccccggcgttgccccaactgatgcgcttgggaggaaacccccttttgagcagccgtgctataaat

SEQ ID NO: 42150 - DNA, 327 bp, Gossypium hirsutum
  Clone ID: LIB3196-033-P1-M1-G7
cccacgcgtccggtttccacttcctccatagccattttctactgaccagtccaaaaagtcttaacccttcttcattggcttcccgagccataagctgctatcaatggctcaacgacgcccattgccacccttgatcatggacctgaccatcgcagttcgtccaccaggtcatcaacatcctagctcaagaaaagtagatttcatgttttgaagtagatggcaatatctctcctgagctctttcttcttatatcttttcttctattctcgaaattctttgatgattattcgagttttcttgaccttgcaagtccgtaagcaaggtaaa

SEQ ID NO: 42151 - DNA, 217 bp, Gossypium hirsutum
  unsure (1)..(217): unsure at all n locations
  Clone ID: LIB3196-033-P1-M1-G9
gcgcccacgcgtncgcgtgttccaaaaggccttcatttccaaaaaagccattgttggccgggaacccaaaccgtttttgtttgtttccgatccaataccaaaaagtttgggaatggtccaaaaaagccgaaccgtctttttgaaccgaaaaggaagccatcttgctttccaaccttggtaactgggaaactttaacggcggtgagcattaatttatt

SEQ ID NO: 42152 - DNA, 318 bp, Gossypium hirsutum
  Clone ID: LIB3196-033-P1-M1-H1
gtttcagacaagatcatcacagtttcaagtgcctccactggtttactggaaaggatactattcttacatgcatcaattatgtccgcttatgtatcatataagcaaaacgcatcactttggcatttgcacaccatagtgactctgagaaaatttaccttgtggccgaacctatgatgaacgctcacgttcttgcacattagaacaaatattatgtcacattatgacctgtagtttgatccactgacccatcaagtagcaccgtgtacttgtctcactcaacgacacgaggaaaagattatcatagcattgctttaccga

SEQ ID NO: 42153 - DNA, 375 bp, Gossypium hirsutum
  Clone ID: LIB3196-033-P1-M1-H10
atgcccgaacgtcatttcttattttagttgggctgggtcccccagactcccaccacctcaccaggacttttggacagcccaattatactcccagagtaccccaccccaaccccctatgaattcccagtattttcccacgtctcacccccccagcagaacactggtctcacctgtgggtatgcagagctgggcacagggaagacggcaggccggggcatgtgaggcatggggtgggcagggtgagctgggtgagtgaggtactgagggctacagggcaagtggggctgtagagcagtgtaggggtgcaggccaagggagtggccatgccccagtcctggacccgggtacaaactagaccccaccgagatgacgggc

SEQ ID NO: 42154 - DNA, 377 bp, Gossypium hirsutum
  Clone ID: LIB3196-033-P1-M1-H12
atgcaagtttgctgagctgaaggaaaagattgatcgccgttctggtaaaaaactggaagatggccctaaattcttgaagtctggtgatgctgccattgttgatatggttcctggcaagcctatgtgtgttgagagcttctcagactatccacctttgggtcgctttgctgttcgtgatatgaggcagacagttgcggtgggtgtcatcaaagcagtggacaagaaggctgctggagctggcaaggtcaccaagtctgcccagaaagctcagaaggctaaatgaatattatccctaatacctgccaccccactcttaatcagtggtggaagaacggtctcagaactgtttgtttcaattggccatttaagtttagtag

SEQ ID NO: 42155 - DNA, 355 bp, Gossypium hirsutum
  Clone ID: LIB3196-033-P1-M1-H2
ataaacatgaataagtttcatataatctcttaacacattaacttcttccatcaacaaccttttgtttctttatccatcaaaacttaaaggaaataatcaaattccttctttaatagccatagccgaatggtccatccatccatcaaagtttttttaaaaagaattagcatggtctaagtaagaaccatgataattaacctaaaacaagctaaaatttcacaactttaacacaatatactaaccttattaaacattcaaatggccgaaagttctttgcccctattccttccttcaattcggccaagaagacaagaatgaagccccttttttttttcatcacattttcattcttttc

SEQ ID NO: 42156 - DNA, 351 bp, Gossypium hirsutum
  Clone ID: LIB3196-033-P1-M1-H3
gggaaaactgcgaatcttagtgctaatttagccgggagagtggaagggaatgtgtttgacattattcatgggttagaagatttaggatcaaatttaggattctccggcgcgtccgatgttgaccgctgtgttgttagttcaggggtagttaaggatattactcactttgtcggtgtttcggattttatcccatttgcttatgatgttcccggattcccggttgttaaagagtcgacaaaaactgggagtttttgggaaaaagaagaagttcctcctggggagcatataccgagttggttgcctgcttttcctgaccctgagacttatgagaactcgttgagtgtagagaat

SEQ ID NO: 42157 - DNA, 390 bp, Gossypium hirsutum
  Clone ID: LIB3196-033-P1-M1-H6
tttaggcgacactatagaacaagtttgtacaaaaaagcacgctgctgcctttccgggatgccagaataccacaaattcctcatcggcaaggggggcggcaaaattcgcaaggtgcgtgacagcacgggagcacgcgtcatcttccccgcggctgaggacaaggaccaggacctaatcaccatcattggaaaggaggacgccgttcgagaggcacagaaggagctggaggccttgatccaaaacctggataatgtggtggaagactccatgctggtggaccccaagcaccaccgccactttgtcatccggagaggccaggttttgcgggagattgctgaagagtatggcggggtgatggtcagcttcccacgctctggcacacagagcgac

SEQ ID NO: 42158 - DNA, 368 bp, Gossypium hirsutum
  Clone ID: LIB3196-034-P1-M1-A12
atgtcgcgacgagggcgctggtcgagaggcatttggcttgtagcaggtcccgcactccaacctttcgcggccagggtttgctctctgcttgtcctggactgaggtgcccatgacggagttatccaaggaggaagaaatctgttccgggtgagcccaggccgccccggatatgcgatggctgaagagcggacaccagggaccacactgaggttgggtttgagaccaagatactggattcttctagttaagataaagagctttgggtgcctgacagtgaaaatggtgtaatctgcgtaacagttcacagtttgaaggcatgacagttaaagaacacacatggacttgtggcacatggaaatgtgcacaca

SEQ ID NO: 42159 - DNA, 360 bp, Gossypium hirsutum
  Clone ID: LIB3196-034-P1-M1-A3
cgttttcctgcctcgtcacctgacaacgcgctgacgtggacgcgttttcggggtaatagggtcatttcggtaattaattttttaatgggcccattttagtaatttaaaaaaaaatagggcttttattggtattttgccctttttaaaaactataattcttttgcatttctatttttttttacaaaaaagaatttttattaacatttttgaaatacttttccatttttttaatctatacagtttaaaagtttgaagagatttcataatttttggaattatactcttatttatgttttttattcattttataaaatttaaattattttctaaatggtgtataagacaaatattatcatgtta

SEQ ID NO: 42160 - DNA, 350 bp, Gossypium hirsutum
  Clone ID: LIB3196-034-P1-M1-A9
atttacagcttctcttattcatatcaatgttgaatatggagatgggcagcttgaattaaatatggaacggttgagaatggctgttgacgagctccttatgaagcttgcaaaaatgttttcaaaaccaaaattacaaatcgtgttcctaataaacaactgtgacatgacaattgcagttctgaaggaagctggtcctgaaggtgggaaaatccaacagcactttgaggagatgctaaagagtaacacaggattatttgtagaggaacttctgatggagcattttagcgatttgataaagtttgtgaaaactcgagcctcggaggatcctaatggtagcaacgaaaggccta

SEQ ID NO: 42161 - DNA, 358 bp, Gossypium hirsutum
  Clone ID: LIB3196-034-P1-M1-B3
tccgatttagtcccgacttgtttctaatgtctttgtagggcctcgagggctcatataaggaagaatatgtattttattgatttgttttgctgttattaatggtaggaattaaatgttttaaaattgttgatagtgctccgtaaccttattctagtgacagatacgggttaggggtgttacagtaattttgtctggtaagttcgtatgaactgtaatcgctataattttattgaaattaaataattactatgttgtttttaatgtaaatgaatcaatatatatatgaatgtgtctatattatgatgaattgatagatatcaagtcccggttgaaccttaagaattcataggatgcaaat

SEQ ID NO: 42162 - DNA, 372 bp, Gossypium hirsutum
  Clone ID: LIB3196-034-P1-M1-B6
atgcagcgtcatcctcaccggggagtacatcagcaaggatggtgttccatactgcgagtctgactaccacgcccagtttggcattaaatgtgagacttgtgaccgatacatcagtggcagagtcttggaggcaggaggggaagcactaccacccaacctgtgccaggtgtgtacgctgccaccagatgttcaccgaaggagaggagatgtacctcacaggttctgaggtttggcaccccatctgcaaacaggcagcccgggcagagaagaagttaaagcatagacggacatctgaaacctccatctctccccctggatccagcattgggtcacccaaccgagtcatctgcgacatctacgagaacctggacc

SEQ ID NO: 42163 - DNA, 365 bp, Gossypium hirsutum
  Clone ID: LIB3196-034-P1-M1-C11
atctctgtgagtatttttaaataaacttattttggacagtatgagctttgggaagggaatttatatacatgactttaaaagattttccttattattttcagatttcaatgttaagaaatagtttttttttaaagctatattttcagtgatggctttaatgtcagtgagaaaccaaaccctatatctgttctcataagcaatctaaaccatagaaattagtgagacttaaatgcatcttttaattttattcttagaaatttgattttggtcttgaagtggcaggtgcaaaatacaaaaacaaagattagaaaaaagaaattaaagaaaagaaatttaattttgggctcttggcctttctagagtct

SEQ ID NO: 42164 - DNA, 325 bp, Gossypium hirsutum
  Clone ID: LIB3196-034-P1-M1-C12
atcagctccatggtgatccgggacctgaccctgcgcagcgccgccagcttcggctccttccacctcatccgcctgctctacgacgagtacatgttctacctggtggagcaccgcgtcgcggaggccaccggagagacgccgatcgctgtgatgggagagttcaacgatctcgcctctctgtcgctgacgctgcttgacaaagacgacatgggtgatgagcagcgcggcagcgaggcgggcccggatgcccacagcctgggcgagcccctggtgaagcgggagcgcagtgatcccaaccactccctgcagggcatctagcagcccc

SEQ ID NO: 42165 - DNA, 365 bp, Gossypium hirsutum
  Clone ID: LIB3196-034-P1-M1-C3
atgcttttttcttttaaaagctaaaaaaaaaaaaaaaaaatacttttaattcctttttgttatgttagataattgagatcacatagaaatgcatttaatctgttcacccactgtaaattttattttgaggacccagaattttcttgtctaatttatactttcacccatgttgcagttaacaccagagaaggaacgtgaatgttgagcacagccactacccttgttggcactaaatttagaaatagggtgagaaggtttaaaagcctgtaaacacccatcttgattttattttcattccttttggttctctgtgtaataatagtaggctacatagtgacattccagttccaagaaggtacatcctg

SEQ ID NO: 42166 - DNA, 227 bp, Gossypium hirsutum
  Clone ID: LIB3196-034-P1-M1-C9
gaagatgtcagttgtggatgctgctccacagaggagcagcatggtaacacaaggaatgatcaaaaaccaatgctgtagattacggattaaatacattgtgtgaaaacaaacgcgaagtgaacacgtacattgtggaagggattcaaaccaataacaaggcaactacacatacatgtgtataacacaaaaaggctattagtagtcatacatgggcgaagatcttattg

SEQ ID NO: 42167 - DNA, 353 bp, Gossypium hirsutum
  Clone ID: LIB3196-034-P1-M1-D12
gagggattcaagtgcaattatggaggattctgttgaatgtaagaaatgcacacattgtgatgatgatgttgtgaagttggattcaagtgacattaaggaaaaattgtcttcaaataagaggaagagggattcaagtgcaattatggaggattctgttgaatgtaagaaatgcacacatagtgatgatgatgttgtgaagttggattcaagtgacattaaggaaaaattgtcttcaaataagaggaagagggattcaagtgcaattatggaggattctgttgaatgtaagaaatacacacatagtgatgatgatgttgtgaagttggattcaagtgacattaaggaaaactttt

SEQ ID NO: 42168 - DNA, 357 bp, Gossypium hirsutum
  unsure (1)..(357): unsure at all n locations
  Clone ID: LIB3196-034-P1-M1-D4
accacgcgtccgggagggcactgtcctattgccccatcaaccgataccggcatttgtgttcaagcccctgcagagaaaggattgaccagctttgccattgatttccataagtgtggagtgagcgcatctgtgccaaaaacagctgatggtcctaaagagcgtgttaagctgttgatacagaaccgagatgaaatgatcataactgggaggctatcagagccctacaagggtatacagggataggctcacgcgaccaatgaatagatgaaggagtggaccctttgtggaggcgtaacacaagataatgntatacgctatcaccccactcatactttgaacatggatttcaaggactac

SEQ ID NO: 42169 - DNA, 341 bp, Gossypium hirsutum
  Clone ID: LIB3196-034-P1-M1-D7
cccacgcgtccggccatgcgttctaaccaagccaaatcaaaagcttcctttatttgtgtttgagactccgcacatatatgaaacacccacattttcctacaaatattacattgctgtgactgtgaaacttacattaatatcagaaaaacttcctaaaacaccatgctttctttaataaacctatccacattttatttaactaacacaggatgcttactcagtcctacttggatctcaacaccagaattatgtgcattgtgcattatgaagagcctgcacagtggcttacgcagccaacctttatcttctaaaaaaccgctacatgttgactccattgacaa

SEQ ID NO: 42170 - DNA, 372 bp, Gossypium hirsutum
  Clone ID: LIB3196-034-P1-M1-E10
atgcggcggcggcggcggtggtatcggcggcggctgtgagggggttccgggaagatggtgctgatcaaggaattccgtgtggttttgccatgttctgttcaggagtatcaggttgggcagctttactctgttgcagaagctattaagaatgatactggcggtggagaaggaattgaagtcttaaagaatgaaccttatgagaaggatggagaaaagggacaatatacacacaaaatttatcacctaaagagcaaagttcctgcattcgtgaggatgattgctcccaaaggctccttggtgtttcacgagaaagcctgaaatgcgtacccctactgtagaacaattgttacgaatgaatatatgtaagatgat

SEQ ID NO: 42171 - DNA, 369 bp, Gossypium hirsutum
  Clone ID: LIB3196-034-P1-M1-E11
atctttccaacgccatggccagggcgctgcaccggcacattatgatggagcgggagcgcaagcggcaggaggaagaagaggtggataagatgatggaacagaagatgaaggaagaacaggagagaaggaagaaaaaggagatggaagagagaatgtcactagaggagaccaaggaacaaattctgaagttggaggagaagcttttggccctacaggaagagaagcatcagcttttcctgcagctcaagaaagttttacatgaggaagaaaaacggaggcgaaaggaacagagtgacctgaccaccctgacatcagctgcataccagcagagcctgactgtccacacaggaactcatctcctcagcatgc

SEQ ID NO: 42172 - DNA, 431 bp, Gossypium hirsutum
  Clone ID: LIB3196-034-P1-M1-E2
cactatctaacaagttggaacgaagaagcacgctggtgccccgccgcaatttccgggatgcggccgacgcggccgtgggatctgcggtggctgtaaaggggttacaggaagatggcgctgatcaaggaatttcgtgtggttttgccatgtgctgtacaggagtatcaggttgggcagatttactctggtgcagaagctattaagaatgaaactgggggtggagaaggaaatgaaggcttaaagaatgaaccttatgagaaggatggagaaacgggacaatatacacacaaaacctatcacctatagagcaaaggtcctgcattcgtgaggatgatagctcccgaaggctgcttggtgtttcacgagaaagcctgcaatgcgtacccctactgttgaacaattgtaacgaatgaatatatgaaagatgagtt

SEQ ID NO: 42173 - DNA, 359 bp, Gossypium hirsutum
  Clone ID: LIB3196-034-P1-M1-E3
cccacgcgtccgcaaaactgttagacagcagaataggggaaggaaaaagataccaaatttccaatttggaaacaagataatagagatctaacatttcattacatataaaccaaacatttctttcaagaacttccaaatcaataggttaaagatttgagtttgttttaagataagaaacttacacataccaaaggaaaaggggtcaactttgctctgcagaaaatacccagaacaagaactaaacaagatctttcttttcgtgagatcaatgaaacatgaagaaaggagatttgggcttggtttttgaagtcaggtaacggctggcaggctgtgcaaatgttaccatccttctatactta

SEQ ID NO: 42174 - DNA, 255 bp, Gossypium hirsutum
  Clone ID: LIB3196-034-P1-M1-E5
ctatttacgtgacactatagaacaagcttgtacacaaaagcagtccggtaccggaactgaattctcgggatcattgcaacgccatgtgcatggcacttctttgctttcttttagcggttgcttagttgatctcttccatgaatgatgtgctcatatagatctcgacataaccataagcagaacccgccttgagggcgaaactgagcaacctcagccacgtgaccaatcccgatgccaactgcagaacttgaatgc

SEQ ID NO: 42175 - DNA, 373 bp, Gossypium hirsutum
  Clone ID: LIB3196-034-P1-M1-E8
atgggcaagagggcagggacggagcgcagggtggccagcgtagggtccagcacgtggggtggtaccccaggcccgggtcagacagggacaaggcaggggacacaaaacagaggggtccccagctgccacctcacccaccgcaattcatttagtagcaggcacaggggcagctctggcagggctttctcaggcctatgccggagcctcgagggctggagagcgggaagacaggcagtgctcggggagtagcagcaggacgtcaccaggagggcgaagcggccacgggaagggccccgggacattacgcagcaaggaggctgcaggggctcggcctgcgggcgccgttcccacgaggcactgcggcccagggtct

SEQ ID NO: 42176 - DNA, 352 bp, Gossypium hirsutum
  Clone ID: LIB3196-034-P1-M1-E9
cccacgcgtacggtgcctagcgctcatcaatgtgtttgacacccagtgccttataggtataactgaattataaatgtgcccagcacttatcgattcgtagtcgaagtaacttgtacatgatctatcctacggcatgccaactatatccgactctgcctaaaaagttaatagggtaaccttttattcaatcatcatattgttcaatatgcatttaaacaattcaattcatcattttatcacatagcatatcctatttcaaaccattttaaaatcaattccaatcaaattacactattttcagttatattcaatttaatcctttatcttaataatcagtcaaattcataacatt

SEQ ID NO: 42177 - DNA, 373 bp, Gossypium hirsutum
  Clone ID: LIB3196-034-P1-M1-F1
atggtttgtgctccccccactgcctatatcgacttcgcccggcagaagctagatcccaagattgctgtggctgcacagaactgctacaaagtgactaatggggcctttactggggagatcagccctggcatgatcaaagactgcggagccacgtgggtggtcctggggcactcagagagaagacatgtctttggggagtcagatgagctgattgggcagaaagtggcccatgctctggctgagggactcggagtaatcgcctgtattggggagaagctagatgaaagggaagctggcatcactgaaaaagttgtttcgagcagacaaaggtcatcgcagataatgtgaaagactggagcaaggttgtcctggc

SEQ ID NO: 42178 - DNA, 372 bp, Gossypium hirsutum
  Clone ID: LIB3196-034-P1-M1-F12
ataaggacattactaatgacattttgcaaagtaaaaacattcatttgaacatagtcccctagaaaaacaactctacaaaaattttgcagccttattcattataattttaataaaattaacacaaaatcagtcaagaagaaggaaacatgtatattagcgaagtgtttttggagactatttgaatgtgaccaaatgtggttctggttgacttcttttcactttggcttatatcagctcttgagagttaagtctgatcatgatattgcaaacaactgtaaatggtctctaggccttactttgtgattatacgttatctcctgctagaaaaagaataatgtagtaaagaactgacaaactgaaaaaaagaaacaa

SEQ ID NO: 42179 - DNA, 377 bp, Gossypium hirsutum
  Clone ID: LIB3196-034-P1-M1-F2
atgaccaaataaggtttttgatctttgcgtagtgtgtggagacaaagcatcaggacgtcattatggagcagtaacttgtgaaggctgcaaaggattttttaaaagaagcatccgaaaaaatttagtatattcatgtcgaggatcaaaggattgtattattaataagcaccaccgaaaccgctgtcaatactgcaggttacagagatgtattgcgtttggaatgaagcaagactgtatgtattagcttttaaggagaaaatactttttaaagattccagcaaactagaagagtattgaaattaacaaattaaaataggtcaaatatgtatactttttagtttacagttttccaactaaaaatataagaatacagacat

SEQ ID NO: 42180 - DNA, 366 bp, Gossypium hirsutum
  Clone ID: LIB3196-034-P1-M1-F8
ataaaaaatgtttatttaaaacaatttttaaaattataaatgtatttttatagccatatgtagggtataaagattaatatgatgttctcaagctacttaatactttgattcgtgaaatggtaagtaaacagttttactgaaataaactctacagatagatgcaacatgaggagttattgaagcagaaaatgtgttttgctttgtacactgtgtgtgtgttagcagacagcctcaagtaggtttccataacagccactgcctttgaatctaccttctgtagcttaatatgtataggaaaatatatcctgattctgtagcaagtagattgtttgctctttgtcttttaagaaatactaagggagggct

SEQ ID NO: 42181 - DNA, 346 bp, Gossypium hirsutum
  Clone ID: LIB3196-034-P1-M1-F9
gctttcggtcctttacctttacctttacattgtgcccaactccatctctctctttaccaccccgctctgttaatatccaaaaaccaaaacaatcccaaattcaaaaaaataaaaaataaaaaatctagggttttcttctaaaaggcttctttgttttgttgatcaagatattggttgataattagcaggacatggaagataccaagtctgaggcgcatataacctctgctgcagcttttgtggaagggggaattcaagatgcttgtgatgatgcctgcagtatatgccttgaagcattctgtgaaagtgatccatccacggtgacctgctgcaagcacgagtttca

SEQ ID NO: 42182 - DNA, 372 bp, Gossypium hirsutum
  Clone ID: LIB3196-034-P1-M1-G10
atggtgcctctggtcccaggtcgggagctctgggccaggggatccaggggccttggggtggggaaggctggccaggagcagcaatgtctgtgcaggtggtggctcccggaagtgcggggctgggcccagagcgcctgagccctgaggagctggtacggcagacgcggcaagtggtccaggggctggaggcgctgcgggcagagcaccgtggcctggctgggcacctggcagaggccctggcgggacagggcccagcgactggcttggagatgctggaggaaaagcagcaggtggtgagccactcgctggaggccatcgagctggggctgggcgaggcccaagtgctgctggccttgtcggcacacgtgggtg

SEQ ID NO: 42183 - DNA, 362 bp, Gossypium hirsutum
  Clone ID: LIB3196-034-P1-M1-G4
atccgatttctgcccgaatagccaagaaacccaagctggaggagtaatgtttgagatccaacctggcggccacagacgtgaccttcctcctgtgctgcgtccccttcacggcgctgctgtacccgctgcctgcctgggtgctcggcgatttcatgtgcaagttcgtcaactacatccagcaggtctcggtgcaggccacgtgcgccactctgaccgccatgagcgtggaccgctggtacgtgacggtgttcccgttgcgcgccttgcaccgccgcacgccccggctggcgctggctgtcagcctcagcatctgggtaggctctgcggcggtgtctgcgccggtgctcgccctgcaccgcctg

SEQ ID NO: 42184 - DNA, 365 bp, Gossypium hirsutum
  Clone ID: LIB3196-034-P1-M1-G8
atcacaccccatgtggcctcagggacttcactctaggttcatcctgtttttcgagttgcctggctgatgtgaaaaagaaaacacggtttgaatcagtagaaagtgtcttgtcagactgactcatgccatctgtggtccgttctgccttgtcctgatgagtcattgccctgtccccaaaacatctggagctttgagagggccgggtggaaaccgcagtggcagtagggggttctgccgagggtgtggtctctttgcaattttgcagagaagctgaacaccgtgaacattcaacatgggcacctgagttctccaccaggctccttctctaagggcatggttgcagctcctgctgggtgggttttgat

SEQ ID NO: 42185 - DNA, 365 bp, Gossypium hirsutum
  Clone ID: LIB3196-034-P1-M1-H10
ataaaacacttaaaatagttggtttaaaagaacttttatttctggaatgggatgatttggatgtgacctgataaataagagtttattattgtggtctcattaaattaatcagctttttcacattggggtaaagaaacagatgacgatactagggaatggaaacaaaattggaaacttgggttatctggggatttatattgtactctgcacagttgcccttttttttaggagtgttccctggaaaagagggatggatgaacctggaagtaagtaaaagacattctaggtgtgtagcatcaaggcagttaatatccaagcatcagctttctctttatacatctacactgcatggcctgcaccaaata

SEQ ID NO: 42186 - DNA, 368 bp, Gossypium hirsutum
  Clone ID: LIB3196-034-P1-M1-H8
atcggccgcgcagtaggacgcagccctatccgagactcgcgccgcgccgatctgatttgtgtccactgtcaccagtactgctcacttaggactttctggatccagacccagctgcagcgcacacgggactcctgaggaagaaggagactgtgattttggattccttggtggaggaaaatcaaacactctggtcttgcccccaacgatgcaagtgtgactgctggcgtcttcatgagctccagaggtcacagcacactaccaaggactctcatggcccctcggatgatttccgagggagacttaggaggcattgctcaaatcacctcctctctattcctgggcagaggcagtgtggcctccaatcggca

SEQ ID NO: 42187 - DNA, 344 bp, Gossypium hirsutum
  Clone ID: LIB3196-034-P1-M1-H9
atgtcatccactgaacaaggtggttgggctggtggcaggagctgggctcaccgggctctaagggccagcaaccccgtcggtcctttgttcagggacataaggaccccggataatgggataccgttactagctgggacaagcttaatgcatgacagtagctgccacaggaaagacgccttctaagaagctatgttccaactggcaactcttgccttggctggcgtgacctgtaacgtgttgcagggctgtaaaccaagtgtcgcatctgcgctctgacaaacacaccatgccagatgactaagaggctccgtttcgaaaggtccgacactttgcattatatgcct

SEQ ID NO: 42188 - DNA, 338 bp, Gossypium hirsutum
  unsure (1)..(338): unsure at all n locations
  Clone ID: LIB3196-035-P1-M1-A1
atcccagatgtggacgcgaacctcggggnggggtgggtagttggtgttggacccaaggtggacactgatgtcccagaagtgaatatcgaaggtccagatgcaaaactgaagggccccacgttcaagatgcctgatagtaatatcaaagctcccaagatctccatacctggtgtcgacctagatttgaaaggacccaaagggaatggagagtatgatgtgtccatccctaatgaagaagggactttgaaaggcccacaactagaccttaaaggtccaaacctggatttccaaagccccaatgcaaaactcagtggcccatctttgaagatgccatcacc

SEQ ID NO: 42189 - DNA, 399 bp, Gossypium hirsutum
  unsure (1)..(399): unsure at all n locations
  Clone ID: LIB3196-035-P1-M1-A10
agnnnnatcctggggtgaataataatcaagtcattcatcacaaagacaaatgacccgtgaccacgtttacaagtaagtaaatccataaacagatttaagatctaggtatgccacattatgaacgtcacaagtgaataaatacataaatagatttaggatctattcttcttgggtcctgtccgatgtactgtcagtttagtcagttacatctatgtctttattttctgggagtcattcattccgatgcccaaaacaaagcatcttcctaattggacttgataaatgacatattagtcattcaatcgattcgttcattttcnattagactgaagacatgtttaannntgtctacaagctgccttttcgtattacaattctatcacgtaatattgcttagta

SEQ ID NO: 42190 - DNA, 403 bp, Gossypium hirsutum
  unsure (1)..(403): unsure at all n locations
  Clone ID: LIB3196-035-P1-M1-A3
cggacgccccncctgtctcgtggggtgtacttctaagtctcttgattttatcgattttagttttcattcagctgaaaagaaaatttgaaaaaaaaagattattattattttttattttttgcatctggattcttcaaaatcgaataacgagatactcagcacaatggctaaaagtagcttcaagatcgagcatgactttgagaaaaggcgcgctgaggctgcaagaattagggtaaaatacccagatagaattccagtgattgtggagaagacgaaaggaaacgacatccctaacattgacaagaagaaatacttagtaccagctgacttgacagtgggtcaatttgaaaaaaaaaaacgcaaaagaatcaaattgagtgctggaaaggctatcttcttattt

SEQ ID NO: 42191 - DNA, 423 bp, Gossypium hirsutum
  unsure (1)..(423): unsure at all n locations
  Clone ID: LIB3196-035-P1-M1-A4
atccgccccgcgcctcgtcggccggnnnnaggcactcagcgtgcggccgagcagctgtgtatgctgagccgctgccgcagccgactgctccacgtcctgggccttagcttcctgctgcagacccgccggccgattctcttctgccctccccgtctcatgaagccgctggtagtgttcgtcctcggcggccccggcgccggcaaggggacccagtgcgcccgcatcgtcgagaaatatggctacacacacctttctgcaagagagctgcttcgtgatgaaaggaagaacccagattcacagtatggtgaacttattgaaaagtacattaaagaaggaaagatngtaccagttgagataaccatcagnnnattaaagagggaaatggatcagacaatggctgccaatgctcaagagaataaattc

SEQ ID NO: 42192 - DNA, 318 bp, Gossypium hirsutum
  unsure (1)..(318): unsure at all n locations
  Clone ID: LIB3196-035-P1-M1-A5
acacccaagaacaagagggaacgcaaaagcacgctggtgccccgccccagtttcccggattcgacccacgcttccgccttcttnnnnaaagcgcaagaggttagtcccgtggatagaagcccccgtcaagactgctagcctttcccgttcactaagcagaggctacctccaatacacatccagacatgatctccttcaaccgaagctaagaaatctggacacttaaatctaccttgcaaataagaatactcccactcgacgagatcgtaccacggccacacatttaagccggggctcattatttctatccggtcctaa

SEQ ID NO: 42193 - DNA, 316 bp, Gossypium hirsutum
  unsure (1)..(316): unsure at all n locations
  Clone ID: LIB3196-035-P1-M1-A7
tctgnnnnagcntgcgaggaaantcctcagtcatatttacgaatcttcagccgagaaattcttgaagctgtcttcaatacacgaagtgagcagctagacgagctgtttggtgggaggcaaagccatcgaaggcggtcaggacagggaatgttccgtaaagccagccaataacaaattaaggcattgagccaaaaagctacttcaccaaagggaaaaagtagcgagggattcgccttctacttattgagccaaacccctcgcttcttcaaccaaaacaggcgcttctattaagcttgcccttataattttcaacagc

SEQ ID NO: 42194 - DNA, 394 bp, Gossypium hirsutum
  unsure (1)..(394): unsure at all n locations
  Clone ID: LIB3196-035-P1-M1-B11
nnnaatgtttacctcggancaagtctttattatattattagggacttaagaaaaagaatgaagtaatttcattagggtcttactttttaaagaagttaaactctcttttaatcaggtataatgataaacttcattgtttacctcttttgttacattgactctaattattactttttgatcattttaacttttaaccttaaatttttagttaatttacttttgttccggcaaaaaattaagtagtttggtaaaattttaatggtcatgacatgatcgcctattgaccattcgcgtgtacataaaaaatccaaacttaaaaaaaaattccatttgttttgnnaagattattcacttcaatagtaaaaatatatgtatattgttacgtgagctgtca

SEQ ID NO: 42195 - DNA, 362 bp, Gossypium hirsutum
  unsure (1)..(362): unsure at all n locations
  Clone ID: LIB3196-035-P1-M1-B2
atgagagatagcaccggcctgaggtnnnnnaggagctgaactatactctcctttgaagactgccggacgacccccgcgggagccggggcccagaaacccgcccgggcagcagtaactggaacggagcccgcaggcctgggccggctgggctgcgcgagctggaagcggggtccccgggcccctttgtgtgaagggcgggggagggttgcgggcagccccgggctgcgggctactctgacgtccgcctcgccgcggggtcctctcgtcgcggacccccccttttgcttcccgggggcacgcgcgccaccctagccgggcttcctccagactttgactcctgcccacgcccgctgattgttttt

SEQ ID NO: 42196 - DNA, 349 bp, Gossypium hirsutum
  unsure (1)..(349): unsure at all n locations
  Clone ID: LIB3196-035-P1-M1-B3
atgagatttgcctgatcctcttcaannnnntcgtgctgtgccggctccagccctgtaccgacatcccacttcccgctgttcccatctgtgttctgggtgggatcggtctggaagcggtcgacgacttcccaggcaggagctcggggcacatgccgagtccgcgggagaccacggcagccaggcgctggctggcaggggacaccgcggtgccagcctgaggctgggctgctccgcgaggatgcagcggcccctgccctgctctgccctgtcctgttctgccctgtgtcctgagagaacatgttaaccgtgcactttgacaagccgggaggaccggaaaacccctacgtga

SEQ ID NO: 42197 - DNA, 145 bp, Gossypium hirsutum
  unsure (1)..(145): unsure at all n locations
  Clone ID: LIB3196-035-P1-M1-B4
aagagaccccnnattnttagatggatnccataatgatgacgctgtcgatagtgtctggagcattggtctgaggaaaaaaggcaaaccaaagaaatgggggaaaatgtcaatgaatgggaaaatcatgaatattttctgcatggag

SEQ ID NO: 42198 - DNA, 293 bp, Gossypium hirsutum
  unsure (1)..(293): unsure at all n locations
  Clone ID: LIB3196-035-P1-M1-B5
attttatgnnnnatgaatgagattttttgntcaagcaaacaaaagagatcaaactttgtaaaacaacgatcatcccctcatttccttccccaatcatcttcaagtttttcattattcttatactctcacccaaacctcacaatctcaaataccatatcaaatcgatacccaactttactagacacaaactacatcaccacttcatcattgagcgctcaccgctaaacccacatcgaaagtttttttttttttacaaacatacccaaactttgttttgcatatttcttttcatg

SEQ ID NO: 42199 - DNA, 410 bp, Gossypium hirsutum
  unsure (1)..(410): unsure at all n locations
  Clone ID: LIB3196-035-P1-M1-B6
attccggagctgcgggctcactggtnnnttgggcgtgggacggcgcggcgcggctcggtgcatttccaggggccgcgctccagtgcgccgtagagaaccctgaactcggagcgctgaaagtcccagcagggcaagggggcgcggcgtcctggtcctcgcgcttgggagacagatgcgcctgggcgtcggggcatgcggacctaagctcgggtgaagctctcgggaagggcatgacggctgcgacaagatgcgagcagaagagcccagcgtcccgggagcccagcgcgcgccgggccccgagctgcgcctgtccagccagctgctgcccgagctctgtaccttcgtggtgcgcgtacttttctacgnnaggcctgtctacctagctggctacctgggggttaacataacct

SEQ ID NO: 42200 - DNA, 300 bp, Gossypium hirsutum
  unsure (1)..(300): unsure at all n locations
  Clone ID: LIB3196-035-P1-M1-B7
nnnncgttcgagtttggcgttattacagtgagctgtagcttacatagtctatagtgtgtagggatggttctgatgatctgaaactcttgcaccctattactgtaaggttgcatctagctgctgttgatcagttgatgtttctacaaaataatctgaggggctgcattgaagtgaaagctgcttatctttaccagtaacggacaaagtctaaactctcagaacctctttgtttctctaaagtagatcatttctgcttttagtccatattggagacgatggaggacatctttattgacaccc

SEQ ID NO: 42201 - DNA, 383 bp, Gossypium hirsutum
  unsure (1)..(383): unsure at all n locations
  Clone ID: LIB3196-035-P1-M1-B9
attgcacgggagcttgcgnnnttgttttatcccagggtgtcctctgtcccttacccaaccccaactcctcttcctctgccaaaagctattcgaattcaaagactttaacctgggctggatctggtttggagacataaaggggacagctctgggtcaacatgaccttctttagagccaccaaagctaaaaataccttttgggaccaggctggcctagacccaaggatgagaatgcaccctaaaataaatatacgggaagcagcagagggcttccctgtctagtgtgtgatcctaactaaaggcagctctcttgaacagccttcccctggattaggtcacatacacccggtgggccaaaaaaaaactgggttccaaatacacacc

SEQ ID NO: 42202 - DNA, 405 bp, Gossypium hirsutum
  unsure (1)..(405): unsure at all n locations
  Clone ID: LIB3196-035-P1-M1-C10
atggagcttatcacagattttnaaggagaggatactttntctcatcagcgtccctgtttattaaaaagtttgaagagagaaggtgctaacaaactcagatatcctcccaacagccagtcaaaggtggattggggaaaattttttctcttgagacggttcaacaaagaaaaactcggtctcctggtgctcactttcctgggcattgtagccgctgtgctggtcaaagctggatattactgaaaaatgatcccgttcaacctcctagtgcctctactgaattattcctcttttaaatggttaatgaaccaatactttttaaatcctaccaaaaatagttagaaaatatgcaaacacactgtnntcaaactcaaaagtcattgccattcatcattaataaaacttgcc

SEQ ID NO: 42203 - DNA, 396 bp, Gossypium hirsutum
  unsure (1)..(396): unsure at all n locations
  Clone ID: LIB3196-035-P1-M1-C12
gcgnnnnttgttgtcgagaattacccggattttatctcgtcggttcgggagttcgcggatgcggacccggcccatcggaagatcttcgtacacgggttgagttgggataccactgccgaaacccttaccgccgagttttcaaagtacggcgagatcgaagaatgcaaagcggttactgattgggtttccgggaaatcgaaagggtacgcttttattctatttaaacataggagtggggcgcggcgggctttgaaacagccacagaagaagatcggtattcgaaccacttcttgtcagctggcagcgcaaggaccggtttctgctccgcctcccaatggtacgnnagtttccgagtatacccagaggaagatttttgttagtaacgtatcgcctgaa

SEQ ID NO: 42204 - DNA, 400 bp, Gossypium hirsutum
  unsure (1)..(400): unsure at all n locations
  Clone ID: LIB3196-035-P1-M1-C4
tctctgatnnnnntagatgtaatatttcttacccgagactgttgccagaatcgagcacgaggcattactaaacttaatctatcacttaaatagttttaaattgtttatttaagcttttcggaatgtgctgccactctgcgtcgtagtcgcctaaaaattcatatcttgagttccaaaactcaaaattaagatccgtaaatttttactgaaactagactcatatatctatctactaatttttttcatagattttttgacttggccaattagtacagtttattagttaaagtttcccttgtttcaaaactcgactgcactaacctcttcttgctacgaaccatgtttnnntctgtacaaaattcatatcactaagcccgttgtttctattaaaactagactc

SEQ ID NO: 42205 - DNA, 403 bp, Gossypium hirsutum
  unsure (1)..(403): unsure at all n locations
  Clone ID: LIB3196-035-P1-M1-C5
ntgggaatnnnnatggtgtgacaaatggaactgataaagcagcacttgtagaagtgcaagtaattgaacctcctgaaagtgataaaagtaaaaaggaaacatatgtattcacatctaaagtcattcaagtagaagcagatatagtagtagagacatttcccttgcggcctgttgctaagccaactgatagcgtcaatggaatgtctagcgaagttgggaaattagatgaaaatttgtataaaacggaaaatgggaagctgaatgtgagtcaagaaaatggtagttttaagttggatggtatgaattcctctgaggtttctgtgttgacagatgatggtaaagaagtannnaacaatgtgggtttgttgttggaaaagaattccaatttaacagattagaaaat

SEQ ID NO: 42206 - DNA, 218 bp, Gossypium hirsutum
  unsure (1)..(218): unsure at all n locations
  Clone ID: LIB3196-035-P1-M1-C6
ggttannattttatggacccgacactacaagggatgagcttcctaatatctgatgccatggctgaatcaagacataccaaagactggctgcacataacacaaatctgagagttgtagacctccaagagccgagtgactcaagaaactgctgaaaaaaactgaactgagagggagtgaaatgacaaagagagagagaagggggaggctaactgacattt

SEQ ID NO: 42207 - DNA, 267 bp, Gossypium hirsutum
  unsure (1)..(267): unsure at all n locations
  Clone ID: LIB3196-035-P1-M1-C7
atctctcgggtcctagggggnccgttctcgtctaaacacgcttatcgcgcgtccgggccttccacctcgcggaaggggctccccaccacttggatttctgttgcaggttgagaacaaaaagatgcacctggactttccccggagccctctgcgtggttgagcttcgggggaatttcggggctcttggctgccagccgcgcttgcctggtagcaacaaaaaccaatcccgctcgcctccgtgccacaaaaaaaccacacccaagatca

SEQ ID NO: 42208 - DNA, 269 bp, Gossypium hirsutum
  unsure (1)..(269): unsure at all n locations
  Clone ID: LIB3196-035-P1-M1-C8
atacaagctccagcagannnncctttgcacggcgacntgcctgagaggacccaccccccggtgtccggtggtcagtcgccccacgatggggactacagtcagagcagccttggtcttggcctatttggccattgcttctgctgcctctgaaggaggccttaaagctacagggcagaggcagctgaggccagagcactttcaagaaattggctacgcaactccccccttcccacccctattccgaagcctcctcatggatcaccctgaca

SEQ ID NO: 42209 - DNA, 296 bp, Gossypium hirsutum
  unsure (1)..(296): unsure at all n locations
  Clone ID: LIB3196-035-P1-M1-C9
aaaanaagaaaactataattncgaacacgatggaatcctgtctgctatctcttattgcacctcggctttcactttcaccgaccctcaagaatcgccttcgcaacaagatctcaagcgccttaagcttatggatgttgtctctctgctcaaatcaccaaagaagccattgcacgaacagcttttttcacctctaatagtccatagagtctgtcaatctcttcaagccacttcctccaccttccaaaacttacatcgtctctgccttgcctgatgatgaagaactcttcactttcaca

SEQ ID NO: 42210 - DNA, 397 bp, Gossypium hirsutum
  Clone ID: LIB3196-035-P1-M1-D10
tcggggaattttaaagtagtgagaagaatgcattcataagagtcgaacatgataaattcttcattattttatataatatatattatatctgagacattcaacatcaaatcaaatcaacacaagagtttatgttttatatatatttgaagcactttgggtgattagtaaaacccgagtggattgagttggaaacataagtaaaaagttaatgaagacatcaatcaaatcatggcattgctggtgttttttggtacacagattctgaggacaatttgacctatcaaatcatatctagaaaacctatattactttttttttcctaataatattaatgatttaagggtgttcttaaaaatataataagaatttttaaatctcattgtgaataaaaatgatc

SEQ ID NO: 42211 - DNA, 260 bp, Gossypium hirsutum
  unsure (1)..(260): unsure at all n locations
  Clone ID: LIB3196-035-P1-M1-D12
tgnnnncatttgggagggcgganatgccaatggcgtctatcagagagaggtttcctgtattggttggttttataatcaccgccatcactatcattcaaagtttattcgctctaaggttctgaaatgagttttgaaaaattataggtgaatgtatagtagaggttcctatattaatagtttgattgcattttaccccatctatttaataaacgagtcatttaatcattgtatgtttgatcaaaattaaacaaacttttaaa

SEQ ID NO: 42212 - DNA, 402 bp, Gossypium hirsutum
  unsure (1)..(402): unsure at all n locations
  Clone ID: LIB3196-035-P1-M1-D6
tacaaaannnnntgtntgaaggactcnaaggtgaaataaatgaaatgtatcgacttatatgggtactaggaagattcggcccttaaagagtgtgaccaaactttgtgtattttgtgttttgtggaataaagactaaattgtgaaagtgcgaaatattaggggtaaaaatgtaatttaccgatttatgcgttattagactaaattgaatgaaaatatgttaaaatgagatttatttgaatatgttaagatcaagaaaccaaggaattggatttagatcggggaaaatcgaaagtagttgagtagtcgatcatttagtcgacgacatccgaagaaagtttataagcannnagatattaaaatttcggaataaatgtttgttatatatgctgaaatggaaatatg

SEQ ID NO: 42213 - DNA, 186 bp, Gossypium hirsutum
  unsure (1)..(186): unsure at all n locations
  Clone ID: LIB3196-035-P1-M1-D7
atggcaaagatctgtggnnnaaggagttttctgttttggagcgagaggactcctgcgcctccatgtacagccgctccatccagggtcaccacgtctgcctcctggtgaaaaagggggagaactctgtctcggtcgatgggaagtgcagtgactccacgctgctgagcaacttgttagaagagatga

SEQ ID NO: 42214 - DNA, 331 bp, Gossypium hirsutum
  unsure (1)..(331): unsure at all n locations
  Clone ID: LIB3196-035-P1-M1-D8
ggnnnnacgnatgggatgacttaaggaacaaagtgaagttggaaggagagcagcgggatgatctcgtctctacttccagtcagaattctcatttggtttcgaaggctactcgcttatgggagtctatattatctcgtaaaagtcagcatgaagttcttgcttcaggacctatcgaagatttgatagctcatcgggagcataagtatcgcatatctgggtctgctttgctttcagctatggatcaaaggtcacaagttcctcctacagatgtcttatccgttcagtcgggtgatttaaatggccaagaacaaaatgaaggatttcacacaca

SEQ ID NO: 42215 - DNA, 346 bp, Gossypium hirsutum
  unsure (1)..(346): unsure at all n locations
  Clone ID: LIB3196-035-P1-M1-E1
atcataactcttgttcatcttcatgnnnnatganagaaaagagtaggttataaataaaattttacggggacaaggccaggactggaattgcacagaggcaatgagaatgaatgattggaaccgaaatactcttaagatcctgatcactgagatagctcttcataccagtatggtcgataagaccattagtttattatattttctagtactaagtggccttcactgcctacttgtccagtctcttatgattcttcctcatatccaaatagatgacctttctgaacatcatcctgctccttgataactctagcactcattgattgctttcacccttaacccttttcct

SEQ ID NO: 42216 - DNA, 321 bp, Gossypium hirsutum
  unsure (1)..(321): unsure at all n locations
  Clone ID: LIB3196-035-P1-M1-E5
tttttaggnnnttggcggggggtttgtgtgtcggatctgagggccggcgccgttgactgtgaaatggatgaggaagtttacgctggggctcctggatctctttcggtggaacaggcgagggctgacgaatgggcgctcggccagaagcaggaccttgttgttggggagaagatgcatgtggtcgatccgcaagctgatttactgtacggcttggccgcttgcataggaccacgggggatcggagaaagagctgagtcctttgtttcgggaggccgaggggacaggaggcttctgttttgatccagaatctaaactcttgtt

SEQ ID NO: 42217 - DNA, 406 bp, Gossypium hirsutum
  unsure (1)..(406): unsure at all n locations
  Clone ID: LIB3196-035-P1-M1-E6
tggacgcgnnnnattttggccagtctggtttctttttcaatttaaataagaaaagttcgaggacttttattgttcactggctgtagcctgtagcagacatacctctcgaggcatgagcgtcttgggaaaactctgcggtgaaagagagacagtaacatgacaaaaaagtcagttgtaatggaacccaaaactaagaacagttatgcaataaggaagacaaattatctgcaagaaaacaaagctacttcaatgaattttcttcttaaagcatgttggaatattgtcttagaaaatgggaaaaattggacattacccaatgacatggcgaccaccatcattatcagccttttttttttaacccatcaaaccaatgctacctcctccatagaccaaatcaatgttcctt

SEQ ID NO: 42218 - DNA, 309 bp, Gossypium hirsutum
  unsure (1)..(309): unsure at all n locations
  Clone ID: LIB3196-035-P1-M1-E9
ataggcggcgcgcccgggnnnnaagagagagtagctcctactcgggccgccgcggccccgggcgtcgccatgaccagcgagctggacatcttcgtggggaacactacccttatcgacgaggacgtgtatcgcctctggctcgatggttactcggtgaccgacgcggtggccctgcgggtgcgctcgggaatcctggagcagacgggcgccacagcagcggtgctgcagagcgacaccatggaccattaccgcaccttccacatgctcgagcggctggtgcacgcaccacccaagcttctgcaccagctc

SEQ ID NO: 42219 - DNA, 260 bp, Gossypium hirsutum
  unsure (1)..(260): unsure at all n locations
  Clone ID: LIB3196-035-P1-M1-F10
atgctagccacgcctccgggggnaaggagttgtttggatgatccttacctattggcaaacggggcgcaaattatctggtaacttgataacgttccgttgccacatatttttttattaagaacacctctctaaatttgagtctactttaaaaacaaatactgcgacctcaattctagctgtggagctgctgcctaatcttgtaaagaagtcaccctccactaaaacgaagcctaatcgtgaaaatgcattatgtcttttaa

SEQ ID NO: 42220 - DNA, 334 bp, Gossypium hirsutum
  unsure (1)..(334): unsure at all n locations
  Clone ID: LIB3196-035-P1-M1-F11
tttgnnnnatttattggggcggggataataatcagaaccatcaaactggtttctgtcttatgtccatgttggagttacaaaaacccattatcgatactccttgtcagcccgtcaagaaagcggcggcttccacaatcatcgctgtctttctcattaccgttctgatggtttccgttggttggcttgatatttgcttcttttcaggtgtttcttcatatcaaaacatagtcgtgggttccaaatcaacaacggcaagacacaagcccgagttcccactcgaatgttccactgaaaaccatacacaaacatgtcggaaggactatcctaccaccac

SEQ ID NO: 42221 - DNA, 198 bp, Gossypium hirsutum
  unsure (1)..(198): unsure at all n locations
  Clone ID: LIB3196-035-P1-M1-F12
tcggnnnnnaatttctgaagcccggctaatcctccacaagtccctactatgtcacaagttaatccgaatcagttgaataagcctccagttgataaaattagaaaatatggggccaaagagttctgtgctaaaattggaacaatgggtacttatataccacttttagctaagaacacgcctatatactgttgataatgc

SEQ ID NO: 42222 - DNA, 274 bp, Gossypium hirsutum
  unsure (1)..(274): unsure at all n locations
  Clone ID: LIB3196-035-P1-M1-F4
gagcgaggggnncggtgagcggggggatgaaggacgaggaacaccccttggaatccaaggccgacgccggagcctccgagacctacccgcatcgggccgtacccatgcgcgagaatgggtacgctcggccaaagaaccggccgtggaagggggctgcagcctcgacctccacgaccgaggcgctgggtcatgccatgcgtgtcttaggccggatggacatgctcaccgccaagtagctggaagatatagtgccctcttcccacatcagtgatgt

SEQ ID NO: 42223 - DNA, 336 bp, Gossypium hirsutum
  unsure (1)..(336): unsure at all n locations
  Clone ID: LIB3196-035-P1-M1-F7
ggnnnncatntcgagaggttcngggatttaagaaaaatggggatttgatgttgagaacttatgacaatctaagattggtttcccgtgatccagagagccatgaaatcgattattttggaattcaaggaagacgtacttatgtttgtaattatacagagagcctaatgttacttgatcgagtaattgatggtgctatgactgagaattgtgcaaactatgcggataaagcttatcgttgaatgagcggctttatggatttactgaacttgctgccaataatgaagcaatcgatgattctagttatgtaagaagaatggtctaaccatgaactctttt

SEQ ID NO: 42224 - DNA, 258 bp, Gossypium hirsutum
  unsure (1)..(258): unsure at all n locations
  Clone ID: LIB3196-035-P1-M1-F8
atgccgaccccagagtgnnnntgtatggctggttgtgggagcggagcgggtcgggcggggccgggcggggcccaaccccgccgcgggccctgttggggccgcgcggcggcccggccggcggacagcgggatgggctgcacaatgagcgcccaggacaaagcggcggccgagcgctcttatatgatcgacaagaaacctcgggaggacggaaaaaaaacagcgccggaggtgaaattgctgctgttgggtgctggggag

SEQ ID NO: 42225 - DNA, 325 bp, Gossypium hirsutum
  unsure (1)..(325): unsure at all n locations
  Clone ID: LIB3196-035-P1-M1-F9
annnnggtnctgcttgctgagnttattcatgaccgatgaggaatcgctgagggtgtcataactaccggtcatgccattactgcgacacataagaccgaatgtggaccataaatgcatgactggagaggaggatgagccccttacttcaacatcattgctagcagcaccggtcgctgccaaagctgctggaaaggttcttcactgccctcaatggcaaactgacatggaaagggaggcgagtatataccgtcaatgtatcacccgtgagatgcaccgccaagcttgagaaaggtgcgtaccatgatgagaacaaaaccgctctcaa

SEQ ID NO: 42226 - DNA, 265 bp, Gossypium hirsutum
  unsure (1)..(265): unsure at all n locations
  Clone ID: LIB3196-035-P1-M1-G1
gacccacgcgtcccaagattctcttttcatatatctattccaatacgttaactannnnatattacttggaggggaaaacatatctctctttttcaccctttctaaacactctatcctctggatcttcaacacgtttatcaataaatatcaatcacttcttcccttattctttctaatacccttttccttaattttatttattcctatacatacaataaaattcttcataacataaccccaatttcccctttctcaattctttttt

SEQ ID NO: 42227 - DNA, 418 bp, Gossypium hirsutum
  unsure (1)..(418): unsure at all n locations
  Clone ID: LIB3196-035-P1-M1-G12
atgctggcgtaactggaattgnnnaagattcttttttcaacggtggtataggcagcagtggcctggttggcaccagcatgggtgctgggggtggggccctgagtggagctggcataagtggtggtggcattggcctgagcagcttgggagggacagccaccattggccacatgaggagttcctctgaccatcactttaaccaaaccattgggtccgcctcccctagcacagctcgaagtcgaatcacaaagtacagtaccgtgcaatatagcaagtagtcaggaccccagctcactttttcatagtcactgaggtttagatccaattcccaccactaaaaaactaacaatgtgaattataaannacaacttcatgctcaagtcatctaggagcaaagtgagaaaacacaatgagaaaa

SEQ ID NO: 42228 - DNA, 401 bp, Gossypium hirsutum
  unsure (1)..(401): unsure at all n locations
  Clone ID: LIB3196-035-P1-M1-G7
atgtttgtctgcagtctnnnaagagnagcaaagctgtngatcactgttttttgaaattaagtgccaatcccatgccatgcagtattatgcccctcttctatctctgtattacacactcccctctcccctgtatcaaaaccatccacctgtgggttcttcttgacagttctagaacagccttgcaaattaatacaagccccaagcccaatgcctaatagaccagacatgggcaaagacaagtttggatggaaaggtgttatcattgaaccctggttcagctcctaaaattcttcaagccaatgacacttttttgctgctgatgacccatgcctcttatgaaaacacttgcttattttggnnacaaaaaaagagtaagctggatgttttcacaagctcacaaa

SEQ ID NO: 42229 - DNA, 424 bp, Gossypium hirsutum
  unsure (1)..(424): unsure at all n locations
  Clone ID: LIB3196-035-P1-M1-H1
atgcaagaagagtgaatctccatcgnnnnataaatattaaaaagaaaaaaaaagtgaggcctggactaaggggaggtggagggcacaagaagggtggagaaaggaggaagcccaaagaccctcaagagaaagagccttcaggatgcccagctggggagaaaggggtctcaggtaagatctaggtatccggccctggtggtgggtgaatgatacgctggtgatacagcaagaggaaagaagggcagagggagggacactaagcctgctggagaccagagaacttccagatggaagggaccagaaggctggagcgggagagggtctcaaaatgcaccaacagaaacagcattttgcaaagagctgccttnnttttttgaacaaaaatagtgttgggggattaaataactaagctttaaaacaaatt

SEQ ID NO: 42230 - DNA, 405 bp, Gossypium hirsutum
  unsure (1)..(405): unsure at all n locations
  Clone ID: LIB3196-035-P1-M1-H10
ccgnnnnttggataacattctgaggcatcaactaatagtacaccaggatggcagataggtgtaagaccatggatgaaagacttcatggcatccgcaaggtaagttcatcagggtagtatacatagaacagagatagtctgtcaagacagtaaacatggaatagagatagtccaccgaaacaataaacacgaaatagagatagtctactgggacaataaacatggaataaagatagcccatcgagatagtaaatacaatacaagtccaccgtttaagaattttaataaagcaaactacttttaaaacaagttagaattgctccaagccaaaaagtatcgataccttttnnnaaaaatatcgatatttttaaaatattgatacccttcaaataaacgataccaactt

SEQ ID NO: 42231 - DNA, 344 bp, Gossypium hirsutum
  unsure (1)..(344): unsure at all n locations
  Clone ID: LIB3196-035-P1-M1-H12
atacttttcatagctgcctctttttccttgacaagaagatnttatttttgcttcattcatattattatgtaatgaactgaattaaggaaaatataagctggtttgtaaatgttaagagataattcattgaaaataccatttaaaaagtatttctgttgacctgaatatagtgctggaacacaaagagaaaataaagtaattatgggatcaggctgggaataagcctgaaaattctcttcacaagactgaaaaatcacttaaaaacttcaaatcaatttaagcatttaattttagaagtttttcacatcatcttatacttaaacatctatgcattgtattttctt

SEQ ID NO: 42232 - DNA, 422 bp, Gossypium hirsutum
  unsure (1)..(422): unsure at all n locations
  Clone ID: LIB3196-035-P1-M1-H3
atgtctctctgaagaggctatcatagnnnnntgncctgccgactggtattcccattgtctatgaattggacaagaacttgaagcctatcaagcccatgcagttcctgggggatgaagagacggtgcgcaaagccatggaagctgtggccgcccagggcaaggccaagaagtgaaggccagcggggaggatactgtccccaggagcaccctccctgcctgtcttgtccctctgcccctcccacctgcacatgtcacactgaccacatctgtagacatcttgagttgtatctgcagatggggactggtggctcccattttcattttagccattttgtcttctgcacccactcccttcgtacaatctagtnnnaatagcacttctagagcacaggttctcaatccaagctgtggaaaagctcccc

SEQ ID NO: 42233 - DNA, 332 bp, Gossypium hirsutum
  unsure (1)..(332): unsure at all n locations
  Clone ID: LIB3196-035-P1-M1-H4
ctccacttgttttnattttgtgtattccntgaaaagctctttgagatcgatcctgatgggtcagtctttgcatctgctgacatgattaggaagtaaatctacatgccaccccactcttattttttatggcaccccttaaaacaagtcttacctctactccattgtgagagttactattcccattatcaccctccctgcctgttttgttcctgttccacttccacctgcacatattatatttgccacatctgttgacatttttatttttatttttcaatggatactgattgttcccatttttattttaaccattatttcttctgcaccctctt

SEQ ID NO: 42234 - DNA, 387 bp, Gossypium hirsutum
  unsure (1)..(387): unsure at all n locations
  Clone ID: LIB3196-035-P1-M1-H5
tataaatatannnnttatttaaaggagagagggagaggcttctccggcctaagcgattttcggccatcagatcacggcccattcgtcaccggcgaccactgtgcgcggcggtcggatgtgcaaaacgaagccctttttgcccctttcgctctcctcactccagatctaagccccaagcacataaaaaaccccgagcaagtcgaagaaagccaaaggagccctccgattccgacttccccgactcgacgaaggtaagaccgatcatattcttcccctctttttatcctttggtttttaaaaatcgattcgagagcaaaaataaaataaagaaaaaaaaaaggaacagagagtgannntccacctttttgttttttttgattgcttaat

SEQ ID NO: 42235 - DNA, 415 bp, Gossypium hirsutum
  unsure (1)..(415): unsure at all n locations
  Clone ID: LIB3196-035-P1-M1-H7
atctgggtataaagataaggggncttntgttttaaagggcttaatttgccaaaaagaaaagtaaaaagctagagaccctttttgcagaacatttggtgcccacacatttgagggaagatgtggctttagatgaagcagaagcaaaccctgctcttagggtctcgtctagatgagtgcacagcctatgacactacagggagaggtcaggaaactgagatccagccttctgggtgacacgggcattgtttatcacaaaggttctgaagtttaagtagcaagtacataatgaaaagggctttaaaaattgctgagaaagcgagtcaccaaggctggcaagagtgtaacggggctgtcctgaggnnttaggagagtagatgctgggagggctggtgacctccatgggtttatctgttgg

SEQ ID NO: 42236 - DNA, 341 bp, Gossypium hirsutum
  unsure (1)..(341): unsure at all n locations
  Clone ID: LIB3196-035-P1-M1-H8
acagnnnnnagnagagcttttatgacgataagtatcctccctctccttcatttttgctttttactcatataataacgaaaatcaaagaaataaaagcaaaatgaaaggaaaaatgatatgaaattaccacttaaaaactgctctttattcacactctttagaactgatttatatgcgaaaatatacacgtatcttttttctttttcagattacactcggcctttttatagccaaaataaataaaaatacaatggccttagattttctgctatatatttgctgtcaattgcgggatatctgctatgtgctctttctgttgcaaacgtgtatgagcacggtac

SEQ ID NO: 42237 - DNA, 394 bp, Gossypium hirsutum
  unsure (1)..(394): unsure at all n locations
  Clone ID: LIB3196-035-P1-M1-H9
nnnccgtcggtaaaagagatccttgtggtctggaacaaagggataccgccaaaggtgagtgatctcaattcagcagtgcctgttcggatcagggttgaggatctgaactccctcaataatagattcaaggtcgatccattgattaagactcgtgctgttcttgagcttgatgatgatataatgatgccttgtgatgatgttgagcggggatttatgttgtggcgtcaacatcccgataggattgtgggattctaccctcggtatgttgacaggagccgattggagtataatggtgagaagtatgccagaaaaaataaagggtataatatgattcttacnnaggctgctttcatggatagtcaagtagcctttgaacggtattggagtgagcaag

SEQ ID NO: 42238 - DNA, 365 bp, Gossypium hirsutum
  Clone ID: LIB3196-036-P1-M1-A10
atggcgactgaatgcactaacagcagcaggctccgacctgcttccctggacatttcccggaccgtgagcgagggaaccacgttgccctggattcttgccaactgtacaaagttgaccaggaaaatggctcagcagacaagcccggacaccttaacagtacctgaagtggataatccgcattgtccaaacccgtggctgaacgaggaccttgtgaaatccttgcgagaaaacctgttgcagcatgagaagtccaagacagcgaggaaatcggtttctcccaagctctctccagtgatctctccgagaaattcccccaggctcctgcgcagaatgcttctcagcagcaacattcccaaacagcggcg

SEQ ID NO: 42239 - DNA, 179 bp, Gossypium hirsutum
  Clone ID: LIB3196-036-P1-M1-A12
ggaacatcgtgtatcagtttaggaaggcccagaatgaaatcgaccagtatttgaagattgttcctcttatcacgctggtggataattctcgagtcagggagagactagaagttatagagaaagatcaacatgaatacacattggatgaagaggaccgaagggtgcaagatgttatactg

SEQ ID NO: 42240 - DNA, 362 bp, Gossypium hirsutum
  unsure (1)..(362): unsure at all n locations
  Clone ID: LIB3196-036-P1-M1-A6
atgcgcgccccggccagtgaagggctcggggatggactgcggctcggtcggcggccagaggacccagcgcctgcccggccatcggcggcttctgttcttgcccgcgggcctcagcggaagaccgggaggcagcgaaacctcagcacgccgctgcctctctgcgctctgcgacggtctgggggcgctgcgccctcgcgccccggcgacccgcggctgcgtgtcacgtgcctcgccgctactcctcctcctgctagtgccctccccgcgcttgggcgncgcaagcccgcgccgggagctcgggggactgggagcgcttcgcgcctcgggattgccggaccccccggcgggcgcagcggcgcatg

SEQ ID NO: 42241 - DNA, 338 bp, Gossypium hirsutum
  Clone ID: LIB3196-036-P1-M1-A7
cggacgcgtgggcttgtatctttctacattacaataatagatatagatagtatggtagaaagattcatattttttttctaccatactatcgagttttataggatggtagaaagattcatattttttttctaccatactatcgagttttataggatactgctgattctagtccattcattttatttaagacgtgagatttgaatcctttttttcttaactccttgataaaaagtcaagtttcattcaaattaatcactttgactgacagtttttacgtatattataagtaaaaaagcggtaggaactagaatgaacagcgctgtagcaataaatgcgag

SEQ ID NO: 42242 - DNA, 261 bp, Gossypium hirsutum
  Clone ID: LIB3196-036-P1-M1-A9
tggatgtgggaacccccaactttttagctgatcagtcggaagaaccggtgacctggacttctgattctcacctctagtagaggcatgagacataccccttaaagagcaggggctgtgtcacctctgtgtaatagtgtctgaattgaattgatgaacatccaattattgtttggaaaatgattattgtcctagcaaaaacccacccctttcgttttagaagtgtttagagtagaaaccaaacctaagaatatgtgtaattta

SEQ ID NO: 42243 - DNA, 207 bp, Gossypium hirsutum
  Clone ID: LIB3196-036-P1-M1-B2
aaaagatatccttccttccttcctttatttattcttcttcttcttcttcccaatggcttctgcttgtgttaacaacctcaccgtcgtctcaacggagaccaatttgcattccacgccaccttactctccctacgtttcgtcgccggagattcaagacacggctgcaggtggtgattttgagttcagactcgaagaagatcccgtcac

SEQ ID NO: 42244 - DNA, 275 bp, Gossypium hirsutum
  Clone ID: LIB3196-036-P1-M1-B3
gcgtgattacttactccctaccagcgtgaatcaaccatggcaaagctcgggggttactcagcccccctggctctcattttgttccttgccaaggcttcaatcacatgcgcagacgtcgaaagcgaggtaaacctggatagctgtgaaccgcagataagggagcacgcccacctgaagcactgtcagaagtacatggaggaagagtggggttgccaatgcagcgacaatatattcggcgggtacattgactcatgttgccagcagcttgagaagat

SEQ ID NO: 42245 - DNA, 390 bp, Gossypium hirsutum
  Clone ID: LIB3196-036-P1-M1-B4
atcaaaataaagcacaaagtgcatagagaaaagaaatagggactgaagataaaaacagagcttcagtaagcagctgtggaacaatatataaagttgcttatcatacatacaattggacttttcagaagagggagatgagaaaaaatatttgaagaagaaaagctggacgttgttcagataggatagaaactataaactcacaaatcccaggaagtttaatgagccccaagcagaatgaatgtcactaaaacacataataatcaaattgccagaaacaagtaatgaaggacatagtcttaaaagcagccagggggcgaaaaatacaccttacatattgaaggaagataaatcaagtcttcttatctgaaatcagtcaggaaagaagaaaag

SEQ ID NO: 42246 - DNA, 382 bp, Gossypium hirsutum
  Clone ID: LIB3196-036-P1-M1-B5
tgattttcgagttgtgaaactcaagatatgatttttaaagcgactagtacgcagattggcagtgtctgagaaatatttttataaagggtttaaagtctgttaacacctcgtgttcgactccggtgtcggtctcgggttcggggtgttacaagtttcccatgatttgacaactcgatcttggtccacgtgcaaccctctatcttgtcgaatcagattttgggcgatttgggtgttcttagttgatttctaaactgatctctattttttaaactacaaacagcagttttacctagaaaagttttttgaaaaaaattcatttgattggataaacattgtccgattgatctgaaattttacatacatatttttggcactgtgattg

SEQ ID NO: 42247 - DNA, 213 bp, Gossypium hirsutum
  Clone ID: LIB3196-036-P1-M1-C2
cgacgcgtgggcttttttacgtgttgaaatgaaatgtgaactccaatcatctttttggactattatttaaccattaattaagccatggccttgttccccacacaaaaatcattattaatttggaaacaacatatggtgaagaaaactagaaacggtcgatagtattttggtcttcaagatacgtcactcaagccacaaacttttgaagtatgg

SEQ ID NO: 42248 - DNA, 192 bp, Gossypium hirsutum
  Clone ID: LIB3196-036-P1-M1-C5
acaccatagaacaagtttgtacaaaaaagggggctggtgctccgcgcccggttttccgggtgcgcggcacgagaccctccccgcctctattgaacacgggggggatatcttggagatagacattcccactctctctgggtgtctttacgctctcatatttgaaaaagcgttgccctttctccaacggggggg

SEQ ID NO: 42249 - DNA, 277 bp, Gossypium hirsutum
  Clone ID: LIB3196-036-P1-M1-C8
cagccagcagtattgcagcgtctgtgggataatcaagtctggcttttcaccaaagatggacggaatctccacgctatcaacgagctggagagcacacatggcggtccctgaggatgtagaggaagagttcaagttcatgaacgtgaaacgggccatgcttgtctgccgggtggtagcgggtagggtggggtcagaaggggatgaaacaaacaaggaggatggcggatttgattcggtgatagggaggggaggggggaatatggcacatcataccaag

SEQ ID NO: 42250 - DNA, 388 bp, Gossypium hirsutum
  Clone ID: LIB3196-036-P1-M1-D2
cccacgcgtgcgctttttcacactaacaagtcttagcctaacatcctctttctttgaagatctctggtggacttgtcgatcaaatcatttagcttaaaatctatttcattgactcacccattgtacccattgttagattattcgccaatcgttggtgaactaataatgaaggatatcccataccttaaatagggtaccccttctattacccttgccttgataataccacacatataccaaattcctttttccatcacaatgtggcgaattcccctattaacaggcttacccgcattcttgggcacatctactagctattctcctcttcatagttaggcagattctcttactatcccatttacccgcattcttagacacgtcgcattca

SEQ ID NO: 42251 - DNA, 401 bp, Gossypium hirsutum
  Clone ID: LIB3196-036-P1-M1-D6
atgccttcctgtcactgccccaccctgccccactgctgtctcagtaccaagaaaaagcccagcagcatctgggacttggagctgcacatgtctggtgaggaccttgccctcacccacagatgccatggggcagagatgctctttccacggcctcagagccactcccagccacagtctccagcatctctgtggacagggatcacagctcccagcttcttccagttcctgcagcaccagaccagcctctgcagctgcacttcagctccgcagacctgcactgtcccagcagacctcacttgccccatggccttcatggcgccttccaggcctcaaacccttctctgcgttccatcctggccacaggcttgttgcagtcagcaggtgtgggcttaggcgggtac

SEQ ID NO: 42252 - DNA, 411 bp, Gossypium hirsutum
  Clone ID: LIB3196-036-P1-M1-D9
atcgggacagttcaggaggaaaggaagagaagaaacatcataagtcctcggacaagcacagataataaagactttccatcaaggctatggacagaccccctaagctgaaagtctcccagaggaggatgccaaagctccgtgcgtcactctcagaacgatatctcccataattaagagcttctggtgctgtccatttaatgggaatctgctttaagtcagaagatgaatacacaccaccatcctcttgacgagacattccaaagtcactgattttcagaacattattttcacctccaggcagtttcttgcagcaaggtccctgtgtatacattttttactcgagatacgccatccagaatcagcatctaatgaaaatttcactaactgagttttagttcattcttctttctc

SEQ ID NO: 42253 - DNA, 397 bp, Gossypium hirsutum
  Clone ID: LIB3196-036-P1-M1-E1
ggacaatagtctgtgtaaggaaaaggttctacagattgagcttgaagcgccaatgccatccttaggggctccagagctactattgcaccgaattgttaggtacttggcagttgcatcttcaatgaaaaataaagatgggaagccaggttactcgtatgttcaaccaattatcttgaaactgctcatcacttggctagcagattgcccaaatgcagtgcaatgcttcttagattcacggccccacttaacgtatctgctggagttggtgtcaagtacatcatcaactgtgtgcgttagggggttggctgcagttctcttgggagaatgtgtgatttacaataaatctagtgaaaatggaaaggatggttttaccatagctgatgccataagccagaat

SEQ ID NO: 42254 - DNA, 392 bp, Gossypium hirsutum
  Clone ID: LIB3196-036-P1-M1-E10
caattttggctccaaggaagattttgacagtctcttgcaatcggctaaaaaaaagagcatccgtgtcattctggacctcactcccaactaccggggtgagaacttgtggttctccacccaggttgacagtgtggccaccaaggtgaaggatgctctggagttttggctgcaagctggcgtggatgggttccaggttcgggacatagagaatctgaaggatgcatcctcattcttggctgagtgggaaaacatcaccaagggcttcagtgaagataggctcttgattgcagggactaactcctccgaccttcagcagatcgtgagcctactcgaatccaacaaagacttgctgttgaccagctcatacctgtctgattccagctttactgggg

SEQ ID NO: 42255 - DNA, 397 bp, Gossypium hirsutum
  Clone ID: LIB3196-036-P1-M1-E12
atctcttcttctcagcactatgccttccttctttgggatagagaatgttccagacattctcgcttccctgaaagactgaggaaagtgtggggtatgggaaccacgaaactgccctggctccagtgaaacgtgggcacatgctcaggctactataggtccagcagcccttatgttaaaccctggcaggcaggtgtttattcaaattctgaattttggggattttcaaaagataatattttacatacactgtatgttatagaacttcatggctcagatctggggcagtaccgtataaatcaacaccttaatatgctgcaacaaaatgtagactattcagacaaaatgcatacctaaagactagctcataaggggtcaaatgttgctggcaaatgcgtat

SEQ ID NO: 42256 - DNA, 391 bp, Gossypium hirsutum
  Clone ID: LIB3196-036-P1-M1-E3
tattaacaacgtgaaaacatgatgatagtattataatagctgatatcatttacatatattataaattataacacccttaaatgtctcacttaacaagaagaagtatttcaacattaattttattataaaattttattatatttgttctttattttgatatttcagcgtattcaaattcacgtttccttatgctgataacaatgtcaatactaatcaaactaatacctaatcagcataatgaagaagttattaattttatacaatattttttaattaataactttttggtatttgtacctttaattaaaatcaggactataatttaatatcatgatagtcttataataatagtagctaatctcttgcaggttcaggtaattgattagataat

SEQ ID NO: 42257 - DNA, 396 bp, Gossypium hirsutum
  Clone ID: LIB3196-036-P1-M1-E7
atcccggccagacggcgggcaagacagctgggtgtgcagcgtcctcgaaaccacgagcaagcgagcagatcctccgaggcaccacggactccagcccatgccatggcggattctgagcgcctctctgcccctggctgctgggccgcctgcaccaacttctcgcgcacccgaaagggaatcctcctgtttgctgagattatattatgtctggtgatcctgatctgcttcagtgcctccacaccaggctactcctccttgtcggtggttgagatgatccttgctgctattttctttgttgtctacatgtgtgacctgcacaccaagataccattcatcaactggccttggagtgatttcttccgaaccctcatagcggcaatcctctacctgatcacc

SEQ ID NO: 42258 - DNA, 410 bp, Gossypium hirsutum
  Clone ID: LIB3196-036-P1-M1-E8
atcgaggctgcagccagcactgccaccggaggcacagtcggtgcccgagctggaggaggtggcacgggtgctggcggaaattccccggcccctcaaacgcaggggctccatggagcaggcccctgccgtggccctgccccctacccacaagaaacagtaccagcagatcatcagccgcctcttccatcgccatggggggccagggcccggggggccggagccagagctgtccaccatcactgagggatctgaggccagggcagggcctcctgctcctgccccaccagctcccattccacccccggccccgtcccagagcagcccaccagagcagctacagagcatggagatgcgctctgtgctgcggaaggctggctccccgcgcaaggcccgccgcgcgcgccttaacc

SEQ ID NO: 42259 - DNA, 397 bp, Gossypium hirsutum
  Clone ID: LIB3196-036-P1-M1-F10
atgacagctgctgctcctgcttctcctgaacagatcattgttcatgctttatccccagaacatttgttgaacacaagtgataatgttacagtacagtgtcacacaccaagagtcatcattcagactgttgccacagaggacatcacttcttccatatcccaagcagaactgacagtagatagtgatattcagtcatctgattttcctgagcctccagatgccctagaagcagacactttcccagatgaaattcatcaccctaagatgactgtggagccatcatttaatgatgctcatgtatccaaattcagtgaccaaaatagcacagaactgatgaatagtgttatggtcagaacagaagaagaaatttctgacaccgaccttaaacaagaggaat

SEQ ID NO: 42260 - DNA, 343 bp, Gossypium hirsutum
  Clone ID: LIB3196-036-P1-M1-F2
cccacgcgtccggccttcagctgggcagaaaattgatattcccaacgtccccaggaaccaaagtggaattgttactatgtaacctgtccaataatgaggccttaatctccagtcagatgaagttcctatcgaggaagcagttatatagtatctcctcacaagaagtgcaacagccatcaacatgaatatgactagaatgctcacagatggctagcttgttaagacatccaagcttgaaaagaaagcaatcagaccacttgagacggcagtttttggtgttccagtctggatggacaaaagaccatggtctgatcacttgtgctcatgcaatatgattcgtgta

SEQ ID NO: 42261 - DNA, 382 bp, Gossypium hirsutum
  Clone ID: LIB3196-036-P1-M1-F6
ggtaaatggattcaaaccgaagaatggtatgttcgagaaggaaagtgctattaggagagagactgagggtgagtttagactgttgggtgggagagaagggagcaggttcgccaatggtagacttttcggttttgatgatgacgaccaagtggcaagcttgggtcgcaaggtatcttttagcatggaagacagcaggattgaaattccgagccggttggagcctggtgaagtttcgttgactaccttgcctgatgatgaatccggtaccgatgaagactacgattacgatgaccaagagtgcagtagaaaggaacctgagatcatttgccggcacctcgaccacgtcaacatgttgggtctaaacaaaacgactcttagacta

SEQ ID NO: 42262 - DNA, 404 bp, Gossypium hirsutum
  Clone ID: LIB3196-036-P1-M1-F7
atggcgtctccggggacgggcagagcctcgagggcgcctgcggggacgggcagagcctcgagggcgtctccggggacgggcagagcctcgagggcgtctccggcgacgggcagagcctcgagggtgtctccggtgatgggcagagcctcgagggtgtctctggcgccggccacagcgcagggctcgcggccgggcagggccccggggctgacgagctgggcttgtcccgcgggaagccctacgcctgcggcgagtgcggggaggccttcgcgtggctttcgcacctcatggagcaccacagcagccatggcggccggaagcgctacgcctgtcaaggctgctggaagaccttccacttcagcctggccctagccgagcaccagaagacccacgagaaggagaaa

SEQ ID NO: 42263 - DNA, 352 bp, Gossypium hirsutum
  Clone ID: LIB3196-036-P1-M1-G11
cacccttccaaaggggaataaaaactcctgcttctgatcaaatggtttttaattaattgagagaggggaaattcgataaagaaaaatggttctctgataaaaatttacgcctgtttcttcagcaaatatcgggaaggaataccccctttttttcccccctggtaactaattgttattgtgaagctttcttttagagaatactagttaactcgacccgcctaccccccaagaggagaagatgacaactcctcccctgaaaagaaagatttggtagtttttttagaagcttcccgatgctccttcccgaaatagaggtgcgacctcagataacaacattatgctttgggatgct

SEQ ID NO: 42264 - DNA, 393 bp, Gossypium hirsutum
  Clone ID: LIB3196-036-P1-M1-G12
atccggactacggggcgccgctgagccaagtgggcgacccgggcaaggacgggctcccgggtcacgtgacacggagctggccgaattctgcaggaggcaacgccatagcctagaggtgccacctcatggagacccccgaggccgccgcccctgccgggagcttatttccctccttcctgctcctggcctgcgggacgctggtggccgccttgctaggcgccgcgcaccgcctggggctcttctatcagctgctgcacaaggtggacaaggcaagcgtccggcatggtggagagaacgtggccgctgtgctgagggcccatggcgtgcggttcatcttcacgctggtcggtgggcacatttccccactgctggtggcctgtgagaaactgggca

SEQ ID NO: 42265 - DNA, 412 bp, Gossypium hirsutum
  Clone ID: LIB3196-036-P1-M1-G2
atgtccttctcacttcagagagacactcactcgtgttcttttcaaatattttgaggttccatctgtcttgcttgctccaagtcatctgatggctcttctgacgcttggaattaattctgccatggtcctagattgtggatatagggaaagcctggtgttacccatatatgaaggaatcccagttctaaattgttggggagcactacccctaggaggaaaagctcttcacaaagagttggaaactcaactattggaacaatgtactgttgacacaagtgctgctaaagaacagagccttccctcagtgatgggttcagttccagaaggtgtcttagaggacatttaaagtgcgtacttgctttgtaagtgatctgaagcgaggactaaaaatccaagcagcaaaatttaatat

SEQ ID NO: 42266 - DNA, 397 bp, Gossypium hirsutum
  Clone ID: LIB3196-036-P1-M1-G5
atgagttttccctttttccactctgagtttcttttgtatggcctttacagtcatttgaaggtcatacctttaggcttggtgacttttgagtaattaaccctagatagcttcatgaatggtttatttggtggctcttagaacctatagtcatatctaaagagaattaaaaaccttaataaagtggtagtaccagcctgtagtacacagaaggctctgttctggcctttagcctcctaaaaagtcatagccaaacatttgctaatacttaatcctctgttatagcacacattcctgatcctagtttatgaggttttcagggtaaaaaaaaaaaaaaaatttaattctatcatgttttgctctgtcagtagaaataaaaccagataatcaaataatttgt

SEQ ID NO: 42267 - DNA, 391 bp, Gossypium hirsutum
  Clone ID: LIB3196-036-P1-M1-G7
aaatttcttcacgaaattttcacacaatcatgcaatcatatcatagacctcaaaataatcataaaataattatttctatctcggattttgtggtaacgaaaccgctattccaactaggcccaaaatcaggatattacagtatgagaaagattacactcaaaatttagagtaggggtttaggctactactaaattcccaattaacacattgaatcgtgtccacaagcaactattctaaacactctccgatacactttcgtcaaaatgtcgaaagctcaaactagcctttctttagcttgtagaaggtcctaataaattcgaagcttcaacataataattcacacaataacacaatcaacaattagctaatgattcatcttaaacaataaaaa

SEQ ID NO: 42268 - DNA, 391 bp, Gossypium hirsutum
  Clone ID: LIB3196-036-P1-M1-H2
attttcacacaggcatgcatatatatcaaggatgatcgcgaggtttcgtgataggttttaaatatttataattacttgttcttgaactaactattatcgcgatgtaggcaagtgtacctatcgaacattagtatagtttttgcaaaaccggattatcgaacccaaaggaactaaaagtactagtaatgactgtctttttattatctagcctaagaataaagaatttttgttttaattaactaattatctaaactaagaaatcaaagagaaaagaattggggaattgctttttgggaaaaatcgattgacttaagacaatacctaaggacaaatccacctagactttacttgttattgtggctccgaatcggacgatgtattcattcaactt

SEQ ID NO: 42269 - DNA, 398 bp, Gossypium hirsutum
  Clone ID: LIB3196-036-P1-M1-H5
atcacgacaaaagaagcgcagaagttttctttatttacttgaacagccattatatcagcacattatgtatagctcctgtcaagaagtctgattgtgtctggaattgatgggttcttggtcttgctgacttcaagaatgaagccacggatactcgcgtcctgataacaacagcgtgacagcacatatacgactggtattcaagggtcccagatcaatggaagaaaacacaggaaaaggaattgaaagtatcttccattagatgctgaagaaccattcaggatccttgactacagatctgaattctctgaggcttatggaaatcagtaaggtcaatgctgcagaaattatcaacaaccgacaaaaaacccaaaaaactatactgtcagctttggcatgaa

SEQ ID NO: 42270 - DNA, 406 bp, Gossypium hirsutum
  Clone ID: LIB3196-036-P1-M1-H7
atcggtatctgaccaaccaaaaaaactccaatagcaaaaatgatcgaaggaaccggaagtttaaggaagctgagcggctcttcagtaaatcctcagttacctcagcagctgcagtaagtgcattggcaggagttcaagaccagctcattgaaaagagggagccaggaagtgggacggaaagtgacacttctccagacttccacaatcaggaaaacgagcccagccaggaggaccctgaggatctggatggatctgtgcagggagtgaaacctcagaaggctgcttcctctacttcctcagggagtcaccacagcagccataaaaagcgaaagaataaaaaccggcacaggattgatctgaagttaaacaaaaaaccacgagctgactattagaagacacgttagtg

SEQ ID NO: 42271 - DNA, 405 bp, Gossypium hirsutum
  Clone ID: LIB3196-036-P1-M1-H9
atcgtggaaggactcatgaccacagtccacgccatcactgccacccagaagactgtggatggcccctccgggaaactgtggcgtgatggccgcggagctctccagaacatcatccctgcctctactggcgctgccaaggctgtgggcaaggtcatccctgagctgaacgggaagctcactggcatggccttccgtgtccccactgccaacgtgtcagtggtggacctgacctgccgtctggaaaaacctgccaagtacgatgacatcaagaaggtggtgaagcaggcgtcggagggccccctcaagggcatcctgggctacactgagcaccaggtggtctcctccgacttcaacagcgacacccactcttccaccttcgacgctggggctggcattgccctcaac

SEQ ID NO: 42272 - DNA, 343 bp, Gossypium hirsutum
  Clone ID: LIB3196-037-P1-M1-A1
tcgcttatatttgggggaattggaaattcatacccatctttcaaatatataattacaacgaatatgaactaattgatgcattttgattctcaaagttaatataacaaatgacatttaagttcaaattgtcaagctcatgttttccaaacatacaataaattttaacattattgatttgaaaaaaaataggtgaggactaaaaaaatgcaggagaaaaaacaattttgtgatattccttattgcacgttaagcttttagactctttggttctttttacggagttaattatatgcgcaatatgattcacatcaggttggataagcggattgctatgtgggagaag

SEQ ID NO: 42273 - DNA, 197 bp, Gossypium hirsutum
  Clone ID: LIB3196-037-P1-M1-A12
attttaaaaataaattgtttaagctgtttaagtaatgaattaagtctgttaacacctcgttttcgactccggcgatggtctcgggtacggggagttacagtaattctttcccatttccattccaaaatcgtaactggctgtaataatcccaaggcacctaatgctcagcttttacttgcagacatatcaaacattta

SEQ ID NO: 42274 - DNA, 240 bp, Gossypium hirsutum
  Clone ID: LIB3196-037-P1-M1-A2
cccacgcgtccggtatgttttgggcctggtaggctcgtattagggactttatgattgaatgcaaaaaattttaatttggacgcaaattgatgactcagaattttatgaaagtttgtgtgataagtccggtaatgcttcgtaccatgttttggaagtgatttgggactaaaccacctttctttgcttgtaaaacaaaaaaaaggaagtgaaaaaaataaagatgcaatacaaaataaatgg

SEQ ID NO: 42275 - DNA, 377 bp, Gossypium hirsutum
  Clone ID: LIB3196-037-P1-M1-A4
atgcggcgcacaagtcaggtttggcacatgtttccgaggagaggacccctcattgacggatgatatcacctcttcttctctggtgagagtctgaggatagagacctttttctcaccatgaatgtcaccccagaggtcaagagtcgtgggatgaagtttgctgaggagcagttgttaaagcatggatggactcaaggcaaaggcctcggccggaaggagaatggtatcacccaagctctcagggtgacactgaagcaagacactcatggggtgggacacgaccctgccaaggagttcacaaaccactggtggaatgagctcttcaacaagactgcggccaacttggtagtggaaactgggcaagatggagtacagata

SEQ ID NO: 42276 - DNA, 360 bp, Gossypium hirsutum
  Clone ID: LIB3196-037-P1-M1-A5
atggcgtggtgtatgtggaggtgcggaacaatccgcacgtgtttgccaattactaagtggtgccaatccctttgaaccagcctgaagaggactttattccagacgtggttgtgtccctagaggcccaactcctgctagagagggagcgagacttcatagtgaaggcccaacccatactgcactgcatgcgccaccagcctaactcatccctcgatgcagatgaattttgtcacaagtaccaccagaagactgtggcaagcacttaccttgctggacatgaaaccataccaggatgcaatctcttttctggacatgtgcacgtctaccatgatgctgcgaacagcgggatttaccatactg

SEQ ID NO: 42277 - DNA, 367 bp, Gossypium hirsutum
  Clone ID: LIB3196-037-P1-M1-A6
gttccaacgtcactaaagctgactgcttgctctctagtctctaccatgaagccaccaccaccatccctcaactcactaccactcttcctcttcctcctcctctccgccgtcatctccgccgctaccaccaccacaaatgccacctctaaacttccccctgctccttcccccaccactgaaactccctcttcttcttcctcctcctcttctactctagaccctaaacaaattgaagcacttgaatccctcaacattcccaccgcaagagacccttgcatccaaccttcccctcacaacgccaccgtttgtgacagctctaagccctttcgccacctcgtttccctccacctttccaactgctcctctg

SEQ ID NO: 42278 - DNA, 240 bp, Gossypium hirsutum
  Clone ID: LIB3196-037-P1-M1-A7
ccctatattttggggaaatttgggggcatacccacctttcttatgtacaattacaacgaatatgaaataatttacatatgccgctaaccaacgtcattacaatctgacgacagctcgctttaaaacccccgatcctgctattgcaacttctcggaaagatttacaggaattaccaccagtgcttttttcttatgttctccaatacatgaaaaaacaacaatattcagacttatcttataa

SEQ ID NO: 42279 - DNA, 382 bp, Gossypium hirsutum
  Clone ID: LIB3196-037-P1-M1-B12
atgacgagagtgagacagcagtgaagccgctggcatctgcgctgctgcagatgatggaagggaacgggaacggccacgagcactgcagcgattgcgagaatgaggaggacaacagctacaaccggggtggtttgagtccagccaatgacactggagccaaaaagaagaaaaagaaacaaaaaaagaagaaagaaaaaggcagtgagacagattcaacccaggatcagcctgtaaagatgaactctttgccagcagagaggatccaggaaatacagaaggccattgagctgttctcagtgggtcaaggacctgccaaaaccatggaagaggctagcaagcgaagctaccagttctgggatacgcaagcccgtccccaagctgg

SEQ ID NO: 42280 - DNA, 373 bp, Gossypium hirsutum
  Clone ID: LIB3196-037-P1-M1-B2
ccctatatataggaaatctttagttgggtttgtggtctggatttaaaggaatccatgtatcatgttggatatatgagtagtaaaactctaatctaaccactaagtattattatgaacttcaattaagtttaattcgaaacatacaaaaacataaaatttacctttctttttgaaccaagctttgtatttttggaaatctttttgatagtgtcctttcttacaaaagtgacacttatctgccatttgttcctttttatcgccattagaaacattgacaggcaagttttttcttcttcttaaacttgttggttgttgctttaagtcctttgccagctccttgatccacaaggttgatggaattacttctttgact

SEQ ID NO: 42281 - DNA, 362 bp, Gossypium hirsutum
  Clone ID: LIB3196-037-P1-M1-B5
agcgaagaaaactctcgtatgcaatcctgcaatggacactgacacaactcaattgaagctcgcccttttagccgtatctttgcttttcttgccttttcttcaagccactgatttcaaatattgcgataatggaggtaattatgttgtgaaagtcaatggaatcgatatatcacctaatccagtggttagtggcaagccagccaccttttccatctcagcttctactggtcaagcaatctctggaggcaaagcagtgattgatgtttcctactttgggtttcatatccatcaagaaacgcatccactttgtgaggaaacatcctgtcctattgcagttggcaactttgtactctctcacaatc

SEQ ID NO: 42282 - DNA, 368 bp, Gossypium hirsutum
  Clone ID: LIB3196-037-P1-M1-B6
ggggagccgttggttccaacaacagttatttagggaggaagctattggagaaaatagtcgttgagggaaaacgcttctagctgcgggaagcgttttcattatttcaacccaatctcgtcatttttcaaaaaaaatggcctaatttagtaaatatcttaaaaaactgacatttttttgtaattcagtctaagttaaaattattttttgtttaccttactttcaaaagttacataatagtcaacaacactattagagttgtgagttttaaaaataaattatgatttttcaaaaaaaagaattttttgatatttttagaaattttgtttcgaatcatcattaaagaaattgtaaaagcaccaagctaaaaa

SEQ ID NO: 42283 - DNA, 373 bp, Gossypium hirsutum
  unsure (1)..(373): unsure at all n locations
  Clone ID: LIB3196-037-P1-M1-B9
acgattaaatttaatctcaataaaaaggtaaattaagtaagaggatttcaacaataatgggttaatgggttaatgataagggttaataaataaaaaaaggttggtaggctcaaaggggtttcgctaagggtttaattatgtcggaaggctttttatggagtaaatgggttaaatcctaagtgcctttatcatcttagtatatcaaatcttacgtgtgatctcgacatgtataatcgaagcaagttctagaataacaattcaatgttgacacactcaaaccataaaagaagtgagcaagaaagaaagctatatgctcaaaaggctcaaaaatctcaccaaaaatttgggttnttgatgtcatttctgtatactt

SEQ ID NO: 42284 - DNA, 359 bp, Gossypium hirsutum
  Clone ID: LIB3196-037-P1-M1-C10
tctaagcctactcaaaatattgatttgtatttgttttttgaaagcatattagaggatttagcatgtgaaaaaattatttgacttgataatcacaatagagcatacactgaattacctattgctcaatcatatcgcaatttaaataagaatcactcttgaagctaaggtttttaatttagaagatggatggagcaaacaactacctcattagctactcaacgtgttactacagtggagtgcccctaattttcttctctttattacacactcttacttggactcacctttctagtcaacaacacgatggagcaaacaaagtggtgctgacttacttggcaattctaagcattggagtttct

SEQ ID NO: 42285 - DNA, 383 bp, Gossypium hirsutum
  Clone ID: LIB3196-037-P1-M1-C12
atgccatcctgacccccaatgacggccgctgtcacctggaggacaacatgtacaagaggagcaacgagttcgactacccatcggtgggccagctggcgcacaagctggccgaaaacaacatccagcccatcttcgcggtgaccaggaagatggtgaagacgtatgagaaactcactgagatcatcccgaagtcagcagtgggggagctgtctgacgactccagcaatgtggtccagctcattaagaacgcttacaataaactctcctccagggtcttactggatcacaacgccctccccgacaccctgaaagtcacctatgactccttctgcagcaatggagtgaccctcaaggaccagtccagaggtgactgtgacggcgtg

SEQ ID NO: 42286 - DNA, 366 bp, Gossypium hirsutum
  Clone ID: LIB3196-037-P1-M1-C5
cccacgcgtccgcccacgcgtgcgcgcacgcgtccggtcaaagcgtcagattcagagttatccacattgtggcttagccactagttcagagcagagtgcttcattcttcacaatatgccaaccgatacatatgcgatatacaaatattcatatttacagagtgcagttcattatcaaaaatagctatcacagtacatatacgggtatgctatacatatgtcaatcatagagcatcagagagccatcatacaatcgaattcagatcattcatactttgagcaagacagaatcaatgttggccacacatggcctcagagaaaagagattcaaacccgatttatttgccacacggcctggacacatgcc

SEQ ID NO: 42287 - DNA, 373 bp, Gossypium hirsutum
  unsure (1)..(373): unsure at all n locations
  Clone ID: LIB3196-037-P1-M1-C6
attgccgcccagttactacagctgacgaatctagaacatgatgtctatgaaagacttaccaacctgcaggaagggattatcccaaagaaaaaagcagcaaccgatgatgatctccaccgaataaatgaactgatacagggaaatatgcagaggtgtaaactcgtgatggatcaaatcagtgaagccagagactccatgcttaaggttttagatcataaagaccgcgtcctgaagcttctgaacaagaacgggactgtcaaaaaagtgtccaaattgaagcgaaaggaaaaagtctagacccagaagaatcaggagtttggaagcaaattgatgaagaatgatggtgggggtgggggggagggtttggnttttc

SEQ ID NO: 42288 - DNA, 367 bp, Gossypium hirsutum
  Clone ID: LIB3196-037-P1-M1-C9
gttctgttttggccctaaatcgggttgttacaagggtttatgtttaaaaatttacccatgagtgacatgctggtattttgaggtttattggtagattatgcatgtttatgattagaggaacaacttttactgagtcgatgaaacgtccaaaaggaccgtttttgcaaaagttattaaattggtcataaaatggtgatttagtggaaattgggggctgctatagttatgaaaatgattcggctaggcttaaaatgcaaggaaattgaataaaaatcatttgacgagcctagaggccaaagtgtaaataagtgaaagtttaagggtcaaaatgcaaatttgtaaaagtatgatttatggacccacttga

SEQ ID NO: 42289 - DNA, 385 bp, Gossypium hirsutum
  Clone ID: LIB3196-037-P1-M1-D11
atctccgctcccgtgagtaacttggctccgggggctccggtcgcctgcccgtacgccgccagccacccaggaccgcgccgccggcctccgccgcgagcaaacccttccgacggccttcgctgcgcaggccgggacgcctctcccccctccgcccccgccgcggaaagttaagtttgaagaggggggaagaggggaacatggacatgaagaggagaatccacctggaactgaggaaccggaccccggcagctgttcgagaacttgtcttggacaattgcaaatcaaatgatggaaaaattgagggcttaacagctgaatttgtgaacttagagttcctcagtttaataaatgtaggcttgatctcagtttcaaatctccccaagct

SEQ ID NO: 42290 - DNA, 355 bp, Gossypium hirsutum
  Clone ID: LIB3196-037-P1-M1-D12
agaaaattgaacccatcttataaacaaaattctgatcatcaaaggattttattgtattgcatccgttacctaatataagaagagcttagcagtttggtactttggtctacgcgaaatattttcaaatctccatttaaagttgcacatactatgtagaaatacaatagaaagtggttaatctaaaaatcatcttctccaatctatacttctacacggctacagccgtttcctctgaagttgaaactaaactaacagcctctaaaatttgataaaagctgaattgaaagaacaaaataatcgataaagtgacataaatttcgcaccataaaaaacgaaattgagattcctagaatct

SEQ ID NO: 42291 - DNA, 363 bp, Gossypium hirsutum
  Clone ID: LIB3196-037-P1-M1-D4
aaaatatagagatatcatcatggttgttaaccaaacacgccatgggaggtctgaaagctgctggtttttaatactttgatatatgtgagttcaattcttgccctttactttgagatttttatgtttttgtgacttttacaattagttccaagtgtttaattcattagtttttattttatggacaaaattaaaagctatcattgataagtgttggcagtttatgatgaaataaaatgaattttaagctttgattttgttgtttgatgattttatcaagtaaattcaatagaaattgattttaggacctaattgtgaaaaagttgtgaattaaggttcagtgttaaaattataattctcaaaggt

SEQ ID NO: 42292 - DNA, 383 bp, Gossypium hirsutum
  Clone ID: LIB3196-037-P1-M1-D5
atctctcctgttacagaagttctgatttttcctagagacctggaggaaagtgatttgccttgaaggaaactggggagtcagaaaattgggaactcatatcagcatggcaagcctactgaaaacactggtgactggctgctcgtgtcctttacttagcaatttggggtcctgtaagggtctacatgtgaagaaggattttttacgaacatttcatactcaccaagaactgtggtgtaaagcgcctgtaaaaccaggaattccatataagcaactgactgttggagtccccaaagagatattccaaaatgaaaagcgagtggcattgtctcctgctggcgttcagaccttggtcaagcagggttttaatgttgtcgtggaatctg

SEQ ID NO: 42293 - DNA, 370 bp, Gossypium hirsutum
  Clone ID: LIB3196-037-P1-M1-D6
cggacgcgtgggcggacgcgtgggagatgtttgagatgctgtgaaagacacctatttagatttagaaaacgctttacagatctttgagttaaaaataaaactctagaaggctaggtaaggggaaaaagaaattacttttattataattagatgatgtctctttggcaagaactagatcaatgctataatgatgaatgagagtgtaccgaagatagtgtaaaagctatgaaaaaagaggagaatgagcgaacttatttatttctcgctggtttaaataaagaatttgatgaagtgagatctcggatcctaggaaaaaatcgctttcaacactccgtgagatttttttttgaggttagaagagaggagacaa

SEQ ID NO: 42294 - DNA, 374 bp, Gossypium hirsutum
  Clone ID: LIB3196-037-P1-M1-D7
aagcgcgctgcagcctcaggtaccgaatcccaattcccacctacacctacgcttactttctccctaccaccgtgtcttgacaaatgtttaacttgctcttaactaaacctacctagatctaattaacgctcttcacaactcttaaatcacatttataacctacaaaatcgatgaaaacaaaaataactttcttcatattattattgaatcatgcctatctgaaacactctcaatcatatcattataataagagaatgatagcgaacccaacatcaatataaccctctgatacattaactcattttgccaacttctttataagatggttactcaaatcaaatatcaaggtctaagacatgcaacgattctacaaa

SEQ ID NO: 42295 - DNA, 383 bp, Gossypium hirsutum
  Clone ID: LIB3196-037-P1-M1-E1
atgcagaaaccactccccacttggccactactcagcagcgctgactcattaaggaaacacaaaaaccgagagcaaccagacacaacagaaaaggggaaccctgacctgaggaggctcaaacggaggggaatagggcagatctcactgacgtagcaattaaatggaagagactttatcagaaatagtagggaaagcccgggcactgacccagacgaaaaagcatgcttctccatggtgaccaaattagtaatgtggaacatcaagcagaagatagattgcagaacaaagaggtaaaaaagccaagaaatagaaataagggtgggaaagagatttgaaaacacattaaggagagccttaatggatgaatgatttccatgaataat

SEQ ID NO: 42296 - DNA, 370 bp, Gossypium hirsutum
  Clone ID: LIB3196-037-P1-M1-E11
atggacaatgctgagataagagtccacacagttgaggattatcaggcaattgttgatgctgagtggaacattctctatgacaagttagagaagatccatcattctggagccaaagttgtcttgtccaaactccccattggggatgtggccacccagtactttgctgacagggacatgttctgtgctggccgagtacctgaggaggatctgaagaggacaatgatggcgtgtggaggcttaaatcagaccagtgtgaatgctctgtcagcagatgtgctgggtcgatgtcaggtgtttgaagagacccagattggaagcgagaggtacaatttttttactggcttgcccaaagccaagacatgtaccttca

SEQ ID NO: 42297 - DNA, 366 bp, Gossypium hirsutum
  Clone ID: LIB3196-037-P1-M1-E12
attggcctaatcgaagtaaagtggtacccagtacctcatcgaatctatccgaagtacaatagtgacacccagtgtctcattgactcgagatcgaagaatccctgaactcttccaatcctatggcatgccaactatatctgactcagcccgactagttaatagggtattcgatccactttctcaattcaatatcactttcaattcatttacgaaacaattcaattatcttccacctttcaaccaacattcaattcacaattcaattcaaattcactttttcactttctaatcaatatacaattcaataccaatacatatttcagataagcacatataatcatactttgattcaattcaatccacttt

SEQ ID NO: 42298 - DNA, 391 bp, Gossypium hirsutum
  Clone ID: LIB3196-037-P1-M1-E2
atcattaatccagccatgatggctgctgcccaggcagcactacagagcagttggggtatgatgggcatgttagccagccagcagaaccagtcaggcccatcgggtaataaccaaagccaaggcaacatgcagagggagccaaaccaggccttcggttctggaaataactcttatagtggttctaattctggtgcagcaattggttggggatcagcatcaaatgcagggtcgggcagtggttttaatggaggctttggctcaagcatggattctaagtcttctggctggggaatgtaggcagtggggttgtggttggtggtatagaatggtgggaattcaaatttttctaaactcatggtaagtatattgtaaaatacgtatgtactaagaa

SEQ ID NO: 42299 - DNA, 382 bp, Gossypium hirsutum
  Clone ID: LIB3196-037-P1-M1-E5
atagaagcccgtggcctggagtcgaaggcccatttggggtttgctctgctgttgccaggtgccagtctgttttcagtgaggctttggacagcagtagggcagaaggcacctgccctttaactgtcagtgaccatgctagacactgttgataccgcctccccctacttccgtctccatcctcttgacgtcgacaccaaaccatttctcctctgtggtgctttaaaaactgtagcaaattttttgtatggtgcaagaatgcatggcctgggtctattggcaaccacagcagtttaaaactcactcagttgacaagcttctttctatcaaaatatctctctaaggcagacattgggactcattccttgaatgcagccctgccttc

SEQ ID NO: 42300 - DNA, 383 bp, Gossypium hirsutum
  Clone ID: LIB3196-037-P1-M1-E6
atcccggctgtcctacagtcctcaaggctctactccctgagcgggatggtgaccgtgccctccagcatcttgggcacccagacctacgtctgcaacgtaaaccacaagcccagcaacaccaaggtggacaagagagttgagataaaaacatgtggtggtggcagcaaacctcccacgtgcccaccgtgcccagcacctgaacttctggggggaccgtcagtcttcctcttccccccaaaacccaaagacaccctcatgatctcccggacccctgaggtcacatgcgtggtggtagacgtgagccaggaagaccccgatgtcaagttcaactggtacgtaaacggcgcggaggtgcatcatgcccagacgaagccacgggagac

SEQ ID NO: 42301 - DNA, 354 bp, Gossypium hirsutum
  Clone ID: LIB3196-037-P1-M1-E8
atcaggaagttataacatttagataaatgagtagaagtggacttccttcaacatattgttaccttgtctatccttaggaagaaaacaagagccacctgaaaatataggctcttttcgagaatctgctgaaatactattacagcaatttgaagttaatatggtaggaaaggaaggtggcttttcttgcaaaagtctttctaaacattcacactgtcctaagagatgagcttgcttgttttattccagtatattccacaaggtggcacttttagagaaaaacaaatccgatgaagactaaagaggtacttctaaaagagatttcattctaactctatttttctgtgcatatttaac

SEQ ID NO: 42302 - DNA, 372 bp, Gossypium hirsutum
  Clone ID: LIB3196-037-P1-M1-F1
tgagccttggaatccgcatggggagaatcatggtattcaaaagaactacaatttggatccctccctatgtgcatgggactcaagtgaccttgaatgaggaaaacctttcctacatgtttgatgaaacaacccctgttaaagattttgaaaaactgccttattatgttacacataacgataatataaccaaggaactggaacagaaaagggagacttcttcacacgttaaaaggcgaagaatgcttcagtttgacactcatgtatgtagattcttccctcatctgcaatgagatgccatctgcactcctaaaaccaagggttcttgctctcttttttttcttctttccatgcttaggagagggatgattcgat

SEQ ID NO: 42303 - DNA, 382 bp, Gossypium hirsutum
  Clone ID: LIB3196-037-P1-M1-F11
aaaaagaaaacaaaaacacaaactcacacccagacccaatcccaattatccggattcctattttacactcttactcccacgatacgcgcgggtttctacagtttcaaacccacccccacaacatcacctgctttatacacccatcaactcattctacataaatcacccccacaattccattaactatttaattctatcaatccataactacatcaaacatatttccaaattcacttattgcatttcaaacaccacatctacatttctgaaaactataaaaccctaataataaacatccctaattacatatcccactacaagcattacatagactactacaaatactaatagtccaacacctcatccaacaattgtatgctaa

SEQ ID NO: 42304 - DNA, 366 bp, Gossypium hirsutum
  Clone ID: LIB3196-037-P1-M1-F12
ctgtaatataaactcataaagtattatcgggattaccagtccaggctgaatcccctgcaacgacaattactctaatgagcttggatctaaattatcagtctaggctaaattcagaccctaattcggattacccgtctgggataaatccattttacacgtattcttcgggagggctatatcaggataggatcactcgttcgagctagattctttttaccgtcaattccttttcattcaaccgggatttcttcccttttttatcaaatatatcaatgtttcatcaattttcatacaatgaatatttaaatcatattcacatcaataacatacatttcaagtatttaaaaatataatttaagttatacg

SEQ ID NO: 42305 - DNA, 354 bp, Gossypium hirsutum
  Clone ID: LIB3196-037-P1-M1-F2
atcggtcctacgcccgatcgcgcgctcgccccgccgctcgtggcggagtcccagggcccctcgcagccgccaccatggacgccatcaagaagaagatgcagatgctgaagctcgacaaggagaacgccttggatcgagctgagcaagcggaggccgacaagaaggcggcggaagacaggagcaagcagctggaagatgagctggtgtcactgcaaaagaaactcaagggcaccgaagatgaactggacaaatactctgaggctctcaaagatgcccaggagaagctggagctggcagagaaaaaggccaccgacgctgaagccgatgtagcttctctgaacagacgcatccagc

SEQ ID NO: 42306 - DNA, 368 bp, Gossypium hirsutum
  Clone ID: LIB3196-037-P1-M1-F4
cggacgcgtgggttcgatagaagcttgccaacccgtgaaaactcctcacttggctgatgttcgttggacacggccattcgttgatcgccttgaccttttcttggtcaacttctaatccacgagcacttaccacaaagcctagaaaaacaacttcattagtgcaaaaagaacatttctttaaattggcataaagtacctcttttcgcaagacttcaagcacggcacgtagatgttgaatatgatcttccaagctcttgctatagactaaaattccctatgaacgaacgtaaaacataattcatgagacgcatgaaagtactaggagcgttggtaagtccgaatggctttaccaaccattcatacaaacc

SEQ ID NO: 42307 - DNA, 388 bp, Gossypium hirsutum
  Clone ID: LIB3196-037-P1-M1-F6
atctggagtgctgctggaaacgcgttctgccaggctgcgcagctgcacctgcagctccagagcaagcacgacgcagccacctgctttgtggacgccggcaacgcattcaagaaagctgacccccaagaggccattaactgtttgatgcgagcaatcgagatctacacagacatgggccgattcacgattgcggccaagcaccacatctgcattgctgagatctatgagacggagttggtagacatcgagaaggccatcgcccactacgagcagtccgcagactactacaaaggcgaagagtccaacagctcagccaacaagtgtctgctgaaggtggctggctacgccgcactgttggagcagtatcagaaagccattgacatctacg

SEQ ID NO: 42308 - DNA, 325 bp, Gossypium hirsutum
  Clone ID: LIB3196-037-P1-M1-F9
gcgacggacggcggccgatgatcggtcggtgaccgaccccctggccgaattcccttcccctctcccttttctctcccatttttttttctttctccccttccaaatgaatttttttaaaaaatttttaactttttataggggaccaaaacgcaccgttttggtcccccctacatttaacctgaaactgcactgttttggcctcgggttgagtcgacaccgacccactccagttagatccgcgtgtttttaaaaacagaacggctatctgcgcatttagcccttccggtttttcatgcatttacaatcagatattatttgttttcaa

SEQ ID NO: 42309 - DNA, 367 bp, Gossypium hirsutum
  Clone ID: LIB3196-037-P1-M1-G11
aactttcccatgtgggctacgacctgggtggcgggcgcatctacaagcccctgcggacccgggatgagctggaccagttcctggacaagatggacgaccctgattactggcgcactgtgcaggacccgatgacagggcaggacctgaggctgacagatgagcaggtggccctggtgcggcggctgcagagtggccagtttggggacatgggcttcaacccctatgagccggctgtcgacttcttcagcggggacgtcatgatccacccggtgaccaaccgcccggccgacaagcgcagcttcatcccctccctggtggagaaggagaaggtctctcgcatggtgcacgccatcaagatgggctggat

SEQ ID NO: 42310 - DNA, 399 bp, Gossypium hirsutum
  Clone ID: LIB3196-037-P1-M1-G2
gccccataatccccgatgcgacccacgcgtacacgtacgcatgatatttttagaggatgccgaatcaatatacttatccttcttccaacactggaacgcaattttaaacagtatatcgtcgtgaaatgctacataatttctatcttcttattgcttgttgatgtataaccagatatcatgcattaaaaaattactcaaattcatgaaagtattgacttgggcctaaaaacggaaaatcaactaacccctgaatgcaacaagttcatttataataattcataaacgaaattatcatatatacgcaagtcaattagatgctatatattaaaattgactatttttcctagttgcacaacaggttttgttacttgctggaaaccctgattattttttatctat

SEQ ID NO: 42311 - DNA, 303 bp, Gossypium hirsutum
  Clone ID: LIB3196-037-P1-M1-G5
ttgaaatagattttttttaaatgggggcattttagtcatttagtaataaaaagaattaaaaagggggaaatcaagtcaaaattggtgtccatcttattcaccttggccaaatttctcaaggagaccatagctagggtttcttcaactttcaaggttgatcgtaagtacatcgtagccccttttttttgctttttacatttttgaagaacgactaacccgatttacctatttataccattattgcgaattaagggacatgtttaaaaaaatacccatgtgtgacaaccttgcatgagacatgct

SEQ ID NO: 42312 - DNA, 327 bp, Gossypium hirsutum
  Clone ID: LIB3196-037-P1-M1-G6
acgctaaagcaccttcgtgccccgccccaatatccccgatccgatccacgcttccgatgcaatgtaacctgaatctataggtggatgaactgataagggatttaacaataatgtactgatgtggtcatgataagggcttataaataaaaaaaggttggtacgctcaaaagggtttcgcttagggtttaattatttctgaatgcttattataagatcaatatgctaaatcctaacgacctttttgatttttatatatcaaatgttacctgtgttctcgacatgtataatcgaatcaaggtgtagaatcacaattgaatgctgacacac

SEQ ID NO: 42313 - DNA, 385 bp, Gossypium hirsutum
  Clone ID: LIB3196-037-P1-M1-G7
atctcccacccccccaagtaggtggggctagaagcgtgcaccatcacacctggctatttctgtatgttttgtatagacagggtcactatgttacctgagctggtctcagactcctgggctcaagcaatccttccactttggcctgtatgcctacactcaagtgtaaagacatataaaccatgtctatactaaccagccaaatacctgaacactaaaaagaataattttcttgatgtggtaatggtatcatggttgtatagaatgttcctcttcttgggagatacgtgctgaaaatctggtttgacatctaaacctatttttgttttggcaaagaggacatgtgtctgtacaaaagaaatggagccagcgtggcaaaatgtttaca

SEQ ID NO: 42314 - DNA, 383 bp, Gossypium hirsutum
  Clone ID: LIB3196-037-P1-M1-H10
gaacgctggtgcgccttcaggccccgccccaaaattcccggtgcaacccacgcactagctaaaaagctattaggcgtacagagggttacaaaatgattacgtgaatgacacaaactaaacatttcaaacataagtgactaaaatccacctataaggagcactggtgaccatcagtgctgcttacccttacaataaggatatttgataggaccaaatatacaaaattcacacatcaattaaacgcacagagtggaatatatgaccaagatatttaaaaagtgtatgcattaagggtgcaaatttaaaataccaggaatacagtatttaatatacaagagaaaatgtataacctgaacatacagaatgatgtctgatttattaga

SEQ ID NO: 42315 - DNA, 285 bp, Gossypium hirsutum
  Clone ID: LIB3196-037-P1-M1-H12
gcgcgcacgcgttcggatacttttctgcattcgctaagcatcactggccttgtgttcaagcctgatgcacacgttacaagtcggtggaagatgtgaagcctctgtctcactgaggattttaaaggtcaattatacttttgttgttcattagcatctttgtaaactataagacatagttttaattaataaatattgcccccagattgtatttattttgaaaaaacaaaaggaaagcggccaagaaagaaaaaaaaaaaaaaaaaacgggggcggcccccctggaag

SEQ ID NO: 42316 - DNA, 357 bp, Gossypium hirsutum
  Clone ID: LIB3196-037-P1-M1-H2
cggacgcatgggattaaattgaaagggagatttcaactttaacaataattttaaaaaattaaattatttataatgtcgaaacctttttttgcttttttttttaaatcaacttatattttgaaaataaagatggaatcttcaccaattttttttatgaggtctgaccgaatcacctcataatttgattgttttactaaaaagcttgatttgctaaaacaatgatttttgttctacaaaaattcaaaaaatgggggcgggagtcgatttcacacgaggaagaattagcaccctcgttacgcccaaaattggtacctaattgattactcgacgtcttagtaccgaaaattaaaattttga

SEQ ID NO: 42317 - DNA, 362 bp, Gossypium hirsutum
  unsure (1)..(362): unsure at all n locations
  Clone ID: LIB3196-037-P1-M1-H3
cagaaggtgaatagcatcattagagatgccattgattttaaatgtgtcgcagaattccaaaaaattcgccaagtgggtgtttgggtcctcatcctgcaaaccatcaaactgaacaaattgctgtatcatttgaatcatgttaggtttcagtttaaaattatttgtagcaatagcaggcctaactatacttgactcagttcctgttaaattcggtttagcataatcatacatagtgcgtggagcatgattctgatttactggatcagcggcaatcgcaggaggtagtgaattttcatgattttcagccatctcctcggttgtggtttgaatatcngcctcttgctcttcctctgtgtatttta

SEQ ID NO: 42318 - DNA, 386 bp, Gossypium hirsutum
  Clone ID: LIB3196-037-P1-M1-H4
atctcggcgcgactcgcttcattcggttctacctgggagaatccaccgccatccgccaccatggtgaacttcacggtagaccagatccgcgccatcatggacaagaaggccaacatccgaaacatgtctgtcatcgcccacgtggaccacggcaagtccacgctgacagactccctggtgtgcaaggcgggcatcatcgcctcggcccgggccggggagacacgcttcactgacacccggaaggatgagcaggagcgttgcatcaccatcaagtcaactgccatctccctcttctacgagctctcggagaatgacttgaacttcatcaagcagagcaagggacggcgccggcttcctcattaacctcatcgactcccccgggcacg

SEQ ID NO: 42319 - DNA, 368 bp, Gossypium hirsutum
  Clone ID: LIB3196-037-P1-M1-H5
tacctaatggacatggcgggcgggcagaacatgaagttccgctactacaaaacatatataggatcgcgtgctttgctgcacagtacgttctgataactctctttctttctaaattgcctacagactccaagaatgaaaaggctctgggccgcataataaactcctgggaattatcaaggtgtgggcattcattcctgagcaacttgcacttgacgaatggcgaactggtcatgcaagaaatggggatttactacatggtattccaaacatactatgaatttcaggaggatgtctaggactacacaaagaacggcaagcacatggcccaatatatttacaaatacacaagttatcctgaccatatactg

SEQ ID NO: 42320 - DNA, 307 bp, Gossypium hirsutum
  Clone ID: LIB3196-038-P1-M1-A1
atgtgagccaagccatttacctgctgaccagccgggacgagagttaccagttcaagacgggtgctgaggtcctcaaggtgagctccccccaggcctgactctcgggcctatagagtcccacgtcctggatccagaatcacacctgggttccaatcccagggcctccacttggagctgtgcaacctctaagcacttacctgcctactctgtgtctccattttctacctgtggggtcaggggcaagctgcagtaaccgttcgccatgataattcaggtcatggagcccccagtaagcactcggcacata

SEQ ID NO: 42321 - DNA, 346 bp, Gossypium hirsutum
  Clone ID: LIB3196-038-P1-M1-A11
atcccagcccatccctgtgtcagccctgagtgctggacgctgtgttccacaaatgaggaagaggagagagagaagagatggacagacctcagatccattaaagcgttctcacttccctgagacttggttctgggtccttaaaaccaggtttcctcggctggggccctgtacacagttggtgtttaatgagtgtgtatggagaggagagttctaaggtcacctctggctgcaggcatccaggggttattccagcaatatgcaggtagggcgtgcatcccagcctgggagcctgctgtcaggagcaggcagacctagactccagcctggctgtgatacgtgctcgctc

SEQ ID NO: 42322 - DNA, 329 bp, Gossypium hirsutum
  Clone ID: LIB3196-038-P1-M1-A2
attgccgccgtcccgcccgccagcgccctagcgaggaagcagcgcgcagcccgcggcccagcgcacccgcagcagcgcccgcagctcgcccgcgccatgttccaggcggccgagcgcccccaggagtgggccatggagggtccccgcgacgggctgaagaaggaacgactgctggacgaccgccacgacagcggcctggactccatgaaggatgaggagtacgagcagatggtcaaggagctgcaggagatccgcctcgagccgcatgaggtgccgcgcggcgcggagccctggaagcagcagctcaccgaggacgggggactcggttc

SEQ ID NO: 42323 - DNA, 383 bp, Gossypium hirsutum
  Clone ID: LIB3196-038-P1-M1-A6
atggagtttgagactagcctgagcaacaaagtaagactcctcatgtcaacagaaaatgtaataaaataaataaaaagaatagtcccagtatcaaatgttcagactcatctcactttcttaggatcttaagattgaaagtgatgttcaagaaccaactgaaccagaggatgaccttgacattatgcttggcaataaaaagaagaaaaagaagaatgttaagttcccagatgaggatgaaatactagagaaagatgaagctctagaagatgaagacagcaaaaaagatgatggtatctcattcagtaatcagacaggccctgcttgggcaggctcagaaagagactacacatacgaagagctgctgaatcgagtattcaacatca

SEQ ID NO: 42324 - DNA, 281 bp, Gossypium hirsutum
  Clone ID: LIB3196-038-P1-M1-B1
cggacgcgtgggggaactttgtgtcttcctattgagaatggcctcacccagaatctgtgaaattgcatccatccaaatataaaattttcattctgcaaatacttaaatttgaactctttttttttaaccttttaattctgttcccattaaattattaaaatgaatattatcttaaaaagcatcttaattttaataattttagaatgttaaaaaatatcaaatgaacaattgttttttatttaaaaaggaattttatatacaatatgcaattttatgggttt

SEQ ID NO: 42325 - DNA, 376 bp, Gossypium hirsutum
  Clone ID: LIB3196-038-P1-M1-B11
atggggagttttgtgcggtgggtgagccaagaaaatactaattaataatagtaagtgttggttaagttgttgcttggaagtgaaaagttgcttagaaaggttagaactttaagtgcaaagaaaagaaaaaaacccaaaacaattgttttcctttgctgcaaggtggggaagactgaaaaagtgtaaccgaaaacagatgacacagagtcacccgttttcctagaacccacagggaggggtgtatgatgccatctcacaagcagggcaagtgtctttaccagcttcctcccggtgaccaaggcagcctgttttagagggttgttttgtttggggtgtgggtgttatcaagtgaattaatcactagaaagatgagtgt

SEQ ID NO: 42326 - DNA, 334 bp, Gossypium hirsutum
  Clone ID: LIB3196-038-P1-M1-B2
attaatttgaaacaaaatagaaaaatatggaaaattttgaaaaattttggaaacagaggtcacattgctatgtggccaagccgtgtgatagagcctagtccatgtggctcagaaacatggccatatggccaaaccgcgtacaattagaaataagggtcacatggtcgtgtcaaatctcgtgtgcccacctgtgtacaattcgaaataaggtacgtggtcatgtcccagaccgtataacaacctatgatcgtgtgtgataaacctgcagcaaaattaaatagtccacttggccttgtagtgtgaccatgtgtggcacatagccatgtgacagatc

SEQ ID NO: 42327 - DNA, 279 bp, Gossypium hirsutum
  Clone ID: LIB3196-038-P1-M1-B3
atgcctaccgcgcgaggacgtgatccgcctctgctccggcttggattgcagccttgacgaggtctgagcgaccatggacgggccggggttcatggcgtcgctggtggctggtggggtagcaggtgtttctgttgacttgatattatttcctctggataccattaaaaccaggctgcagagtccccaaggatttaataaggctggtggttttcgtggaatatatgctggtgttccttctgctgctgttggatcccttcctaatgctgctgcatttttatc

SEQ ID NO: 42328 - DNA, 347 bp, Gossypium hirsutum
  Clone ID: LIB3196-038-P1-M1-B5
caaaattagattaattaactggagaaaggcgttaatgaatttgcacaggtttaactcacccatcagagtcagttacaactacatggatatttctatgatgatattgtcaaattataacttgaaacacggatcatatcttacccaatcttgaaggcatacataatcctcttcaggtcggtattttgtattgttcttcccagtaacgatctctaatgcaacaatcccaaaactataaacgtttgccttgaaggtgagatagccccataatgcatattcaggggccatgtatcctctgcaaaaaatggagctttaagcgcaacattctcatgcatatcaacttcgttcac

SEQ ID NO: 42329 - DNA, 266 bp, Gossypium hirsutum
  Clone ID: LIB3196-038-P1-M1-B7
ttgaaagtaagatcagaatctaaattctgaaaatgccaaaatacatgttacggaggaagtacagactactaaactattcaagagaaagttcaaacagactgatagagaacctaagttcaaaaagaacaaaagggctcatgctataattatggtaagccaagatattttaaaaatgaatgtcgatttttaaagaagaaatcatcttctaaggctaataataatgaaaaagtttgtacaatgatatctgaaattaatatgcacaagat

SEQ ID NO: 42330 - DNA, 255 bp, Gossypium hirsutum
  Clone ID: LIB3196-038-P1-M1-B8
atcacaaatgtagtaagtgcagcaattcatatggtacagaatgggacctgaaaagacacacagaggactgtggcaagacctttcggtgcacatgcggctgtccctacgccagtagaacagcattgcagtcccacatctaccgaacgggccacgagatccctgcagaacacagggacccacctagtaagaaaaggaaaatggaaaactgtatgcaaaaccagaagttatccaacaagaccattgaatcattgaaca

SEQ ID NO: 42331 - DNA, 377 bp, Gossypium hirsutum
  Clone ID: LIB3196-038-P1-M1-C12
ctttagaattgcaacgaaaactcagttttatcaaatacaacatttttcttaaatgcaaacgattttctttaaatatcacaattttaaaagcttctgctacagaatatgtttctaaacgaatcaaattaatgagaaaatagttttgaaattgatgaaaaataaataaaagctaataaatggaaacgattttaaattgataaattcgatttcaaattctattccatatgacatcgccagatttggccataatgtctaggccaggtttggggtgttacatgaaccatgtaggaattaactgagtcgaatatgtgcttagaaactagaacacttctagccttcgacttgtacactaccaaatcaaaactaacccgggtttg

SEQ ID NO: 42332 - DNA, 341 bp, Gossypium hirsutum
  Clone ID: LIB3196-038-P1-M1-C4
atgtgctccttgcttcctccgctttcttccgagtggtcgcgtgaacggcttcctgcagcctggccatggcgcttcacgttcccaaggctccgggctttgcccagatgctcaaggagggagcgaaacacttttcaggattagaagaggctgtgtatagaaatatacaagcttgcaaggagcttgcccaaaccactcgtacagcatatggaccaaatggaatgaacaaaatggttatcaaccacttggagaagttgtttgtgacaaatgatgcagcgactattttaagagaactagaagtacagcatcctgctgcaaaaatgattggaatggcttctcatatg

SEQ ID NO: 42333 - DNA, 349 bp, Gossypium hirsutum
  Clone ID: LIB3196-038-P1-M1-C5
cccacgcgtccgtttttgatgaaactgttattctacctaacttatctcttaaaggctcttccaataaagaaaatcaaaagtagatggaacatcagattaatccagaatctacaacagagtcgacttctcaagccagtacaaaaattcagaaaagagttatttcttcaccacaatactctatcgccaaaaacagaactagaagagaaattaaacctccaaagaagtataccgaggctgatctagttgcttatgctttaaatttggctgaagatatatgtaacaccccaaacctggtctaaacgttatgaccgaatctggcgatgtcacatttgaacacccctaacccgta

SEQ ID NO: 42334 - DNA, 312 bp, Gossypium hirsutum
  Clone ID: LIB3196-038-P1-M1-C7
gattaattgaaatggctttgtaataatactcctattatctcattaattcatgctatggattcccctattagatttgactctaatccagtagatttatgtagtcttatttgtaggattgcatgcaattccattcaattacactaaatctaatatgaaacagggtctactcaaccattgatttaagcatatcgaacatggattaataatctagaaatatcaaaccaagaattaagcacacataattgagaacaagaaactaagaatttattgcgtaaaataaaaatcaaatgacagaatccatgtatttagaaa

SEQ ID NO: 42335 - DNA, 298 bp, Gossypium hirsutum
  Clone ID: LIB3196-038-P1-M1-C8
ggtaaaaatacaaggattgttaaccaaggaaaataattcgtggtaaagacaagatacacttggaccagaaaaacccgtgctcaaaaaaaacctttttgagcacgggttttttcagtaaaaaaaatcaaatggattcaaaatgtattcaactagggttttctggaccgtatcaataagctagacccatacttcgagttgtttcatgccataaataaactcgaacgctcaagatatccgttggaaaagcggattcacatctcttacaaccaacacaatcttctgtttttggaggggaagc

SEQ ID NO: 42336 - DNA, 319 bp, Gossypium hirsutum
  Clone ID: LIB3196-038-P1-M1-C9
gatgctatggatagagatgacaaccaagcaagcaaaaagctccgtctaaggtctacatctcggtcaaggtcactatcacgacctcctggtgaagttataccgggagagggcttgaaggattctgctcagaagataaaggctattaaattggccaagaaatctgtgttaaagaggaacaaaaatgctcgccgtggggaggctgatagagttattcccacattgaaaccaaagcatctgttctctgggaaacgttccattggaaaaactcaaaggcgataagaattggtgttggggagagaagattttgtttgggtttttg

SEQ ID NO: 42337 - DNA, 365 bp, Gossypium hirsutum
  unsure (1)..(365): unsure at all n locations
  Clone ID: LIB3196-038-P1-M1-D11
atgcagcaaatactgtaaacgtgcagttttttttttggggggttatgtatacaaaagtttaactactttttggtgttcatgaaaaccatttagttgaccaggtgcctatgccattgttcagttttctttaacaacagatttgcaaattaaaaaaaaaaaagaaaaaaaaatcttaccagcagtttgtaaaggtctggaatcacagttggcatcctttattcaggtctcttctctccagtgtgcacttaaaagtggtgccgagcagggataaaacctgcagttaagggaaaagaaaatccagcctccctctccaaaaaaaaaaatacatttaattnttaaaaattagtggtatggcaataagacac

SEQ ID NO: 42338 - DNA, 315 bp, Gossypium hirsutum
  Clone ID: LIB3196-038-P1-M1-D2
atgcgagaggagtggggggagcgcggggcaggaggagtacctcggccaagaaaattatgcatgcgttagggaagctctgagagaatggctgtggaagctcttcactgtggtttgaatccacggggcattgatcaccctgcccatgctgaaggtattaaactgcaaattgaaggtgaaggtgtggaatctcaatccattaaaaacaaaaatttccagaaggtgcctgaccagaaaggaacccccaggcgactgcaggcagaatctgagacggctaaggtgcgtaatattccagttaattacggagatttgaaagct

SEQ ID NO: 42339 - DNA, 211 bp, Gossypium hirsutum
  Clone ID: LIB3196-038-P1-M1-D3
atgaaaaaagttgagaagtctgtcaatgaagtgatggaatggatgaataatgtcatgaatgctcaggctaaaaagagtcttgatcaggatccagttgtacgtgctcaggagattaaaataaaaatcaaggaattgaacaacacatgtgaacctgttgtatcacatccgagaccaaaaattgaatcacccaagctggaaagaactccaaatg

SEQ ID NO: 42340 - DNA, 324 bp, Gossypium hirsutum
  Clone ID: LIB3196-038-P1-M1-D8
atccgcgcgaggtgaccggagtcacagttcccgcgggcggcgacagcagagcgcccactgcctccagcagattaatattaagattggaagtttgtatcttttgctggatattggaaattgaagtaatggcaacagaatttataaagagttgctgtggaggatgtttctatggtgaaacagaaaaacacaacttttctgtggaaagagattttaaagcaacagtcccacatagtcaaaatgctactatctctgtaccttccactgacttctgtttctgtaaagcctcaggttggctgtactgaggattatttgctttccaaatta

SEQ ID NO: 42341 - DNA, 364 bp, Gossypium hirsutum
  Clone ID: LIB3196-038-P1-M1-D9
gtcagtttcgagcacgggctagacgcactggcatgtgactggccatgtaacccaagtcagtagcctccctaattttcacacagcctggcacacgggcgtgtcatgtggccgtgtggacaagttagtatgtatgccctgttttgccacggcctagacacatgggtgtgtttaaatccgtgtgaggcacacggcctattcacacaagcgtgtgacctctgtaatttagaaaaaattgtttagttttgaaaaattttgtaagtgttcggtttagtcccgacctcttcctaatgcatgtttaaggtctcattgacctaagaaagggacttattgttgatattttaatatgatatgatgatatataact

SEQ ID NO: 42342 - DNA, 407 bp, Gossypium hirsutum
  Clone ID: LIB3196-038-P1-M1-E1
attgtattcaaagatgatttcatagtgccaagcaacatggtgatccagtggttatgtaaaaataataaaacatgaggtgtcctgaaagttttggggcagtttttagctttaatatagtgtgcctgggccctccagaggactgcagcatataggtacatgctgtaaatctttacaaaatatcatttggaagtgtaattgtatttcttctttttatttttaatagatggtgcctcactatattgcccaagctacagtgcaatcagagacacaatcatagcgcaccacagcctgaaaaccctggcctcaagcaatcttcccatgtcagtctaccaagcagctgggaccataggtgtgtaccaccgcctctaggtttattttggagaatttgaatgttaacttttaacttt

SEQ ID NO: 42343 - DNA, 332 bp, Gossypium hirsutum
  Clone ID: LIB3196-038-P1-M1-E11
cccacgcgtccgaaattttcgtacttcattgaagttacagtatagctagatacggtattcggtcaattttatgcataaatttaccaaaattcgggttatatatatttccatcatacataaatgtattgttttaaggttttgctagggcgtttatatatgatgtaatgatttttgttgattttcttgttgctgaagtttataggcttagttgttgcttcagtctgaagttaatctctcatttggttttacagtggatttcaaagcaagtttgcttatgttttgaatttggattaggtcttttccattttgcatttgcagtttaattttggaat

SEQ ID NO: 42344 - DNA, 361 bp, Gossypium hirsutum
  Clone ID: LIB3196-038-P1-M1-E2
atgcctgcgacaggctccccacaaccatcccatgctgtgaaggacggaaacaggagaggaagggactggagatccctggcgggaggtggctgaggcagggatggaccctgctcaggttttctgagccctggattgtggtttgtccttcagttttctggtaaaagatgtagatgaaattgagccagcagagagatctcataaaaggaagcaggtttcaggatcacccagaccttggttcggatcctaaccccgggaactttccagctctgtggcctagacagacctccccctctttgaagctcagtgttgatagtgctcattttcaaagataatagttccagcactttgagaggctgaggca

SEQ ID NO: 42345 - DNA, 348 bp, Gossypium hirsutum
  Clone ID: LIB3196-038-P1-M1-E5
atcgaggagaccaggctgctctaacttctgaagagtgggctccggctcaagactccaatcggccagaagcccacagagatcaaagcactagcaagttcagctgtcctggccctcaggcagaacccactggagtgcctgggtgtggctccacccacatgccccactgtcagcccaggcaggagccttcctggccaggctcaagatctgcctgcagcccagccaggccatcacccagccccgatgcatcctggcactgcacgcttactcttcacaagcacttatatgcggatggcctccgagaccctgcctccctggtctgctgaggccaggccaggtctcccacggggc

SEQ ID NO: 42346 - DNA, 365 bp, Gossypium hirsutum
  Clone ID: LIB3196-038-P1-M1-E9
gatctcaccattactcagatccaaatcctcttttgcaaggggaaggatgttgatagtggatagtgcttgaagcgatgagtcggccccaagacccttaattcaagatgcagttcagtattccggtgtcttggatcggactggatttgttgacaaatgcatttttgaagcagataacaaatctaaaaatgcttttccagtcaacaaataccagtttgagctgagattgggctgagatttacaaacctcttcctcactcaattcaacagtctgattccgggaaagttcctttcttttgaatttacttttaaattttactaggtaatgtttagtttgcagtcgtttcttccctctcttcgacatatttt

SEQ ID NO: 42347 - DNA, 362 bp, Gossypium hirsutum
  Clone ID: LIB3196-038-P1-M1-F1
ccaaaccaagaaacaaaactattaaaaggatgaaatttaatccaataatcattgggaaaacatatttttaaataaaaaataaggttgtatcttccttaccggttccaatggacagaacatagtttcaccgatagagaggaacagaaaacgtgagaaggaggctgctttctgattggtgttcaaagtccagttgtaacgccaaagagaggtaaaacagaaaggtaaaagcgtgaatcggtggagatagaaaggtaagacagaaaggtgaggagagtggaaaagaaaggtggaaggaagaaccagattacggtggattttgggtaagacagaagcgtgaatcaggagggtaaaacagggaccaa

SEQ ID NO: 42348 - DNA, 335 bp, Gossypium hirsutum
  Clone ID: LIB3196-038-P1-M1-F10
cttcgaagacctatcatctctgttattctattaccgattggatccaaacaaaggatttaatggatcattggtattttctaggattcttgcttcttattttgcttcaactctgtttggtttcagctgagatcaatggatcggtgcttgaaatgaagagaggaacttcttcggttccatttgatcccactcgtgttactcaactctcatggcaccctagggctttcctttacaaaggatttttatcaagtgaggaatgcgatcaccttattactctggctaaggataaattagagaagtcaatggtggcgggatatgaatcaggtgatagcattgag

SEQ ID NO: 42349 - DNA, 406 bp, Gossypium hirsutum
  unsure (1)..(406): unsure at all n locations
  Clone ID: LIB3196-038-P1-M1-F6
atgggaagttgttggaaatactactggagatgtaaccagtagttggaccatgtaagactataaatatacagaaaaagatgaaaatgttttgacaagagaatggcttaatccaatatacattttgacagaattgctctgtcagaatttactgtgtcagccacagacgtcagggggcaaaggtagaggcaagaaaccagacaggaggctcccgtagtagtccaggcaagagatgataatagttatgctctttaatcatactcaacaaagttgttgagtattggaatacatttttaagttgccaccagcagaanttgcttatgaattaattatgggctatgagaaaaagataaatcaagatgttctatcatgtgttttctgaacaacatgggtaatggcaatgttattt

SEQ ID NO: 42350 - DNA, 334 bp, Gossypium hirsutum
  Clone ID: LIB3196-038-P1-M1-F7
cccacgcgtccgggggttctcaaaatccttgaccctagactgtcttcggttcccctccacgaggtaatgcatgtattctacgttgcgatgctctgcgttgaagaacaagctgtagagagaccaacaatgagagaagtggttcaaattctaacagaggttcctaaaccacccagctcaaagcagcagcagggagactccgcaatcactgagtcctcaccaatatcacaacccacaactctagagtctcctagagatgcaacaacaaaggaaccaaaagaccaacacactccaccacctgatcttcttagcatttaaagtggggtttttttttttt

SEQ ID NO: 42351 - DNA, 354 bp, Gossypium hirsutum
  Clone ID: LIB3196-038-P1-M1-F8
atccggtccaggctttacagaagggaagaactggtaacttgacagcaggctctctggagtccacggaacccatatacgtctacaaagcacaaggtgcaggagtcacgccgcctccaacgccctcgggcagccgcaccaagcagaggcttccaggccagaagccttttaagaggtccctgcgaggttcagatgctttgagtgagaccagctcagccagccacattgaagacttagaaaaggtggagcgcctgtccggtgggccggagcagatcaccctcgaggccagcagcactgagggacacccaggggctcccagccctcagcacgccagccggagcgaggccttccagaaag

SEQ ID NO: 42352 - DNA, 347 bp, Gossypium hirsutum
  Clone ID: LIB3196-038-P1-M1-G11
atcggtcccggagccagtggccgcacccgtgcgggtagcgcctctgccaccgctcaccatgggcccgggtcctcggctgctgctacctctcttgctttgcgtggggctcggcgcgcttgtgtcttcttcgggggccgggggcttccgcatgcgaggcccctctgtgacagccaaggttttctctgatgtgaggattggagacagagatgatggcagaattgtgatttggcctctttggaaaagttgtgcccaagacggtagaaaattttggtgctctagcaacaggagagaaaggatatggatttaaagggagcctgcgtcattgtgtcaccaaaggatttcatgat

SEQ ID NO: 42353 - DNA, 292 bp, Gossypium hirsutum
  Clone ID: LIB3196-038-P1-M1-G2
atgcctgaggagccattttgagcaatggggaacgctcacggactgggtggtaatgagagatccaaacaccaagcgttccaggggctttgggtttgtcacatatgccactgtggaggaggtggatgcagctatgaatgcaaggccacacaaggtggacggaagagttgtggaaccaaagagagctgtctcaagagaagattctcaaagaccaggtgcccacttaactgtgaaaaagatatttgttggtggcgttttagaagacaccgcagaacatcacctaagagattatttt

SEQ ID NO: 42354 - DNA, 301 bp, Gossypium hirsutum
  Clone ID: LIB3196-038-P1-M1-G3
gagaggttaagactgacctaagtctctactaatataaggtagccacaaaatatgtggatagaatcctccaaagaattgtagtatcatgggcacaaagtattcattgcaatccttctgtaatttagattgactaaagtagggatagaattccatgaaaatctccaaaccatagttttaatcatagttttaattttcggaggaatttgtaaattccatagctttttgtagaaatatctagaattagtatgtgatgtataatcagtaggaacaagggaaccattttgtaatagtatttgcgata

SEQ ID NO: 42355 - DNA, 406 bp, Gossypium hirsutum
  Clone ID: LIB3196-038-P1-M1-G6
atccaccatggaggcccagaccacactgaccacaaatgacattgtcattagcaagcttacccagatcctttcatacctgaggcagggaacccgtaacaagaagcttaagaagaaggataaagggaagctagaagagaagaaacctcctgaggctgacatgaatatttttgaagacattggggattacgtaccctccacaaccaagacacctcgggacaaggagcgggagagatatcgggaacgggagcgtgatcgggagagagacagagaccgtgaccgagagcgagagagagaacgagatcgagaacgagagcgagagcgggacccggagagagaagaggaaaagaagagacacagctactttgagaagccaaagtagatgatgagcccatggatgttgacaaag

SEQ ID NO: 42356 - DNA, 309 bp, Gossypium hirsutum
  Clone ID: LIB3196-038-P1-M1-H11
gggatttgaaggtcccaaatagatgtatagagtttttttcattatcgtttttactcaaattactgtctgtatgctgggtcacttttgtaagtaacgctcgatacccactcttcaccgaatactctcttgaagtatcatggcaccaagcaagcaaatcaggaatactacacccaacaagaggaatgttgaaaatttttcgagtatgaacttcatcgcatatcttaaaaatcacctcatttttccaggaccaggaagctagggatcattccagatatttacctttacaccattgccaattcttcacaagag

SEQ ID NO: 42357 - DNA, 141 bp, Gossypium hirsutum
  Clone ID: LIB3196-038-P1-M1-H12
atctcctcactcacccttcctggtgctttgggctccccttcctccttagataagatgtcttatcagaaaaagcagcccaccccccagcccccagtgggctgcgtgaagacctctggcggcggtagcggaagcggaggctgc

SEQ ID NO: 42358 - DNA, 317 bp, Gossypium hirsutum
  Clone ID: LIB3196-038-P1-M1-H2
atgagatttacgaatgaaagccgaagattatgaagtagtgaaggtgattggtagaggtgcatttggagaagttcaattggtaaggcataaatccaccaggaaggtatatgctatgaagcttctcagcaaatttgaaatgattaagagatctgattctgcttttttctgggaagaaagggacatcatggcttttgctaatagtccgtgggttgttcagcttttttatgcattccaagatgatcgttatctctacatggtgatggaatacatgcctggtggagatcttgtaaacttaatgagcaactatgatgtgcctg

SEQ ID NO: 42359 - DNA, 379 bp, Gossypium hirsutum
  Clone ID: LIB3196-038-P1-M1-H4
ttccacgcgtccgctttcttcttccccagttcccagtcgaaggactaaaacccaactctcattcgccgcctcatgcgcggccgtaaacagccatcgaaaggccgaagttcacccccttttgccagcgaatcgaaaggtatggtgaatgtggcttggacgtggtacatgggtgcatggtgaacgatgatggagaacgtgggtagtgcgtggaggtggtggcggcgccagccaaagggagagcctcaaagctagggtttgttatttctttaaaagaaaattagggccattgggcttgtgtaaacgggctaaaattatgttttgagccagcatttaagcttgggctttaaatttggaatggacctatttgtttttgtttagt

SEQ ID NO: 42360 - DNA, 324 bp, Gossypium hirsutum
  Clone ID: LIB3196-038-P1-M1-H8
ctagctccgaatccgattgctccaacaacccacgccttcaatccaacacttaagaagacactaatcattgacagaaaacgtcagttaaaaacccttagagccacatgcccaaatcgacagcctccctagattttagggacttcggcttttcctaactttgtaaaataggaccagatctgagatgatgaacacttaccccttactccttttcgacctccatgcaatctggtgccgatttatctttcaaatgacggtagaactcaacttccaaagttttgaaagttccgctattaaccccttaatctatgggtttttggcttttgg

SEQ ID NO: 42361 - DNA, 295 bp, Gossypium hirsutum
  Clone ID: LIB3196-039-P1-M1-A1
aaataatttgtaatctacagtgatgctttattgaccagtttgggatgtgttgtgatgcaacaacattggcctttcccggatgataatcgataacaagctcgtaatcttttagcaattctagccatcttctctgtcgcaggttcaaatctttccgagttatcaagtatttcaaacttttatgattagaataaacgtgacatttctcaccaaatagatagtggcgccaaatcttcaaagcaaatacaatatccgccaattctagatcgtgtgtcaaatagttctttttatgctactt

SEQ ID NO: 42362 - DNA, 319 bp, Gossypium hirsutum
  Clone ID: LIB3196-039-P1-M1-A2
aaagctcatacattggacagacatggtttagatactaaatagatatggattaatgaactaataatgttatacgataatctttgctgcgtatgttcgatgaggaccaacgtttggatattactggattcggatgtaccaaaaagtttcgcctgactatacttaaatcacttactaatccaatctccgatcacgggtcaacttgtgatctctcctttcccattccacttttaatttggctattaccaatgctgagtctgcatacactcgtagtatcttaatcttccgttctatggttgctcgaatccccatgatgcaagct

SEQ ID NO: 42363 - DNA, 364 bp, Gossypium hirsutum
  Clone ID: LIB3196-039-P1-M1-A4
atcccagacgaaggctgagagtagacagcagaaccagcggcggtagctaagctgagacagtagtagcggcgacaacgacggcggcagcgatggctggggcggggccagccccgggactcccgggtgcaggaggacccgtggtcccgggtcctggcgctggcatcccgggcaagagcggcgaggaacgcttgaaggaaatggaggcggagatggccctgtttgagcaggaagttctgggggctccagtacccggaatcccaactgctgtgcctgcggtgcccacggtccccacggtccccacggtagaagcgatgcatgtcccagcggctcctgtgatccgtccaattatcgcgaccaacacata

SEQ ID NO: 42364 - DNA, 271 bp, Gossypium hirsutum
  unsure (1)..(271): unsure at all n locations
  Clone ID: LIB3196-039-P1-M1-A7
agttatgccataaatgccaaatggaggaagataaaacttatgtgcctcatccatttcttcacagattttctatatgtggagcatggatattatagggctgatcttgtcaaaagcttctaaccgatactgattcatctttcgggtcgttgattacttcgtgaaaagggtgcaagtcagttcatatggccaatattactaagtccacggtcaccaaaatcaaanntaaaaataataaaaaaaaaaaaatataatttaaaatattttaatatat

SEQ ID NO: 42365 - DNA, 380 bp, Gossypium hirsutum
  Clone ID: LIB3196-039-P1-M1-A8
atcaaaaatgccagatgaatggaagagggaacacactgagatgacttagactctggtccaccaaccagacccttggaatggaatattaaaatcattacaaggcatgaattttaaatggatgaaatttcaaattatcttatttggatagaagtctatattctagcctcatttgcctgaagtcagatagccagaagaaatttcattgctcgttttcacgaaattcacttgtcttttgttaattaacacagggcctttcccaaattattctctagccaagccccgccttcattactgttgaaatccctcatttatttccttctcaaagtgcccgttatccaaacgcagaacctttgcatctccaagccagttatgctgaattt

SEQ ID NO: 42366 - DNA, 356 bp, Gossypium hirsutum
  Clone ID: LIB3196-039-P1-M1-B10
cggacgcgtgggcatctcccatctttccttctatttttgatttagtttctcctcagctcttcaacaccttcaagcattcatggattccatccatcacctatctgcatccacctctttcacaatgaaagaaggaacttcattcatcagataagttgtttctctcctttttagttcctttgtagctagaatgtgaacagccttgtctgattctctataggtaaatcgaaaaacataagacctaaaacttgaacataattgttttgaatcattgataaaaacttcaatctcagatctgtctgctacctcagcttacagtttacgaatcactgtatgggcatctccttctatttcaagcg

SEQ ID NO: 42367 - DNA, 366 bp, Gossypium hirsutum
  Clone ID: LIB3196-039-P1-M1-B2
atttctaacttttatcatcactattaccagcatcatcactgttatcgttatcttcatcatcatcattaccaccattatacctgatactgccacaacatcagaacattatgtacaggcacagcatatcttcccaaagatcttggccactgtggactacgatctttacgtttcttggagtggcagcaatcttgggagtaactattggtcttcttgttcattttctggcagttgagaagacttactattatcaaggtgattttcatatttctggagtcacgtacaatgacaattgtgaaaatgtagcttcacaagccagcacaaatctaagcaaagatattgagactaagatgttaaatgcatttcaaa

SEQ ID NO: 42368 - DNA, 377 bp, Gossypium hirsutum
  Clone ID: LIB3196-039-P1-M1-B3
tgttgatgctgatcaagttgtgagggcagatatgggagaactctatgacatggatataaagggaagacctcttgcatatactcctttttgcgataacaataaggacatggatggctatcggttttggagacaagggttctggcgagagcatttgcggggcagaccataccatataagtgcattgtacgtggttgacttggtgaagtttcgtgagacagcagcaggggataatctaagagtcttttatgaaagtcttagcaaagatccaaacagtctagccaatctggatcaggatcttccgaactacgcacaacacacagtaccaatcttttcattaccccaaagatggctatggtgtgaatcatggtgggggaatg

SEQ ID NO: 42369 - DNA, 387 bp, Gossypium hirsutum
  Clone ID: LIB3196-039-P1-M1-B4
atccctggtagagttccggaacctggagaacttcaaacaaggtcgctggagcaattcctacaagctcccgtacagctggatcggcacaggccacgtggtatacaatggcgccttctactacaatcgcgccttcacccgcaacatcatcaagtatgacctgaagcagcgctacgtggctgcctgggccatgctgcatgatgtggcctacgaggaggccaccccctggcgatggcagggacactcagacgtggactttgctgtggacgagaatggcctatggctcatctacccagccctggacgacgagggcttcagccaggaggtcattgtcctgagtaagctcaatgccgcggacctgagcacacaaaaagagaccacatggcgcac

SEQ ID NO: 42370 - DNA, 370 bp, Gossypium hirsutum
  Clone ID: LIB3196-039-P1-M1-B5
cggacgcgtgggtgcagttgcagtcgacttcaaacttcaaactccaaactccaaactcccacataacaaaatcgtaaaagatcgatctatctaaatttttgctaaaaaagtaagatccttcaaaaatggctacccttccacaaatcgcggttctggaggctggaatatttgtaaaaactcaatacatcccgagactcgccgagatctcacatctcttctgcctcaaatatatctggagctgttcagaggaatcttcgagaggagctgttgagatagccaaacagcattttcctggagtggaatgtaaatggggagaccaaggtctaaacgacatcgtgcaggattcttctcttattggtactgctgtcgt

SEQ ID NO: 42371 - DNA, 357 bp, Gossypium hirsutum
  Clone ID: LIB3196-039-P1-M1-B7
atctggattcgactgctcagttcacctgccacgttctctccaaggagtgggttctacgtgaccttcagtcctctacctcagagccccgagtcatttctgacaaccccgttctgtgtcctcactcttgtccctgaacgggtccctgtgtggatctgtgtgtgtgtgtgggttctccgctcccccccctcgtgtaccacacctgccataatgaaccgtttctgcactgatcttgtccatgggtatggagtggagggaaggtcttgtgaaaggggagagccttgacttccatctaggtttcttttatctggagaaaaagaacatttttaaactatgaatgcttagccctgaaaggcaagc

SEQ ID NO: 42372 - DNA, 293 bp, Gossypium hirsutum
  Clone ID: LIB3196-039-P1-M1-C1
atcacgggtgatctggactggagcagcagcagcgtgagcgactctgacgagcggggcagcatgcagagcctcggcagtgacgagggctattccagcgccagcatcaagagaataaagctgcaggacagtcacaaggcatgtcttggtctctaagagaatgggcactgcggctgcctccttgaaggttctccctgttggttctgattaggtaacgtattggacctgcccacaactcccttgcacgtaaacttcagtgtcccaccttgaccaaaatcagctttgtaactgttttc

SEQ ID NO: 42373 - DNA, 345 bp, Gossypium hirsutum
  Clone ID: LIB3196-039-P1-M1-C11
cccacgcgtccgatccgcaacaacaccttatctggcaatgtaccaccagttttgaagaggctgcatgctgggttccaatatgaaaacaatattggcttgtgtggtgttgggtttcctaacttgaaagattgtgcggattcgagtaagattatagaagcagacctgaaccattcaaacccaatggccttaaccaaaagaatatccgggagtcggctgatttaccaactgaatgcagcaaagctaactgctcgagtccatccggtagtgcaaaaatcggtgtggtctccggcattgttggtgttgctcttgtgttgacagttgcagcactttttacttttgcatggt

SEQ ID NO: 42374 - DNA, 336 bp, Gossypium hirsutum
  Clone ID: LIB3196-039-P1-M1-C12
cggacgcgtggggcttatggaattgaagagacattaagtataccccccattggttgcttactgaaagggatgccgcatgtcataacagagagttctcagtatagttgctcaaatgagaatggtagattttagtgttttatatatattaatattaatgattgcatagtacaatttatatagatagaggccgagggggagagatgacatagcacaatcatctgaatatgtattatataattggtttgttttgtggtgttggtttaggcttctttcatccctttaaaggggttatttatcccttagcgtgtgatgagatgagatgtgctggtttgtata

SEQ ID NO: 42375 - DNA, 261 bp, Gossypium hirsutum
  Clone ID: LIB3196-039-P1-M1-C2
acactatctaacaagttggtacgcagaagcacgctggtgccccgccgcaatttccgggatgggaaccgcgcgctcgttgaccatgatggttaaaagggcctggccaaggtgcatattgaggaagctggctggagctatgttgggggctggactggccaacgtggctctaaacttgagactaaacggactctacccaagaagagctttgctcagatcactgccaatgtaactaagcctaacattcatggcctggtcatgatt

SEQ ID NO: 42376 - DNA, 383 bp, Gossypium hirsutum
  Clone ID: LIB3196-039-P1-M1-C6
atccgccgccagctcgcgcatcttgttcttctgccgctcaactgtcctagtcctccgccggtcgcaatggaagaagagatcgccgccctcgtcattgacaatggctccggcatgtgcaaagctggctttgctggggacgatgcaccccgagccgtgtttccctccatcgtcgggcgcccccgacaccagggcgtgatggtgggcatgggccagaaggactcctacgtgggtgacgaggcccagagcaagcgcggcatcttgaccctgaagtaccctattgagcatggcattgtcaccaactgggacgacatggagaaaatctggcaccatactttctacaatgagctgcgcgtggccccagaggagcacccggtgctgctgac

SEQ ID NO: 42377 - DNA, 217 bp, Gossypium hirsutum
  Clone ID: LIB3196-039-P1-M1-C8
aaccggtcggttttatttaacctaaggagggggaggtttaaacttaaactttttgttgagatagaactcctaaataacttacaatacttaataattataaaaaatttgggataaaaaataaaaaatatttaaagtttataaatacaatattgagcttatctattataaaaattaaacctccaacctccctctaatataatttaaacactcattaaaa

SEQ ID NO: 42378 - DNA, 366 bp, Gossypium hirsutum
  Clone ID: LIB3196-039-P1-M1-D11
gtaaatcttatcaatctgcatcgaaggaattccaagactcgttcaatcgttctaatgcatcgatgagatattcaagtagagatcatgaaaaacaacctgtgagttctacagctcaagctacgcctattgctagtgttggcagtgtgacagcccaaaattgaccctagtcagaaagtggtttcgggaccgctaaaccgagtcaccgaagtatttgagtataatatttattgtctaaaatatgtgaatatgagtgtgtgaaagttttaagcttcgatttagttaattgcatgtgaatttagttaataagacttatgtgtgacacttttgaaatgtgataggttaatctataaggatctattagtgcat

SEQ ID NO: 42379 - DNA, 104 bp, Gossypium hirsutum
  Clone ID: LIB3196-039-P1-M1-D12
caaaatactaagatcattaatacccaaaatgaaagtttgatagtgtgatttgaatctctgacgatctctgtttccgagctagcttggcgacactataaaacatg

SEQ ID NO: 42380 - DNA, 275 bp, Gossypium hirsutum
  Clone ID: LIB3196-039-P1-M1-D2
atcttaatgactgttttggaaaagttgaattctagatttatatatatatgtgtgtgtatttttttttcaaacatcatttacatagtcatgtagtggaaaagggatacctaacatagttttattgaaaaccaaatttcatgtataaataataaaaaatccatatttcaacatcctaaaatcaaaataaatgccatgcatgctatataaattcaaaacctaagtcccatgccacagtttaattataaatcaatacagtctcttaataatagaaattg

SEQ ID NO: 42381 - DNA, 387 bp, Gossypium hirsutum
  unsure (1)..(387): unsure at all n locations
  Clone ID: LIB3196-039-P1-M1-D4
ataatgattgcagttgtattttcagaggattcaaatatcatatgtgccatggatattgatattacaactttcaaaaatgattaacaattctcagtaaggtgcaaatgaaacaaagtatagtcttcagttagtttacattggatttgcatttatgggaaattgtgtattaaaaccatgaaaagaagtatttaattttttaatgtaagattgaatttggtcctaggcttaaatcattacatacagattttttttaatctacatgattaaaaaaatctacaggaaacacaatgtctcatatccatggctccattggtgcatggtactatataactngtagggtatgttaattccctgatatttattcatttattcattcaacacataaaa

SEQ ID NO: 42382 - DNA, 387 bp, Gossypium hirsutum
  Clone ID: LIB3196-039-P1-M1-D5
atcgcgccgctgcggtgctcaggaacagcccatggaagaatcatatgaagaggtggtgactgaggtcgtaagcaggagtggacatgtttggatttccaacagctaccctgctggactgtcatggaagatatgcccagaatgtagcgttcttcagtgagtgagtcagttgatgtctggatgtgctcagctcacagatattcagtgttcctgtcctcagcactggtcagcagtctgaggaagcagaggagaccttgctttggtagagctcgctgttcctagggttacaagaaaagcctgtgagctggagttagaagtaatagtagaaacagagcaagagaaccatcgtgatatagaggtagcgttgaagtaatctctgagaatcaatga

SEQ ID NO: 42383 - DNA, 275 bp, Gossypium hirsutum
  Clone ID: LIB3196-039-P1-M1-D6
ataaaatttggattgtagtctgagttttttttccccgtacaattccccattcccccctgcaagcctgtaccaggagaggtatcagctgccttggaggcggtgagacatgtgggtgttcactgtggccctcaggggtgaggctggcactggggcatctggggccagaagtcctcctttagtcccaagtcttttgccactgaagggcataaggaaaaggtcctaatagaaaatttactgggggcccaaagctgccaggctgttgggggtgggaagca

SEQ ID NO: 42384 - DNA, 381 bp, Gossypium hirsutum
  Clone ID: LIB3196-039-P1-M1-D8
atctggactcagagctcaaatctgaactctacctccagacagaatgaagttcatctcggcatctctgcttctcatgctgctggtcagcagcctctctccagtccaaggtgttctagaggtctattacacacacttgaggtgtagatgtgtccaagagagctcagtctttatccccagacgcttcattgatcgaattcaaatctcacctcgtgggaatggttgtccaaggaaagaaatcatagtctggaagaagaacaagtcagttgtgtgtgtggaccctcaagctgaatggatacagagaataatggaaatgttgagaaagaaaagttcttcaactccaccagttccagtgtttaagagaaagattccctgatgctgata

SEQ ID NO: 42385 - DNA, 361 bp, Gossypium hirsutum
  Clone ID: LIB3196-039-P1-M1-E10
atcgcgagcggcgccctgttttttttttttttttatttttattttgaagcttgaccagcaattattccttcaccactcactctctttctctaactttgcccaattattaaatgaaaaagttgaaagcatatatgctcgtttatttgatgtgcatataggtgtttaattattatttttaacatatttaatgcattaattttattgaatttaaaaagaaaaatcactatttttttcaaaaagaaaaaaaggaaaaatattattattaaataccatattattattagactttgggtcttcttaattgattagcattttccaattccaaataagattattttgttttcatttgactctaaactta

SEQ ID NO: 42386 - DNA, 384 bp, Gossypium hirsutum
  Clone ID: LIB3196-039-P1-M1-E6
atggaatggccaggacaagtggagctagccattttcattacatggccatcccaatggacactggatccctggtccaactgtctaaaaggccagttgtgcctgtctgtggatgtggatgtctggccttcacctgaggtagagcggggactataaacacacatcaactttctttctatttgctttcttttccttcttttcaaactcttaaacttaggcctttatgctgtgagtgactagtccaagaagcacacatttagtagtagtcctgcaccagccctgctcttgaataaaaaggaatattactggctgcacccaaatcttctagtacttaagtcgagtaataagcatcaggcattggaagaggttttaaatttgcttttttga

SEQ ID NO: 42387 - DNA, 364 bp, Gossypium hirsutum
  Clone ID: LIB3196-039-P1-M1-F1
atcgagaagacaggtgaacatttccgcctggtctatgacaccaagggccgttttgctgttcaccgcatcacagtggaagaggcaaagtacaagttgtgcaaagtgaggaagatcactatgggaatgaagggaatccctcacctggtgactcatgatgctcgtaccatccgctacccagatcctctcattaaggtgaatgatactgtgcaaattgatttagggactggcaagataatcaactttatcaaatttgagacgggcaatgtgtgtatggtgattggtggagccaacctcggtcgtgttggtgtgatcacaaacagggaaagacatcctggttcttttgatgtggtgcatgtgaaggatg

SEQ ID NO: 42388 - DNA, 391 bp, Gossypium hirsutum
  Clone ID: LIB3196-039-P1-M1-F2
atgtttgccggccggcccggcaaggaggcgggacacgtcggcgctaccaccgccgcccctcctcctgtttcagctgccgctgctgccgccgcttcctgggctaagccagcccgcggtcccggcggcgccaggtgcgttcactctccccggctccagccagcgtccgccgccgccgtagctgccctgggctccgcgccccactgccgagatggcgacgcgctcctgccgggaaaaggctcagaagctgaacgagcagcaccagctcatcctatccaagcttctgagggaggaggacaacaagtactgcgccgactgcgaggccaaagtgcatgcaagatatgggaaatactaaagcaagactactctatgaagccaatcttccagagaactt

SEQ ID NO: 42389 - DNA, 363 bp, Gossypium hirsutum
  Clone ID: LIB3196-039-P1-M1-F4
atcatgtgtaaaagcttcgaagacggtttgaatgaagacattaaattactaataggcatacttgagataaaagagtttgtggtacttgttgagcgaatttgcaaagccgaagaacttggaaaagagaaaacaaaagctgattttaaagccagagattctcgtaaaagatcatcgggtaagacttttcactcaacatcgaagaagttcagagatgattctactcgatctaaggatactacaggcttttctagacgagatcgagaccgacccctatgagttcacgagctacttcgatagctagtgttggcaacgttcgacagaacagagtcaagtgcaagcattatggtaaatggcattcttgag

SEQ ID NO: 42390 - DNA, 385 bp, Gossypium hirsutum
  Clone ID: LIB3196-039-P1-M1-F5
atcttcctgtatcttatcactggcaatttagaaaaacttcgcaagatgatgaagattgctgagatcagaaaggacatgagtggccactatcagaatgccctatacctgggtgatgtgtcagagcgtgtgcggatcctaaagaactgtgggcagaagtccctggcctatctcacagctgctacccatggcttagatgaagaagctgagagcctaaaggaaacatttgacccagagaaggagacaatcccagacattgaccctaatgccaagttgctccagccacctgcacctatcatgccattggataccaattggcctttattgaccgtatccaaaggattttttgaaggcaccattggcagcaaagggaagggaggagcactgg

SEQ ID NO: 42391 - DNA, 357 bp, Gossypium hirsutum
  Clone ID: LIB3196-039-P1-M1-F9
atcagcagccctgagccacaggaaggtacagacacaactgaggccccctttcaaggggatcagaggtccctggagtttctgcttcctccagagccagactactcactgctgctcaccttcatctacaacgggcgtgtggtgggcgaggcccaggtgcaaagcctggattgccgccttgtggctgagccctcaggctctgagagcagcatggagcaggtgctgttccccaagcctggcccactggagcccacgcagcgcctgctgagccagcttgagaggggcatcctggtggccagcaacccccgaggcctcttcgtgcagcgcctttgccccattcccatcttctgggatgcaccc

SEQ ID NO: 42392 - DNA, 342 bp, Gossypium hirsutum
  Clone ID: LIB3196-039-P1-M1-G1
catgaacacaatcctccacccctaaattagattcggcaatcacttaacccctttaacctcaactttcaagttaaaagcaattaaccactcaccatatcctacattactatccattttaatgacattaacacatctactaagagtttcaagcttcttggccgaatttcaacctcaaaatcctaagtctaatctatcggatgagtagaatttgaactaaccatctcaaacatgcatagattttcaagaatcattcaatacatacctcattctagccatcttccaagccaaaatccaataaccaaatctcccttccttctcctcactcacggcaatagccaaaaa

SEQ ID NO: 42393 - DNA, 375 bp, Gossypium hirsutum
  Clone ID: LIB3196-039-P1-M1-G12
atgttctctgcagtgctttctaacagcttctgggtgcagattttcttcggcatccttttgcactcagcttattacaggtaggtagtgcttaagaaaagtcatggaggactaaagcctaagtccttttcacttttcctccatctgaaggtaggtgagttcatcctcttcatagtaatgctgttttaccaagactttttatatagcagatgaacccagaaagaattttctgctattgtgttcactacaacagggtagagacatcagaacagccccagaacccctttcaaatctgatatgggactattaaattttatgctggtaatttggattcattcacaatgcagtttaaggcggaaggctccactgcattctttg

SEQ ID NO: 42394 - DNA, 358 bp, Gossypium hirsutum
  Clone ID: LIB3196-039-P1-M1-G2
atggtgatatcaccctcaagtgtcctgtgatgctggtggtaggagaccaagcacctcatgaagatgcagtggtggaatgtaactcaaaactggaccccacccagacctcgttcctcaagatggctgactctggaggtcagccccagctgactcagccaggcaagctgactgaggccttcaagtacttcctgcaaggcatgggctacatggcctcatcctgcatgactcgcctgtcccggtctcgtacggcctctctaaccagtgcagcatccattgatggcaaccggtcccgctctcgcaccctgtctcagagcagcgagtctggaactctttcttcggggcccccggggcacaccat

SEQ ID NO: 42395 - DNA, 356 bp, Gossypium hirsutum
  Clone ID: LIB3196-039-P1-M1-G3
atgtttgatgcatgcaaaaaattggcagattgtttagtttttaaatgttaagcccaatatataaagaagcgattgctaggtgtgtgttgctgttgcagaacccattcattaatcaatgtgttgaagcgttcattttaaggtgttgcaggcttaagtgtgtacttctttggattttaggcttccgttttctaaacgagaggtgccggtggctagtgggtctgggtttattgtgtcggaagatggactgatcgtgacaaatgcccacgtggtgaccaacaagcaccgggtcaaagttgagctgaagaatggtgccacctatgaagccaaaatcaaagatgtgggtgagaaaacagaca

SEQ ID NO: 42396 - DNA, 390 bp, Gossypium hirsutum
  Clone ID: LIB3196-039-P1-M1-G6
atcgccttccccgccgccaggatgcccaagaggaaggtcagctccgccgaaggggccgccaaggaagagcccaagaggagatcggcgcggttgtcagctaaacctcctgccaaagtggaagcgaagccgaaaaaggcagcagcgaaggataaatcttcagacaaaaaagtgcaaacaaaagggaaaaggggagcaaagggaatacaggccgaagtggctaaccaagaaactaaagaagatttacctgcagaaaacggtgaaacgaaaactgaggagagtccagcctctgatgaagcatgagagaaagaagccaagtctgattaataccatataccatgtcttcccagtggtccctgtctcccttcttgtacaatccagaggaatattttt

SEQ ID NO: 42397 - DNA, 367 bp, Gossypium hirsutum
  Clone ID: LIB3196-039-P1-M1-G7
gctggctgtacctgcaaacacgacaaactcacgagagcaaaagaaaaggacagaaggacaaggacgaatttttttttccttttatttattttctttttcctctgtaaaaatgaggctataagaaagccaagattagactgtaaacgggagaacccatgcagatattgtatcaaatacataaaaaagacatattgaaatgaaaaaaaaacagagattaaagatcgattgatccttttttctcaaaaggtggttcctttttttcgttttctctctcggtatttgctttttagcaagtgatactgtcgtttttttttgttgcatgcatatagatataacgaaaggggggtctttttgtcattactagcgt

SEQ ID NO: 42398 - DNA, 366 bp, Gossypium hirsutum
  Clone ID: LIB3196-039-P1-M1-G9
gtgaaagcaaaattttcggagtggatttgattaaaaattctgaacagaaagtaaaaataattagtgaaagtctgaaggcagcatcagatcgtcagaagtcgtacgcggatttaaaatgaagagatattgagtatcaggtgggagacaaagtgtttcttaaggtatcgccttggaagaagatactcagatttggccgtaagggcaaattgagtccgagattcattgggctgtatgagatctccgaacgagttggcccagttgcatataggttgcttttaccccctgaactcgaaaggatccacaacgtttttcatgtttcgatgcttcgacgttacagatccgatccttcgcacgtaataaacccct

SEQ ID NO: 42399 - DNA, 365 bp, Gossypium hirsutum
  Clone ID: LIB3196-039-P1-M1-H1
atcaccaactcacttctctcggcttccttgtctgtaaattggatgagaacagctctaatgcctttcaggctctaagaagccatagatttggacaagcccagcaagatgggtgtccttccaggcctcttcccctttcctccatctctggcaacagttcttagggtttggcaattgtttggattttttttctttctgcagttgtgtgtatgtgtttgtgtgaagaaaaacagactctgtccaggtagaaatggtgacgagggggaagataattacatttccagggtcaggaacttggcaacagttttcctaaagtgactcagacacaccacagtaacaactcttgctgcaattttattttcatttga

SEQ ID NO: 42400 - DNA, 318 bp, Gossypium hirsutum
  Clone ID: LIB3196-039-P1-M1-H12
atgcttcatgcacattaacttttagctcatttcatggagatgggacactcctggctgcttgtctagcaacctggctgcctgtctagcatgtctggctttggaacaaggattcccatttcagaatgatgagagtaaaagcccttttactgtgtatagcacattataaattattttcacatctgtgaacttatgttagcttcacaacaactttgttggttttatgattcccattttataaatgaggaatgtgggctggagaacatgaagtgcccaaatgaggaacgtgcaagtgttagatcaaggaaaatagactgcacc

SEQ ID NO: 42401 - DNA, 361 bp, Gossypium hirsutum
  Clone ID: LIB3196-039-P1-M1-H2
tcaaaaagttgggtggtggattattttaataaatgtgaacattaaatgagttaaattttccattatagatcaagatagacgagaagactacctcaaacggggaaaagagaagatagtggagtaaattgcaaaattgcaatattttgcatcgaggtaagtaaacatgtgaaataatgcattattttgatattatttgatatgtgttgagatttatttgaacatagaataaatatgtggcaaagattcaaaaaaaatgtggctaagtggggaaaggtggtaaagtgttgaaaaacacggtttctggttgaacactcggaataggccggattacattgaatagaaagggggttgctaagtgctg

SEQ ID NO: 42402 - DNA, 370 bp, Gossypium hirsutum
  Clone ID: LIB3196-039-P1-M1-H6
taataagaagacacggatcaaaacgatgtaatgaaacatgttgggtgaatggaagaataaaataagaagcatgggcaataaactaataagaaattgaaggaagaaaacaaagagaaaaaatgtaacaccccgaacccgagaccgacaccggagccggacacgagatgttaacaaactttgaaaaatttttccagacactgcccagtctgagtactagtcgcttcaaaaatcatatcttgagtttcacaactcgaaaatcagttttgtgatttttccctgaaactagactcatgtccccacctatgtatttttttctagaatttttggtcgggccaattagtacagtttattagtcaaagtctcccatgtt

SEQ ID NO: 42403 - DNA, 380 bp, Gossypium hirsutum
  unsure (1)..(380): unsure at all n locations
  Clone ID: LIB3196-039-P1-M1-H7
atccagaatacacaggttccaatacatatgaagaggcagctgcctatattcaatgccagtttgaagatctgaacagaagaaaagataccaaggagatctacactcacttcacctgtgccacagacacgaanaatgtgcagtttgtttttgatgctgttacagatgtcatcattaaaaacaacttaaaggaatgtggactttattgaaaagcatggatgttagtgaaagttactacagtgtggagtgttgagaccagacaccttttgctgtcttacggggcagctacaaacatgaacgggaccagggaatggcagcagcatgcagaatcttagcactctttagcacaatcttctatattagggaacttttaattgacatga

SEQ ID NO: 42404 - DNA, 313 bp, Gossypium hirsutum
  unsure (1)..(313): unsure at all n locations
  Clone ID: LIB3196-039-P1-M1-H8
gcgaggtcacgtggaatcgatctgnttaagatcgatatgggacgtcctttggctgatcaaggaccgtttgattgcgtgcttcacaagttgtacggtgaggattggaggagtcaacttgaggatttccgttctcaaaaccctaatgctgtaatcattgattctcctgctgcaatcgaacggctccacaataggatttcgatgctccacgtggtgtccgaactcaagatcgaaaatcaaagcgaaacctttgagatccctaaacagatcgtgatttacgatcgggaaaccttgcttgataaccaatcttgggaat

SEQ ID NO: 42405 - DNA, 407 bp, Gossypium hirsutum
  Clone ID: LIB3196-040-P1-M1-A10
atgtcgggggcctgggctggtgcttcatggtcttcgtggacatgtgagggccgtgggcgtgagcttgatgtatcgtcccagcctgtggctgtgttctttacatcggtgggactgcccatgccgcaggcagtcgctgctgcctggcgcccacggagagaaaagaaagggctgagacttccgtgatgggggtgcggatgccgcccctaggctggcttcctgcgtccaccctccccatgtgcactctcaggggcggcgcccacctgcgggtggctcctgttcacacgacttcaggtcatactgcggagtgggccgtctgttctgcctctctgtgggcttctctccaggaccccagctgccaaggactttagacgtcacccttggaggcctctggacacagagggctgtgt

SEQ ID NO: 42406 - DNA, 162 bp, Gossypium hirsutum
  Clone ID: LIB3196-040-P1-M1-A11
cgtaagactttcaaacactgctgatccatagagaacctcatgtgccaagtcctaggctcaatagaaaggagtgaacccatgatcatcatcacgtctcttgctaaagggaaacccgcatatcagtctggtgcagccgcatgttctacggactgtacggagggt

SEQ ID NO: 42407 - DNA, 320 bp, Gossypium hirsutum
  Clone ID: LIB3196-040-P1-M1-A3
tacaactcatagtaacgtgcaaaaacgcagagctggtgccggtcccgaatccccgttatcgctgttgtgacagccagtccgggcactgacctcatctggaagaaccagagctgatcttgcactgtcgatgagcccaggcaatactgactaaaactcagctagaggagggggcacgcagaacccttggtgggaagaagcttattctcacatagtgtctagttgtgggaccaacaaaggcagcagctggttcttggggcatcttcattcttttggggcctcagttttatttatcaaaatactggacattatactggtcacat

SEQ ID NO: 42408 - DNA, 298 bp, Gossypium hirsutum
  Clone ID: LIB3196-040-P1-M1-A5
gaaaaagataacattttctctttattttatttattagtcaaatacaccacctaatggcaacaacctttgattttttttttgactttctttgtctcaatggccgactatgcctaaaaaaattggcctatttgcacattaaatacccctaatttataatccatggccatttaacactattttctagcaaatcataactttttcccctatgatatttagtcctttttcgaaattaagctctcaaacgttaaaattacttcaccaaatttttcatgcactattataattaggctataacacc

SEQ ID NO: 42409 - DNA, 409 bp, Gossypium hirsutum
  Clone ID: LIB3196-040-P1-M1-A6
atccgccatctgctctgcagtcaagaagcagcaaccatgcgtgagtgcatctccatccatgttggccaggctggtgtccagattggcaatgcctgctgggagctctactgcctggaacacggcatccagcccgatggtcagatgccaagtgacaagaccattgggggaggagatgattccttcaacaccttcttcagtgagacgggcgctggcaagcatgtgccccgggccgtgtttgtagacttggaacccacggtcattgatgaagttcgcactggcacctaccgccagctcttccaccctgagcagctcatcacaagcaaggaagatgctgccaataactatgcccgagggcactacaccattggcaaggagatcattgaccttgtgttggaccgaattcgtaagc

SEQ ID NO: 42410 - DNA, 402 bp, Gossypium hirsutum
  Clone ID: LIB3196-040-P1-M1-A9
atgaatcattcacctgtgacctctgtgggcctgcggggggacagcaggggcacatgacatctgcctgggccctgaccaataaatcctcagaccctgctgtggatggggagcaggggtacctttgggaggtgaggactttatttaaacagcggttctagtgtgggaccaagagaggcagcagctgggtcttggggcagcttcattcctgttgggcctcagtttctcttccccacattgagggacttgtgccgggtgacatgcagggtctccctctgccctaacaggatatgcatgatgacaggcagtgtgatgtgttctgaaagggtccagggcaaagcacagggagagggtggatttgtgtagggtgcagctctggagaagctggatcattcccggtcccac

SEQ ID NO: 42411 - DNA, 409 bp, Gossypium hirsutum
  Clone ID: LIB3196-040-P1-M1-B1
atgtggccacgagcgagggcaggcccctggggacacatctgcccacagctgcacaggccagggtgcaggcccatctgttggttctcaggcctcagatgaaaccatctccgcatcatatggccagtgaccactttctcccttcaggaaaattctgtggctgtgcagcattttgaagttttaattattaacctgctttcattaaagcagtttcctttcttgctaaatggaattaccaaatctgatcacacatagcaaggtcctgtagttacccatcctgctgccataatgggggagattgtaaggaagcagtgacaggtggtgaagcaagtgtcaaatttcagagctcttggccgacggatacaaagataaagaaaacattgcctttttctacaactgtcagaaatagtca

SEQ ID NO: 42412 - DNA, 342 bp, Gossypium hirsutum
  Clone ID: LIB3196-040-P1-M1-B11
taacacgtttgtgcacaaaagcacgctggttcccggccggaatttccgggatcccaccacctcttttcttaagctttggggtgccttcttcttctcctggtattcactaacaacatttcatgcccccaccttctcgattaccttctcattttgctgtaccttcccctgggggcattccaacttgcctttaacttaattcaaccttttttcccccaccaaacgcttcaatggggccttcaccagatacttacattaaagcctctgtcccctattaccaccattggagccgagaatttggcccttcaccctctacagttagtgaagcccaatttgaagatatta

SEQ ID NO: 42413 - DNA, 376 bp, Gossypium hirsutum
  Clone ID: LIB3196-040-P1-M1-B2
tccacgcgtccgaacgatgtgagtaagtgtttgactgaatacttatagcaacctctaaacataaagcaatgttcatacgaaaagaaaaaaagcagtgtaaggtaccgtgctataagcctgtaaacatatatcgcttaaggcaaggtaacttgagatcttgttcttgaaggaagcaaaccattttagaactcttctgagcaacagattgagtatggttttgccgaggcattactgtcagtaagggtggattctttgtaatcccgaccttctaaatcaacatcgtagaccctatatcctttgtcgtaggtttttcgacataacatatttagttgtttacttgtttgttacatattattcacgtattattctcaaattt

SEQ ID NO: 42414 - DNA, 397 bp, Gossypium hirsutum
  Clone ID: LIB3196-040-P1-M1-B8
atccacacctctgtctccatcactgcctcacggtcctgcagggccagcaagatgcagtttgagatgcacgacaacgtgaaaggcaaagctatgtcctaccccgtgaccagtcagccccagtgcgccaccaccagctgctaccagacccagctcagtgactggcacacaggtctcacggactgctgcaacgacatgcctgtctgtctgtgcggcacttttgctcctctgtgcctcgcctgccgcatctccgacgacttcggcgagtgctgctgcgcgccctacctgcccggaggcctgcactccatccgcaccggcatgcgggagcgctaccacattcagggctccgtcgggcacgactgggcggccctcaccttttgtctgccctgcgcgctctgtc

SEQ ID NO: 42415 - DNA, 382 bp, Gossypium hirsutum
  Clone ID: LIB3196-040-P1-M1-B9
aagggctcaactgaatacgttcctgatccaatcgagctaatagttggtccatttactagctctagccaagcagttcaaagaggcaattttggtcttagttgaacgagtttgggaggaagcttcaactggacttgtcaatcatgtttgggatggctcatcaagtgctccttgtaatttacttcaagccgaattcaacttaactagctaactcagctgttgaataagacttagacatttttagttatttcaattatattatttatgttttgatttcatacaacattattacatgtttgattattttagttaagactactaaatgtgtcctagtttgtacaactttattacatatctgattgtttagttgttctatgtttattac

SEQ ID NO: 42416 - DNA, 404 bp, Gossypium hirsutum
  unsure (1)..(404): unsure at all n locations
  Clone ID: LIB3196-040-P1-M1-C12
atggaaatgtcaagcagattatgaattacatgaccaaatattttgtattggagaagctttgcgcaccagttaaatctcattccttcccttttttttttcaaatggcaccagctttttcagctctcttatttcttccttgagttgcatttattcctaaggtaggcagggtatttcctagtaagcatactttcttaagacagaggccacttggttcctgggagaataggcagccccacgctttgaagaccacagaccccaatatctagtcgtggatatacttaaaacactgaagagcataaccttttgggtcaaccgttggtcaaactatagggaccatcacacgggtagggattttccatccagagccaataaaagggctggtgggggccggnggtggctattgt

SEQ ID NO: 42417 - DNA, 318 bp, Gossypium hirsutum
  Clone ID: LIB3196-040-P1-M1-C3
gaacgctgacgcaggagcaggctgggccccggtctccatgatgcgacacacgcttatgaacaccctgactatccgacggggtgacgtgctaactgaggtttaggcattctaaccccccctcagcgaaaaggctgcgtggatgacacaatgatgactggccgaacaagactacagttgacagcccgaatttctaagggggaaagttcaacatgtgagagcatccgtgtacacccaggctcatgcgctgcagtcattccgccacgactgttacctactgttggaacagacttaggaggggcaggaattcaaggctgggct

SEQ ID NO: 42418 - DNA, 409 bp, Gossypium hirsutum
  Clone ID: LIB3196-040-P1-M1-C9
atcccagccctgcagaccctggaattctgtctctgctcagtgcccccttgggctccggtggctttactctcctgcatgcagcagctgcagctggcagaggctcagtggttcgtctgctgctggaagcaggtgccgaccccactgtgcagtgagtaaaggtccccatcctgagtcattttgggtatagagaggataatttggaggttaaagttggcactgactacttgacaatattctcttggtctggttgggtgatgttaggaaaggcaggaggcaagttaaacccatttttggagtttttgcgcctagggactctcgggcccagccaccttacactgttgcggctgacaaatcaacacgtaatgagttccgaaggttcatggagaagaatccagatgcctatgattac

SEQ ID NO: 42419 - DNA, 376 bp, Gossypium hirsutum
  Clone ID: LIB3196-040-P1-M1-D1
cccaacttaccagagaaatctatactaacccagttcttgagaacttcgacggtagcttccgtggttctgcccaaggtatcgaaggctccatcaggagcccacacttgatggacatcttgaacagcataactatctacaccgatgctcacagaggagagtattactggtctggacaccagatcatggcctctccagttggattcagcgggcccgagtttacctttcctctctatggaactatgggaaacgccgctccacaacaacgtatcgttgctcaactaggtcagggtgtctacagaaccttgtcttccaccttgtacagaagacccttcaatatcggtatcaacaaccagcaactttccgttcttgacggaac

SEQ ID NO: 42420 - DNA, 306 bp, Gossypium hirsutum
  Clone ID: LIB3196-040-P1-M1-D4
atttgatcttttcccatggaagtctcaaagatctttcattggttgtttctctgagccttgctactaaaatgagcctcgtggggagcatcaaagaaagccaggtgtgtttccctagactctataactatctctctctctctctctttctctctctctctctctctctctggctctctctgactatctctgtgtctctctctatatttctctatctctctgtgtatatatgtgtccctgactctggctctctacatgctctctgcttcggtatggaactttacttagacattttgtagcctttatttt

SEQ ID NO: 42421 - DNA, 415 bp, Gossypium hirsutum
  Clone ID: LIB3196-040-P1-M1-D6
attgaaaattttaatttttgttgatttagctatcccacattataaatcatccttaaccattttatatcagttaaatacaggggtggggtgggggaggaatgactggcatgtagacatgtattgatttgggaatatctgagcatttctttcattgttggtaagatatcatgatgaaattaaaacagcagtatggagcattatatatcagtaatgtgatactttatatacttaagccagtttaaccattttgggaaatgttagcataaggaaataaaatccaaaagaaggaagataagctatatgcaatgcaaaatttgcttattgcaatatttttatatacaaataaagacactaaaaacagttttcacagtccatcattacataactaaagtaagtaaaatgatatgtatcaact

SEQ ID NO: 42422 - DNA, 393 bp, Gossypium hirsutum
  Clone ID: LIB3196-040-P1-M1-E10
cccgaacatcgttaccccattaccaaaatctgaatgatttcgaatggtgcttcagcggcggtgacgaatgtaggtttgctaccgctcacaatactcctcgttttggcaatgcaggtcggtccaatgctcctacgacaccgactcagagtgtgtgcggggacggatattttaggccatattccaacttccccaactatatgaccaacacacaatcgtttaaggcgaaattacgatcttacagtgccccaaagcaaagaccagaatcaggaggtgcaaagaagaggctttcgctcaatgaaataatggctgctagaaacagcataagtggagttagaatgaacaaatcatattaccaaattcatcatcaattttgaataggaaacaaaaaaagat

SEQ ID NO: 42423 - DNA, 389 bp, Gossypium hirsutum
  Clone ID: LIB3196-040-P1-M1-E11
cggacgcgtggggtattggctatctgtgaaccccttaccccaatccgatatgcactgtgaggtcgagagataagtagttctagcagactcattagtttattggaagatctagatatcctgtttatgtaatgactagtagattgagtagaaacctagaataggaattaattataaccactaaagtgagctaatcacccattcttagatttggttgagttatatataagtttttcattttcactcttttatgcatgttttactctttccttattaaataaatatttttcactttaggccttatcatactataatttatttatgatactaattagatctatttacgtttaagttaatattagtacttgccttccttgggttcgacctttgga

SEQ ID NO: 42424 - DNA, 368 bp, Gossypium hirsutum
  Clone ID: LIB3196-040-P1-M1-E2
ctgcatttaatttcttaggtagagcttatttcggttcaaacccggttgatactaaactcggaaccgacggtccgagtttgatcgctaaatgggtattatttcaacttgctccggttctttcccttggtttacccaaatatatagaagaccttttaattcatacgtttccgttaccatcttttcttgtgaaaaaagactacaaaagattatacgattttttctacgaatcggccggttcggttcttgatgaagctgaaaaatgggcatttcacgtgaagaagcttgtcataatctttattcgctacgtgctttaataccttcggcggcatgaaaatcttcttccccaacatattgaaatggatcggtaa

SEQ ID NO: 42425 - DNA, 176 bp, Gossypium hirsutum
  Clone ID: LIB3196-040-P1-M1-E3
cagaaatagagaaattaagaggagtcattcttagtacatacagcactttttgctaaacaactaaccgacggcccctgttatagcgctagatgttttattattaaaactggctccgcctctttttattggtttacccaaatttatataagaccttttaattcatacattgttccata

SEQ ID NO: 42426 - DNA, 397 bp, Gossypium hirsutum
  Clone ID: LIB3196-040-P1-M1-E4
gtaaggggtgttgtaacaccccaaacccggcccagacattatggtcgaatctgacgtgccacattggagttgaaaatccacgttctgttttagtgttttaaaaaccatatattttgttgagttaacaaagtgtatggaagcttggcaccaggtaggtatccgagatagaggaggtgagccatgaaggctgcttaagtaccaagctctttgattggatcgaatcctagacatgcccacaaccatacccacactttgttatatcgagtttaaatttttttaagtgaatgactttgataaatcaattaatcgtggtgttgaactcttttgaaaacaagtatcgttttgaaaacacgtcctaagtctagcccatttgaataattatcaaccaggtttgaag

SEQ ID NO: 42427 - DNA, 289 bp, Gossypium hirsutum
  Clone ID: LIB3196-040-P1-M1-E5
atttttattatatatgtacatataaatatttatatagtgttatttttaattactttattttaatattattatattatatttcctttttgtatttcattattattattgctagtattattatcattatcatcattattatcatatacaaattcctattacaaatgatattttttctatgtttttaatttcaacaaataaggtaacgtaccgatttcaacactaagttgctgatttcatcgctatgttgggtggatatcattgactcatgttaaaaactagacgtccttct

SEQ ID NO: 42428 - DNA, 367 bp, Gossypium hirsutum
  Clone ID: LIB3196-040-P1-M1-E6
aacaaatgcaaatgtaaacaatgtcaaactgtgtttagctctggcttctgctcctgagatggattccaagttattttcgcagctaaaagtggttcgaaaaattggtaatcttttggagcttgtatatgcaaaggttatggaagactttcttgagccaactcttggcttgtttaaggcttttcttctccgctctagtggaaatggtttcgtttacacaaaagaacccacactgttacttgatggttcattcgagtcaagtggctcattcaagcagcagcaatgcattagagatataatggactttggcagcaatgttggagtgctattggaggtaagtgcatctcatgaaccgaacattgctgatgta

SEQ ID NO: 42429 - DNA, 377 bp, Gossypium hirsutum
  Clone ID: LIB3196-040-P1-M1-E7
cttttctcccccatttgtctctttttggctagggcttcatatccatcatggccgccgccgttaaggccaccatggacggtggttgaaggcatgtgaaaaggagggtttttcacctccgtttaaagagtttgaaaaccaagcctcctcaaaacccccctcaaaaaaatgatatatgaaagaaaggcccctttttctctcttgaaatcgacatcagcaacggagaggagaattccgatggccgaccacagggcgttcgaggaaggttctcctcttttttctttttattgatttttctatttaaaatagatttgtaatgaaaataaaaagataaaaaaatttaaattgaacataaagaaaccgaacaagtagagactaaa

SEQ ID NO: 42430 - DNA, 376 bp, Gossypium hirsutum
  Clone ID: LIB3196-040-P1-M1-E8
atggactacgtggacattgtgcaggggcggcgcattggtgtctggaatgtgccctatatttcaaacatctacttgatcaaaggcagtgccctacggggtgagctgcagtccccagatctcttccaccacagcaagctggaccctgacatggccttctgtgccaatgtccggcagcaggatgtgttcatgttcctgaccaaccggcacacccttggccacctgctctccctggacagctaccgcaccgcccacctgcacaatgacctctgggaggtgttcagtaaccccgaggactggaaggagaagtacatccaccagaactacaccaaggccctggcggtgaagctggtggagacgcccttgccggatgtctact

SEQ ID NO: 42431 - DNA, 404 bp, Gossypium hirsutum
  Clone ID: LIB3196-040-P1-M1-E9
atgctgggtgtcgtgcatccgtagtcccagcttgctgggaggctgaggcgggttgttcgcgtccaactggtcaacaaagcaagaccccgtctcaaaaaaaatacttttttaaaaaatgaggccaggcgcctcattttaattgttcggtaaaattaaaagtggtttgggcacttgaggaaggggtacagatgcgtgcgtgcctggggacgcttgcacacaacttgagaaaagcagatgcagaattgagttctcatgtcctgctctgacacagggtagcccctgatacaggtcacccatcgtccacttgatgacttggtgagtgacccatacaggtgcatctgaggctctttagatgtgagcttgtttgacatacacaagctcctgaatgaccatcacctagactg

SEQ ID NO: 42432 - DNA, 383 bp, Gossypium hirsutum
  Clone ID: LIB3196-040-P1-M1-F1
cggacgcgtgggcgaaattatttttcttttttgtcatcattgtgagtttgttgaaagcattaaaaatggatgagaacaaatttgttgttagtttgatgatcatttttctgggtttttcttatctcctcaattcttctgctgctgttcctgtaacaagatgctccatgccaaataataagaaactcctcccttcttctccttctgctcaagatgttgttgttcaggtattttgaatgccctaattgatattcttacagggtttttatccttttgcattcttttacatccttcacatgaactcacaagtaatggttaggattttggttaatttgttgtgttttttgggggcaggatgtaatgaaattgagtggaagtgaggaagt

SEQ ID NO: 42433 - DNA, 409 bp, Gossypium hirsutum
  Clone ID: LIB3196-040-P1-M1-F2
atcactgagccacctcctcctgttcgccaggagccatctcccaagcccaacaacaagacccctgcaattctgcatacctacagaggcctgcgtaatagacgagctgccgtctatgtgggcagcttctcctgggttggattgatctctgaaagagaactatcctgaggacgtactggtgccgaagaaagcaatgattaatggaccacagaccagcagctgatccaggttattcgctctataggagtctatgatgtggtggagttgaaatttgcagagaatcgagcaaatggccagtccaaagggtatgctgaggtggtggtagcctctgaaaactctgtccacaaattgttggaactcctaccaggaaaagttcttaatggagaaaaagtggacgtgaagccggccaccc

SEQ ID NO: 42434 - DNA, 381 bp, Gossypium hirsutum
  Clone ID: LIB3196-040-P1-M1-F3
ggttcatctatctcatacactatatcattaaccacaattattcaatacataccttcactgtctcgtatttaactattacattaccacatccatgctcgatgcactaattcgttagatcgtttttcacgtgcaagaacatcgcacacttagtgccaacaatctagtcgaagctataagatatcgcacacttagtgctatcacattatacctaaccatctcaatattgcacacttagtgtcgcatatagctgaagctattccaattcgcacacttagtgctatttctagttgaagctgttgaaatcgcacacttagtgctgaacagaatcgatttatcatcgcgttcaaaccaagcttgaatatacaatttatataattcatc

SEQ ID NO: 42435 - DNA, 397 bp, Gossypium hirsutum
  Clone ID: LIB3196-040-P1-M1-F6
gctatatttgttgtatacagatttcttgtgtatcaagcaaccctttttttgcttttatcaaacaaaatatttttgcatgaaatcttcctataatggcttaaatttccttaacatattatttaaaatattcaatattaatattttaataataaatatttattacaattataaatatattaataaaaaatgttttgtagtataaaggctaaagtatgtcataagtctatgtacacttcacaaatttacaatttactctttgtacttttatttttaagaatttagtccctttacttttcaaatttaaaaatcaagatcaattgttgacatcgttaaatttttttgtcaaatttgttgatgtcacattttaaaataaaaaatactcactttgtagtcatgt

SEQ ID NO: 42436 - DNA, 389 bp, Gossypium hirsutum
  Clone ID: LIB3196-040-P1-M1-F7
atgcccagaagcccaggaagccggtcagtgcccgccccagtttgaggcctggctatccccgtgggaacatcaccatgtcagagacaccccgggctgagacctttgtcttcctggacctggaagctactgggctccccagcatggatcctgagattgctgaactgtccctctttgctgtccaccgctcctccctggagaacctggagcgcgacgaatctggtgccccagtactgccccgggtcctggacaagctcacgctgtgcatgtgcccagagcgccccttcaccgccaaggccagcgagatcactggcctgagcagcgagggcctggcgcggtgccggaaggctggctttgatggtgccgtggtgcggatgctacaggcgttcctg

SEQ ID NO: 42437 - DNA, 367 bp, Gossypium hirsutum
  Clone ID: LIB3196-040-P1-M1-G11
atcggcaggaagtgccggaggcgtggtggaggctgccatctcatacaccggcgacgtgtccgaccccagccgcaccaagtactcactgcagtactacatgggcttggccgaagagctggtgcgagctggcacccacatcctgtgcatcaaggatatggctgggctgctgaagcccacggcctgcaccatgctggtcagctccctccgggaccgcttccccgacctcccactgcacatccacacccacgacacgtcaggggcaggcgtggcagccatgctggcttgtgcccaggctggagctgatgtggtagatgtggcagccgattccatgtctgggatgacgtcacagcccagcatgggggccctg

SEQ ID NO: 42438 - DNA, 242 bp, Gossypium hirsutum
  Clone ID: LIB3196-040-P1-M1-G3
atagaaatttaggtatttacctaaggccattaaggcgtggaataacccgtccccacgtgtagaatgtgtcctggcagagctcaagggcgttacatgcgagaacagggaggctgtgctggatgcttttctggatgatggcttccttgtccccacatttgaacagttggcagctttgcagatagagtatgaaggtgtcccttacaaaccagaaaacgtggacttgaatgacgtcctggtgccaa

SEQ ID NO: 42439 - DNA, 401 bp, Gossypium hirsutum
  Clone ID: LIB3196-040-P1-M1-G5
gttggtatgattggcctgaacctttgaaaaatcgccatcttgcggccttagaaaaaatatacgaggaaaagaaggatttcatagacttgttcattgctaaacaattcctgttccaaaggcagtggaagaaaattcgcaactatgcacagacaaagggagtcagcataatgggagacatgcctatttatgttggttatcacagtgctgatgtttgggcaaataagaaacattttttgctgaataggcatggttatcctatgctagtcagtggtgttcctcctgatgccttcagtgatactggtcagctctgggggagtcctctatatgattggaaagccatggagaaagatggatttttatggtggataagtcgcattagacgtgcacagaatctatatgat

SEQ ID NO: 42440 - DNA, 389 bp, Gossypium hirsutum
  unsure (1)..(389): unsure at all n locations
  Clone ID: LIB3196-040-P1-M1-G6
gtatgttccgcttctgaactactttctggctttctgtatctaattcagtacttagatggtttgctctcacactgagctcgattagctccccctcatctgtttcctctttcaggtatagttctggattctattgatggacttggtacacggaggtcttagacagtctcagtggaaatggattatcagtttgtgatttccaattcttatatttggtttttgtactgtaagactttataaaactatggtacaaattctgatttaagttttactcattctaattntgaatttatatactaaacttaactaaaattgtactgttcaagttttatgtgattaaacgttttgatacgaagtaataatttatttgtggaaaaatttacctactatca

SEQ ID NO: 42441 - DNA, 375 bp, Gossypium hirsutum
  Clone ID: LIB3196-040-P1-M1-G7
atctctggaaaagctcttcttgcaaaaaataaatgaactacccacagaagaaaccgagatcatgatagtccaggcaaaaggaagaggacgtgggaggaaagaagcagggacagcaaaacctggcgtttccacggtaccaaacacaactcaagcatcaactcctccgcagacccagacccctcagccgaatcctcctcctgtgcaggccacgcctcaccccttccctgccgtcaccccagacctcatcgtccagacccctgtcatgacagtggtgcctccccagccactgcagacacccccgccggtgcccccccagccacaacccccacccgcttcagcttcccaggctgtacagagccacccacctatcatcgc

SEQ ID NO: 42442 - DNA, 389 bp, Gossypium hirsutum
  Clone ID: LIB3196-040-P1-M1-H1
gcggcaactacttccatggttacttcattaaccttcacaattccttcgctagggcttcgcctacccactcgtagctacccatgtctaaaaccccagagacgttttgtgaggaaggctgcttcaaatgttataacggcaacatatgagttgaaggcacctccatatcccttgaatgcattggaaccccatatgagccgagaaaccctggagtatcattggggaaaacatcacagaacctatgtggagaacctaaacaagcaagttgtaggaacagatctagaagggttgtctttggaagacattatcattgttacatacaacaggggtgatatactccctgcattcaacaatgctgcacaagcctggaaccatgattttttctgggaatc

SEQ ID NO: 42443 - DNA, 405 bp, Gossypium hirsutum
  Clone ID: LIB3196-040-P1-M1-H2
atcggcgagtcacgatgatggcggccaccatcctgtggtgagctagcggattccctgcttgtctcgccgagccccttgcgcctcctgcagactcagtggctggcgctcggcgcgtgaggaagcacggcggcccgagctcgcggggaaggccgcagtcgcggaggcagcggcgcggtccggggcacgggctgggggagaggccgctccgctgggcgaatgtgacaagcccccacccccaccgcctttctccccagagcgcgaggagcgcgggcgaccccggggccccgccaggccacagaccccgcccagcggccagcacccggcgcatgcccggcagcagagctgcgcggcggcaccatgcaggtcaccctgaagacccttcagcagcagaccttcaaatagaca

SEQ ID NO: 42444 - DNA, 357 bp, Gossypium hirsutum
  Clone ID: LIB3196-040-P1-M1-H6
ggtcttctctgcttttggtcctgttcaaaagattgccatgtttgataagaatggtggactacaggcactaattcagtacccagatgttcagacagctgttttggctaagggcaccttggaagggcactgcatatatgatggaggattttgcaagctccatctctcatattcacgccacactgatcttagtataaaggtcaacaatgatcggagcagagattacacaatccctaacccggccatggttaaccctcagccttcaacattgaggcaacagccagttcaagcaatgggtggtccagctgctcatcaatacaatggggctgcatatgctttaggttacaacaacctaccatg

SEQ ID NO: 42445 - DNA, 393 bp, Gossypium hirsutum
  unsure (1)..(393): unsure at all n locations
  Clone ID: LIB3196-040-P1-M1-H8
atagggagttgggtgaggacgttacagatatccataggaggtcattttcaggggtaattcaaaagcattctgcaataaagacttcatcttcatcatcaacatcttcatctggttcttcttcttcttcaacatctttttctttaagttcaagtggattctgcgatttacagttgctgaaaaggagcaacagtgccaattcagagattgagaattcaattgaaggggcaattgctcattgtaagcagtctcagaaacttggggtctgttcactttctgcttcaaagatttctgtttgtggggaccaagaaagaccagaactttgcagcatttgaatgtcaaaaaatactttacaaagactggaaatccaccataacangaagaaaaaaataaacc

SEQ ID NO: 42446 - DNA, 378 bp, Gossypium hirsutum
  unsure (1)..(378): unsure at all n locations
  Clone ID: LIB3196-040-P1-M1-H9
atgcgtctcttgggtttgctgagaactcacgggctccagctacctgacgatgaccaccacatttctgcaaacttcttcctccacttttgggggtggctctacccgagggggttcccttctggctgggggaggtggctttggtgggggtagtctctatgggggaggtggaagccgaaatatctcagcttcttctgctaggtttgtgtcttcagggtcaggagggggctacgggggtggcatgagggtctgtggctttggtggaggggctggcagtgcttttggtggaggctttggagggggcattggtgggggttttggtggtggctttggtggtggcgatggtggtctnctctctggcaatgngaaaattaccatgca

SEQ ID NO: 42447 - DNA, 391 bp, Gossypium hirsutum
  Clone ID: LIB3196-041-P1-M1-A10
atcttacctctaacctactgctcattggcatggaaggaaatgtgacacctgctcattatgatgagcagcagaacttttttgctcaaataaaaggttacaaacgatgcatcttatttcctccggatcagtttgagtgcctctacccataccctgttcatcacccatgtgacagacagagccaggtggactttgacaatcccgactacgagaggttccctaatttccaaaatgtggttggttacgaaacagtggttggccctggtgatgttctttacatcccaatgtactggtggcatcacatagagtcattactaaatggggggattaccatcactgtgaacttctggtataagggggctcccacccctaagagaattgaatatcctctcaa

SEQ ID NO: 42448 - DNA, 377 bp, Gossypium hirsutum
  Clone ID: LIB3196-041-P1-M1-A12
agccattggaatggttaatcatgatcattttggtgctatgtatgacaacctctagttgattcatggaaaaccatgaaataggtaaagtttaccttaaaaatagatgctgacagcagcagtggtgtggatttgaaaaatcactaaaaatagtaggaatggaattaaatagtgaataaattatgtaatcgaaccttgatgaatctattttcatatggaagaaacaaaacgatcatatgagtcgtatgttaagagatatttaagtttttgtgaaacagggccagaacagtttctggattccctgttccgacttcggaaattcattatagattaaccagagataattagaagtcattccatatatttatagatttattttc

SEQ ID NO: 42449 - DNA, 397 bp, Gossypium hirsutum
  Clone ID: LIB3196-041-P1-M1-A3
cggacgcgtgggttggaaataatttggaggcacaggaaactttgtcatccaaaaatgttatggatgcccgtgatacaagatgcaatgcggagattggtagtcaagttatttgtaggccggatttagataaaagtagtggtgagtccattgataaaaattcttgtttagattttagcttcaactctgaaggtctgcgtcaagttcctcttgacttgggttctgctggaaagccttctatcttattatttccaaatgaaaacttttctgctaaaaattctgcatcacattctgatgcctctcaatgtgataaaatttgcaaccaagataggttgtcagcgacacttgcttatcatgggaatgaagacaaacaggctaacaatgcttgtagtggacatga

SEQ ID NO: 42450 - DNA, 389 bp, Gossypium hirsutum
  Clone ID: LIB3196-041-P1-M1-A4
atcagctctggccacggcgcttgacgtgggcttgtccaactggagcttcctctatgtcaccgtctctctgtacacaatgaccaaatcctcagctgtcctcttcatcttgatcttctctctgatcttcaagctggaggagctgcgcgcggcactggtcctggtggtcctcctcatcgccgggggtctcttcatgttcacctacaagtccacacagttcaacgtggagggctttgccttggtgctgggggcctcattcatcggtggcattcgctggaccctcacccagatgctcctgcagaaggctgaacttggcctccagaatcccattgaacaccatgtttcacctgcagccactcatgttcctggggctcttccctctctttgctgta

SEQ ID NO: 42451 - DNA, 377 bp, Gossypium hirsutum
  Clone ID: LIB3196-041-P1-M1-A6
cggacgcgtgggcttgaagcgaaatgagttcctggaactcaaacaagggaacaagactgtagcagaatacgaacgagagttcgtgaggctaaatcagtacacaactgaatgggtccataccgagccagaaatgtgtaaacattttgaggaaggtctaaatgaggaaattaagttgttgattgggatcctcgaaatacaggaatttgtcgcattggctgatcgggccaagaaggccgaggagcttaacaatgaaagaaagaaagcaagagagaggcccgagtcttgagcaagaggtctagttgtaaaacactctcgtttcccacaaaaaatcaaggagccagcatgaacgctccatttcatcagtaggatatttgggt

SEQ ID NO: 42452 - DNA, 344 bp, Gossypium hirsutum
  Clone ID: LIB3196-041-P1-M1-A8
atagctccggcaccaacagcagcgccgctgacaccttccaccttctggcgacaccaccacagccaccttcttctccttcgctgtgctctcccgtactcgcctctgtcgactatcatgcgagccttgaaccacgatggctgagccccgccaggagttcgacgtgatggaagatcacgctgtgacgtacaggttgggggacaggaaacatcaagagggctacaccatgctccaagaccaagagggggacacggacgctggcctgaaagaatatcccctgcagacccacgctgaggattgatctgaggaaccgggctctaaaacacttgatgctaagagcactccaa

SEQ ID NO: 42453 - DNA, 266 bp, Gossypium hirsutum
  Clone ID: LIB3196-041-P1-M1-A9
ttctagatcgcgagcagagcccctttgttttttttattttttttttcttttattttatttttttttttttttctttatttttttttttttttttttttttttttttttttagccggatttagagaaactaaaagtaaagccatttataataagcaagcttaaaatttaactttaactgtttaaggcagaaaaaaatccttttgactcggattacccttgaaaggcttctatttttttatttacaaatgaaaacttttctttttaaa

SEQ ID NO: 42454 - DNA, 227 bp, Gossypium hirsutum
  Clone ID: LIB3196-041-P1-M1-B1
cttcgtaccacattgatgatgggcctaatgacctcggttctgaacctaatggggccccctgccaccatgatgatgctggccctttcatgggccgccctgggccttatcaatgcatgggaatggggttaccacaccctatattccattgagggtatggatgggcaaagtggcattattaccggggcctcttctgggattggagagcgaattggatattaatattccaa

SEQ ID NO: 42455 - DNA, 396 bp, Gossypium hirsutum
  Clone ID: LIB3196-041-P1-M1-B12
atggggccaggacccctgccagagtgactcaggaggccccctggtctgtgatgagaccctccaaggcatcctgtcatggggtgtttacccctgcggctctgcccagcatccagctgtctacacccagatctgcaaatatatgtcctggatcaataaagtcatacgctccaactgatccagatgcccagaggctccgtcgtccatcctcttcctccccagtcggctgaactctccccttgtctgcactgctcaaacctctgccaccctccacgcctctaaacatctctcctctcgcctcattcccccacccatccccattctctgactgcactgaagcctgaatgcagagaaacattattccagaaaagcaaggaagccggtcatcgcccattctct

SEQ ID NO: 42456 - DNA, 338 bp, Gossypium hirsutum
  Clone ID: LIB3196-041-P1-M1-B4
atctgttgcaagccgccacgccgctctaaatcttggatgcgatctgtatgccctggatcggatttggaaagacatgcgaacatacctgaatgttgatgatgtgagacccaaacaaagctaatgcactcacaagtgtgacacagctcttgtgttcgcaagtatacaatattgccggggaattaatatgaggcattcgatctttcgccttatattctaagggcccccatcgcgatgcaggcagaagcatattgttactacacacacgcttgtggagttctaattgagacccaaaaactggatgaacaaacaagtggatgccacaattagatagaatgatt

SEQ ID NO: 42457 - DNA, 303 bp, Gossypium hirsutum
  Clone ID: LIB3196-041-P1-M1-B9
cccacgcgtccgcccacgcgtccgtccattacagccttatgcagagaatagagagcatttctattccctctcctccccaccgaatggtcattcgttgtttggaaaatcattcatctccccaattttaccctccccaagttctcaccttccttctttcctttcttccttaaactccaaccagtaaaactcctctcacttatctccttctgattttgcttccttcaccctcatcggagtcttcttcaggtactgtagtagcacggacgaataaagttgcagcagctttggcttaaaatagctatg

SEQ ID NO: 42458 - DNA, 376 bp, Gossypium hirsutum
  unsure (1)..(376): unsure at all n locations
  Clone ID: LIB3196-041-P1-M1-C11
catttttatcacataaaaatctgcagggaagataaggctattgactttgactaatacatcctcgaggactccttcggggtgcacaacagacctgtctgccaactgaatgatgacacctgtctttttcaaaaaaccggtgttaagtgactcataaatagaataaggcataatatttatggatgcccctaaatcacacatggcctttttaatccccaaatggcctattttgcatggtatagcgaacatacccctatctttacattttgccggcattttccgctgtagcactgcgaatacattctcaccaacacttatcttttcactgcctgtaagttttggtttgttggtgcaaagttctttgaggaactntgcatac

SEQ ID NO: 42459 - DNA, 326 bp, Gossypium hirsutum
  Clone ID: LIB3196-041-P1-M1-C3
atgcctgggccctacttagctggggtggcagagggcgagaggctctgtgctgcgtcccttctgagggtccctttgcagccccagtatactgtgtgtgcaccagccccagctggagccgccagaaatgctgccggtttaggcatatgtcctgggtgcaggaggcctggggcgccttcgggccgctcccctgagattctggggcagtcagacgatgtgggccctgggcgggagcagcccacctcagcagcactgccactgcctttggccacctgaggtgacccccaggccctcccgccctgtgcagtgtacctctgtgtatttgtaca

SEQ ID NO: 42460 - DNA, 394 bp, Gossypium hirsutum
  Clone ID: LIB3196-041-P1-M1-C4
atgacaggtttaagattgaaggacaggatgtatgatataggagacatgaaatagagtgaagagtcaaagataattttaatagttctatcttaaaagttgacattattgcataattattaattcaattaggggctggtttggagaaagtgatgatgactttgacattggatatgtggagttttgtagcgctatagagcacctagtcagatacatcaagaaggctgttgaatatgaggttgtagctgagaaagaagtagggtctataaatgcactgtcatgtatagtaaccactagtcacatgtggatttaaatgaaaaataattagattaaataagagtcaaagttcaatttctcagtagcattagccataattcacatgcttagtgatcatgta

SEQ ID NO: 42461 - DNA, 400 bp, Gossypium hirsutum
  Clone ID: LIB3196-041-P1-M1-C5
atgcgactgcgtgagcctgcactgcggcctcaacgagcacatccaccaccttatcaacgacttcaccgtcaagcagatgagacaaggggccttcctggtgaacacagcccggggcggcctggtggacgagaaggcgctggcccaggccctgaaggagggccggatccgcggcgcggccctggacgtgcacgagtcggaacccttcagctttagccagggccccctgaatgatgcacccaatcttatctgcaccccccacgctgcgtggtacagcgagcatgcttccatcgagatgcgagaggaggcggcacgggagatccgcatagccatcacatgccggatcccagacagtctgaagaactgtgtcatcaaggaccatctgacggcagccacccactgg

SEQ ID NO: 42462 - DNA, 243 bp, Gossypium hirsutum
  Clone ID: LIB3196-041-P1-M1-C6
ataagctgcggaagcccagacaccaggaaggtgagatcttcgacacagaaaaagagaaatacgagattacagagcagcgcaagattgatcagaaagctgtggactcacaaattctaccaaaaatcaaagctgttcctcagctccagggctacctgcgatctgtgtttgccctgacgaatggaatttatcctcacaaattggtgttctaaatgtcttaagaacctcattaaatagctaagtcca

SEQ ID NO: 42463 - DNA, 234 bp, Gossypium hirsutum
  Clone ID: LIB3196-041-P1-M1-C8
gactcacatggtcaagagacacacccgtgtctcaggctgtgtagatattcgaattagggacacacggccgtgtctcagcccatgtttgtacctgtgtaactttctgacttggtcacatgaacaagtcacacgcccgtgtgctgggccgagtactcttcgaagtaacatcacacacccgtgtgccaagccgtgtgctaagccgtgttacaactcgacttttaaccctttaaaaac

SEQ ID NO: 42464 - DNA, 393 bp, Gossypium hirsutum
  Clone ID: LIB3196-041-P1-M1-C9
atggccttcacaaacatccctggaattactctgcttaatgtaagcaaactgaacattttgaagcttgctcctggtgggcatgtgggacgtttctgcatttggactgagagtgctttccggaagttagatgaattgtatggcacttggcgtaaagccgcttctctcaagagtaactacaatcttcccatgcacaagatgattaatacagatcttagcagaatcttgaaaagcccagagatccaaagagcccttcgagcaccacgcaagaagattcatcgcagagtcctaaagtagaacccactgaaatacctgagaatcatgttgaagctaaacccatatgcaaagaccatgcgccggaataccattcttcgccaggccaggaatcacaagctc

SEQ ID NO: 42465 - DNA, 373 bp, Gossypium hirsutum
  Clone ID: LIB3196-041-P1-M1-D10
ggaccgatgaaagcaataattttctcacaatggactggtatgttgaacttggttgagcactcgctacgccatcatggtataagctataggagacttgatggaacaatgactttaactgcacgagaccggaatgtcaaagatttcaatactgacccagaggtaactgtgatgctgatgtcattaaaagcgggaaaccttggtttgaatatggttgctgcttgccatgttatccttctggacctctggtggaatccaaccactgaagaccaggctattgatcgagcacatagaatcggacagactcctcctgttactgtaactcggatcaccattaaagacacagtggaagatcgaatattatctcttcaggatg

SEQ ID NO: 42466 - DNA, 376 bp, Gossypium hirsutum
  Clone ID: LIB3196-041-P1-M1-D12
cccacgcgtccgcaaggcttttttcgaataagccaattcatttgggatcctgcggatccactctttttcctattcaaagatcagccctttgtctctgtgttttcacaccgagaattctttgcagatgaagagatgtcaaaggggcttcttacttcccaaacagatcctcctacatctatatataaacgctggtttatcaagaatacgcaagaaaagcacttcgaattattgattcatcgccagagatggcttagaaccaatagttcattatctaatgctaatggatttttccgttctaatactccatccgagagttatcagtatttatcaaatctgttcctatctaacggaagactattggatcaaatgacaaaga

SEQ ID NO: 42467 - DNA, 377 bp, Gossypium hirsutum
  Clone ID: LIB3196-041-P1-M1-D6
atgtttgtctgaacaaaatgctagactttctggagtgataagctggtgacaaatattctctctgcagctgtaagcaagtcacttaatctttctacctcttttttctatctgccaaattgagataatgatttaaccagttagaagaggtagtgtgaatattagtttatattactctcattctttgaacatgaactatgcctatgtaatgtttttatttgctcagttggctgtttagaagtcactgaacaaaacctacacacacaccttcatgtggttcagtaccttcctctctctatcagtctatttccattctttcagctgtgtctgacatgttgtttgtgctctgtgccactttaacaactgctcttacttttcca

SEQ ID NO: 42468 - DNA, 390 bp, Gossypium hirsutum
  Clone ID: LIB3196-041-P1-M1-D8
atgagacagccgagggcgccgtgcgggctccggacactagctgctccgcccgatccccgccaactgtgcaggctgctgacccgcagcggcagctgcagcatcgaggactcgagcgccggcggcagcaacagccgcggcgaaagcgacaccatggatctctcctttatggccgcgcaggtcaggacactaaacgagattaaataatttgcccaaggacatgccgtttgtaaggaggagaactggatttcaaatctgagtctgagtgtctgcaaagccactggggtttccaccttattgctgcagcctgagaaagatttgatctgcccatgatgggaggagctttcatggactcgcccaacgaggacttcagcaccgagtactccctgttta

SEQ ID NO: 42469 - DNA, 344 bp, Gossypium hirsutum
  Clone ID: LIB3196-041-P1-M1-D9
gatgaaagaagatcggagtatcaatccaaactggactacatttagcacaatggctaccatgtatatcaagatgggactgtctgaaaaagctgaagaatgcttgagaaatgtagagagtaggatcaccggtcgggatcgtataccatatcattaccttattacactttatggtactgttggtaataaagaggaggtgtatcggatatggaaggtttacaagtctattttccccagtgttccaaatttgggttatcatgctatgatatcatctctggttagggccagtgatattgaaggggcagaaaagatttatgaagaggggctatcagttaaaacatcttatg

SEQ ID NO: 42470 - DNA, 389 bp, Gossypium hirsutum
  Clone ID: LIB3196-041-P1-M1-E10
acactatataacaagttggtacgataaagcacgctggtgcccgtccgcaatttccgggatggcatggactcctgcattgccgcggggcgcggggctacattgggcctacggcgcattttccaagccatcaggactttgttccccgcgccagcctatttgtcctgcaaggttcacgccgtgcctgtgcaagcgtacagtactggaccttacaatccctgcgcgtttcagccatcgacaaagcctgtcataatgcacaagcgcctgccttcggcacaagaacgcacattcttgagtcctgaattcattcctcgcatgggaagaacagatcctctgaaagttcaaatattaagataagatgtgttagaaacgagaaaagatctccacatgcc

SEQ ID NO: 42471 - DNA, 380 bp, Gossypium hirsutum
  Clone ID: LIB3196-041-P1-M1-E4
agaatcctgaatgagtattttttaatagaaacaaacaagaacatcatttgaatcctgtatgaagagataattaatttttagtgaagaagggtcagaactgtcagacagcagaactggggtgaatttaaagaataaactgtacttattggctaaaccaaaaattctgaaaattttatagtaagaagatatatgagtctagtttcagggaaaattaactgatcttaatttggagttccttagcttgagttataaataatttagtgactatgactcaaatagacagctttgaataaactataaataataatagttgaattatagagaatgttgcatatgaacatgaaatgtattaaattgataattaaatttatttatttaga

SEQ ID NO: 42472 - DNA, 401 bp, Gossypium hirsutum
  Clone ID: LIB3196-041-P1-M1-E5
atgagaactacagttcgtgggtactgctggagttggctcatctaggctccctcccacctccccttccctgcagaggacctgtcagaccccgctgaaagggacaattatgagctgctctgcccagacaatactcggaagccagtggacaagttcaaggagtgccacctggcgcgggtcccttctcatgccgttgtggcacgaagtgtgaacggcaaggaggacgccatctgggagcttctccgccaggcacaggagaagtttggaaaggacaagtcaccagagttccagctctttggctccccgagagggcagaaggatctgctgttcaaggactccgccatcgggttttcgagggtccccctgaggatcgattctgggctgtaccttggctctggctactt

SEQ ID NO: 42473 - DNA, 377 bp, Gossypium hirsutum
  Clone ID: LIB3196-041-P1-M1-F11
cccacgcgtccgctcacaaaattcattatatctcaaaatttacaaatccattgcttacaatatttcttctataagaaactaggctcaataagctttaattccatatttttttatcttctaattcgatttctacaatttatggtgatttttcaaagttagtctactgctgctgtccaaactgtttttgtgcaagctgtttattaccatttttcccctaagcttttaataaatgataatttcgtacctactcaattagcctctcaattgagctgatttttctcaattaacattttattctatcaccttaaactagtttaaaacctttaggaataagaatttcagcaatagactttaattctaagcattttcacaattag

SEQ ID NO: 42474 - DNA, 395 bp, Gossypium hirsutum
  unsure (1)..(395): unsure at all n locations
  Clone ID: LIB3196-041-P1-M1-F12
atagcctttccatttagatatttttaaatctccccaggtgatactataataatatgcagccaagattcactaactttgcctgagggcacccacagtttctttgtagggcttgtggactcattctttctcttttctatatgcttattataccagttatatttagtcattgaataaaatctagaaaatactgattaatttttggagggtagtcataattattccacagagaaataaattttgttaacaattggctgtatatctttctgggatttgtctacatacatacacacaaataaataatcctatgcttcttctttaatcaaaaatgatatacatgctgtgtatcttttatctttgactttnttttccatgccaacaaattcaaataagcctat

SEQ ID NO: 42475 - DNA, 296 bp, Gossypium hirsutum
  Clone ID: LIB3196-041-P1-M1-F3
ggttccatgtgaacggtacttgcacatgtgtatggccatcctaatatactgaacctgaccgtacgccagcctgtacacctcgagcctgctatgggtagatcacttatatacctggaccgggacccggtggctgacgcaaacgatagggaaatcggagacctttgctgcgcctactgaagagtgatccatgctgtctaacatgctgcgctccctggataccgcttaacccaaagttgattacatctggcatcagatgaacaaaagcaacctattttccctttcaagacctacgacat

SEQ ID NO: 42476 - DNA, 381 bp, Gossypium hirsutum
  Clone ID: LIB3196-041-P1-M1-F4
agttaacaaagacctggtttctcgtatcaattacgctggagccaccgctgtgggcctttctggcatggacggccgccttttagttgcccggcccagcccaaacgctgcacagttggggtttgtgggagaagttgcgagagtggaccccacagtcctccaaacgatcgtggacaacggaagcatcccggtgattgcttcagtggcggcggatgagtatggtcagccttacaacatcaatgcagacacggtagccggtgaggtggcggcggcattgggggcagagaaactgattctgttgaccgacgtcgcagggattctgagaaaccgagaggaccctggaagcttggtgaaagagattgatataaagggagtgaagaaaat

SEQ ID NO: 42477 - DNA, 383 bp, Gossypium hirsutum
  Clone ID: LIB3196-041-P1-M1-F5
atttcttgggtagtttagatcccatgtcacctcagctgatattatggcaagtgacatcatcctctcttcagcccctagtgctattctgtgttgaacacaattgatacttcaggtgcttttgatgtgaaaatcatgaaaagaggaacagatggatgtacagcattttcattcatgccatctgttttcaaccaactatttttgaggagttatcatgggaaagatcagggcttttcccaggaatatcccaaacttcagaaacaagttattctcttcactcccaataactaatgctaagaaatgctgaaaatcaaagtaaaaaattaaagcccataaggccagaaaactgctatcttcctctaaatatgattactttaaaataaaaa

SEQ ID NO: 42478 - DNA, 398 bp, Gossypium hirsutum
  Clone ID: LIB3196-041-P1-M1-F6
ataccatccgtgtgaatctagcagatttgagtgtgaggagctaggcttggattgcggacctcaagttacaattgatgtgtccttgttttgtagtaagatgcacatcctgaaaggtttcacccagcagagaacaatttgtgggggtagtcatggggagatatccgaggccttttcttttctgtgggggtctggctaatgtctaaggttgtgagattacagctgtcattaggaagaaggatgacaatattgcttgactcagtctccaggcttaactttccctttggcataaagagtttgggggtcccaagatttctgttacagtacccaaggacttgctaatatctctggggatttcaaaacagatgggccacactttgaaacaagctaccttaccgaat

SEQ ID NO: 42479 - DNA, 193 bp, Gossypium hirsutum
  Clone ID: LIB3196-041-P1-M1-F9
ctactctaactcactttactgtaagcaaagctggctcgcctgcacgttccggaaattaattctcgacccaaccctcgcgtccagtcttttaaaggaaggggtaaatgtggtggagaaaaattttccacacaatgaatgagaagattttcatcatctacattagcaccaaagagcatttcaacatcagtttttc

SEQ ID NO: 42480 - DNA, 397 bp, Gossypium hirsutum
  Clone ID: LIB3196-041-P1-M1-G10
atctctggaaagctccgagttcacaggtcttacccacgcacatgctcagtgcttccaatcagcgattaaggccattgcttttcatccggagcaggcagcagggattcccaggtatccaaagcaaccaaaacaggcggtgtaatttaggactgaataattcatggctcggccactttaagtgtggaagcaaaactgaccccacagatacagaaaactaacactgcttattgggagacactagtgtcaccctgtctagttctgctccccaaattaaataaaagggaaataaacagttgagcacgtcccatcagcctggagggaaacttccgcccccaactttgtaggactgacatctgaagacgtcagagactgcggtcacaaccgtcggtacctcctc

SEQ ID NO: 42481 - DNA, 392 bp, Gossypium hirsutum
  Clone ID: LIB3196-041-P1-M1-G4
atccgccatgttgggtcttgtgggtcgtgtggccactgcttcggcctccggggccttgcggggactcactccttcagcgtcgctacccccagctcagctcttactgcgggccgctccgacggcggtccatcctgtcagggactatgcggcgcaaacatctccttcgccaaaagcgggcgccgccaccgggcgcatcgtggcggtcattggcgcagtggtggacgtccagtttgatgagggactaccaccaattctaaatgccctggaagtgcaaggcagggagaccagactggttttggaggtggcccagcatttgggtgagagcacagtaaggactattgctatggatggtacggaaggcttggttagaggccagaaagtactggattctg

SEQ ID NO: 42482 - DNA, 158 bp, Gossypium hirsutum
  Clone ID: LIB3196-041-P1-M1-H1
gaaaagcagattttgaaaataccttagcgtgtcctgaggctcaactcatctctcgcaatatgagttgatttttgaaaacatgaattaaaacagaaattggaaatacctcagcatgaccaaggctcaactcacctctcgcaatatgagttgattttttg

SEQ ID NO: 42483 - DNA, 388 bp, Gossypium hirsutum
  Clone ID: LIB3196-041-P1-M1-H10
atgggctggatatggcctactttcataggcttttcttctttcaggtttgatgtaagcatgggcttgcatcgcccaggtacatacttttacttattgtgggataacctggcactagtaggcaggtaaagtcacaaatttggtgtcttttcaccttttgactgttgacttaatagctcctctcactctggctggagatacttcctgcctcagatgaggagccagaagaaacaaagcccgacttgaatgaactcagctcaagagttctaaggaccagcattctgggggccattttctctacaagcaaatggaattgcttttccataacatccaaattgtaatgtggctgctgctgaaggaggaggcagcaacgaggtcctgcggtacccat

SEQ ID NO: 42484 - DNA, 378 bp, Gossypium hirsutum
  Clone ID: LIB3196-041-P1-M1-H11
cccacgcgtccgcccacgcgttcgcggacgcgtggggcaaaagtgtgatctgaggagggcattgagccagaggtgataaatagtgaaatagtacatgtccatggccgcgatgaatattgattgcgaagtgaaatgtaaataaggtttaattttatttgtggaccagtgaagacgaaaggttgtgcataagcaggaaactaagtttgaagagttgcaaagagtgtatacttttattctaattggaaatttatatacagatgtatttaggactagtttgtaaggaaagaccatttgtgttttgctatatattctgcaaacgatcaagtctaatgacgtggttgaaatctttctcatgaagagcctggttgtgcatctgat

SEQ ID NO: 42485 - DNA, 324 bp, Gossypium hirsutum
  Clone ID: LIB3196-041-P1-M1-H2
aacaaattgatgtgcataacaaactaacagttgaattgactcctaacaatactagcagttgttactttgtactttaacattcacccatcttcctgacgggtaaaacctgaagaagacttctaaaccgagcaaaagatgaaacagataaaggtttaataagattgtcaacaacctgatctcacgcaggtacctcacccacaactatggacctattagcaactctctcacgtacaaagaacaaatcaagctctacatgtttaaacttagaatgtaaaacagatttgcagcaactgcgactgcacttgagttgtcacactagacaat

SEQ ID NO: 42486 - DNA, 401 bp, Gossypium hirsutum
  Clone ID: LIB3196-041-P1-M1-H5
atgccagatttaagagtttaggaataagagcaggagaaattaagcggttcttgcaaaacagaagcgagggtgctacgtttcatttgcgttctgccttccatgcggacgtagttacagaaatgacatcggggtgcctgtgtgtatcctcatttcagagattccagtgtaaagggtatgttatacacatactggaatgtgcttttcagaccaagtaatccactttttcacttgtaattactgtgagtgactttggggcaacacatttcttcctgggttttgcctaccttgaactcctcttttggtatttcttggagacattaaagtagttcaagtagaaagttgtcactgtttccagggcaattgataggtaaaattccttgtgttagtaaaaacactaaaaa

SEQ ID NO: 42487 - DNA, 288 bp, Gossypium hirsutum
  Clone ID: LIB3196-041-P1-M1-H7
tcctgatgcacgaagtatagctgttgtaaaacttttatgcgatctgagtgccatggatcggatctctgatgacataggtgcataccgatatgttaagcttgttgcaaaaaactaacgttttgcggtcaaaaggactacacagaacttgaatgcccaagttctaaatattgcctgtataagcattgacgacttggatctttcatcttatattataagggcccacttcaggatggactcagaagcttatactgctgacacacagcttgctgggacctaattgatacccgt

SEQ ID NO: 42488 - DNA, 386 bp, Gossypium hirsutum
  Clone ID: LIB3196-042-P1-M1-A3
cgatgccagacttcagggacatttccaaatggaacaaccgcgtggtgagcaacctgctctattaccagaccaactacctggtggtggctgccatgatgatttccgttgtagggtttctgagtcccttcaacatgatcctgggaggaatcgtggtggtgctggtgttcacagggtttgtgtgggcagcccacaataaggacgcccttcgccggctgaagaagcgctaccccacgacgttcgttatggtggtcatgttggcgagttatttccttatatccatgtttggaggcgtcatggtctttgtgtttggcattacttatgctttgctgttgatgtttatccatgcatcgttgagactccggaacctcaagaacaaactggagaat

SEQ ID NO: 42489 - DNA, 311 bp, Gossypium hirsutum
  Clone ID: LIB3196-042-P1-M1-A7
tccacgcgtgcgtaagaagatacgaaataagagaaggagagatgggcgctcaaaaggacccagaagaagaactgaaagaaatagcagcttggctaaccacaagaaactagaaacgatagcaagcaagctaataaaattaataagctttgtagatggccgccgcctcatcgtccacacctttttttggaaccagggaagaaaatcaaaaaccagatgatgcaagtacaatcattcaccgctacacccacttcgtcaactgctccaaccactgcacctcagaagagaaagagaaatcaccctggaacatcata

SEQ ID NO: 42490 - DNA, 380 bp, Gossypium hirsutum
  Clone ID: LIB3196-042-P1-M1-B1
atcactgggatacacgtaggattttattttgtaagtgtcactgtgaaaacagacaagtaagtattaaaaacagtttatctgtaccagcttctactctgaatgaggaaatagccccagaaaggtgaagtgacttatgctgagtcccacaggtaggtcctagcaaagtggggactaagtcaggacccctgcatgcctgtgccccccactcccatgtcattttaacaaaggatgttggagcaaacagacatctccattttgaggaaataatattcctccataatgaggaaacaggtaaaatggctccaggagtgccaagatggagccaggctggaaatctctgaaagccagtcctgtggacctgcctcatcccagccccaccc

SEQ ID NO: 42491 - DNA, 373 bp, Gossypium hirsutum
  Clone ID: LIB3196-042-P1-M1-B10
atctctttcctccttgtcttacaccatcattaagacctgggctagatcacctacaacatctcacttagggaaggcaatgtgttgccataaaaagaccacaagcttttgagtgaggcccgaatttgaatttcagcttaatcctgtgggatttatggtgggggccctttcagtctcaacttccacattagtgagccggggaaatgatacatacttctaagggtttttagggggattaaatgaagtatacagttcttagcctcaggcctaggattaagtaagtactcaagaaacgtgcaggttttctacttccatgtttcttttctaatcttcaaatggaattatagaaaccgtgggtcagaacacattgctttac

SEQ ID NO: 42492 - DNA, 377 bp, Gossypium hirsutum
  Clone ID: LIB3196-042-P1-M1-B12
atgagttaatgcaaatgaagagattccgtgggttgcgctgggataagtgaggttagtgtcttagaccacactattgtttgaaggtttatctcttctagtcatgctcttccacattgtagacagcctaaagagagttgtttttgagctgatctcacggaagtacaaataacttgggagatgagggacaaaagatgattctgtgctgtcaaggcagtaagtctgaagaaaggaccatgcttcttatattatcttccaccttgcttaaaacagcccatagctttgagttgacatttttattcttggcaggtagcctactttatggaggtaaggaatgaagacttacccttgggtcattctctgtactgatgcattggtct

SEQ ID NO: 42493 - DNA, 371 bp, Gossypium hirsutum
  Clone ID: LIB3196-042-P1-M1-B2
cccacgcgtccgatttctctaacaaatccctattcaatacttgttatatcaaatagttcatgatccaatctaaattttatagttggaatactatttccaataaaattggtaaaaacataagattgaagaaaatattcagaaaaagtttttctaaattgattctgctgattgcagatcatatcatttattttgttgaatatttccaatggacaaatctgtctagatttgttatgtaaacagattctaaataccttattcataaaagggctgctttttcctttatgaataaaatattgaatagtatcaagaagattatttatctccttaatatccattataaagagttggaattcatcccaatctcgatataa

SEQ ID NO: 42494 - DNA, 378 bp, Gossypium hirsutum
  Clone ID: LIB3196-042-P1-M1-B3
atgacggaacccaggggtcgtaatatatgtgaactggcgtccgtgctgcgtgcccagagtagtggccgaataccttaacgggtctgtgcgcgaggagagcatccactgcaagtcggtcgaggagatctcgacgctggtgcagaagctggccaaccagtcgggtttggacgtgatccgcatccgcaagcccttccacaccgacaaccctagcatccagggccaatggcaccccttcaccaacaagccgaccactttccgcgagctatgcccccgagaggttcaggatcctgccccagcccaggtgcaagcacagtgaagagttgctccaccccaggctttggactgtttctccagtaaaggtggttcttcccctttggg

SEQ ID NO: 42495 - DNA, 375 bp, Gossypium hirsutum
  unsure (1)..(375): unsure at all n locations
  Clone ID: LIB3196-042-P1-M1-B7
attgctaactttctgacacagtgctctagaaccctggctgtggtcctgagcactgatcagcttagctagaccatggttgactcttcttggagattttcacttggtcctagaatgtggcaacgtagttgtgctcgctagaatgtgggaccaaattggcctcatgtgtttagtccagacttctgcttttgagagagggctgcactttttaatggtatttctaggggaggtggtaggctgcatgtgccacttggtcttgtgagtatgctgacaccagaaactcanagccagcttgtggcaagcagttggggtggggggtctctgacttgctcangacaaactaggccagtgggtttcaaactgcttggcagagccctg

SEQ ID NO: 42496 - DNA, 381 bp, Gossypium hirsutum
  Clone ID: LIB3196-042-P1-M1-B8
atccacgcctcgcagccatccatgactgtggacggcgttaccgacccctacaattcggagcgcttctgcctcgggctgctctccaatgtcaacaggaatgcagcagtggagctgacgcggagacacattggaagaggcgtgcggctctactacatcggaggggaggtcttcgcagagtgcctcagtgacagcgctatttttgtccagtctgccaactgtaaccagcgctatggctggcacccggtcaccgtctgctagattccaccaggatgcaagctgaagatcttcaacaaccaggagtttagtgaccttctggcccaagccgtctaccagggctttgtggcgggctaccagttgacccgaatgtgtaccatccgcatg

SEQ ID NO: 42497 - DNA, 384 bp, Gossypium hirsutum
  unsure (1)..(384): unsure at all n locations
  Clone ID: LIB3196-042-P1-M1-C1
atcaagattccattaacctcttcctgggagtttttcatcccactgaagggaaacctcatctctgggaactcccaacagatttttatttgcatcacaaaaataccatgagacttttgccaacaagaagaagttatacttactggtggacaccagaggtaataaagcattttaccattaccctatgatgaagttatctgtgctgtgaacttaaagaagttgatagtgaagaaattccacacatatgaagaagagattgatatccacaatgagttctttcggccatatgagttgagcagctttgatgataccttttgcttggctatgacaagctcagcacgtgactntatgcctaagactgttggaattgatccaagtccatttact

SEQ ID NO: 42498 - DNA, 372 bp, Gossypium hirsutum
  unsure (1)..(372): unsure at all n locations
  Clone ID: LIB3196-042-P1-M1-C11
atttctccaactgttatcctaatctagcaaatgaggactgatccctaggcagaagtggtgtgaggaattaactctggaagaggaaaatctggctggctttccaatgctaagataggtttgtatttcaccccgtggccaagctacagaaattctgagattgtggcagaatttatgcaaccagcaggggaagaggcctcttattgcctaaacacaaagttacactgagttttctaccgtcctttgcctgttgctccctctatcgtgtaaagatctgggaaggatgaaaggcagagactgcttgtcatgagctgcactcttctctttttaactagtcattgacaattggaagaaaattgactntaaagaagtttc

SEQ ID NO: 42499 - DNA, 284 bp, Gossypium hirsutum
  Clone ID: LIB3196-042-P1-M1-C12
agagtattcaccaaccttcgaccctttaagaggtttctaggcaccaactgaaaaaaggtaagcacttaagttaaccaataaaggaaaacaccactctaactcttttcttgaaagttgctttggaaagaaaagagtttgagggtgttttccttgtaaatttgctaagtaatgattttaggctttgcttaaaattcactatttataatactctctttccctaattgaaataggttttaacaattcatgtagaattgatacttctttaaaataaggactaaattgaa

SEQ ID NO: 42500 - DNA, 238 bp, Gossypium hirsutum
  Clone ID: LIB3196-042-P1-M1-C3
gatcttaatttggctttaggttagcaaaagatctattgtaagctcatattagaccccaaaaatgattatataacacaatacaaatatgaattatacttaattgtatgtgtaaatgattgtatgatgtataattgattggagttgctccaacaacgaatgtaacatcctgtggctccgacccgatgattgggtcaagtaaggggtgttacataatccatatgtgatctcaagtgaaaaa

SEQ ID NO: 42501 - DNA, 248 bp, Gossypium hirsutum
  Clone ID: LIB3196-042-P1-M1-C5
tcccggaattccccgggatcctgtgtccacttcgtggtggcaaatcacacttggagaactcggtcccaagagcctactgatagctgcagcccagaatgcaagacttgggtcacaggctccctggctttacccaagatctgtctctgcccccataccttgttggcctggggcacccccataacccatgtccccaggccctggctggaacgtgccatgcagggaagacaggccccaccttgcagcctcct

SEQ ID NO: 42502 - DNA, 346 bp, Gossypium hirsutum
  Clone ID: LIB3196-042-P1-M1-C8
cccacgcgtgcgcttgcagttcggacattattcagccgtgctaggacatgttcaccatgcatacttttttttgatgaggtttgtggctctcttttttatttctaagtgaaaggaaaaatttctggaaaaaaattgctactgttgaatttgataattttgaggattttctgtaaaatgtaggtggatgctttgaccacaaagcggggaaaagaggggggatgggtcgttgagcgacttctgaaccagttactcatagagttagatggtgcagaccagcggtgtggtgtttttgttattggtgccactaataggcctgaggtgatggatcgtgctgatttacgccctg

SEQ ID NO: 42503 - DNA, 326 bp, Gossypium hirsutum
  Clone ID: LIB3196-042-P1-M1-C9
acggtacactgtgtgcattagccggtttaacactggcctgcaccatcattgggctgatgctagccacaccgatgttcatgatcttcagcccagttcttgtaccagctgccattgccattgccatggcagagacggggttcttgtggtcacgcgcgtttgggttaacaggggtggagaaggctagttacacgcttaacaggctgtggtacacaacagggacggagcatctagatctagaccattcagagagacggggacaggacatctgagactatgtggtgcaaaagacaaatgaagatgggcagaacactgagaacaaggcacat

SEQ ID NO: 42504 - DNA, 382 bp, Gossypium hirsutum
  Clone ID: LIB3196-042-P1-M1-D1
ataacggctcgggtctccgccatggcttctctactggccaaggacgcctacctgcagagcctggccaagaagatctgctcccattcgggcccggagcagcaggcgcgcacgcgggctggcaaaactcgaggctcagtagctgcagggcccccaaaaaagaaaaggaagaaaacacaaaagaaattccggcagcggaagagaaggctgctgagcacaaggccaagtccttgggagagaagtctccagcagcctctggggccaggaggcctgaggcagccaaagaggaagcagctggggcttccagttcagcagggaaccctgcagatggcctggccactgagcctgagtctgtctttgcactggatgttctgcgacagcgact

SEQ ID NO: 42505 - DNA, 356 bp, Gossypium hirsutum
  Clone ID: LIB3196-042-P1-M1-D10
gagagtgttaagcatgataagtcattttttagaaattattattttaggttgcctcattgaactaaaggattatcttgaaattttaaatctgcaagtctgacatcaaaaccataattttttgtgagcttttgagcctatagagcatatatgttatttcatgctcattttatttttagttgtgagtatgtcaacttgatttgttattatagaacttgcttcgattatgcatgtcaagaccacattattgatttgatatactaagatgatagagacacttaggatttaacccacctaacctttaatcatcttacttgttgtattaatccctaataaaccccgctgatcctaacacattt

SEQ ID NO: 42506 - DNA, 343 bp, Gossypium hirsutum
  Clone ID: LIB3196-042-P1-M1-D11
aactctactacgtctaactatagggaacgctggtgcgccttcatgcacctccccaatattcccgattggacccacgaccgccccaactcggggctatgggaacccatcgtctgcccatacttacgataggacgaggactaggacatagggagtgtcctagcggtgtaacactcacagtcggccgtggaagatcacattctggtgcgcgtgcccgagccaataaatgaggtcctgcatgaggcgctcattgaatctacagacctgatgaccacactttacaatatgcttacagaactttgttcacttcaacgatggtagactacactcttggggtggaaagctc

SEQ ID NO: 42507 - DNA, 317 bp, Gossypium hirsutum
  Clone ID: LIB3196-042-P1-M1-D2
taaaaattagaaatatgggaattcatgtctgggagtactcattagagcatttaaacagaaagctttctctcaagcactataacgggaaactcattaagccatgtaacgagaagcttatccaggcttaataacgggaagctcacaaagagcctatatcgggtagcttcaaagagcacttaacgggaagctccgaggagcctttaacgggaagctcacaaagagcctataagcagaacgcttataagagcgtgggggtggctacaacatatgcatatgacaactagtcgggatgctcagcatagcattttacgggaagc

SEQ ID NO: 42508 - DNA, 392 bp, Gossypium hirsutum
  Clone ID: LIB3196-042-P1-M1-D4
gccggacttcccgggatcatttgtacagtggtctccttaagagggtctggtgcaaagatgtcaccagtatttgtgttatcaaccagacaaactgagtgaaacacatgctttacacaacaaaaaaatccatgcccacattcatggcttacagtgcagctctggctgagtgattcaggttcctgagatcccatcttacaatgcagcttgacttaccaaaagtatccaatggcccaatgccttcaaaccaagttttttcaattactatatttaaagttatacattcaagttaaaatatacctaggacattctgattatagctgaggctttagttctatccagagaacaagaaaaactttttgaaaaaggggaggaatcaatttcatacctgatca

SEQ ID NO: 42509 - DNA, 373 bp, Gossypium hirsutum
  Clone ID: LIB3196-042-P1-M1-D5
atccgggcccaggggctccgcacagcaggttctccccatgacaccacctgaacgtctcttactcttaagggtgcgtggcacccccctacacctcctccttctggggctgctgctggtcctgctgcctggggcccacgggctccctggtgttggcctcacaccttcagctgcccagactgcccgtcagcaccccaagatgcatcttgcccacagcaccctcaaacctgctgctcacctcattggagaccccagcaagcagaaactcactgctctggagagcgaacacggaccgtgccttcctccaggatggtttctccttgagcaacaattctctcctggtccccaccagtggcatctactttgtctactccca

SEQ ID NO: 42510 - DNA, 267 bp, Gossypium hirsutum
  Clone ID: LIB3196-042-P1-M1-D7
atgggttctctacttggcaaaaactatcttcctgctgactccttccttgaagatcttttttttaaatttctcgaaaccccttgtttgcccactatgtgtcaatacatcaaggtatttcgccacgctaccgcccaggatgtattgctggattcaccaaattgattcctgtcccacttgaaatagctggtgatctcttacatgtcactatgcactgatgatactttgcgatcaatattgcaaatgcgctggctaggcctcttatataca

SEQ ID NO: 42511 - DNA, 273 bp, Gossypium hirsutum
  unsure (1)..(273): unsure at all n locations
  Clone ID: LIB3196-042-P1-M1-D9
atcgcccccnngaaaccagataaaaatgggtctctgcgtcgaaaaatggggataaaaaacttctttttttttttccatggggagaaaagaaagccggaccttttcatatcttaacgagccgggtgttattatcacttacaaccacgtgcattcgtgagagcagcacatgaaatggccttctcagagaattcatgacccccaacaaacccgagaggggccgtgcctggagacaaacctgggtccagacctctgatcccgaaaatgtttgcgtgc

SEQ ID NO: 42512 - DNA, 349 bp, Gossypium hirsutum
  Clone ID: LIB3196-042-P1-M1-E1
cccacgcgtgcgggggcagggtggagtaggaatgcatgcactcaacatccatggaagcggtagtgtttttcaaaattattcattcatagtggagtagaatatatgatggagcaaactatggcaactatgaagcaatgatggatttaataatattcgcttctgtcccgctcgactactattcctagagatattagtcatcaatatataaggttggagaaggatgtatgattgaaagctttatcaagaaagaaatttaccttttggatgtcaactagatgaagaaacacttgttactaaccgttcctttttttttttttggtaagtagtaacaatttgatacataaatttt

SEQ ID NO: 42513 - DNA, 334 bp, Gossypium hirsutum
  Clone ID: LIB3196-042-P1-M1-E10
taaagttttgatttcaatcgacaagtaagatttaattcttttccgctatgacatttcctttgaaacttgaaattttctaaagataatcgatttttgcaattttttttgaaaagaaaatttatagacactatttggattttcttaagcaaatcaaaatgacgattttaaataatgacgtttgtcaagagaaaatagtaaataatttatgtgccatcatcctggccaatgtgatcttcgagatccgatcataatgtttaaatcgagtttagggggttacaagtttattgccgaattatttaaagtttagttttataaattaaaaatctcctccaaa

SEQ ID NO: 42514 - DNA, 368 bp, Gossypium hirsutum
  Clone ID: LIB3196-042-P1-M1-E7
atatgccagcaagctcagcatcgacgaggaggtggagctttgagaatctcatgcagctggtggagcactacacctcagacgcagatggactctgtacgcgcctcattaaaccaaaggtcatggagggcacggtggcggcccaggatgagttctaccgcagtggctgggccctgaacatgaaggagctgaagctactgcagaccattgggaagggggagttcggagacgtgatgctgggcgattaccgagggaacaaagtcgctgtcaagtgcattaagaacgactccaccgcccaggccttcctggctgaagcttcagtcatgacgcaactgcggcatatcaacctggtgcagctcctgggcgtgatc

SEQ ID NO: 42515 - DNA, 370 bp, Gossypium hirsutum
  unsure (1)..(370): unsure at all n locations
  Clone ID: LIB3196-042-P1-M1-E8
atccagcgtgtgggcccctcccgaccccacgggggctgcacaggctcccacctgcctctgggcgtgacccangcacaggaagctgtccagggaaaggaatgcccatggcagtcacagcacagtatcatccttggagcctccatcctgcccatctagaacagactagaacattccctggaggaatccccagcctagctgggaagggcgggagctcgggttccagacgtacttcaccttcccaccccgatggcgggagaagccagggcaaggcggcaatcgagagacataccaggccttgcgtgggatctcactttaatggagaggacgtgctggcctctggggcacggctctcagccttgggcaagcccct

SEQ ID NO: 42516 - DNA, 306 bp, Gossypium hirsutum
  unsure (1)..(306): unsure at all n locations
  Clone ID: LIB3196-042-P1-M1-E9
atggagagctggagcaaggactcangcggaggcagaggtcagaacccaagccctgtccccgaaggaagtgtgtcccatcctaactactccgtagctgaggcctggagggaagtcagggaccctgggactggctctcctggccttgactcatgactgttccggagacccaaatgcaccctgagccaccagacgcaccctgagccaccagacatgggtgttaacacctgaggtcaaacccctgatgcttccgggtgctctggaggaagctgatcctccctcccatctcctgttttttgtgccagcctg

SEQ ID NO: 42517 - DNA, 360 bp, Gossypium hirsutum
  unsure (1)..(360): unsure at all n locations
  Clone ID: LIB3196-042-P1-M1-F1
attgcctcgcttcctccgccactaaaccagcgggggactgacagcccgaggctggtgcagaagcgggtgcataagccggagagggaacgcgcgtggcgccccagccgccacctcaacccagccacttccgcagctgcccgggcgccgctgcatccggactactctgcggtccacccgctgcggccaaaagaagagagactccggggagtgcggccctgcagcaccctggccttcacagagcagggggcggaggagcccangtgccctcggtgcctgcgcaacctgagccccggccgcttcgcgccttatccttggggctccccctggcggttattccggtccctgcaaggaaatgtgccc

SEQ ID NO: 42518 - DNA, 354 bp, Gossypium hirsutum
  Clone ID: LIB3196-042-P1-M1-F10
gtactattgtgggtggaaaaatggtgaagatagatgaccctcttgattatattttaatattcaattcgctaatgtcatcaattaccaaccctagtcatattttgactttttgactcctcatgtctctatggtcggctagctcgtcttttaagggtttaatttccctttaaaaacccttaatttaggtgctctaagtattcgacaccctcagctatcaaaataagacttttgcactttatgcgatttaggcttttttcacaattcagcataaaatcactaaaaatcattcaccaaaattgtcatactttcatataatcatgccgccacacataaaataatcttaaaaataatttc

SEQ ID NO: 42519 - DNA, 288 bp, Gossypium hirsutum
  Clone ID: LIB3196-042-P1-M1-F12
gtcacctaacaccttcggtttattcatctaagcctctaagctatcttggtcttctcaaattttgcgcccaaaacaagttttttttttctttccaatatttgaatcaactcccttttcactaaccctaatcattcgtatcattttcgcaggcaaaacggtgttgaagcagagagaagaagcgggattttccccctcaattgtgcccaaaataatttaaaatggctggaagaaaccgcattcctcgcgaagccttcaatgaccggcatggatttcctcctgaaagatctt

SEQ ID NO: 42520 - DNA, 374 bp, Gossypium hirsutum
  unsure (1)..(374): unsure at all n locations
  Clone ID: LIB3196-042-P1-M1-F2
atgcggcggcggcgcggagaggcgcancgganggtggcctggtttcggaccccagcggccggatggtgaaatcctccctgcagcggatcctcaatagccactgcttcgccagagagaaggaaagggataaacccagcgccaccatccacgccagccgcaccatgccgcttctaagcctgcacagccgcggaggcagcagcagtgagagttccagggtctccctccgctgctgtagtaacccgggtccggggcctcggtggtgctcctgatgcccctcacccacccctgaagatcccaggtgggcgagggaatagtcagagggatcacaatctttcagctaacttattctactccgatgatcggctgaatgtaac

SEQ ID NO: 42521 - DNA, 332 bp, Gossypium hirsutum
  unsure (1)..(332): unsure at all n locations
  Clone ID: LIB3196-042-P1-M1-F3
attggacaactcaactcctgacaagatgtcctgccggcagaaccagcagcagtgccaacctccacccaagtgcccctcacccaagtgccccccaaagagcccagcacagtgtctgcctccagcttcctctggctgtgccccaagctcccggggctgcggttccagctctgaaggcggctgctgcctgagccaccacaggcgccaccaccgatgccggcgccagaggtccaactcctgtgataagggcagtggtcagcaaggcgggggctccagctgcagccacggttctngaggctgctgctgacctggatcctgatgctgagacaagcaat

SEQ ID NO: 42522 - DNA, 368 bp, Gossypium hirsutum
  Clone ID: LIB3196-042-P1-M1-F4
ctttgtgactcacccagagcctcgccttcttctcttcgctcttgcgctgcttcgcgccgtctcattagtgcctccggccaccgtctgaagctgccgtcgtgggatatctgaggtaaatttgtgaacaaagataagcttgcggtaatatttgctgcaagttgttgaaagtttactgtcagccactcaacagatggagcaggattgcacccattggacttgcaacttgtgtgggaatgtgggaatggctgatggatcagatggctacttctactgcttgagatgtgggtctcaggctgatgacatcattgatacgggtgttgctgatgaggattttattgaaaagggtactcagggtggtggtgcccttt

SEQ ID NO: 42523 - DNA, 380 bp, Gossypium hirsutum
  Clone ID: LIB3196-042-P1-M1-F5
atggccgcagccagcaccgggcggagagggccacggggggaaaatcgcgctgcaactcaaagccacgctggagaacatcaccaacctccggcccgtgggcgaggacttccggtggtacctgaagatgaaatgtggcaactgtggtgagatttcggacaagtggcagtacatccggctgatggacagtgtggcactgaaggggggccgtggcagtgcttccatggtccagaagtgcaagctgtgtgcaagagaaaattccatcgagatattaagcagcaccatcaagccttacaatgctgaagacaatgagaacttcaagacaatagtggagtttgagtgcaggggccttgaaccagttgatttccagccccaggctgggt

SEQ ID NO: 42524 - DNA, 370 bp, Gossypium hirsutum
  Clone ID: LIB3196-042-P1-M1-F6
cccacgcgtccgaaagcgtggctccgaaacaatctccacttgcgaaagtctcactttggaataggatctttcgattataagaacataaaataccctaagtgaaaactaagaatgaaataaaaaacctaagaataatttttgtctccttaaaattgtgtgtttaaactgattacaatggcctttatataggctaaacttgaaatgttaaactgcctaaattgtccttgaattccttgagttcgactaggaacatacacctaatttccttccaaaacatcattatcaattgcaagacttttttgggctgcgtaggtgctttgttgcaacacatggggtatgtcacgagactgtaaggagcgtatcacgacat

SEQ ID NO: 42525 - DNA, 374 bp, Gossypium hirsutum
  Clone ID: LIB3196-042-P1-M1-F8
atggaaatctagaagtagtcctgaaggacagaaactaaactcttaccatatgtttggtaaggctccagactccagataacagtccctatggaaagatggcatcaaaacagatagatctatatatatatataaatatatattctattacattttcagtgagtaattttggattttgcaaggtgcatttttactattgttacattatgtggaaaacttatgctgatttatttaagggggaaaaagtgtcaactctttgttatttgaaaacatgtttatttttcttgtctttattttaacctttgatagaaccattgcaatatgggggccttttgggaacagactggtatgtaaaagaaaatccattatcgagcagc

SEQ ID NO: 42526 - DNA, 328 bp, Gossypium hirsutum
  Clone ID: LIB3196-042-P1-M1-G11
gagattcttgggtgctatttgagttctccttatgtatgtatgtgcatgagtattcggtcatgttatagatccatgttgaaaaatgtgaatgctatatgtgtcatataaatgtacttgtgaatgaacttgagaatatctaaattataggttggaggtgccgaatgtagtgttggatgagttttaaagaataaaaatttatgtgactaaaggttaatgacattcggccaaaggcttgtgtgctaacgaaatcggcataaatgctgttcgatgtgttgaattgagtaagctagatgttggaacacttaacgattaggcatctctatgacat

SEQ ID NO: 42527 - DNA, 374 bp, Gossypium hirsutum
  Clone ID: LIB3196-042-P1-M1-G4
atgcataagccactgcgcctggcctaaaattaaatggttacaggcacataagtaacacttcctggatccaaaaatgtgcattctgcatttcgtattaaaatgaaaaagcaagtgcttgggatacaaatatctgcatgaaaatttaaagactttattcctgactggtatcatttttagtaagcagttgaacataacttgtagtgtgaatatggttaaaacaaaggacacctgatgtctgtgaaatcttgtagtgtgaatatggttaaaacaaaggacacctgatgtctgtgaaatcttgtagtgtgaatatggttaaaacgaaggacacctgatgtctgtgaaatctgctaaggacaggtacaaaatttatgaat

SEQ ID NO: 42528 - DNA, 233 bp, Gossypium hirsutum
  Clone ID: LIB3196-042-P1-M1-G6
gtttgtacaaaaaagcacgctggtgcccctcccgaattcccccggtctggccctctcgggcgtatacgcctgctattcgagtgagcggggtcttgagagcttctcattgataacgatagtaccgtttgctgtgcgagaaaccacgttcacccctttcttcttcctgtgggggctaagcttgaaactttagctcccttttttttcacaaacaggctcaatgcaaagaattggat

SEQ ID NO: 42529 - DNA, 291 bp, Gossypium hirsutum
  Clone ID: LIB3196-042-P1-M1-G7
atgggcagcgtctcctggcctatgtggatccccttgcagaagaaggctggaaacagaaacccaacctcaatgccatccgctctctggaggctgtgatccgggtgcacagtaaatactggggctgcatgcagcgcctggcctcctgtccagactcctgggtgcctagagtgccaggggctgacaaagaagaagtggaggcagtgaccgcactggcatccctctctgtgggcatcctggctgaagacaggccctcggagcagctggtggaggaggaagaacctatgaatctct

SEQ ID NO: 42530 - DNA, 187 bp, Gossypium hirsutum
  Clone ID: LIB3196-042-P1-M1-H11
acgcccactcgtccggttttggtgacaaatacatcatgtgatgcacattctatcattccccaagtatagaaatttcacttttgtgcataatgaatatcacaatcacgtgcacaatctcttactgagaacttgagctgtaaacactcaacaatgtttacaataatttgcattctatcacaaaaacaac

SEQ ID NO: 42531 - DNA, 319 bp, Gossypium hirsutum
  Clone ID: LIB3196-042-P1-M1-H12
atccaaaaacaagatgaccaaatttgatctcagcctgatgacgctacaagttgtgctgtgatacagagtccttatgggtaaagcagaaagagagtgggaaagagaaccaccccactctgtcttcatatttgcatttcatgtttaacctccggctggaaatagaaagcattcccttagcgatgaggataaaagaaagtttgtaattcaacagggggaagaaaatggagatttaatcctaaaactatgacttggggaggtcagtcatttacagttagacttgtgtctttcgacttttgggatagttaaccccactcactac

SEQ ID NO: 42532 - DNA, 274 bp, Gossypium hirsutum
  Clone ID: LIB3196-042-P1-M1-H2
agccttccggaaatgataaatgttaagtggagcttgagaaatgctttgggattatatattaaagggcctaaattaagtgttattagggagtgaggtaaatttaaaggggttcttaagggacctatcgcggattatggaatatatatatggaataattatgaagtttcatattccctgtgacaacccgctttcagtggaatcagaatagtgatttttggactacacatccgcgttatatagaaaatttattttaatattattgcgtgggctatat

SEQ ID NO: 42533 - DNA, 322 bp, Gossypium hirsutum
  Clone ID: LIB3196-042-P1-M1-H3
atgtggtgggagaggcctgcgtctgtacaccccactggggtccccgctgtgtgtgcccctcatgcggtcaccagccctaccaggtcctcctctcccggcaggtcttcgccttgatcgtgttctcctgcatctatggcgagggctacagcaacacccacaagtctaagcagatgtactgcgtattcaaccacaatgagggatgcctgccgctatggcagtggcatcggggtgctggccttcctggcctcgggcttcttcttggtgatcgacgcatattttccccagatcagcaacgccactggaccgaagtacctgggcattg

SEQ ID NO: 42534 - DNA, 182 bp, Gossypium hirsutum
  Clone ID: LIB3196-042-P1-M1-H4
tatgccgtggcttcaccagcagcatcagctttggtagtggcttcaggggaggatatggtcgcaactctgttccctgcctcccttactgctcagctggtagctatcctggcggtgatgggcttcctgtggacacccacacaggtgccccgcaaaaccttaacgaccagctagactcctaccta

SEQ ID NO: 42535 - DNA, 273 bp, Gossypium hirsutum
  Clone ID: LIB3196-042-P1-M1-H6
tcgcccacgcgttcgtttttaattacaaatacaacaagggatttacattctatcattccccaagtgtagaaatttcacttttgtgcataaagactataacactcacgttcaaaatctcttactgagaacttgagctattaacactcaacaatatttacaataggttgcattctatcacaaaaacaccaaatgaaagtggtatcctccataatagaaaaacttcctccatcttgggaagactttaaaagaggtgtaaaacatataaaagagaaa

SEQ ID NO: 42536 - DNA, 403 bp, Gossypium hirsutum
  Clone ID: LIB3196-042-P1-M1-H7
acactatataacaagatggaacgcagaagcacgctggtgccccgccgcgatttccggggtgtgcccgagccagagactgaaacgcgctctcaccacacagactcaccgagcactcgttcggctatggtataggagccggttcgagccgcccacgaaaaccaggcgatctgcaccctgcgcagccatgaccaccaagggcgagtcctcgggctcctaccgtatgaggttctgtgggccgggcaccgctagccgatcgagctccaaccggagctacacggctacgtgcacacgcacctacagactgggcagggcgctgcgccccataaccaagcgcaggctatacgcctcgtgctcgggcggtgtgtatgccacgcgctcactctgctgtgcgcctgacagagca

SEQ ID NO: 42537 - DNA, 395 bp, Gossypium hirsutum
  Clone ID: LIB3196-043-P1-M1-A10
gcttgtgaacgtgctaagcgtacgctctcttccagcacccaggccagtattgagatcgattctctctatgaaggaatcgacttctatacctccattacccgtgcccgatttgaagaattgaatgctgacctgttccgtggcaccctggacccagtagagaaagcccttcgagatgccaaactagacaagtcacagattcatgatattgtcctggttggtggttctactcgtatccccaagattcagaagcttctccaagatttcttcaacggaaaagaactgaataagagcatcaaccctgatgaagctgttgcttatggtgcagctgtccaggcagccatcctgtctggagacaagtctgaaaatgttcaagatttgttgctcttggatgtcac

SEQ ID NO: 42538 - DNA, 118 bp, Gossypium hirsutum
  Clone ID: LIB3196-043-P1-M1-A3
aggcgacactgtataactagtttgtacgaaaaagcaggctggtacccggccgcaatttccgggttacaatttaccaaaccgtttactttacaaatggcttggcattagaaattttaac

SEQ ID NO: 42539 - DNA, 406 bp, Gossypium hirsutum
  Clone ID: LIB3196-043-P1-M1-A4
ataaatctgctaaatttctaaatattacataactgaggaaatcccagacctacaacgttggaacagtgaaatattagtccaaggatccagtgagagacacagaagtgctagaagccactcctggggacctagggggaaaaggaccggccaggggacaaccttgacacatggttagagatatcacataacacaggccaatgtgcctcattgagaacactaatgggcgactgatggcgaatccagaagctctgaagatcctgtctgccattacacagcctgtggttgtggtggcgattgtgggcctctatcgcacagggaaatcctacctgatgaacaagctggctggaaagaaaaagggcttctctctgggctccacagtgcagtctcacactaaaggaatctggat

SEQ ID NO: 42540 - DNA, 359 bp, Gossypium hirsutum
  Clone ID: LIB3196-043-P1-M1-A7
attgtgagactatgaaacaaaatgattatcttttagattcttattgcagatgagaagatgaagtgttttataaaataatgtattaaatgtacctattccttggcatatatgtttagatttttaattataatttttatgatgtgttggagccagcattttcctatagaaatataactcaagatttaatattgggcaacagtgggaaaatgggatttagtatgaaaatatttgctttatgtaaacctttttatgaatgtacctaatgtataaagtgaagtcaagctgtaaaaacaattagctgggaaaatgccacgttaattttctatgttccagcgagtatctattaactacacattact

SEQ ID NO: 42541 - DNA, 357 bp, Gossypium hirsutum
  Clone ID: LIB3196-043-P1-M1-A8
ggagagagtcgtccctttgctttgagttggaacaaatccatggctccatctctcacctccaattcctttctcttaaccaccacgccccgctcaagggtaaacctcaagtaccaaaggctcgcagtgtttgccaaagggtccggtcccttctctccatttcagttcgggaaagctaaagacaaccctgaagatggtcaagctgaagatacaggcaattctagtcctttccgcttcgattttggtaaattacctgatgttaagactttggtccccctcgtcagtaacccttcctcgggtttatcgtttgggaacgttagaagaaaagacccaagcactgtatttgtggctggcgcaacc

SEQ ID NO: 42542 - DNA, 197 bp, Gossypium hirsutum
  Clone ID: LIB3196-043-P1-M1-A9
gctttgctgctccacaagggcatcctggctgtcagcctgtccctgcggctgctgcagagccaccttaaggcacaagtggtggctggctgtgggatcctttttttatgcattacaccctttaggattgggcctggtgccacttttggttagtccgggggacccttgtaccaaatgggccaatctgtgctttaaggcat

SEQ ID NO: 42543 - DNA, 321 bp, Gossypium hirsutum
  Clone ID: LIB3196-043-P1-M1-B1
gctctaatagctcttttggggtgcgatcgaaggacaaaaaggtgttctagttggatgggtgggtttcaatacttgactacattcctgtgcatctatttgggtgtaagactatatttctgtactctttatgtctatgcaacacctctgttaactatcatgtgtgtatttggtgtgctttgattgtttcgtgtgttaaggtattggttttgtgttgtgtttttttctgcatatatctgcaaataaattctgctactgatttgccatctagagctcccttctgtaaatatatagttactcgtttgaactcacactaagctcgag

SEQ ID NO: 42544 - DNA, 400 bp, Gossypium hirsutum
  Clone ID: LIB3196-043-P1-M1-B12
atgcggcgatggcggcggggatggtggcttctcggagactccgcgacctactgagccggcgattgacagcctccaactactcgggcctcagtattagccttcgcctcactggctcctctgcacaagaggaagccccagaccacagctatgagtcccttcgtgtgacatctgcgcagaaacacgttctgcatgtccagctcaaccggcccaacaagaggaatgccatgaacaaggccttctggagagagatggtagagtgcttcaacaagatttcgagagacgctgactgtcgagcggtggtgatctctggtgcaggaaaaatgttcactgcaggtattgacctgatggacctggcttcggacatcctgcagcccaaaggagatgatgtggcccggatcaa

SEQ ID NO: 42545 - DNA, 394 bp, Gossypium hirsutum
  Clone ID: LIB3196-043-P1-M1-B2
cccacgcgtccgggacatataatgctttcggattttgacctctctcttagatgtgctgtctctcctactctggtcaaatcctcgaactcgaccctggaatcaaaacattccttgtactgtgctcaacctgcatgcattgagccaacttgtgtggtgcagccggattgtatccaacctgcatgttttggaccacgttttttttcaagcaagccgaagaaagaaaagaagaacaaagtaaagatcgaaacgggccatcaagtgagtccgcttcctgagctcatagcagaacctaccaatgctcgatcgatgtccttcgtgggcactcatgaatacttggcaccggagatcattaaaggtgaagggcacggaagtgctgtagactggtggacatttg

SEQ ID NO: 42546 - DNA, 437 bp, Gossypium hirsutum
  Clone ID: LIB3196-043-P1-M1-B3
ggcttttacccgtccggaatatccgggatgttttgctgttttgtggatggcaaggccagctttgtgtgttgttctgagatgatccaaaccgtaaaaaagctttcgcagcaaggctgctgtggccagactgtctctctagattcctcctctctaggcagggcgtctctgaaaaaaaggcagcagccccagtcatgggcttatagacaaaatccccatcaccctgggacagaacacctgggggaaggggcagtttcagcagacttaaacgtccctgcctatccgctcttaagagagcagtggatctcccagcgcagtgtttgagctctgctaagggtcagactccctcctaaagtggtttcctgacccctgtgtatcctgactaggagacatctcccagtagggacacctactgacaggagagacacctcatacaggac

SEQ ID NO: 42547 - DNA, 372 bp, Gossypium hirsutum
  Clone ID: LIB3196-043-P1-M1-B6
atggtagccagaacagtcaagagaagaatgaggattgaggtactgtagtcccccacttatccttgtttttgctctctgtgatttcacttaccctcagtcaaccaacatgtgaaaatattaaatggaaaattccagagataaataaatcacttaagttttaaacactattcaccccatttcatctcatcatgtaggcattttatcatctcacatcatcacaaagagggtgagtacagaacagtgttttgatagagagaaagaaaaagacaccatattgacataactttcattacaacacattgttataatttgttttttagttttagttttgtttgtttgtttggttggttgtttgtttggtttttaacagac

SEQ ID NO: 42548 - DNA, 381 bp, Gossypium hirsutum
  Clone ID: LIB3196-043-P1-M1-B8
cggacgcgtgggcacaaattcacaatgttccatagcaaagtaaatgtgatatatttattcatcactcgaagcaaagcaaaaggaaaagtcggagggttttgaggagagtgaaaaatggttggtcctacttcatcggagagtgaagtcattctggaaataccattcgggtcaggaggttgccctagttcccaccattttatcggtggaaatcatgaagcttccaattatttatgtgaattgtaagtcaccccttttttttcatatgttttagcttggggattttaattcttttatgaaaaggcgttgaattttaccttctgcaattgaaatgtgtgaactttaggtattatgggggatgggcattacctaatatatactttt

SEQ ID NO: 42549 - DNA, 309 bp, Gossypium hirsutum
  Clone ID: LIB3196-043-P1-M1-C1
atgacaagatctcggctcccttgctcatgccccagagactcccttctcccttgccagctcatccgtccgtcgactcttctgtcttgctccaagccctgaagccgatcccccctttaaacttagaaaccaaagactaaactctaggggatcctgctgctttgctttccttcctcgctacttcctaaaaaacaacaaaaaagtttttgtgaatgctgcaagattgttgcattgtgtatactgagataatctgaggcatggagagaagattcaaggtgtgtgtgtgtgtgtgtgtgtgtgtgtgtgtatgta

SEQ ID NO: 42550 - DNA, 380 bp, Gossypium hirsutum
  Clone ID: LIB3196-043-P1-M1-C10
cttattttctttgaactgatctaggaatcaattgatcaagtcaattcaaaataagttcaactacaggttcaaacaattttgtagctcgattcacctagtccgtacctgttcgcgggtcaacagtttttttcctcactaaatcattacaataccctaaccgattcctgatccaatcagtctaactggtcgatttagtgtagtctagtttggatatcattgaatctttgaaaattttttatatttttttaatttttttaattttttaattttaaagagtttttattttttttaaatataatcttgtttaaaattattttttaaaaattataaattataaatttgttaggttttttatttaaaatatgaaaagatagtttgta

SEQ ID NO: 42551 - DNA, 339 bp, Gossypium hirsutum
  Clone ID: LIB3196-043-P1-M1-C11
tcgaaaccccttgctactgcaaccaaaacgggctcttttacgatgcttgccctattaatttccaggaggacttctatgagggggtatcaacgttgttaacttcataaaaacacataagtgttcattcgtcccaggctgcaattaaacgcatgaatgcgttgctcttgtgactgagtgaagacaacacgtacataatggcttgacgtgaccttgtgtaatcttagctcacactgttcctcacagtaggaagaagaactagacgaacatgaagatgaaaggagcagtcgacaattcacgatagtgagagcccagctatcaacaggtgacctatttgtagtc

SEQ ID NO: 42552 - DNA, 410 bp, Gossypium hirsutum
  Clone ID: LIB3196-043-P1-M1-C3
gggatgggggccatctcacccacggctacatgtctgacgtcaagcggatatcagccacgtccatcttcttcgagtctatgccctataagctcaatcccaaaactggcctcattgactatgaccagctggcactgactgctcgacttttccgaccgcggctcatcatagctggcaccagtgcctatgctcgcctcattgactatgcccgcatgagagaggtgtgtgatgaagtcaaagcacacctgctggcagacatggctcacatcagtggcctggtggctgccaaggtgattccctcgcctttcaagcacgcggacatcgtcaccaccactactcacaagactcttcgaggggccaggtcagggctcatcttttaccggaaaggggtgaaggctgtggaccccaagact

SEQ ID NO: 42553 - DNA, 401 bp, Gossypium hirsutum
  Clone ID: LIB3196-043-P1-M1-C5
atgtattattggagtggtttatcatttctgaaactaatcatgtcagaattgactttgaaagcattgctttttacagaaatatattaactttaggagtaatttctagttggattgtaatacgaaataatttaaaagagcttcgctcatatataggaaaattgcaaatggtcctactattaaattcttactgcttactgatttttttgaattaagagttgttatatgctagaatatgaggatgtgaatataaataagagaagaaaaaagaataaagtagattgagtctccaattttatgtaagcttcagaagaactggtttgtttacatacaagcttatagttgaaatatttttcaggaattacatgaatgacagtctttgaaccaatgtttttgttcgattt

SEQ ID NO: 42554 - DNA, 401 bp, Gossypium hirsutum
  Clone ID: LIB3196-043-P1-M1-C7
atggctgaaatacagattgtgaagttatcactctatttcttcattctccatttagcaaggtcatggaagatttggaggaaacattatttgaagaatttgaaaactattcctatgccctagactattactctctggagtctgatttggaggaaaaagtccagctgggagttgttcactgggtctccctggtgttatattgtttatcttttgtcctgggaattccaggaaatgccattgttatttggttcacggggttcaagtggaagaagacagtcagcactctgtggttcctcaatctagccattgcggatttcatctttcttctcttcctgcccctgtacatctcctatgtggtcatgaatttccactggccctttggcatctggctgtgcaaagccaat

SEQ ID NO: 42555 - DNA, 385 bp, Gossypium hirsutum
  Clone ID: LIB3196-043-P1-M1-C9
cccacgcgtccgaggaggaactgattaaggatgacacaatttccttccattaataaccaagttaagactgatactagcaaaaacgaggaagaggtggaggatccagaagaaggtgatgaggagttggaaccgaattctgactaaatcagaacaattattgtttttatttttgaacttttcattatttttaaagacttggatatttttaatttttaagcttagatacttttaattttttaggtatattttagtttgtactttttatgtaggaaccctgcaatttttgaaggcacttcaaatttcaagctaaatcagcaaggaggagatcgcccaacaaattccaagaaactttcaagcttatcgagtaatctatttcctttatttt

SEQ ID NO: 42556 - DNA, 359 bp, Gossypium hirsutum
  Clone ID: LIB3196-043-P1-M1-D10
tgatattgtaggttatgagttttcgattttgaaatgatagtaaggcctattggccgttgtgatgaatgtgaaagtgtttttttgtgatagggcctattagccgacgtgatgaatgtgaaagtgtttatgggggttaaggcctattggccgttgggttgattgggaaagggttatgtgtgataaggccaaatggtcgatgtgatgaatgtgaaagtgtatatgtgtgataaggccaaatggccgatgtgatgaatgtgaaagtgtatatgtgtgataaggcctaatagccgatgtgatgaatgtgaaagtgtatatatgtgataaggcctaatagccgatgtgatgaatgtgaaagtgta

SEQ ID NO: 42557 - DNA, 394 bp, Gossypium hirsutum
  Clone ID: LIB3196-043-P1-M1-D12
atcaagggcggtagaagaaagtctccatgctgaacagattacattatggagcccaggagcctgggaaagatgggccaggagagtgaagggggctttgaggagaggtcctgccagaaatatttgtccctgtccggggtgaagagtaagagggtaagggggccagggcctcagaagcggccatgccggtgatcaggggaacgccgacggttcccctctcggggacagtggctagtatggaacctcgggggtgacccgggaataggagtgttgagaagttaggttagaatgctgaggagtggtgcagagatcctgcaggcctgcctctctgctctgggatgaggcaagagggtgctgaaataactagagttctaagacatggcctcagtggccagca

SEQ ID NO: 42558 - DNA, 386 bp, Gossypium hirsutum
  Clone ID: LIB3196-043-P1-M1-D3
atatttttggtactatatttaatttgaatcgttcaagcctacactcaaaatagttcgtggtataagaatagcggagaaggtcattcgattgaaagtcaggaaagacaaggatctatctagtaaaaaacacatgtgcaatttcgataaagggtctattgctataaatatcacaaattaactgagtttttaaaatttttatttttcgctatataagaaaccgttttcgaactatattttttctaacattaactgcctttagtttagttgttgcatgaattgtttgaacatcactagggacaaatttggacagttgaaatgcagtgtgttttgttcgcatttgtgacttggttaatttttggtggtttcctatggacaaataatttttt

SEQ ID NO: 42559 - DNA, 362 bp, Gossypium hirsutum
  Clone ID: LIB3196-043-P1-M1-D4
cccacgcgtccgtttttatgttcatttatgtatttatttatatgcccatttttatgctttagtttatttatttatttatttgctatggtatatgcatgattgatttattttattattcgtttttgctcatttttttattcgcattatcatgtctattatcccattatgcatataaatatcatattttaaaaaaaaagaaaatatttctaattgagacaatatttagcgtttggaaattcgagaaaacatgccctaaggtgttgggtgtcgatttttctcgttcaaccaaatagcttaatatccttttcaaaaatttcaaaataaggcaatattttgcgtttggaaattcgaggaacgggccc

SEQ ID NO: 42560 - DNA, 377 bp, Gossypium hirsutum
  Clone ID: LIB3196-043-P1-M1-D5
gagattttggtattagattttgctgaggcacttcctctgggtctaggagttttggctattggatttgaaggaattttaaatgacagaatgaaaggtttctatagaagtacatacgagcacaatggtgagaagaagaatatggcagttacacagtttgagccagctgatgctaggcgatcctttccatgttgggatgaaccttctttcaaggctacgtttaagatcaccttagatgtgccatctgagctaatggccctctcaaacatgccagtcatcgaagagaaagttaatgggcctctggaaactgtttcttatcaagaatcaccaatcatgtccacttatttagtggcttacgttgttggtttgtttgattatgt

SEQ ID NO: 42561 - DNA, 404 bp, Gossypium hirsutum
  Clone ID: LIB3196-043-P1-M1-D6
atatcacctccagcgccaaagtggacatgacgttcgaggaggaggcacagctcctgcagttgaaggtgaagtgtctgaacaacctggcggcctcgcagctgaagctcgaccactaccgcgcggccctgcgctcctgcagccttgtgctggagcaccagccagataacatcaaggctctcttccgcaagggcaaggtgctggcccagcagggggagtacagtgaggccatccccatcctgagggcggccctgaagctggaacctttcaacaagacgatccacgcagaactctcgaagctggtgaagaagcatgcagcacagcggagcacagagactggcttgtaccggaaaatgctgggcaaccccagccggctgtctgccaagtgccctggcaagggtgcctgg

SEQ ID NO: 42562 - DNA, 400 bp, Gossypium hirsutum
  Clone ID: LIB3196-043-P1-M1-D9
atctggcatcgaaaagttaaaaatatatcaaatgaacaacctaacattacacctagaggacctagagaaacaagagaaaacgtatcccagagctagcagagcagaagacaagaaaaaaaaaaaaatcagagtggaactcaaggaaattgagttgtgaaaaaccatacaaaggtcaaagaatgctggagtaggttctctgaaagaataagttagacaaactgctagctagattaataaagggaaaaagaggaagatccaaataaacacaatcagaaatgacaaaggggatattaccactgaacccacaaaaatacaaaaattatcagagactactataaacaccctatgcacaccaactagaaaacctggaagaaatagataaatttctggaaacataaaa

SEQ ID NO: 42563 - DNA, 386 bp, Gossypium hirsutum
  Clone ID: LIB3196-043-P1-M1-E1
ccaaaaccgagcctagaccggggcaaggccaagcaatccgattaagcctactagtaaatactttttgtaaaccgaggtaagttatatgtaaataatacaactatattattaatgcatgtattcgattgttattgatttgatatagcatatatttctagaattggaactaagtatatgtatttatgattgagaaagtcgaaagatccagtaagaacccaaggaaacaaaccgcatattcatgccatgacatagggttatgtgagagccagtataataccatgtttgggacatggcatcggcattgagacgaaggctagtgtaagacgtgtctgggacatgcatcagttgcatcatgatagcctgggtaagacgtcgtctgggacatg

SEQ ID NO: 42564 - DNA, 140 bp, Gossypium hirsutum
  Clone ID: LIB3196-043-P1-M1-E12
gaggtccgggaaagtttctttggaggtccggcccggagcagccatgtcccactgccccaagcagcccggcacggtcgccgcgccgtcgggcgtcaaggctccgtgccagcatgggggcttctttgtggctgtcaaacaag

SEQ ID NO: 42565 - DNA, 156 bp, Gossypium hirsutum
  Clone ID: LIB3196-043-P1-M1-E6
atccccgccctcctcagcaccgacctggcccacttctcggaaaacccaatactctacctgctcctgcctcttatctttgtcaacaagtgttcgtttgggtgcaaagtggaactcgaggttctgaaggggctcatgcaagagcccccagcccatgct

SEQ ID NO: 42566 - DNA, 397 bp, Gossypium hirsutum
  Clone ID: LIB3196-043-P1-M1-E8
atcatccatctgcacagcaacgacatcttccaggtgggggagtgccggcgcgtgcagcagctggccttgagccccagcgcaggcctgctggttgtgctgtgtggccgcggccccagtgtgcgtctctttgccctggcggagctggagaacatagaggtagcaggtgccaagatccctgagtctcgaggctgccaggcactggcagctgggagcatcctgcaggcccgcaccccagtgctctgtgtagccgtcaagcgccaggtgctctgctaccagctgggcccgggccctgggccctggcagcgccgtatccgtgagctgcaggcacccgccactgtgcagagcctggagctgctgggcgaccggctatgtgtgggcgctgccggtggctttgcgc

SEQ ID NO: 42567 - DNA, 375 bp, Gossypium hirsutum
  Clone ID: LIB3196-043-P1-M1-F4
ggaagggtcgcgaaaaggcaagtagccggacccgtatgtcttggttcgggtcaggattctggttgcatcggggataaaaattggggttttgttgaggagagcaacagtgaggcgagaacgggaaggaaaggaagaagaagaagaagaagtgagggcgcggcttataagagttgatagagatcgtcgggcattgaggcaagccatgttccggcaacgctggttctctctgataataagctttggttcttctacactactagatagttcaccgatttattatttagaaatatcaaatcatatcaaatcatatcttttctttttaaaaatttgtattaatgtttatatcaagatttaaattcctgaaatttaaatctt

SEQ ID NO: 42568 - DNA, 388 bp, Gossypium hirsutum
  Clone ID: LIB3196-043-P1-M1-F7
taaggaggaaggttcttctcggagaagtgaaaccagaaaggcttattacaatgaccccagaggaaatggcaagtgaacaaaggcaacgtgaaattaatgaaattaaagaaaaagctttatttgattgcgagcgaggtgttgcaccaaaggcaacgacagatcaatttaagtgcggtcgttgtggtcaacgcaagaccacttactatcaaatgcagacaaggagtgcagatgaacctatgacaacctatgttacgtgtgtcaactgcaacaaccattggaaattctgttagtgaaatccagagatgtcgtgttgaccatcttggttgcttcactctgtttatgaggagtttgtggtcattaactttagaattcatctttcattcatatt

SEQ ID NO: 42569 - DNA, 403 bp, Gossypium hirsutum
  Clone ID: LIB3196-043-P1-M1-F8
attgaatacagagttcctgaactgaatgttcaaaatggagtgttaaagtcactttccttcttgtttgaatatattggtgaaatgggaaaagactacatttatgctgtaacaccggtacttgaagatgctttaatggatagagaccttgtacacagacagacggctagtgcagtggtgcagcacatgtcacttggggtttatggatttggttgtgaagattcgctgaatcacttgctgaactatgtatggcccaatgtgtttgagacatctcctcatgtaattcaggcagatatgggagccctagagggtctgagagttgctattggaccatgtagaatgttgcagcattgtttacagggtctgtttcacccagcccggaaagtcagagatgtatattggaaaa

SEQ ID NO: 42570 - DNA, 370 bp, Gossypium hirsutum
  Clone ID: LIB3196-043-P1-M1-G10
atctttttttctgaataaaggtcttatcactgtcacttggaaagagagttgctaaatgttgaattttaaattttcaagatggcaagctctattccatgtaagttgtttaatgatttaatagttcaaatcatattgtcagattgcaagtagtattaaagttatgacactttgtcagaaatattgtaatgcactatggtgactgagaaatggcagtgtacaaagaataccacttaattatttaagttctagaatttaaaaacaagggctagctttcattttagggtttgatctttccagagatcagggtaatatgggatatttcatttttaatggtaacacaacaatgaaaggtaaataccttggggaaatt

SEQ ID NO: 42571 - DNA, 331 bp, Gossypium hirsutum
  Clone ID: LIB3196-043-P1-M1-G12
tggtgatagcaaggctgaggccgtggccctgtaccagaccaaggtccagcagctccagatctcaattgaccaacatggggacaacctgaaaaacaccaaaaagtaaattcgaaagctcaacaagatgatccaaaagctgcgggcatagatcgagaacattaaaaaacaatggccaaatctttaagcattcgtggctgatgcaaaacaacgtggtgaaaatgcccttaaaaattcccacaacaaaggcattgagctggagactgccctgcaacaagccaaggaggaacttgcaccaatgcttcgtgagtaccaaaaacttataagtgtgaaa

SEQ ID NO: 42572 - DNA, 389 bp, Gossypium hirsutum
  Clone ID: LIB3196-043-P1-M1-G7
ataaaacttgggaaccaaaatggtggtttatccttgtatctctgcagtgtggattgaacagaaaattggaaatcatagtcaaagggcttctcttggttcgccactcacttatttgtaacttgacttctttttttctgcttaaaagtttcaattctcgtggtaataccagagtagaaggagagggtgactttacagaactgacagccattggggaggcagatgccggtgtggaagtgtgggcctgaaggtagggcctgtttgattttaaaaagtgtgcctgtcaagtgtatatgttgcttttctcaaacaatgattcagggatacaagtgggctcctctcgttcattaaaagaaaacgtgacatcttctaagaatctctgtgggaaaaag

SEQ ID NO: 42573 - DNA, 384 bp, Gossypium hirsutum
  Clone ID: LIB3196-043-P1-M1-G9
atcagttatgccagcacagccaccagctctgactccagcacaccctccagtggggccagcacagccaccagctctgactccagcacaacctccagtggggccagcacagccaccagctctgactccagcacaacctccagtggggccagcacagccaccagctctgactccagcacaacctccggtgggaccagcacagccaccagctctgactccagcacaacctccggtgggaccagcacagccaccagctctgagtccagcacaacctccggtgggaccagcacagccaccagctctgagtccagcacaaccttcggtgggaccagcacagccaccagctctgagtccagcacaaactccagtggggccagcacagccacc

SEQ ID NO: 42574 - DNA, 385 bp, Gossypium hirsutum
  Clone ID: LIB3196-043-P1-M1-H3
tactgaaaatgactttagtaagaatgtatgtttgacttaccattacctgatacagtttacttgcatgtttagaagagatgaaaatattttaccaaaaatcatgaattgaaaaataaattccgaaacattgcaaaattctacaaaaaagggcctgaagaaacaaaaccctttcatcctctacctaatttctttatttaaccttctggaaaaataacacctctgggtaccgaactcagttttagaggttgttagaagtggcagttaagatgagaaatagattacttcccaccttagatttacaccattaaagatgcttttaagaatctggttcaaccacctgaacattcttttcttgacatttacttattgtttacttctttacttt

SEQ ID NO: 42575 - DNA, 379 bp, Gossypium hirsutum
  Clone ID: LIB3196-043-P1-M1-H4
ctttgaggaaaccaaggagctcaaagatgcactggagaaggaaattttaaaggctaaggagcaatcttgtgtgagaaagagatcaatatctgctatgacaccgcttgtcaaagaagaggccgcttctttacccaattgtgttgaaatccccaccgatggaactgatgcgtgggaaattgattccaggcagctcaaaattgaacacaagattgcatctgggtcctattgcgatctatacagaggcacatattatagtcaagaagtggctattaaagtcctcaagcctgagcgggttacaagggaattgctgagagagttttctcaagaaggttttattattaagaaaattccgcctaagaaagatggtcaattcataggt

SEQ ID NO: 42576 - DNA, 336 bp, Gossypium hirsutum
  Clone ID: LIB3196-044-P1-M1-A1
atcccccctcatcttcatactcacccccccattcctcctctcaccttcagacccaccccaccctttattcccccctcacctacacccaacaccccccactctcggtctcacctccacacccaccccgcactcccccctcacttccacacccactcctccccttctcacctccacacccaccccccactttccccttacctgcacgcccaccccttacttcccccaacttacgtttcacctgcacaccccttaccccacttgttttgtgcacgtggctgtggagggactggctggctgttccaaaagcaaaccctcgtggttgtaactggcattgtc

SEQ ID NO: 42577 - DNA, 212 bp, Gossypium hirsutum
  unsure (1)..(212): unsure at all n locations
  Clone ID: LIB3196-044-P1-M1-A10
naaccaggggagaatggacactttaacatgtaatagaaaaaacatcaaaaaaaagaaccaaaatagccctgccgatccaaaccctcaaggcttacctactctggcattccaagttatagttctcttatatcggaccctataattaatcaattgtccgccaaatacaacttcctgaccgtaattttacttactaacccaattaaaactcctct

SEQ ID NO: 42578 - DNA, 345 bp, Gossypium hirsutum
  Clone ID: LIB3196-044-P1-M1-A3
ccatggaggctgcgtctggctcccgctctcacagggattgcagaacattgagctccataaagacaggaactgagcaagtgtgagcccaacgggcactgcgcgactatgtgcctggctgagggaaaataactaaacatgggcacaggagatcctaagaagccgcttggtaaactgtattgataaggagtggttgggcaaacttgactgatggagcacaagaagaagtacccagttgctttagtcaacttttcagagctttctaagaagtgctcacagaggcggtaggtaagagggcttataacatgctaacaaggtaattagacaattttcaattgaggatgctta

SEQ ID NO: 42579 - DNA, 346 bp, Gossypium hirsutum
  unsure (1)..(346): unsure at all n locations
  Clone ID: LIB3196-044-P1-M1-A9
ggcacgcgggggcaaanccggaggaggcgcaagcacaaagacaacccggacaggggaagggacaaaacgaggccgcgggcgaaaagcacgagaggaccagcaaagcaaccggcagcgagagcacgaggcagagccaccgagaagaaaaagacaccaaacacgcggcgacggccaggacccggagaaccngagagaaaaggacacgaagaaccgagggagcccgagaaggggagccaggaacaacagccacaggcaccgagacaaccacagaagggacacaagaacacacgagaacgggggccaacgaagcccgaaagggaaaaacccaagggcagagggcggaggc

SEQ ID NO: 42580 - DNA, 325 bp, Gossypium hirsutum
  Clone ID: LIB3196-044-P1-M1-B11
tcgcggacgcgtgggggggactcctaaggagacagtggcagaaccagtttccgtggggatcaagggaaccactgtacaaaccgttggaaccaaagaaacttcagagtcttttgaggcagcagtagaagcacccaaagaagaagttgtgaaggagagaagaagcaaaacccgctgtagtggagaaagttgtaacagaaactgatccagcagagaagactgggtgaataataaagcttttgtgatgaaaatgagggtgtcaatggggagattgttttaagaggctacagattgataagattgcatgttaagtcaactagtttttttt

SEQ ID NO: 42581 - DNA, 344 bp, Gossypium hirsutum
  Clone ID: LIB3196-044-P1-M1-B3
ccgaggagaagatacgggtagcttacgacaagaaatcccgtaggttgaaacgacttgatgaacggggtgctgaagctactaaagttgattcaacccggaatataatcaggagcctatctacaaagttacgaattgcaattcaagttgttgataagatatctgtaacaatcaataagatcagggacgatgaactatggccgctgctcaatgaactgattgatgggttaagcagaatgtggaaatgtatgctcaaatgccatcgaaatcagtatgaggtgatcagagaagccaaagctttaagttctattggatcaggcaaaatgctcagcgatgaccaccttaca

SEQ ID NO: 42582 - DNA, 387 bp, Gossypium hirsutum
  Clone ID: LIB3196-044-P1-M1-B4
atgtgaaatgttatctaccaaggaagctcattggagactcagtacccaaagtttttattgagggatggcacgtaggcatctgcctagaatgtatcaaaattccagactcccagaaagaaaataggtatacaacataaaccatattgtttgtataaacagtgtaggcagagtaagctacccttatcatttgaggaaagtttcttatcaatatagggaactgtttaccagctaaattcccaaatgccagccaaggaccacccttgtaaggaggtctttctaccctctggtaactctgctctgcacagatgatttttgcaggattaaattgaactatatgaatgccatttttataggtcagagttgatctgatatcagtaattctgtatt

SEQ ID NO: 42583 - DNA, 362 bp, Gossypium hirsutum
  Clone ID: LIB3196-044-P1-M1-B9
gtttgtcttatgtatagtgagttacctgaaagactacacaatagttcaagtttcaatgaggaggtggactctcgagctagtctaatgctccattctagggaagtctagtaacctcctatcttttgttttaaacacattggggataatgtgtagtctgagtgtggcggtgcacataagttatatatgtgttatttatcttacttttatgtttggttgagcatttattttaagttttatgccttttggaaaaaattttaaaatttcaaaagtattattcattttttgttcttattttttcaagaatctgatgttccttaggagcacatttctgtgacagcatagtgcttgaacatgaagttatt

SEQ ID NO: 42584 - DNA, 357 bp, Gossypium hirsutum
  Clone ID: LIB3196-044-P1-M1-C2
atggctcccccgtccgcttcaccacaactcccccgggagcctgctctccagcaggccctgagtaagataaatgaggtaccccggagaggctcccttcttcagggagatcagatggcatcagcagccatcatagaagcccaaatcttaggaagggaaggacctgggggtggcaggtgccaaagtgtgaacacggctttgagagactgataggttttccgcagatagttctgggatgggggagggctgggtgggaggcccctgtgctctagggtgggttctataggtttcctagaccctgctaactttcaagcggcatggattcgaggccatctctctgcgaaaggcaagatggctccc

SEQ ID NO: 42585 - DNA, 268 bp, Gossypium hirsutum
  Clone ID: LIB3196-044-P1-M1-C3
atcgctgccatgcgtagttttgcacatctccaactgaaaagagtgtctaagggagcgcagggtgacaccaataaagtgcccctgagaggcccccctgttcacatacatgacccagtttagctagccctcatatacaccctgatcacacgctgggaacgaccttcttgccggctcaggcaaagactgaacacatggttaccgagactcataactgtctcgccaatagttatttgatggccaccggctagatagggtactctttggcctt

SEQ ID NO: 42586 - DNA, 333 bp, Gossypium hirsutum
  Clone ID: LIB3196-044-P1-M1-C9
cccacgggtccgaaaaaagggaggtgggtacttgaacatatgtagtagtgtatcatgcataagattggttttgacttggttttaatgtcttggattggttggtgcatgtgtgttggaacatttatgtaggtggaaaacaagttttggtgagaaataaggcttagaaatagctttattttgtgcacacaggtagagacacgggtgtgtgtcttagccgtgtgtgacacacggccatgcgctcgggcgtgtggtttagtaatgtgttcactgcatcttaaaaattaagaattagagtggtcaaaattaatcacacgggcatgttggtagctttgt

SEQ ID NO: 42587 - DNA, 372 bp, Gossypium hirsutum
  Clone ID: LIB3196-044-P1-M1-D1
atgccctctcctctggggcctcggcttcccggaggtccccttctccagtgcttccctggagaggccagctgtgtcgagtcctctgtgcctgccctggcgttctcacagcctcccccttcccttcagcaggcagctctgtttgccttacccgtccggaaggcttgccctcggcgctctgcctgcccctgctgctggctcatcacaatctgcagggcattgaccctttgctttccctttctgctccctctctttccatctgtttggctttttccctcagggaactgggtctggaaggcactgggaagctcatcagagaaaatgggtgttgggcctgcgtactccggtcggaggggacggacaggcacccctccc

SEQ ID NO: 42588 - DNA, 364 bp, Gossypium hirsutum
  Clone ID: LIB3196-044-P1-M1-D10
cccaagggtccatgctatcagaggtggccctctggctgctacaatacttcacgagatgagggaccaatttatggaacgagagcaggaacaagcttcagacaggctcccttgaaacatagccctgtgatatgtcattcacagggctgatcaggacacgttcgagagaaagcgaatgcgttggcagctctgtgcggggccgagacatgacttgctactcatagtctatcgactccagactttgagtgggcacttcgtcttgcatcttatgtttcatagcttgaggccttggctgcgccctgcttacttagcgcggcgtcttgccctcgtatttaagaccaaccggttttagccggatgctggcaat

SEQ ID NO: 42589 - DNA, 369 bp, Gossypium hirsutum
  Clone ID: LIB3196-044-P1-M1-D2
ggaaaatcaataagtaaacagtctcaaatatgagaatgggtgattagcttgcttcagtaatcataaccaactattgctttagggcttcttgttcaatcaactagttgttaccctagcaggatcttctgatcttccactagaatactagtcatcaagaactacttatctatcgacctcacaatttagaccagtttggggctaaggtgatcatggataggccataccaattttgggttaattcccacattaatgacttcctagggtcatcaagcctaaggtttgtgttcttcctctcccaaacaactgatccattaatagaaccttacaaaatagttaatttatcatacctcgactcactaatcacccacc

SEQ ID NO: 42590 - DNA, 334 bp, Gossypium hirsutum
  Clone ID: LIB3196-044-P1-M1-D4
atcgccctgtcagccgccacggccgccgccgtcgtcagagtcgccatgcagatcccgcgcgccgcgctgctcccactgctgctactgctgctgctggcggcgcccgcctcggcgcagctgtcccgggccggccgctcggcgcctttggccaccgggtgccccgagcgctgcgagccggcgcgctgcccgccgcagccggagcactgcgagggcggccgggcccgggacgcgtgcggctgctgcgaagtgtgcggcgcgccggagggcgccgcgtgcggcctgcatgagggcccgtgcggcgaggggctgcagtgcgtggtgcccttcggggtgc

SEQ ID NO: 42591 - DNA, 316 bp, Gossypium hirsutum
  Clone ID: LIB3196-044-P1-M1-D7
atgtcaaagctcatcccagatgtcctaatgtttctagtaaatgtttctgcacaattctaaaagataaggatgtttttaaacccagccccgacactatcatacctcacaagattcatgctaattcctcagtttcttctagtcccaagtccatgctcaagtgtcccccgctgtccaggcaccctattcaggggtcctccatgtttcacagtgagaagggaccctcagagttgggcaccccaggcaggctgattggagggggatttggaaagaaaggctttgccagggtgtgagggtacaggtctcaccacactctgtt

SEQ ID NO: 42592 - DNA, 263 bp, Gossypium hirsutum
  Clone ID: LIB3196-044-P1-M1-D9
atctgacagtgaagtgacagggccctcacttagggacttttagtctgtcggaggagttagaatacacctgagggtccaaagagagacacagggagagaagagcagatgacataggtggaagaagtcttcagaccaaggaaatggaggaagcagagctggaaaagcttcctggaagagaatcaatagagaactacacccacagcaggtgtttatagagcgtctacttccagcatgacttggatacaggcacaggccttaggaaa

SEQ ID NO: 42593 - DNA, 345 bp, Gossypium hirsutum
  Clone ID: LIB3196-044-P1-M1-E11
cttaaattttcacacaaataagttactttggctggacgcttatatatcttatttagcataacttcattcatctttcgaatccaaatgacattataacaagtatgtttacattcatatacacaaactcataaatcaaaactcaacatcacattcatatgcacatatatattgccgaacatacttttcatatttactcacattcttcatttacatcttacatgacttgtaataaatattaggaaacttacttaacatatctgaattaagtcataagctaaattcatacctggtcgatttaagatattttacacatcttgcacacgtttcaccttcccctggttgaac

SEQ ID NO: 42594 - DNA, 315 bp, Gossypium hirsutum
  Clone ID: LIB3196-044-P1-M1-E2
cacttttggtcggttggggggctaaaccagggttatggggcctccacaaccgggggttaaaccaacccacagggttttgaaacttgacgggggggccaccttgcccaattggccccaaacagaatggaactttccttttttaaaatggccgggattccaaaccggttaaaaaggattggccggggaaaaaggcgattaccttggaaacaattttttaagagttttttttttttaaatcccccaattttaccaaaaaaaagggatccttattttccgacaatttacccaacaaaaaaaattccaggcccctctttt

SEQ ID NO: 42595 - DNA, 178 bp, Gossypium hirsutum
  Clone ID: LIB3196-044-P1-M1-E3
agccttccgatgtttggtgggggtggcaatggaaaggaatataaacccggcctttacatttgtttcgaaggttggttgaccaacaacctgtttggccccttgggctaggggggccaccgttaatttgggcttggtgaaggtcctatgaacaccggccctttttttaattgttcacaaa

SEQ ID NO: 42596 - DNA, 221 bp, Gossypium hirsutum
  Clone ID: LIB3196-044-P1-M1-F7
cgttgaatatgtgggctttcttcttgttcagagaaggaaggaaaagggaccatagcgtcggcgtttttggatcttcttcttcttcttcttcttccctctctctctctctcttactctgaagctcctctttggtctttcatttactcagtattggaaaaaatggcccgccgtgaggaaattcaacccctcgtctggggtaatgggaactggaatgggggaag

SEQ ID NO: 42597 - DNA, 278 bp, Gossypium hirsutum
  unsure (1)..(278): unsure at all n locations
  Clone ID: LIB3196-044-P1-M1-F8
taaaaaaaggccaagcaggnacgccagcaaacacacgaccaaaacccccggaacgacccacgcacccaggcagaccaaaaaagaggaaaagggaggccgaaaaagggcaagcganccaaagaagaaggncaaaagccaaaggagcaaaggccgaaagagcgcgaccagaaacccgacgcaccaagcaaaaggcaacccacagaaccgaggcaacaaaacaaccggaagagggcacggggcaaagaaccaaaacaggggaccaacaacaagccaagaac

SEQ ID NO: 42598 - DNA, 364 bp, Gossypium hirsutum
  Clone ID: LIB3196-044-P1-M1-G1
gtagaaattagggcgcaactggccgaactagaggcttcaaaaatgcaaaccacagaagcgcgattggtatgtaatgctgttgatgaacgtaccaatatataggcttctgaagtcatcgtcttggaggagaaggcactcatattaatggtcgaatgagctaaaacttggagaggcatactggagaacacagaggctgaaatattttatttcaagtattcctaagaaaattgctaacctagagaaagagcgttaggatattctatcaacccctgtagcacttcaagaagagaagaaggtgctttagtctcagccaccaaaagcttttcgctggagacagcctattgatgctattaataatcctgct

SEQ ID NO: 42599 - DNA, 378 bp, Gossypium hirsutum
  Clone ID: LIB3196-044-P1-M1-G5
atgccgatcccgccggaagcgccaggacaatggggacccgggacgacgagtacgactacctattcaaagtggtgctcatcggggactcgggcgtgggcaagagcaacctgctgtcgcgcttcacccgcaacgagttcaacctggagagcaagagcaccatcggcgtggagttcgccacccgcagcatccaggtggacggcaagaccatcaaggcgcagatctgggacaccgtcggccaggagcgctaccgcgccatcaccttcgcgtactaccgaggcgcattgggcgccctgctggtgtatgacatcgccaagcacctgacctatgagaacgtggagcgctggctgaaagagcttctggaccacgcagacagcaaca

SEQ ID NO: 42600 - DNA, 287 bp, Gossypium hirsutum
  Clone ID: LIB3196-044-P1-M1-G6
atgccttttctgtgtttggccaggtagagagggctgtagtcattgtggatgatcgaggaaggccctcaagaaaaggcattgttgagttctcagggaagccagctgctcggaaagctctggacagatgcagtgaaggctccttcctgctaaccacatttactcgtcctgtgactgtggagcccatggaccagatagatgatgaaaagggacttccaaagaagctgtttataaaaaaccagcagattcacaaggaacgagagcagccacccagatttgtacaacctggc

SEQ ID NO: 42601 - DNA, 363 bp, Gossypium hirsutum
  Clone ID: LIB3196-044-P1-M1-G7
atacggaaatatctgcgcagtgtaggagatggagaaactgtagagtttgatgtggttgaaggagagaagggtgcagaagctgccaatgtgactggcccggatggagttcctgtggaagggagtcgttacgctgctgatcggcgccgttacagacgtggctactatggaaggcgccgtggccctccccggaatgctggtgagattggagagatgaaggatggagtcccagagggagcacagcttcaaggaccggttcatcgaaatccaacttaccgcccaaggtaccgtagcagaggaccttctcgcccacgacctgccccagcagttggagaggctgaagataaagaaaatcagcaagccttc

SEQ ID NO: 42602 - DNA, 359 bp, Gossypium hirsutum
  Clone ID: LIB3196-044-P1-M1-G8
atcgagatgcaggtcatggcgccccgaaccctgctcctgctgctcttgggggccctggccctgaccgagacctgggccgtctcccactccatgaggtatttcagcactgcagtgtcccggcccggccgccgggaaccctggtatctcgaagtcggctacgtggacgacacgcagttcgtgtggttcgacagcgacaccgagagtccgaggatggagccgcgggcgccctgggtggagcaagaggggccggagtatttggacccggacacacagagagccaaggggcaacgccaaactgagcgagggagcctgagggccctgctccgctactacaaccagagcgagggggggtctcacac

SEQ ID NO: 42603 - DNA, 366 bp, Gossypium hirsutum
  Clone ID: LIB3196-044-P1-M1-H10
ttggaagagaccttgacaacatcaaatggttgttcatcttctatgaatttgagctctaggaacttagtttatcatgatgaagttgattttgatagtcatagagcaactgcagatgctagaaacgataattcacctaaattttcacaaccagagcttaggaaactagatattcctgatgcatcaactcttgggaatgattatatctgctgtgcatctatacctggttcaagttttaagaacatccaacaatcttcctctatgtcttttgtgattgatccaaatgctaggaaccttcctattttgccaaataaagtggaatcatactccaacactttgcctagcgatttattggcagcggctattcaa

SEQ ID NO: 42604 - DNA, 352 bp, Gossypium hirsutum
  Clone ID: LIB3196-044-P1-M1-H4
atgttaatcagaaggttagacacagttgaggagaaattaatgaactagaatagaagatagatgtgaaggaaacattcagaatccaacatagccagacatgtaaacgtaaatgccaaatgtgtcagaagaaaggtgggaatctggagggtaaagtgatttcttacatacctaaccagaactcttgaaggaatgggaaaaagtagggcagagacagactcttttttctgtgtttaaaaaaaaaaaattcaggtggataaaagacctaaggagaaaggcacactacaataaggttttagaaaaagtaaaggagaattgtctttatgatcttggttaagggaaggagttttgaaga

SEQ ID NO: 42605 - DNA, 229 bp, Gossypium hirsutum
  Clone ID: LIB3196-044-P1-M1-H7
aatcccaaatttgtagtttgcgttaagccaacggaatgggaaagggcatagaggtttgtatgagacaatttatggaccaggtctggaagtagagatagcacttttgctcacattctgttggctagaacaatcacaagtccttgcctaactgctgggaaatagtttagctgtgagaccaggaacaagaggaaaagatttggtgatcagctagctgtctgttccatggcca

SEQ ID NO: 42606 - DNA, 363 bp, Gossypium hirsutum
  Clone ID: LIB3196-044-P1-M1-H8
cggacgcgtgggcactagctcatcttcgtataatcaatttttagttttatctctcagcaactttcaaataatggcttcttttgatgttgcttcttggtttatcgttttgattgtagcattttgttagtatatacaataattctctactttgatattcaatcattacatcatatgtaacaccccaaacctagcctagacgctacggtcagatttggagaagctaccataatacactttgaaaactcaaaaatcatttgggcttgtaaaaataacgcaagcttttgatgaaaaaaatttcaatttatttttagtgaaaatatctttcttatttaatttggtaattttggtgactgaatttatatt

SEQ ID NO: 42607 - DNA, 358 bp, Gossypium hirsutum
  Clone ID: LIB3196-045-P1-M1-A1
atctctatctccgggcaggctcacccgagatcccccccacaccgaactccctctgcacgctcggcccagcggtgttgccccgggagcggacgtttctgtagctatttgagcacaccttgacgtcggcggagggagctggacagggccagcggcgaaggaggcaggccccgcgcggggaatctcggaagccctgcggtgcatcatgaagttccagtacaaggaggaccatccctttgagtatcggaaaaaggaaggagaaaagatccggaagaaatatccggacagggtccccgtgattgtagagaaggctccaaaagccagggtgcctgatctggacaagaggaaagtcctagtgccc

SEQ ID NO: 42608 - DNA, 274 bp, Gossypium hirsutum
  Clone ID: LIB3196-045-P1-M1-A11
tcggaccattggaatcatgcttgacaccaaaggtcctgagggtaggagtggcgacttgcgcttaaccaattacattaacaaccgggcaggaattcacttttacaattcggagaggggttgggacacctgattgtgtgagagtgaactatgaggagattgtgaatgaggtagaaaagggtgacacgctttttgttgatggggggatgatgtcattagaggggaagtctaatacagaggattcagagaagtgtgaagtagttgatggtggtgagct

SEQ ID NO: 42609 - DNA, 296 bp, Gossypium hirsutum
  Clone ID: LIB3196-045-P1-M1-A12
atgttctgccaggtatatactgctctttctctctgggttttttccccttttcttggttgattgctataaaattaacacagcttctgttatcagaaatggccccttttatccttgcataaagatataaaaaatgttaaaaattatccctcagggataagaaaactgccttggaaattcacacacagtgagatcccacactcacatttatgatcaagggaaatttcacccttaaaacctgaagggatctcatatttttagggggtcattgagcccatggataaattaacccattcccc

SEQ ID NO: 42610 - DNA, 362 bp, Gossypium hirsutum
  Clone ID: LIB3196-045-P1-M1-A2
cagcttttctcatctgtcacaatcgctccaccttgagagtccttttgcatccaactcgattaccggttttggataagagagaggttgacaatactgtctttgatggagatggagaaaaagaataagttaatcatactgaaaagccccttagttttccctatgattatgatcttaaacttatgtgccaggattataaagcagccttttcaagtatcacgaaactcaaaccgtgaccgtatagccacccttaattggatcctgagttatacttcaacccgtgaccgcatgaccactatcaactaggagccttaattatacttcaactcgtgaccgtataaccaccatgaatttggagcctgagt

SEQ ID NO: 42611 - DNA, 433 bp, Gossypium hirsutum
  Clone ID: LIB3196-045-P1-M1-A8
cacaatataaggaaagctgatgcgcctgcaggctcttgcccggacgtactggccggaatcactcgtggagaaggaccacgtgaccaagcctactgccatggcccagggccgagtggctcacctcattgagtggaagggctggagcaagccgagtgactcgcctgctgccctggaatcagccttttcctcctattcggacctcagcgagggcgaacaagaggctcgctttgcagcaggagtggctgagcagtttgccatcgcggaagccaaactccgagcgtggtcttctgtggatggcgaggactccactgatgactcctatgatgaggactttgctgggggaatggacacagacatggctgtgcagctgcccctggggccccaccttcaggacctgttcaacggccatcggttctcccgggctgtgcgccag

SEQ ID NO: 42612 - DNA, 376 bp, Gossypium hirsutum
  Clone ID: LIB3196-045-P1-M1-A9
atggactttgacgctaggcaaatttgtgaaggagcaaaagttcgtttgggggttgtttcatttaccccttactctttgccctccctagtcatgtttgtcttcttttctttgtttataagaaatggactgatactcatagtcaggaataaataaatagttatggattaaaataatattcttgagagtattttcatctttgtcagggaacaaacatggttatttgtacttgagttcttgtcctaccatcatcactggaaaaacatctctgggtagtcactgtctccccaaactggactcaggatggaacttttgaagcagtgttacctaccccaaacaacttaaaccccgaagtgtatgaatatttgattattacttt

SEQ ID NO: 42613 - DNA, 127 bp, Gossypium hirsutum
  Clone ID: LIB3196-045-P1-M1-B2
gataaatgtataatgagcaagacgttgaggactccatagctgacagctttattgaaccatctgttcaacacgaggagatagatgctggccgctctgtttttaatgcaataaacgtactttgtcatgg

SEQ ID NO: 42614 - DNA, 296 bp, Gossypium hirsutum
  Clone ID: LIB3196-045-P1-M1-B3
atactgcctctcaaatctgccaccacttatcagcagatggcctttgcccctgaagatgtttcagactggctctaagatgggggatcttgtacaagaagagaatggtgctgacactgaactccgagttagcagacctggattttatgcacagtgctattgttagctatataaccttgggccctctccaccacggggattcattttatgatggacaacttgagaaaatgcagttaaatcacttgcagtggtgggtctcaccctaagagtctcatgttgcataaagtatcagccttaaa

SEQ ID NO: 42615 - DNA, 366 bp, Gossypium hirsutum
  Clone ID: LIB3196-045-P1-M1-B4
atggtgccactgccggcaggagcccgaggagagcctgggccgcttcctggagggcctgggtgccgtcttcccccatgagccctggctgcagctgtgccgggagagaggcggcacgttctggagctgcgaggtcacccaccggcaagcgcccgctgcccccagtgcccctggtgaggaccaggtcatgctcatcttctatgaccagcgccaggtgctgctgtcacagctacacccgcccaccgtcctgcccgaccgccaggctggagccacccctgccagcacggggggcctggctgtggtctttgacacagtggcacgcagtgaggtcctcttccgcagcgaccgctttgatgagggccccgtgcg

SEQ ID NO: 42616 - DNA, 378 bp, Gossypium hirsutum
  Clone ID: LIB3196-045-P1-M1-B6
ctagagggaacgctggagcgcgcgcaggccccgccccggtatccccggtgcggcccaatcgtccgtacactcgttcgcttcatccagcgatgtaaaattctcatcctaagctgtggaaagggagaaaagaaagatgggctttatttttcatctgcttactgagtaatcctaacaagggggggagcagcccccatgagcatgggtgtgacatgacaaagacatattgtcactgtgcatgagtgactaatcacaactgtgcagatggaagaggagaactaagggtgcctattctaaagacatgagcgatttcaaaaacaatgctttctctctataataggataactgaaggtcgcacttagctgatagatgaaggagact

SEQ ID NO: 42617 - DNA, 293 bp, Gossypium hirsutum
  Clone ID: LIB3196-045-P1-M1-B7
atgggatcaccccaccctggcccacaagatatggcacattagctgtgggtgcggcgttcactcccgcgttcggatccttttgtacaactatgtaaacccggttggtgaaaaaaggcggatgggcctgttcaatgcccgattagtggccggcgaagactcccgggacccccttcccttagatcccggaccccttgaggttcttcgtagatacggggggccaaccaccaaacccttacaaaccgggtctggggggccagaacccgccccgcaatgggtaccaggggcagatcctt

SEQ ID NO: 42618 - DNA, 288 bp, Gossypium hirsutum
  Clone ID: LIB3196-045-P1-M1-B8
cggacgcgtgggaaatcagtatccatagtaggatacgcgatgcacaatggtggttggtctaccgtagcttcggccagttgcttaatcggttgggccattgggtgatttgctaaattcgagtttttggtaaccttagcggtaagcacttcttttggtgaatcgacttttactttttcactttcaaggggttgagtaggggtttcggttacccttagactcaactgtggggtcaacttcgatttttgggggggggttactctgagtcccaagcactttggatggcttttt

SEQ ID NO: 42619 - DNA, 370 bp, Gossypium hirsutum
  Clone ID: LIB3196-045-P1-M1-C1
atcgcggggcgcaccgcgcggagccggccggagcgcgaggccggcagcggcgggagagcggcccgggtggcctcgtagcggagccccgcatcgccgagtggcggccggagccgcggaaaagattctcagtgctgattttgagatgatgggcttgggaaacgggcgtcgcagcatgaagtcgccgccgctcgtgctggccgccctggtggcctgcatcatcgtcttgggcttcaattactggattgcgagctcccggagcgtggatctccaggtgttttgttttgtttattatgtttattttatgtttatgttttggttattttgttatggggtcccgggcgtttgttgttcattgccagccagggcattt

SEQ ID NO: 42620 - DNA, 334 bp, Gossypium hirsutum
  Clone ID: LIB3196-045-P1-M1-C6
attgcaggccgaggccgacagcacaagcgaggggctggaggacgcagtccacagccgtggtgccagaccccctgcggcaggcccgggtgaggatggggacgaggacgaggaggatacagccccagagtccgcgctggacacatccctggacaagtccttctccgaggatgcagtgaccgactcctcggggtcgggcacactccccagggcccggggccgggcctcaaaggggactggcaagcgacggaagaagcgtccctccaggagccaggaagaggttccccctgattctgatgataataaaacaaagaaactgtgtgtgatccagtaaggc

SEQ ID NO: 42621 - DNA, 363 bp, Gossypium hirsutum
  Clone ID: LIB3196-045-P1-M1-C7
cccacgcgtccggaagagagtaaggaccgtagaggaggataaatcaaatatcagtaatctagtcaaggaagtaaaagaaaggatttgtaggtttgaaaaaaatagaatttcgaaacgtaccttagaaagctaatgaagtttggcagaggaaggtaggcgttatgaaaaccccaaatattggatagaagacgctctgaagagagtgaaagaactattaaatcaagattgacatggactacaatgagagggatgaagaatgaggttactgagaccgaaagaactatgactatttggacttcgatgaactcagattgtcatagagggatcgagccgtaaacggaagcatacccaagatcaacagga

SEQ ID NO: 42622 - DNA, 360 bp, Gossypium hirsutum
  Clone ID: LIB3196-045-P1-M1-C8
cggacgcgtgggctagccatggttgcctctcgatcctcctcgatatcagctcgaatcatcgctatctccatctccttataataatcttcaacacttctatttccttgagtaaggttttgaagtcgttgataaagatctcgatggtaggatgatggaataaatcttttccgcatgactggtttcatttctccccaaggagagatgggtctttcacaatttcatcgtcgacttgttacaagctggtcccactacactatggcatatagtcagaaaactcaattgccgcgagtttcacctttttactctccgaatagttgtggcaatcaaaaacaagctcaatcttcttttcccactccaaat

SEQ ID NO: 42623 - DNA, 375 bp, Gossypium hirsutum
  Clone ID: LIB3196-045-P1-M1-D3
atggaagagaagaaatttgatgaagccctgaagttgagaggccggagcttcatgaacaactgggaggtatacaagcttctagctcatgtcagacccccggtatctaagagtggttcgcacacagtggctgtgatgaatgtgggggctccggctgcaggcatgaatgctgctgttcgctccactgtgaggattggacttatccagggcaaccgagtgctcgttgtccatgatggtttcgagggcctggccaaggggcagatagaggaagctggctggagctatgttgggggctggactggccaaggtggctctaaacttgggactaaaaggactctacccaagaagagctttgaacagatcagtgccaatataact

SEQ ID NO: 42624 - DNA, 378 bp, Gossypium hirsutum
  Clone ID: LIB3196-045-P1-M1-D4
atagaatatatcctggaagaagacaatagttacccgtttcctaaaactggttccagaccttttggccattgtgcagcgtaagaaaaaggaaggggaagaagaacaagcaatcaacagacagacagcattgtataccttaaagcttttatgcaagaattttggtgcagaaaatccagatccttttgtcccagtgctgagcactgctgtgaaactgattgctccagagagaaaggaggagaagaatgtcttgggaagcgcgctgctgtgtgtagcagaggtgacctccaccctgcaggcgctggccgtcccccagcttcccagcctgatgccatcgttgctgacaacaatgaagaacaccagcgagctggtctccagcga

SEQ ID NO: 42625 - DNA, 370 bp, Gossypium hirsutum
  Clone ID: LIB3196-045-P1-M1-D6
atcgcaccttcagcagccgcctgatcctggagaaacatgtccaggtccggcatggcttgcagcttggggcccagtcccctggccgggggaccactttggctcggggttccagtgccagagcccaggggccaggtcggaaacgccgccagtcttctgactcttgcagtgaggagcctgacagcacgacaccgccagccaagtcccccaggggcggacctggatctggaggccatggccccctgcgctaccggagcagcggctccacagaacagagcctcatggtggggttgagggtggaggatggtgcccagcagtgcctcgactgtggcttgtgctttgcctcccctggctccctgagccggcaccgttt

SEQ ID NO: 42626 - DNA, 362 bp, Gossypium hirsutum
  Clone ID: LIB3196-045-P1-M1-D7
cccacgcgtccgctgaatcttatgtccaaaggggagatcaagcttcaattataggaggagctatcaatttcgtgaaggagcttgagcactgtgttcaattgttaagtgctaagaaagaaacgaaggaaagaccaaatgggagtagtagtggctgttcatcgccttttggtgagttcttcacattcccacagtactcaacgagctcgactcggggtgataacaattccatccccatgaatgagtcaatggttgggacccgatctgccatagctgacatagaagttaccatggtggagagccatgcaaacctcaaaataaggtcgaaaaagggaccagcacagctcttgaaactggtttcaggg

SEQ ID NO: 42627 - DNA, 321 bp, Gossypium hirsutum
  Clone ID: LIB3196-045-P1-M1-E10
attaaatcggatcagatgggataccaattcaaagaaaaggattgaattagttgactcaagaccaagtaaaaagttggttgaattatatttttaatatatatattttattttttatgattttttattaattatttaatctcaccaatcagattcgttggactggcgaactgacaacctaactagaggtgatcatgggccgggccgggtcaggttcgggccgggcccatataaatttttaggcccatctactaggctcgggcccggcccggccagaaatataggcctaaaattttgtccaagccctgcccgtaatatatattc

SEQ ID NO: 42628 - DNA, 382 bp, Gossypium hirsutum
  Clone ID: LIB3196-045-P1-M1-E11
atggcaatgtgaatccacttatgttgtcaaccatctcgggagcacctgcccaaagccttctggggcaaggatggtggatggttgggagaaatccagacattggcagctggcagcaatgagtcagacattgcccataaaggtgttttgtttgatttgcttaagctttatacaattattttttaagttgcagccaacacataaaattagaaaattccacaaaacattccagatttctggttgttctttaaaaatggaaggatcaggccacactgtcttcatagtcccactgggccacagtggcccggagccaacagctgctttctttgtagacctggcacagatgctctggtccctgcagtttctgccatccactgttattccc

SEQ ID NO: 42629 - DNA, 386 bp, Gossypium hirsutum
  Clone ID: LIB3196-045-P1-M1-E4
atatttctttctcatgcctcagtggcatcagttagaataaggaatagagaatttcatttttgagaaataattttacagtatgttactgttcagggatatggcagacctgggatagagaactgaacccttgtgggaagggatgagcagcatatagtataaggttagttcattcttggggaggcaggtcctgatgacagagaggggagggtacctgatgaaaacttcgctcaattaaaaattgtgtctgtggtttatctttggatctagaagaggaagagaagttattttttcttttattttatgctcaattacagaacttacaagactcagcactcagtgtgtgtggtgaatactgtggccttaacatttgggttaaggggacatta

SEQ ID NO: 42630 - DNA, 385 bp, Gossypium hirsutum
  Clone ID: LIB3196-045-P1-M1-E5
attcagtgaggactagctagggttctccaaggtgcaatgccgatgcagggccctcatgtacccctacccctgcctgtgatggggtgttctgaggagctttggcatttgctggaagcacagcgagttccaaatgagaggaagcttgtgtggcttgagagcctttggggccttggctgccagagcacgaggcaggccaggacatggagagcccaggccctgtctccagggggccagatggggccttgcctgaaaggctgatccccttgattgctggaggtgtgtgggtggcaaccagggctgggcagggcttaaggtgtgtggaccaaacccctctagggttggcaaagctgcctgtcaagcctccaggtgggggcccttggacgca

SEQ ID NO: 42631 - DNA, 281 bp, Gossypium hirsutum
  Clone ID: LIB3196-045-P1-M1-E9
ccagatttgtgagcacttccacatctcatcgccacccccacctcgtgaaccatctaggatgaagatgtttaaaaaattttatttatctattttatgtttttacttttcttttattttaagactactttttatttttctttcaccttatttttattaagttttataattgttattttacaatttttaattccgactaattcattatgagtacttaatcttccttatatatatttcttaaaagagttcctgattctatcatagttataaagagctctaaagct

SEQ ID NO: 42632 - DNA, 388 bp, Gossypium hirsutum
  Clone ID: LIB3196-045-P1-M1-F10
atgagaaacgaaagaatcccataggaaggataaatctggctaattgtaccagtcatcagatagaaccagccaacagagaattttgtgcaagacgcaacacttttgaattaattactgtccgaccacaaagagaagatgaccgagagactcttgtcagccaatgcagggatacactctgtgtcaccaagaactggctgtctgcagatactaaagaagagcgggatctctggatgcaaaaactcaatcaagttcttgttgatattcgcctctggcagcctgatgcttgctacaaacctattggaaagccttaaactgggaaatttccatgctatctagaggttttttgatgtcatcttaagaaacacacttaagagcatcagatttactg

SEQ ID NO: 42633 - DNA, 390 bp, Gossypium hirsutum
  Clone ID: LIB3196-045-P1-M1-F4
atcgccgacgccgtccccattcagcacgtgagcccgcccgcgcccaccatggccacagttcaacagctggaaggaagatggcgcctggtggatagcaaaggctttgatgaatacatgaaggagctaggagtgggaatagctttgcgaaaaatgggcgcaatggccaagccagactgtatcatcacttgtgatggcaaaaacctcaccataaaaactgagagcactttgaaaacaacacagttttcttgtaccctgtgagagaaatttgaagaaaccacagctgatggcagaaaaactcagactgtctgcagctttacagatggtgcattggttcagcatcatgagtgggatgggaaggaaagcacaataacatgaaaattgaaagatggg

SEQ ID NO: 42634 - DNA, 367 bp, Gossypium hirsutum
  Clone ID: LIB3196-045-P1-M1-F5
aaagaactagatcaaagcaattcttcaattcctggtacttcatggtgagtgtttctaatttttatcctattcctattctgccccacctccccttttttttaccgcctgttgcttcttttttgatggattttcatgcaagaaactttaggagagatggaaccaaggatgatattggaaccttgagtagttctcagcaacatttggtggaacttgcagcacttgtattgtatcgggtattctgttctcatgcctaatatctaatagctattttttttactagaactgatgctgtgctacactcttaaaagtatctatgttttgatataataatttcaatttgctgcatatcttgtgttgaattgtgcat

SEQ ID NO: 42635 - DNA, 365 bp, Gossypium hirsutum
  Clone ID: LIB3196-045-P1-M1-G2
tattactaccctgagctcctctataatgtccaagccaaaagaaatttatgctttgttgtgccttatctttctctcctcctttacttgtttgaagcttgtatgcctcaccttaacctttgcttggggacattcaggccttgggcttctaggacaacgacttttctttcttccagcaagctgagttacttaagatgtgtaattatcaaccatgggaagatgattcaccttcaagtgaagatcgtgaaccaaggaccagaaatgtcacaaacactgtggcaactggatggcatccatgggaaaccagaatagcaatgttagaggcacggatagcaaggattgaggttcgacttgacggtcttgaaaca

SEQ ID NO: 42636 - DNA, 143 bp, Gossypium hirsutum
  Clone ID: LIB3196-045-P1-M1-G3
ataaatttgtctattttaaagtatagtctttgatggtaaaaatgtgaggttgacaaaaatcatgtcctcttatatgtatgaatttagtcttctttatacaattcttcctatgacggaatctaagacacaaatgtcctcaaaac

SEQ ID NO: 42637 - DNA, 298 bp, Gossypium hirsutum
  Clone ID: LIB3196-045-P1-M1-G5
cggacgcgtgggattttaaagttcttttcgagtttttaattttcgacatcaagacattaagtaatcaactaggtaccaattttgggcgtatcgagggtgctaattcttcctcgtgcataaccgactcccgaatccattttttggattcttgtagaccgaaagcaatgttttaataaatcaaacaatttattaaaacgatcaaattgcgaggtgatccgatcacacctaataaaaaggatcgctggcgactccatgttcgttttcattttcaaaaatcaaaagtcgacccccttcttac

SEQ ID NO: 42638 - DNA, 388 bp, Gossypium hirsutum
  Clone ID: LIB3196-045-P1-M1-G6
atcgctgagatgggggcggcggcggcggaagcggatcggactctctttgtgggcaaccttgaaacgaaagtgaccgaggagctccttttcgagcttttccaccaggctgggccagtaataaaggtgaaaattccaaaagataaggatggtaaaccaaagcagtttgcgtttgtgaatttcaaacatgaagtatctgttccttatgcaatgaatctacttaatggaatcaaactttacggaaggcctatcaaaattcaatttagatcaggaagtagtcatgcctcgcaagatgtcagtttgtcatatccccagcatcatgttggaaattcaagccctaccttcacgtctcctagcagcaggtacgaaaggactatggataacatgactt

SEQ ID NO: 42639 - DNA, 333 bp, Gossypium hirsutum
  Clone ID: LIB3196-045-P1-M1-G8
atcgtcgggtcccgggaaccgaacccgaaggagaggagggggcccccatggatttaggggggaggggaaagccatgggggggcacccccccggaacccctttcccaggcgcgcgttctccgctgaaagaggctcagagagacactttctctgggatcttaagtgtgggggctgccagctggggggccagtccggcccaacgccggaggcttggaaaagagagttggcagagggagcggactacgtgccgggccatggcccttctgccggggccctggacacaatgacctctttgccctgcccccttcccggccgggacgcctccaaagctgtc

SEQ ID NO: 42640 - DNA, 358 bp, Gossypium hirsutum
  Clone ID: LIB3196-045-P1-M1-H2
ataaaaaatatataaatatagaaaaaattataaaattttataaagtcgtaagaaaattataaaaaatgaaagaaatataaaattcataaaaaaatataaaaattatcacaccaaaaagaaacattttataatttttctattaattttattgatttttattttttatcatttttgtgccacatgtcatgttgtgttacaacacgcaatggtattaactgaaaaaaaaactaggggttattagctttaacaattaatagtcaaagttaatggttaaagagaatttttgatgcattttataatttttaataattttaaaatatattttatatttttattaaaatttagtaatttttataac

SEQ ID NO: 42641 - DNA, 364 bp, Gossypium hirsutum
  Clone ID: LIB3196-045-P1-M1-H5
gttttgcagtcggttagctgttttaaaggatgattttgctgttgcattaagtcacgcagatcacgttgtggttacagcggtttattcggtccgagaagcaggtccacggaatgtttgtggaaaggatttagctacttcaatcatcagttctacatccgaatacatcccctctctggatgacgtggttgataaactagcacttgagatatgcaaggaccctcttcgtgaaatcgttatattgacccttggtgcaggtgatgtcaatacagtgggtcctaaattgctgcacgaattgcaaaagagattatgcattgcataatggtaagcacaagcagcctttactggcataaagcaaagagagatt

SEQ ID NO: 42642 - DNA, 372 bp, Gossypium hirsutum
  Clone ID: LIB3196-045-P1-M1-H6
cccacgcgtccgataataagttgtttttttagagtgccaaataattaaaattttaagtttgtcaaaattgatttaaataaatgaaattataataccttatcaatactaattaaaagtaataataatttattaaaataataattacacaactaggcaaattttagtgatccacaaattttattgtatgtatcaattaaattttataacatttcaacaatactaatatttagaaaataataataaattaatataaacatttaatttttaaaagttgtttgatatgtagcccatttaccttcttatcaatttctacatggtttctgtgaaaaatcctattattgacttttctttatggactatgaaacatatatt

SEQ ID NO: 42643 - DNA, 329 bp, Gossypium hirsutum
  Clone ID: LIB3196-046-P1-M1-A10
gggatccccgcggttgagagcatgggttctacaggggccggtagagcgccgccggagttaccggagcggaactgtgggtaccgcgaagtccagtactgggatcagcgctaccaaggtgcagccgattctgccccctacgattgggtcggggacttatactccttccgtgcccccctagagccggagctgcggcccgaggaccgtattcttgtgttaggatgtgggaacagtgccctgagctatgaggctgttcttggaggctttcctgatgtgaccagagtggactactcgtcagtcacggtggctggcatgcaggctcgctatgttca

SEQ ID NO: 42644 - DNA, 362 bp, Gossypium hirsutum
  Clone ID: LIB3196-046-P1-M1-A2
atctttctgctctccacagtaggccagagttgggggctctggagctgtttcccaaagtgcacccacaggctggatctgagttttgtcactcaaaagcaagaagaaaagtgggaaaggggcatcccccattagatttcaatactttgcacttctactaagcttgataggacaggagtgcaatctacaattattttaaagtgaatttccttccatccaccattctttatctttttcttgaataagaagatatctagcaaggatattacttgtgccttgagggtagcaattacaggatagattcatataaaatacggtattctgtatttttttaagagaataataccaaacagtcttcaaagaaa

SEQ ID NO: 42645 - DNA, 362 bp, Gossypium hirsutum
  Clone ID: LIB3196-046-P1-M1-A4
ggtgatagccggctgagcccggatgtggggcacctggtgctgaccaccctctgcccggccctccatgccctggtggcggatgggctgaagcctttccggaaggacctcatcaccgggcagcgcaggagcagcccctggagcgtggtggaggcgtcggtgaagccaggctccagcacccgctcccttggaaccctgtatagccaggtcagccgtctagccccgctgagcagcagccgtagccgcttccatgcctttatcctgggccttcttaacaccaagcagttggagctgtggttttccagtctccaggaagatgcaggccctgttttccttctgtaccctgcaacaggaattttttttcc

SEQ ID NO: 42646 - DNA, 416 bp, Gossypium hirsutum
  Clone ID: LIB3196-046-P1-M1-A6
atcgaacccagaagaaacgagggagcctgggtctcctcctagtgtgcagcaagctggcctggggtccccggaaagaccgccggagacaagcccaggatcaccccgtctgcaacagggtgcaggcttggagtccccccaagtgcagccagagccaggcccaggatccccccagcgtcagcaagacctacacctggagtcgcctcaaagacagccggagtcccgtcctgaatccccacgatgtcagccgaagtcaagtgaggaggcatcaaagtgttctcaggaccagggagtactggcctcggagttggcccagagtaaggaggagctgaccccgggggtcccccagcatcagctaccgccgggcccaggatcaccagagccttaccccggtcagcaagctcccggtccggagccct

SEQ ID NO: 42647 - DNA, 378 bp, Gossypium hirsutum
  Clone ID: LIB3196-046-P1-M1-B10
ctaacattcagccaaggtgtaaatatgagagctggtatcaataaaattgcacttctaagcattgctgttggtcttccggtatgcgctctccctccctccctctctctctctccttctctgctcttgtgattttggaatttctttgactgactgaatatttggtttgaatgcagaacgttggtccacattttgagacatggaatgccggtgttcttggcccggttacactgaatggcctcaatgagggaaggagagatctctcgtggcagaaatggtcttacaagattggccttaagggggaagcattgaatcttcattctctaagtggtaggtcatctgtggagtgggcagaagggtcgttagtggcacaaaagcagc

SEQ ID NO: 42648 - DNA, 389 bp, Gossypium hirsutum
  Clone ID: LIB3196-046-P1-M1-B11
gggggtttgtaataggattcataagagggcccgaactaagcaaaccttataagtgttgaatgatgggaaggtttctaagaggcgcccagctatcactggcgaactaaaaaatgtcttaaccaatgttgaagtgaagacgccttataaattccgagcggcaactgtagctttttaataacttcggaaccgccccaatagttctgcccttcttatcacggaatcctcgttccagatatttgatcgggaaaatgcccagaccaaaagactgaattgtgcacacagagccatgccgatcttgctcttgatgaagctgcagaagcataccttgtgggcttaattgaagacaccaaccagtgtgcgacacacgccaagcgagtgactataacgcc

SEQ ID NO: 42649 - DNA, 383 bp, Gossypium hirsutum
  Clone ID: LIB3196-046-P1-M1-B3
cccacgcgtccgcccacgcgtccgctcagtcaaaagacgttttacattattttcttctctcacgcctcctctgccattctcttattctcttcgataacttttctccccccatctttgatatcttcttctttttcttttttcccccttcttttacctaattgcttcccaaatgtctcttcagattgcttgggacttaatactgaattttaagtaaaagtgcacgtgtagagatgaggttttccatttcccttcatcttctccactgctaaccagcgaaaattctactcgataatggaactcaaatattgcattaagggattgttgtatttggtgggagtggtagaacatcgaattcgggttttcagaacggatggatacggata

SEQ ID NO: 42650 - DNA, 395 bp, Gossypium hirsutum
  Clone ID: LIB3196-046-P1-M1-C1
atgcacctacaccagccaacccagatcccgaggtccaacagcgcccggcccagatccccacgcctgccagtagcaagccgagagccagccggccggcgcactccgactccgagcagtctccgtccttctgcccgagccccgagccctttccgggacccctgccccgcgggcagcgctgccaacctgccggccatggagaccccgtcccagcggcgcgccacccgcagcggggcgcaggccagttccactccgctgtcgcccacccgcatcacccggctgcaggagaaggaggacctgcaggagctcaatgatcgcttggcggtctacatcgaccgtgttcgctcgctggaaacggagaacgcaaggctgcgccttcgcatcaccgagtctgaaga

SEQ ID NO: 42651 - DNA, 391 bp, Gossypium hirsutum
  Clone ID: LIB3196-046-P1-M1-C10
gcttagctctcattgccttatcccttcaaacatgtcccaaggcctcaatgcccaaaaccactatacatataagtgagtactcacactcctatagcatgccaactatatccaattgttctaaggtctctataatagcccgtttcagtgaaatttgaacagtggtttcggaaccataaatccaatgtaaaaatatttattttattattattttaatgtctacagcatgttagtattaccttataaaaattttgttaataaattttatcgtttgcatactgaatttgataaaaaaaagagactaaattacataaagtgcaaaactagagttttatagacctaaaggcattaaatagctatagaaccttaaagtatgagtccttacgtggtaaat

SEQ ID NO: 42652 - DNA, 295 bp, Gossypium hirsutum
  Clone ID: LIB3196-046-P1-M1-C4
gcgtaccgttcctgtataataacaccaggacaatatcgaggagattgttctagctgtaagccaacaccctcatgtgtatacactagcctttacaggagaaatttttgggccagacttcaatacacgaagggagcagctacacaagctgtgtggtgtgaggcaaagccgtctgacgtagcagggacagggaatgtttgctaaagacagtcaggaactaagtgcggcattgagctatgtcgctgacataccaagggagaaaagttgcgagagaagcgccttcaacttattgagccaa

SEQ ID NO: 42653 - DNA, 397 bp, Gossypium hirsutum
  Clone ID: LIB3196-046-P1-M1-C5
aaataaataaacagccaagagattttgcagtagagtttaacagaagctatgtaaaagctcgttaatttgtgtttttttaaaccagtgtgagaaacatagatcttagtaaaaattagttgaggacttaatgaagaattgctcattaaataactgacagtttgttcctttctttgaagattgcttgttcttgttcaattagaaaggagaaagttacctccatgtggcctaaaacacgagatttcttaagaggaaaaggccgtactcctttagaattaagctcatgagagaagcttttcacgtcaggagctttcttcctacggccactggtaacgcgcagtacggcctggaaacgtggtgactgcatttccttggcaaaaccaacatgattactccacca

SEQ ID NO: 42654 - DNA, 369 bp, Gossypium hirsutum
  Clone ID: LIB3196-046-P1-M1-C9
cccacgcgtccggtttgtgggaaaagctccgctaaaagtcatgacctttggcggcactgtcattagcagcgtcataagcgccgcaaatgcttttagcggcacttttttaaaggcctattttggtgtagtgacgaaatcatgcaaacatccccaaatgaacatattaaattttggtggtaaggacagattccaaagagttaaccaaggaccactcaacatactgttgcgaaagcgaagtgttgacttgaatagctaaatggtaccccgacttcacactatataaattgtctttagtaaagtgctagataaaataatcggtcagtttaagcatagcaaccgtgatactaaaaattgttaattagaatcgac

SEQ ID NO: 42655 - DNA, 376 bp, Gossypium hirsutum
  Clone ID: LIB3196-046-P1-M1-D1
atcacccctgcactccagcctgagtgacagagtgagattgtcttaaagaaaaaaaagctcttcccagagattttcaccaagtttttctttcatctttaggcaccttgacagcagtagcaatgagcgtccagatattagttccatccagagacgtattaaggtatccaaatgggatttgggagaaaacttgggaaataagtttaaatgattttttcacgtttctgatttttacagagactggcattcaactactgctcaataaatatttgttgaatgagccaagaatcaatcttgttctttgttttagaaagtaactcatgacatggacatgtgctatgggatgatgggaagcctgtttcgcagtggctcccggcag

SEQ ID NO: 42656 - DNA, 374 bp, Gossypium hirsutum
  Clone ID: LIB3196-046-P1-M1-D11
atgggagattgattggaattccatttaaaattttggtatatggcattttctaacttaggaagccacgatgttcttggcccatcatgacactgggtagcattaactataagttttgtgcttccaaatcactttttggtttttaagaatttcttgatactcttaaagcctgccttcgattttgatcctttattctatttgtcaggtgcacaagattaccttccttttttagccttctgtcttgtcaccaaccattcctacttggtggccatgtacttgggaaaaggccgcatgatctttctggctccactcagtgtctaaggcaccctggtttcttttgttgcaccccacaaactattttcctcattctatttact

SEQ ID NO: 42657 - DNA, 381 bp, Gossypium hirsutum
  Clone ID: LIB3196-046-P1-M1-D12
catagattctacctttgtaaagtcgtcatgaatttaacataattatatttgagttgagaaaataatttaattaggaaaaataattaaatttattttaattaattaattaatattttttatacatgcatagatggggtgaaatttattaaatttcattcaccgaagctgtcaattttaaagtttagaaaatcagttgacttgcgatgacttttgggatgggatctaagcatttctgagttgagatgtcttcatagagtttgaagatctatcttagctttgaaatgcattttgaatcactcgattttgagtttgaaagctcaagttatgaccgttttagtgaagattgtgcgagcaaaatacaagaattactagtcctagact

SEQ ID NO: 42658 - DNA, 366 bp, Gossypium hirsutum
  Clone ID: LIB3196-046-P1-M1-D2
cggacgcgtgggcggacgcgtgggaaaaaattccacatgtaagcggagttaaaatcttcataatttgggtcaactcctctagacagtatgcttaacccagggtagtcaatggaactttatggtattcaggaggttaatagacatccttaccttttttgtcgcattacttctatttctgtcatctttttcagattccaacttttttggaatgttttttagggaggggacttgagatattgccaaaagtgttctcattacaagccctcatccacacatcattgccgtgtttgacagcagtgctacaagagaatggtacgtgcactttatcaccaacgaaatgcatgcttcatgtggatgcgttctaaa

SEQ ID NO: 42659 - DNA, 409 bp, Gossypium hirsutum
  Clone ID: LIB3196-046-P1-M1-D5
atgtggctcactccctttcctctgttgcctctcggtcacgcttgctctttcaccatgcctggatcgcttcctttgaatgcggaagcttgctggccaaaagatgtgggaattgttgcccttgagatctattttccttctcaatatgttgatcaagcagagttggaaaaatatgatggtgtagatgctggaaagtataccattggcttgggccaggccaagatgggcttctgcacagatagagaagatattaactctctttgcatgactgtggttcagaatcttatggagagaaataacctttcctatgattgcattgggcgactagaagttggaacagagacaatcatcgacaaatcaaagtcagtgaagactaatttgatgcagctgtttgaagagtctgggaataccg

SEQ ID NO: 42660 - DNA, 446 bp, Gossypium hirsutum
  Clone ID: LIB3196-046-P1-M1-D6
gtttgtacgatgatgcgggctggtgccgggccggaatttccgggattgagtacctactgtgtgccaggagctggtggtgcagtgttgacatagtctgctgccctgatagagttgattgtctagtgaggacgacacgcatttttaaaaaatatattgaaacttacaaaccttgtttgtgacaagtggtgtgtattgcaataactgcttggtttgcaacctaatttgctcaacagagacatatgttgcaagacccttccatggcggcacttgcgttttggcaaagctgagagagctctgggttgggcacattgctttggattacaactgttaatctgcgcctttctacaactgattgcaacagactcttgagacatgataactacagagggaattgctggagacaccagaggcacttgcatctcggctgggaagactatggtgctggc

SEQ ID NO: 42661 - DNA, 157 bp, Gossypium hirsutum
  Clone ID: LIB3196-046-P1-M1-E10
tcggtctgtacccaccaaaaatgcgaggaatgatttcctggggggggtgaagatcatgtcatggctcatggacccaaacatcattcggctgctagatcgagtgtgatcaagacgaccccttctgcatgaattctgactttcatggagaacggtgacc

SEQ ID NO: 42662 - DNA, 392 bp, Gossypium hirsutum
  Clone ID: LIB3196-046-P1-M1-E12
ggaagctggcccccatgtcctctggctgaaagcagcaacccctccccaaaaggccaggcaatgtgccgccccaccccaccttctaggcataggactaagatttacagaagccaaatgtcatagcctcgctttgttctttgttaggcatttcctcctgtctctgagggaggggaaggcttctattagaagaacatactttccaagagctataaatttttcacctctacaaagaccaggcaattatctaacctaatcctaaacaatttaaaggataaaatgaaggtaatcaagatggctcttccagaaaactgtacttgcactgggagacaaacgtcccaagccttggggtctgggacaagccttcaacactgccagcctcaagtgaagctttt

SEQ ID NO: 42663 - DNA, 350 bp, Gossypium hirsutum
  Clone ID: LIB3196-046-P1-M1-E2
atcctttgggcagtgggggttggtcccgtggctccggcccccggtgcagaatggcggcggcggttcggatgaacatccagatgctgctggaggcggccgactatctggagcggcgagagagaggtgcacggggacgggaaggggtccactcgaaccgaggccgggggtcctgtagggccggcctcaggtccgggcgcccagccgctccgggggtggttggaggcggggagaccgcgagcgcttccaacccctccggctctccccacgcgcggtccgaagggaggccgtcgctgccctagagcaatgaatcaggtggagaaagggctttcgcctcgcggggtcccgaacgc

SEQ ID NO: 42664 - DNA, 409 bp, Gossypium hirsutum
  Clone ID: LIB3196-046-P1-M1-E4
atcgccatgggccgtgtgatccgtggacagaggaagggcgccgggtctgtgtttcgcgcgcatgtgaagcaccgtaagggcgctgcgcgcctgcgcgccgtggatttcgccgagcggcacggctacatcaagggcatcgtgaaggacatcatccacgacccgggccgcggagcgccgctcgccaaggtggtcttccgggatccgtaccggtttaagaagcggacggagctgttcattgccgccgagggcattcacacgggacagtttgtgtattgcggcaagaaggcccagctcaacattggcaatgtgctccctgtgggcaccatgcctgagggtacgatcgtgtgctgcctggaggagaagcctggagaccgtggcaagcttgcccgggcatcagggaactatgcca

SEQ ID NO: 42665 - DNA, 359 bp, Gossypium hirsutum
  Clone ID: LIB3196-046-P1-M1-E7
atggcagagagaacaggaaatcttgaaacaactaaattctggatacaaataaatagatggagtaacttattcagcagatttgaaagggttcatttccaggttttcagtggggaaagctaagaatcaacccaaattgaattgtagaaccaccaaaatgtctcaggaattagtagtgctagctaccttgaaagtagagcaattaaatcactacccctgtccccttagccaaagatccatcttctccctggaaaggataaaaccataactccactggggagtactataattagtgaaactaagtgtactgtactcaaaacagggaagagtaaaagcatacttgaatggtaagtgtttttttt

SEQ ID NO: 42666 - DNA, 383 bp, Gossypium hirsutum
  Clone ID: LIB3196-046-P1-M1-E9
atcggccagatgccaccaagaatgccaggaatgatttcctgaaagaggtgaagatcatgtcaaggctcaaggacccaaacatcatccggctgctgggcgtgtgtgtgcaggacgaccccctctgcatgattactgactacatggagaacggtgacctcaaccagttcctcagcgcccaccagctggaggacaaggcagctgagggggcccctggggatgggcaggctgcgcaggggcccaccatcagctacccaatgctgttgcatgtggcagcccagatcgcctccggcatgcgctatctggccacactcaactttgtacattgcgacctggccacgcggaactgcctagttggggaaaatttcaccatcaaaatcgcagac

SEQ ID NO: 42667 - DNA, 394 bp, Gossypium hirsutum
  Clone ID: LIB3196-046-P1-M1-F1
gggatggagccgaagcagcagcgcaggttatccccgtttcccctcccccttcccttctccggttgccttcccgggccccctacactccacagtcccggtcccgccatgtcccagaaacaagaagaagagaaccctgcggaggagaccggcgaggagaagcaggacacgcaggagaaagaaggtattctccctgagagagctgaagaggcaaagctaaaggccaaatacccaagcctaggacaaaagcctggaggctccgacttcctcatgaagagactccagaaagggcaaaagtactttgactcaggagactacaacatggccaaagccaagatgaagaataagcagctgccaagtgcaggaccagacaagaacctggtgactggtgaccaca

SEQ ID NO: 42668 - DNA, 371 bp, Gossypium hirsutum
  Clone ID: LIB3196-046-P1-M1-F11
caaggacacagagactggttcattcaggggaagtggagaacaaaagagacagatccgctttatcatcccgagatggaaatgcgaaagcaacacaagtggagtggaggaggtgattttgtgttgcgttaaggggttgaagattcatatgctttgcggatatttgtatttattctttgatgtaggataaaagaagtatgctatgaaactgaaacagggtattatacccgaaggtgtgtgctgctggccgattgcctctaaagttttctttttctgggagtttgtgtatagaaatagaatacggtttgaacttttagcttttaaaatttgggtaaagttcctaagttgtctgtatctgttttaggaggttgttt

SEQ ID NO: 42669 - DNA, 402 bp, Gossypium hirsutum
  Clone ID: LIB3196-046-P1-M1-F5
atcccagcaatatgcatcttgcacatctggtcagctcctgctccctccttctgctactgggggccctgcctggatgggcggccagcgatgaccccattgagaaggtcattgaagggatcaaccgagggctgagcaatgcagagagagaggtgggcaaggccctggatggcatcaacagtggaatcacgcacgctggaagggaagtggagaaggttttcaacggacttagcaacatggggagccacaccggcaaggagttggacaaaggcgtccaggggctcaaccacggaatggacaaggccggaaaagaagcagacaaagcggtccaagggttccacactggggtccaccaggctgggaaggaagcagagaaacttggtcaaggggtcaaccatgctgctg

SEQ ID NO: 42670 - DNA, 396 bp, Gossypium hirsutum
  Clone ID: LIB3196-046-P1-M1-F6
aattcagttaagagtggagttgtgtacatggggaatgactcacttagtaaagtaatcagtgttggtactatttagatcaagatgcacgatgggataattaggacattgtcaaatgtcaggcatatgattaacttaaagaaaaatctcatctcctttggaaatttggaccagaagggttgtaaaattaacatcgagtcaagcgtcattaaagtatctcgtggggctttcattttgatgaaaggtaaaaatattgacagtctttatgttctagaaggatcaacgatgacccgtaaaataggacgtccatcgtctgttaaggagtcgaagttgactcatttgaagtggagacaacttggccataggagggaaaaaagtataactgtttcgtttaagaga

SEQ ID NO: 42671 - DNA, 331 bp, Gossypium hirsutum
  unsure (1)..(331): unsure at all n locations
  Clone ID: LIB3196-046-P1-M1-G1
gttttagtacatacctgtgccatcgtgcacacatatggcttacttaaattttactttcagaattcatattacgttacccgttaaacacttggaatatgattcagacacacggaacaaatgcacagaagtgcctaaacatagccttggctacttgacaaaaagtgtactgaagtgcctcatatcacagaatcacatgctgctctcaacggngctactcaaagagctaagagagtatctgaacacaactcangatacccagcaccaggaccctagcatgtatcacatattaaatgagctcaatacacacatgactatcctagtgacatgtcac

SEQ ID NO: 42672 - DNA, 390 bp, Gossypium hirsutum
  Clone ID: LIB3196-046-P1-M1-G10
gccttgacatatatatactacatgaattttgatctttttggttctatttgaattaagttgaatggtaaattagggttaagcttgattgatgaaaggtacgtgtgatattcacgcatgattttaagctgaaatgaaataatggtgttcataagaagctcatgtccgaatgtagccaatggctactaataatgtgaaatgttctataaaattcgttagaatacgataaaaaaaaacatgttatttgatgtggaattgtatccgggcttaaagacccgcagacttcgtgctggaatcgtatccgggcttaaagacccgcaggcttcgtgctggaattgtatccgggcttaaagacccgcaggcttcgtgctggaatgacatccgggttaaaaa

SEQ ID NO: 42673 - DNA, 385 bp, Gossypium hirsutum
  Clone ID: LIB3196-046-P1-M1-G11
taaaaaggcaatatggagcatggaataataatacatgaattaaatgctatgttaatgaatgtcaacaatatgaagatattaaataaaaatttctagagcatattatggcaatattcatgtaatacaccgtttaaataccaatattaacaaacgaagaaaatgaaacaaaataagttataaaaaaattcgaagtaaataatataaaacaatttaaaataaataatatgtaaaacaaattacaataaataatatacaaagcaatttcaaataaataatatataagatacttttaaacaacatatgaaatatgaaagagtttaagatatataataggtaaaaagaaatttaaaataaataatatacaaaggcattttaaaattaaaga

SEQ ID NO: 42674 - DNA, 391 bp, Gossypium hirsutum
  Clone ID: LIB3196-046-P1-M1-G3
atcgcggccccttccagttgccggcgaccctgcgccggcattcagagcgcctcgcctggcgctaaatttaaaaacgtaacagcagcagcaggctggtcccggaaacgaaacgaaactcggcccccgggcctcctcccgggcgctgccggtccctcagcgcgccgcgccacccggaacagacccttctcccgccattttcggcggggctgggagactgaggcccgcagcgctgggcctgcggcgccccggaagaggcgggcggcatggccgccggcgtggactgcggggacggggttggcgcccggcagcacgtgttcctggttccagaatatttaaaagatgctttaaagaagatgaaaagggggctaatggttgtaaaaccggttaaccc

SEQ ID NO: 42675 - DNA, 308 bp, Gossypium hirsutum
  Clone ID: LIB3196-046-P1-M1-G8
atgaagaggtgagccctggaaaactttactacgggctgcttgaattgaccaacctttcatgtagctttacagtgaacgctcagaccctttttttcattatatttccaaagatgaggaaagcggggtgggggcatggaggtcaaaactcaggccttacttagccagctaacaggacactattaacacaaagggagatagaaactgattcactttctggaataagtatttcaaacacattaaagtaaagatacaacaaactccgcgtaaccatttagtaaaccaatattttaaacaagaatcatttttac

SEQ ID NO: 42676 - DNA, 390 bp, Gossypium hirsutum
  Clone ID: LIB3196-046-P1-M1-H10
gtttcgggatcacaggaccgagtcgaaaaaataataaatggttatattctatgcttattatgtgtgtacatgcatatgtcgacgtttcattccctaattttgccaattgcatgagaaattattaaatagggatcaatatgagacatggtgaaatatgatagactaattttaaatggtttattagtgcatgtcaacacaagggtggacttgcatgtcaaattgcccaattttctttatagtggccggccaagatgggtgttgatgggaaaatatatatgtttaattagttattaaaataagaaatggcattatgtgagaaaaaaataatattagtgaaataaagtaaagaaaacaaagaggaaggaaggctcatctttcatctccttcatt

SEQ ID NO: 42677 - DNA, 289 bp, Gossypium hirsutum
  Clone ID: LIB3196-046-P1-M1-H2
ataccgagtgtacttggcagttccgcgcgtccgagcagtcgatcccggcacccctgcccgcgggtctgttcgtgttcagctcgcgtcctgcagacgtccgacgtgctccagttggagaccgaggttcccgggctctagctgagtgggcggcggcaccggtggagatgcctgggaagaaggcgcgcaagaacgcgcaaccgagcccaacgcgggctcaggcagagctcgaagtcgagtgtgctactcaactcaggagatttggagacaaactgaacttccggcagaaact

SEQ ID NO: 42678 - DNA, 329 bp, Gossypium hirsutum
  Clone ID: LIB3196-046-P1-M1-H3
atggacgtcggaggtggaggttgtggagttcgctgttcgagagtgggcacgaaaagctccttttagtcctgcgttccgaaaggagggcgtctgttgggcctttctctcagtcgtgagggaggcgtcgacggcctacggaagtcgtgagttgaggcttgcgggatcgtttccggagaaagcgcaggctaaggccgcagcggaagatgtccaactacgtgaacgacatgtggccgggctcgccgcaggagaaggattcgcccaccgcctcgcggtcgggcgggtccagccggctctcgtcgcggtctaggagccgttctttttccagaagc

SEQ ID NO: 42679 - DNA, 192 bp, Gossypium hirsutum
  Clone ID: LIB3196-046-P1-M1-H9
aaattatggtgattggatagcgatactgactcatatgtctaataatagtctgacatatagcttttcaagtgatgatgggcacaaaaagaggaagagatcttctaaacgaggaaattatagacattgaaaaaggagaaaaagacgccacgataaaaagagaaaaaggcgttgataagagatctaagcgtaaat

SEQ ID NO: 42680 - DNA, 340 bp, Gossypium hirsutum
  Clone ID: LIB3196-047-P1-M1-A11
attgcccagcagtggaaccagtactatcagaaccagggccagtggccgccatactacgggaactacgactatgggagctactccgggaacacacagggtggcacaagcacacagtagccagtgtgacccagaggctcccagaggcccctgccggcttccttcaccagcgccttgctcttgcccttctcttgccccgccagatcctgtggtgctggggatggggtcatcccagggctgcctccctccagcccactgcctcccctccgaggggcttccttcgcctccatagggccaggcatttttctctggattcaaacaagcaacaatgaccctttaattt

SEQ ID NO: 42681 - DNA, 374 bp, Gossypium hirsutum
  Clone ID: LIB3196-047-P1-M1-A12
gaagtattaattcacctataccaacatcaataatggttctagcagttgctaaaaaggactgacctagaatcagaggtacatcactatcctcatctatgtctaaaacaataaaatcaactgggaatatgaacttatcaattttcacaagtacgtcctcaataatacccctaggaaatctaatggttctatctgctaattgaatacttatcctagtttgtttgggttttccgagaactagttgcttaaacatcttatagagcatggcattaatactaacccctaaatcaagcaaagcattattaacatttaaacttctaattaaaaaaggaatagtaaaactccctagatctttcaatttgtggggtagcttattc

SEQ ID NO: 42682 - DNA, 222 bp, Gossypium hirsutum
  Clone ID: LIB3196-047-P1-M1-A3
gcggaacaattcatcaatgacacctgctatcgctaatcccccataagtggattagttactcacgggatccctaaacataataaacttgattatagacatagtgcatgaaaaataaatcaagaattaagtttagagaatctcgattgtattcgattgacgaatcgcacaaatccttcaatgttggactgcgtctacatatcaagtgtttctagaacacgtatg

SEQ ID NO: 42683 - DNA, 403 bp, Gossypium hirsutum
  unsure (1)..(403): unsure at all n locations
  Clone ID: LIB3196-047-P1-M1-A9
ctatttaggcngacaactatagtaacaaggtttgtacacaaaaagcacggctggtacccggtccgcgaattctccgggatacccacggtgaggggcacggacctcgaaggtgtgttgcctgttcaacaatcacgtcatcatgggtgtgttttgtcaactcgcttgttaattgatttggggatatttgccccaaatgagaggttgaggaaaagactgtgggtggggaggccctgcctgacccatccctttttctttctggccccagcctaggtggaggcaagtggaatatcttatattgtgcgatgtgcgggcttggggaggcagagaatctctttggagtcttgggtggcgctggtgcattctgtttcctcttgatctcaaagcacaatgtggatttggggac

SEQ ID NO: 42684 - DNA, 389 bp, Gossypium hirsutum
  Clone ID: LIB3196-047-P1-M1-B12
attgcagttccattgggatcgcttccgcacttttgctcgactagacaaaaaaacagatgaaagccttaccaagtacttccatggctttgtggccatgtgccgccaagtatgccgccttcccccagcagctggagatgaacccccagaccctaatctgttcattgagcccatcactgaggagagggcctcacggactctttaccgtatagaattgcttcggcgcttacgggaacaagttttatgccacccccttttggaagatcgactggcattgtgtcagcctcctggtcctgaattgcccaaatggtgggagcctgttcggcatgatggggagcttctacgaggggcagcccgccatggggtgagccaaacagactgcaacatcatgc

SEQ ID NO: 42685 - DNA, 240 bp, Gossypium hirsutum
  unsure (1)..(240): unsure at all n locations
  Clone ID: LIB3196-047-P1-M1-B3
atttttaaccttaagcctccgcctgcagagctcctccgccagttatggaggtggttttgggggtagctcttgccacttgggaggaggcccgggggccttaacctgttcaactcggtttgtttttggggaacaagttgaggcttccgaaggggggtgaaccgttggttttgtggaagggcctgttncggcttttgaagtggcttccggggagggccttgaagggggttttgtggggggttt

SEQ ID NO: 42686 - DNA, 252 bp, Gossypium hirsutum
  Clone ID: LIB3196-047-P1-M1-C1
actattttgcaagtttgtaccaaaaagcaggcttgttccggttccgaatttccgggattgccagagagagagccacagaccagggaacaggacagagcccaccaaaccagtgagactgtgactgggtctggaactcagacccaggcaggtgccacccagactgtggagcaggacagcagccaccagacaggaagaaccagcagccagacacaggaggccaccaatgaccagaacagagggattgagatccat

SEQ ID NO: 42687 - DNA, 360 bp, Gossypium hirsutum
  Clone ID: LIB3196-047-P1-M1-C10
atccgggaccgtagaggctgcagagagctagaacccgagtcgcagctccgagtcgcagctccgggccgcagagcgctgggcgaacgcgagggccagggcaacggcagggcgggcagctgcgctctcggctggagtcatgctatactgaaaagacactccatcaagagaactctgggagaagcaggaaaccctgtgccagggacaggaaagataggagaaagaaagtgtatcagaaatttttaaacctgtctcagaaataacaacatattttaatcagagatttatgttgctatgaggacagattcatcaaaaatgactgatgtggagtctggggtcggcaattttgcatcttcagcaagg

SEQ ID NO: 42688 - DNA, 401 bp, Gossypium hirsutum
  unsure (1)..(401): unsure at all n locations
  Clone ID: LIB3196-047-P1-M1-C3
attgattttcaagctctggttgctgatgagtatttcccctatgctctaagcagatatttcactttttcttttcgtgtagtttctgttaatatctctgttgtaatttcaggagtcagaacagtgtggaaactttaatgtaggaaatccacaaacgtattgtttttacatagaaagaaaatgttccttgttgctctagatgttggtgctgtatccctaatacttatggaccaagcaagaagaaattgtataatctttgttgttcagaaagnttctaatagaataaatagtagaccttgtagaatgaactggcactaataaatggtacttttaaagacatgaatatgggagtattaaattattcaaccagatatatttataactctaggcttttaattttttta

SEQ ID NO: 42689 - DNA, 268 bp, Gossypium hirsutum
  Clone ID: LIB3196-047-P1-M1-C4
gttcaatgccatgtcgatgcgacattacttttactaacgaaattttcttatttcacgactctttaacctctcgagctaaaatttggatcgacttttcttcaatatttatatcagactaaattttgatctcagatagaggaatcacatgcgaaggatcagatctgtaacgtcgaaacatccatacgtgaaacacattatgaatcttttctaattctggtggcaacaacaatctatatgctatcggcccaatacgttatataatttcata

SEQ ID NO: 42690 - DNA, 355 bp, Gossypium hirsutum
  Clone ID: LIB3196-047-P1-M1-C7
atgtgcccgaggcagcggcccattgcgatcaaaggctacaggccatacttgaagaccatcgaggacctggggaacaagatcattgcagccaccattgagaatgcgcaccccattttgcagattgacaatgccaggctgtgagtcgatgacttcatgacaaagtactagcacgaactggccctgcggcataccgtggaggccgatgtcaatggactgcgccggctggtggatgagctgaccctggccaggactgacctggagatgcagatctaaggcctgaaggaggagctggcctacctgaggaagaaccacttggaagtactgcttgcactttgagggcctagctctggagaag

SEQ ID NO: 42691 - DNA, 269 bp, Gossypium hirsutum
  Clone ID: LIB3196-047-P1-M1-D4
attgctatcctagtttaagggggataaaataggaatcaagaagcctggcccacttgagcgcccagcccaagtgcattctgcaatccagtttatattagtcctccatgtgggtggctatactttatcaagattcccccccaaggggaggaggattattagtcacgttatcaaactcccctccaacccctttctctgcttagaggtatgtgtaacgtgtagtagaaagatcgaatccccacgcaaaagtccgtgctgctactcaatttttt

SEQ ID NO: 42692 - DNA, 384 bp, Gossypium hirsutum
  Clone ID: LIB3196-047-P1-M1-D6
gcttagttaatggttccatcataaagctagcaattagatcatattttaaaagtcgcagatcgatatgatcaaaaaaaaaaggaataacggtcgaaattacataatctgttaagggatgggcaggggcagagccagaaaaattatttggggggggcggatgaaattttaattctctatagtttatatctttataaattcgcaaggattaaatcaaatttttataattttaggggggccaaagtacaattttacctttactaatttaaaatttataaaaaatttaaagggccaaaaatataattttacattttagggggacggggctcatgccaaccaccctagctacgcccctaaatatgggctaaatttatatttatgtctaac

SEQ ID NO: 42693 - DNA, 136 bp, Gossypium hirsutum
  Clone ID: LIB3196-047-P1-M1-E10
attcgggctcatcccacgcagaaagggcaagaggggctggacggggcgcaaggtggccaacgtaaggtccaacacgtggggtggtaccccaagcccgggtcagacagggacaaagcaagggacacaaaacaaaagg

SEQ ID NO: 42694 - DNA, 183 bp, Gossypium hirsutum
  Clone ID: LIB3196-047-P1-M1-E3
atgaaaggtccctttctgggtttataatgatgccagattctagttcagctgatggggacaaaaaccatcatgactcaaaccggtggaaatggaagatcttcaacagtgagtttgcttttaccattggagagatgacaacacttaatttgccaagaggcttagcccatgggaatatgcaaactt

SEQ ID NO: 42695 - DNA, 266 bp, Gossypium hirsutum
  unsure (1)..(266): unsure at all n locations
  Clone ID: LIB3196-047-P1-M1-E6
cctaaaacgactcactagaagagaaagctcgcactcctgcacgcgccgctccattatccccgggtccttccactcctgcgctagcatttctcgatgatagagatagagcctagctctcacattaacaagaaatagtgctacaaagggggggaaatcccagtggccagtatggaatgcatagagaagagaggggcatggtcgtcgacgcctgagctttctggccacggtatactgtctatctgcggccngaattgttaccggaaaca

SEQ ID NO: 42696 - DNA, 215 bp, Gossypium hirsutum
  Clone ID: LIB3196-047-P1-M1-E7
atcataaataaaacagccagcatgttacttggcgaaattgtagtgattgaacgaatatttgtttactcttcaagcatgtgttgagcaactgtgtatcaagcaagaagaaagccattgtctttacccttctggaatatagaggctcataggaaataatcaatactttgatttttttttaaagcataattagatgaaaattaataagactcatagac

SEQ ID NO: 42697 - DNA, 362 bp, Gossypium hirsutum
  Clone ID: LIB3196-047-P1-M1-E9
atcatgactgtggcttccccccagcagggatgggattccacagctggttgacggtgttggggagagggagaaatagaggccgtcactcaggtgtctgagttcaaaacgtgtgctctcatttcaagggccagcaaccctccctgatgggtcgtcagcaacaaaggcgccttaagacgtgacgcaggccctgggcccagcttgaaagagacagggattgtccttaagagcacgccctgggctgagggccgcgctgggacttcccagctgtgccgcccctacaagcaggagcccagcagccccccgctggcgcctggcctgcccgccttcctggcggccccgggcaccacgttctgccccgagtg

SEQ ID NO: 42698 - DNA, 402 bp, Gossypium hirsutum
  Clone ID: LIB3196-047-P1-M1-F1
atatcttcgcggaggtgaatgccgaccgcatcacctggctgtatgatggcaccaccggcagacagacgaagaattccgtggatactcgcaccattggcaggtacatcagcaccaaggcagtgggaagtaacgctcgcatggacgtcacggacaagtacaagtacccagaaggctctgaccaggaaagacgagtgttccaaaaggctttggggaaacttaaacccaatgcgtcatttggcgcaacgtcttcaatgggtttggaagcagaggaacgggagtccagcatcatcgggaagttcaaggtcactggcatgctagcagtgggcaaagaagtcaacctggtcctactgctcaaaaacctaagcagcgatacgaagacagtgacagtgaacatgacaggct

SEQ ID NO: 42699 - DNA, 159 bp, Gossypium hirsutum
  Clone ID: LIB3196-047-P1-M1-F3
cggacgcgtggggttttgaagctggaaaaattcagcaacatatttccttgcttgaagtgatttaatgtctttgcttgatgatttttgaatttttggacccctaaagcataagctttcataagaggggatcatttgcaaatgatgagaggttaggtttta

SEQ ID NO: 42700 - DNA, 428 bp, Gossypium hirsutum
  Clone ID: LIB3196-047-P1-M1-F9
cgacactataatacgagtcagtacagggaaagctgctgctcccgcgtccgcacagttccggggatcacgatattgagcgtgggtggatcttggtcaccaaggaacagcaccggcaactcaaatctctgcaagagaaggtctccaagaaggagttcctgagactggcccagacactgcggcactatggctacctgcgctttgatgcctgtgtggctgacttcccggaaaaggactgtcccgtggtggtgagcgcgggcaacagtgagctcagcctgcagctccgcctgcctggccagcaactccgagaaggctccttccgggtcacccgcatgcgatgctggcgggtcaccttctcttgtgccattgcccaatggaagcacgagcagcccgggccggggcccgggcgaagtgcgcctggaactggcttt

SEQ ID NO: 42701 - DNA, 171 bp, Gossypium hirsutum
  Clone ID: LIB3196-047-P1-M1-G11
atgggccttcgcgggtggctgctccagcttccccagccctgcccgcgtcctggtgggaaactcagcccagaaggagtcttcgggggctcctcgcgggttggggaaccgtcggacgctggcgcagggggcggttcaaggaccccgtggggtgttcactgacccttcgtgctc

SEQ ID NO: 42702 - DNA, 410 bp, Gossypium hirsutum
  Clone ID: LIB3196-047-P1-M1-G12
atcaccaaagaaggaagctcgtcagcgccaggattccaaaatcccgcctctcaaggcttcctgagatattttgtctcccggcatgcactgcgtccggcccgggtgtcctctgcccggaagacggaagtgcagagacttccggtcggcgtgatcctgaggcgtgtgtgttggtttttcaggtaaaacatggctaaaagcttacggagtaagtggaaaagaaagatgcctgctgaaaagagaaaaaagaatgccccaaaggagctcagcaggcttaaaagtattctcaaactagaaggtgatgttttaatgaaagatgttcaagagatagcaactgtggtggtacccaaacgcaaacattgccaagagaaaatgcaatgtgaggtaaaagatgaaaaagatgacatgaaaat

SEQ ID NO: 42703 - DNA, 255 bp, Gossypium hirsutum
  Clone ID: LIB3196-047-P1-M1-G3
acgctactcgatggtgtgacccagtttcagacctaggcgaagacatcgactatcttgctgcattgctacgcatgtgacccaataccgacaacccagtccgagcaccttcacaggcttcaccgcggtcacttgtaccccttccacgagtacctctagtgctcattatcgtattacgcttttatgcatcaggctaatagctctagtgtttggtaacagatattttatgaaaaacagtatctattattcagtggtttc

SEQ ID NO: 42704 - DNA, 386 bp, Gossypium hirsutum
  Clone ID: LIB3196-047-P1-M1-G5
atcagcggcctcggctccctgggtccggacgcagcggcccccggaggaccgggattgggcgcggagctgggcccggggctgtcgtgggctcccctcgtcttcggctacgtcactgaggatggggacacggcactgcacttggccgtgattcatcagcatgaacccttcctggattttcttctaggcttctcagctggtactgagtacatggacctgcagaatgacctaggccagacggccctgcacctggcagccatcctgggggaggcatccacggtggagaagctgtatggagcaggcgcccggctgtgcgtggcggagcgtatgggccacacggcgctgcacctggcctgccgtgtgggagcacacgcctgtgcccgtgccct

SEQ ID NO: 42705 - DNA, 365 bp, Gossypium hirsutum
  Clone ID: LIB3196-047-P1-M1-G6
atgctttgtctttggatttagcgtttcagaattgcaattccaaaatgtgtaagacaggagattctcttctgtgctgtcaagggacatggatttgattgatatactttggaggcaagatatcgatcttggagtaagtcgagaagtatttgacttcagtcagcgacggaaagagtatgagctggaaaaacagaaaaaacttgaaaaggaaagacaagaacaactccaaaaggagcaagagaaagcctttttcgctcagttacaactagatgaagagacaggtgaatttctcccaattcagccagcccagcacatccagtcagaaaccagtggatctgccaactactcccaggtttgccacattccca

SEQ ID NO: 42706 - DNA, 122 bp, Gossypium hirsutum
  Clone ID: LIB3196-047-P1-M1-G7
aagaaactcactcttgttcctataaaaccacttatccataaataaacacagcaactaacttcattacccaatccaagattttcagacatgccattatttaacaaaagctcaaaatttgactc

SEQ ID NO: 42707 - DNA, 406 bp, Gossypium hirsutum
  Clone ID: LIB3196-047-P1-M1-G8
atggcagcaatgctgagtaggtaggataattatttcattcagtttttggagctcagttaagccaatgcatttaaagttttgcatgaggaacattgactttattaagcattttcagatgtggtggttgtatttttgcaccaagaagtgtttggataaccacacaaaagcatgatgaaaaggcttcttgtagtcccatactttcttgtgaactaatgttgtgaatttttgtttgcagtcacctgcatagttcctacaggctaatgtggtaaaactgttgatttcccaatttaaccttaagtttctgttgcttataagtgattcatttgctacagctggaatatgggaaaattaatttgggcttagtggttacaaatatgtgtaagtggatgtatatgtacttaaactg

SEQ ID NO: 42708 - DNA, 262 bp, Gossypium hirsutum
  Clone ID: LIB3196-047-P1-M1-H11
tcgcccacgcgtccgctaaacattaccaaaatatggggatgggtgtattaaaactcgctaataaaggtgacttgcttgagcatttttgactagggtaactgaccagccatgctgagtgcgttgcactgtgtacgtgggcttatacgaccaatgaacgctcggtattatcttgaaatgatcctagtctcccaagcaatctttaccatttgcaggaagctcttgatctatttaacgatggttcaagcactaatggaaggagaac

SEQ ID NO: 42709 - DNA, 132 bp, Gossypium hirsutum
  Clone ID: LIB3196-047-P1-M1-H2
gtgactcaaggggaggaggggtgcatatagaatatcaatccttcaaccttagcaccgtgggggaacaagttcaatatatgggttataatcattttaaacgctaaaataacctatacagtaacacttataatg

SEQ ID NO: 42710 - DNA, 271 bp, Gossypium hirsutum
  Clone ID: LIB3196-047-P1-M1-H3
gtttggctggatccatgtgtcctccaaagtctgagttatgttaataggcgaaatatatgtggggaaaaatcaaatgaaattgaggttagtagtgatatttgaattgaatgagaattggatttgattgatgaatgtatacatgtgtgaaattgaattgtataatgatttgcggggaatttgaaaatgtgaatgaattggtattgcgattgatttgggttcgattcaagcacgtttgcatgtatatgtgaaaaaaaggaaaggtatgtatttg

SEQ ID NO: 42711 - DNA, 395 bp, Gossypium hirsutum
  Clone ID: LIB3196-047-P1-M1-H5
atcattgatgtcctacccagctaaaacagaggccaggagccagggaggaaaagcagtcaggccacacaccactgctcccgaaatggacttctctgcaagcctgactcctaaaactgtgcgttgtaccctgaaaccagctttatccatagcttctgcgataaatggctgtaagtcttggactccttgctccaaaagcagcaactcagcaatggaaccttccagctcccaacccttgctagtgcccacgggctttcccaaagggcaagagaacatttctcctcctataattgccatctctttgttctcccgacatggtgaacaccatccggactgcgtgtatgtcccaaattacaattctttctttgctaatgaaatatgaaatttagaggctcttc

SEQ ID NO: 42712 - DNA, 346 bp, Gossypium hirsutum
  unsure (1)..(346): unsure at all n locations
  Clone ID: LIB3196-047-P1-M1-H7
ggaaatgatactctgaatcatagaactataatgaaatatacgatcaaccaacatttatcgaatttgaaaaagagtcagaagaaatggttcgatcctcttattttgatttctcggaccgagagatccatgaatcgggatcctaatgcatatagatacaaatggtccaatgggagcaagaatttccaggagcatttggaacatttcgtttctgagcagaagagccgttttcaaagagtgttcgatcgattacgtattaatcaatattcgattgattggtctgaggttatcgacaaanaaaatttgtctaagtcactttcgttctttttgtccaaggtacttctctttt

SEQ ID NO: 42713 - DNA, 441 bp, Gossypium hirsutum
  unsure (1)..(441): unsure at all n locations
  Clone ID: LIB3196-047-P1-M1-H8
ggcgacactataaaacaagtcactataaggaaagctggtgcgcccgctcgctgccgtcccgggatcagggttccgccacacacacccggctaagtaaggggttgatgggtgcatgtattttaccatgttggccagcatggtctctaactcctggcctcacgtgatccacctgcctcagccttccaaagtgctgggattacagctgtgagccatcatgcccagccgagtgtgcatgttttcaatctctccctgttctgatgctcaaagttacaactacacaaacactgcaactggctttgctttttgtcctgatagtatctcacaagggttccctgatgcaggcagtcttactttctagacaacctaccaaccgtcgtncacaacacacttctggggccataataagggaacacttttgtaatgaaatgtgagtgaaatcag

SEQ ID NO: 42714 - DNA, 358 bp, Gossypium hirsutum
  Clone ID: LIB3196-048-P1-M1-A11
atttcatcagtttctccgctgctaccatgagcctctccttatccttcactcatccaatcttaagccgccacgtctattccgccgtatttcctcctccccggtttctcttcctctctcctctcatccccaccacgtcccgtttccctattctctaccgcgcgccccaacgcgccaccgcactctcagccaccgctgtaaccgcctctatcttccgagataccgctgcttccgcctctgtctttgctggcgcttatgctctcgtcttcaccttcgatattctcactcaaaaggagctcattcagcagaatgtaagtagaaaattggtgcatatattatctggattactttttgcattttc

SEQ ID NO: 42715 - DNA, 387 bp, Gossypium hirsutum
  Clone ID: LIB3196-048-P1-M1-A3
atggcggcccggccggccggtggctgcaccacgctgggtcctgcgctggagtcagcggcctgctgaggagccgggggccgggcgggagagccggggcgagccggccgctgagcgtgtcggcgcgggcgcggagcagctcagaagataaaataacagtccactttataaaccgtgatggtgaaacattgacaaccaaaggaaaagttggtgattctctgctagatgttgtggctgaaaataatctagatattgatggctttggtgcatgtgagggaaccctggcttgttcaacctgtcacctcatctttgaagatcacatatatgagaagttagatgcaatcactgatgaggagaatgacatgcttgatctggcatatggactcacag

SEQ ID NO: 42716 - DNA, 372 bp, Gossypium hirsutum
  Clone ID: LIB3196-048-P1-M1-A5
cggacgcgtgggggatcattcttaatctctatatttctcgatatttaaaattttagtctcgatgcaaatgaaagtcattagatccatatactgcattttttaaagtaatatgtgaaaatagcacattgacatgatgctacacatatgataatatgtttttagcattatattttgaaaataacataacttaatgaatttaacaactattatttggcaagaactgaaatttcaaagttcaaaaagtattaaggattgaaaattacaaaattaaagtatatgaagtaacgactagtttctcattgcttttggaaagtgcagtgaaaaaacgcttataaaaaactttgtttaaaatttgagtgtttagtattatag

SEQ ID NO: 42717 - DNA, 316 bp, Gossypium hirsutum
  Clone ID: LIB3196-048-P1-M1-A7
ccgacccgtgggcgggcgcgtgggcttattctagcgatattaccaggggtcaatttgagagatgaagcttcaagaggcatgggtggtggttccgtgggtgggtttggaaccacccacattttggattttgacctttaccaacctggttattggcttaatatggaaggttggatggccatgggtggagctcaacttctcatattggggatttgggccggcattactaggcattcattacgcttgaagggttggctggttgttgtgtggggaagccctgttgtgttcttgggaatattccacttttcaccttataaag

SEQ ID NO: 42718 - DNA, 389 bp, Gossypium hirsutum
  Clone ID: LIB3196-048-P1-M1-B12
atggtttccggaaagtggtccacatcgagcagggtggcctggtcaagccagagagagacgacacggagttccagcacccgtgcttcctgcgcggccaggagcagctccttgagaacatcaagaggaaagtgaccagtgtgtccaccctgaagagtgaagacataaagatccgtcaggacagtgtcaccaagctgctgacggacgtgcagctgatgaaggggaagcaggagtgcatggactccaagctcctggccatgaagcatgagaatgaggctctgtggcgggaggtggccagccttcggcagaagcatgcccagcaacagaaagtcgtcaacaagctcattcagttcctgatctcactggtgcagtcaaaccggatcctgggggtg

SEQ ID NO: 42719 - DNA, 353 bp, Gossypium hirsutum
  Clone ID: LIB3196-048-P1-M1-B5
gttcgttggagcttagcccgagcacttgcaaaactggcattgcttcccattgtgataatggaaaggatggtgatgtagctcttatagatgtaggaaccggccttgagtatttcacacttggctatgtttctccttcattgaaaatcgatctgagtggctgcaaagcatcttgtgttagtagttgccactatatagttatgttctatgacaacagttcgagggattgtttcttgtttaatgacgttgggagctttcagagatctaaacacaggtccaatttggttgcttttgtgatgtcgagaaatgaaaatggtggagagggtgcaaaagggacaagagccttcccatatgtt

SEQ ID NO: 42720 - DNA, 150 bp, Gossypium hirsutum
  Clone ID: LIB3196-048-P1-M1-B7
atgggatgtggtttccgttaagctggacaacagtgcctccggagccagcgtggtggccatagacaacaagatcgaacaggccatggatctggtgaagaatcatctgatgttgcttgagagagaggtgaaatctgaggacaatccaagctg

SEQ ID NO: 42721 - DNA, 334 bp, Gossypium hirsutum
  Clone ID: LIB3196-048-P1-M1-B8
atgaaacgaatgcctaaacaggaaacttggattggtaaccttccaattcccaccttatcttgattttttatatttgtaaacttttccttttgttgcaaaattagattctttacttcgtgaattttttttttaagtaagattctttacttcgtcttggacggcttgacttgtttgtgatgattttgtattttggctttcatacttgtttggattaataatggttttctcttctttcttgccctttcattacctttgaaattgtgaggtcgttcattgttgcaattattatggaattcggcgaaggtcctttttttttttaataattacttaatct

SEQ ID NO: 42722 - DNA, 239 bp, Gossypium hirsutum
  Clone ID: LIB3196-048-P1-M1-C1
atccctgatgttggctttgcttgtaagaagtttaatggctgctctggcctgctatggcattttggctgcaattttgtctggcagtgggtggagaactggtatcaagaaagggaaccgggagtagtgatggagataatagtgggggtggggacagagaaagacataagggactgtccctcttgaactctgccttttggcacattggagaatgggacaggggagatgacaataatggaacc

SEQ ID NO: 42723 - DNA, 390 bp, Gossypium hirsutum
  Clone ID: LIB3196-048-P1-M1-C4
atgttcttcgccccctggtgtggacactgcaagagacttgctcctgaatatgaagctgcagctaccagattaaaaggaatagtcccattagcaaaggttgattgcactgccaacactaacacctgtaataaatacggcgtcagtggatatccaaccctgaagatatttagagatggtgaagaagcaggtgcttatgatggacctaggactgctgatggaattgtcagccacctgaagaagcaggcaggaccagcttcagtgcctctcaggactgaggaagaatttaagaaattcattagtgataaagatgcgtctgtagtaggttttttcgatgatttattcagtgaagctcactctgagttcctaaaagcagccagcaacttgagggat

SEQ ID NO: 42724 - DNA, 387 bp, Gossypium hirsutum
  Clone ID: LIB3196-048-P1-M1-C9
atggaggatgaaacccggccggggggataccattgcagtcaatgtgacagagtcctgatgtccatgcaggggctgcgttctcatgagaggagccacctggccctggccatgtttacccgcgaggacaagtacagctgccagtattgctcctttgtttctgctttcaggcacaatttggatcgccatatgcaaacgcaccacggacaccataaaccattccgatgcaaactctgctccttcaagtcctcctataacagccggctgaaaacacatatactcaaagctcatgctggtgagcatgcctacaagtgttcttggtgctcgttctccaccatgacaatcagccagctgaaggaacactccctcaaggtccacggaaaagccctg

SEQ ID NO: 42725 - DNA, 363 bp, Gossypium hirsutum
  Clone ID: LIB3196-048-P1-M1-D11
cacacatcttgctagccgattcttctccatttagcaaccaatgcacatatgtgctcacacaaaaatgctaaaaaggaggttcaagaatcatcaagccatcatcacatgcatcattaacaagcttcatattttgcatgcaatggcattaacatgacctccacctaggccgaatcttaactcatcctcatgcctcatcaccacaacatcaaacatcaaccaagaatgatgcatccatggtcaagtgccatttccatcacatagcaagatttagaccatgggctaggtagaactcaagctaacaactaaaacatgcatgcatctcatggaacatcatcaaacataccttagcctagctacatgcat

SEQ ID NO: 42726 - DNA, 240 bp, Gossypium hirsutum
  Clone ID: LIB3196-048-P1-M1-D12
cccacgcgtccgcttataactgtgttgttaaagacaaaatttttaaaataaattaaattctatatataaaaagaaaatatatatccttatatttcctatagaacatataatacatatttcttgtacaaatattaaaatatatctaataaaaaaataattaacacatgattcattacccataagatagaaatcacatgatacttaaattgtgttatttttaagtttcaatatagtacattc

SEQ ID NO: 42727 - DNA, 314 bp, Gossypium hirsutum
  Clone ID: LIB3196-048-P1-M1-D3
atttcgggatttttttattaaatagtttattccatggtttccttttttttaattatctaaattttaaaaaaaattaattatttattttggggggtgggttttggttttttttttaccctattaaataaatttttttttaccttaccattttttccaccttccacttccttgtgtaaaagtattattggaaattaatttggaaatttggtaaaatacctggttttgatattgatttttcctgcggttaattttttttaaaaattaggtggcttacctgtaattaattaaaaaagggattcctttatttggatttt

SEQ ID NO: 42728 - DNA, 389 bp, Gossypium hirsutum
  Clone ID: LIB3196-048-P1-M1-D5
atgcttgcaggcttggaagtcctaagtgatgaccctgatctagtgaaggtggttgagtctttaacttgtggaaagatctttgcagtggaaatacttgacaaagctgacattccacttgttgttctatatgatacctcaggagaagatgatatcaatatcaatgccacctgcttgaaggctatatgtgacaagtcactagaggttcacctgcaggttgacgccatgtacacaaatgtcaaagtaactaatatttgctctgatgggacactctactgccaggtgccttgtaagggtctgaacaagctcaatgaccttctacataagatagaggactacttccattgcaagcacatgacctccgagtgctttgtttcattacccttctgtgg

SEQ ID NO: 42729 - DNA, 303 bp, Gossypium hirsutum
  unsure (1)..(303): unsure at all n locations
  Clone ID: LIB3196-048-P1-M1-D8
gggatggagcccaccctggaaagtncacagtgttcattcgggggtcacacaaaacacaaaggccttcaccatggagtttggcttgaactgggttttccttgtcctaatttaaaaaggggtccaggggggggggtccttgggggagtctgaaggaggttgggtccacccgggggggtccttggaactttcttggggagcctttggattaaccttaagcttttttggcttaagtggggtccgccaggttccaggaaaggggctgcaggggtcttaaatatataaaaaggaggttcttttatatac

SEQ ID NO: 42730 - DNA, 342 bp, Gossypium hirsutum
  unsure (1)..(342): unsure at all n locations
  Clone ID: LIB3196-048-P1-M1-D9
atcaacttttcctgccttncccacgccccaaattatttgggtgttttggtacctttctcacatctggaaaagagacatactgtggctgattctttttccatatccggggaaagtctgttctggtacctaaaggtgagtgagagctttctttgatttggataaaacagtccctccagcagctattttgggttcactcccagcttttaatgattgttccccgggggaccataaatgtaaaggaggttagttaacaaggttcagtgtgatggtgtagttgcttttcttgtttgccaaaaccatttgatcaggcacaagaacttgttttagtgagcgtcctttatt

SEQ ID NO: 42731 - DNA, 314 bp, Gossypium hirsutum
  Clone ID: LIB3196-048-P1-M1-E2
aaccacgtggccttgtaaattgtggtaacagctgttatgccaatgctgtccttcaatgcttgactttcactcctcctctgactgcttactttcttcatggaatccattccaaagcatgtgcaaagaaagattggtgtttcacttgtgagtttgaaaaattaattttgaaggctaaagatgggaaatcaccgctgtcccctatgggaatactttcccaactacaaaatattggcagtcaacttgctaatgggaaagaggaagatgcacatgaatttttaaggtatgctattgatgctatgcaatctatttgtctt

SEQ ID NO: 42732 - DNA, 361 bp, Gossypium hirsutum
  Clone ID: LIB3196-048-P1-M1-E7
cggacgcgtgggcgcctctggggctcttgttacttaacctagggctgttctttattttccttttctctctgttctttgttccgtttgctttacttctttctgcttcaatgtcgtttaggggattcagtcgggtatatctcactctgtcatgacttctttattggtttatttccttttgagatgttaaaaaaaaatgtttaatctgctatttcttatgttgatatcaatttattgtatctgttaaggtgactttctgctattgcatgttgtatatgttgtttggttttctgtaaaactttgaattacttctcatgttccaatcgatgctccaaaattaataaacatgggcacccatttttta

SEQ ID NO: 42733 - DNA, 218 bp, Gossypium hirsutum
  Clone ID: LIB3196-048-P1-M1-E8
acttttttaaactctacaccggaattaaattatcatgttctatctttaactcaattccatattatttatgaaaaccatgaggaactgatccctctatggggattagcgagtggaggtatgatttgttaactgttttatagggctactcaacggatcaactgtttgggaaaggaagaacctaaaccctagggagtcattaacgggggcatgaacccagc

SEQ ID NO: 42734 - DNA, 230 bp, Gossypium hirsutum
  Clone ID: LIB3196-048-P1-M1-E9
gcgaaagatggcaacaaggaagagaaaaaaggagaggaaaaagaaggcggtgaggaagtaaagaaagaagccggtggtgaagaagacaacaaagacaaaaaagaggaaggtgatcaaagcacggaagccaaggcagctgccgcagaagcggcggctgaaggttcgacggaagagacgaaagtggcggtggaagtgaagaaaaatgaatactgttactacccgccaaagta

SEQ ID NO: 42735 - DNA, 184 bp, Gossypium hirsutum
  Clone ID: LIB3196-048-P1-M1-F1
atgtgggatcgccgttcttgtttgtgtgtaggtgtcatagccacttgacaatgcaaatcttatgtatgacccttacttgtaagaccatcatccttggggttgagtcccctgtccccattgtgaatcgtaagggcaaaattccagataaggtaagcatttcttccaaacaggggaagcttatctt

SEQ ID NO: 42736 - DNA, 371 bp, Gossypium hirsutum
  Clone ID: LIB3196-048-P1-M1-F11
cttttcccttccgtttacattatatactcagatgcgaacatatttaacgaatccagattactgtttggttagagtgagcgaaaggagcgaagatgataaaagctgtgatggtgatgaacactcaaggcaagtcacgactggcaaaattttatgagtatctgtcagttgagaagcagcaggagcttattcgcggcgttttttcagtcttatgcagtagagctgagaacgtaagcaatttcatagatgcggaatcaatttttggtctggatagtcgtcttgtatacaagcattttgctacactttactttgtctttgtatttgatagttctgaaaacgagctagccgtgcttgacttgatacaagtttttgtg

SEQ ID NO: 42737 - DNA, 395 bp, Gossypium hirsutum
  Clone ID: LIB3196-048-P1-M1-F4
ataagatgagttgttagaccaatcctttagcttcctgcaatatagtggaggaaaatcaatggtagcaatgggaggttgtggtatccctagctgagttgtatgagcttttgctacctggtgcacctcagcctgaagattgctagagttgcttgcctcatgacatgggtcataatgggaactttgtcaagccccctacactggctgccaacataaatattcagtaccccaacgtcacccagctacagcccaacatcacccagctattcacctactagtcccaactacacgcctaccagccctaactacagcccaacctcttcaagctactcttcaacatcacccagttattccccgacctcaccaagttactccccttccagcccacgatacacacc

SEQ ID NO: 42738 - DNA, 394 bp, Gossypium hirsutum
  Clone ID: LIB3196-048-P1-M1-F5
atgggaagtgaatcgctctcgtcggcagtgtttgtggagggcctgaggagacagggaggctgtgccaggctggaggagtcttgtctttccgaagctggaaaggatcttacggaggttcgcctttccctgcctgggaagaatttcccctgtggtagcagcagcagcagcagcagcagcagcagcagcagcagcaacagcagcagcagcagcaccactgcctcctcttctggggcacagacagaatgcctgtgctagagcgctatttccacccagcagagctaggcaggaggtggacaggcccagaaggtgtgctgccctcctccccgggaagccggccggggtgccagcaggggccgctgccctgggacttgccagagatgatcaggatggtaaa

SEQ ID NO: 42739 - DNA, 287 bp, Gossypium hirsutum
  Clone ID: LIB3196-048-P1-M1-F9
gtcaacttaaatggccaaatgcataccaacatttacaatgcagatctcatggctcaaaatcataactcaaacatatcaagataacactagcctatacattccatataccatatatacaaagcgccaaaagtactaacgagatgatcaatagtgtgataacatctcccgacgatccccgagtctgagctagctttgataatctataaaataatgaaaaataaacatagtaagctttaaaagcttagtaagccatatacaaataaagttatcaaatgagtatttgcata

SEQ ID NO: 42740 - DNA, 389 bp, Gossypium hirsutum
  Clone ID: LIB3196-048-P1-M1-G11
atcgcgccggcgtccgccttcgggagctccctgctaggctcgggcggtagcgccttcgccccgcctctgcgcgcgcaagacgacctgacactgcgccggcggcccccgaaagcctggaacgagtctgacctggacgtggcgtacgagaagaagccttcgcagacagcgagctatgaacgcctggatgtcttcgcccggcccgcctcgccgagcctgcagttgttgccttggagggagagcagcctggatggactggggggcaccggcaaggacaacctcaccagcgccaccctgccgcgcaattacaaagtctctcctctggccagcgaccggcgttccgacgcgggcagctaccgccgctcgctgggctccgcggggccgtcaggcac

SEQ ID NO: 42741 - DNA, 388 bp, Gossypium hirsutum
  Clone ID: LIB3196-048-P1-M1-G12
atagaatttctgaagagaagaagtagcacaaagaggaccgacacaggttaaacgttctacgtcttgataaatcacagaagcagcacccaagccatcttaaagggatgttggaagaactaaatgcaagtgaagattttttcacagtagtggacacatagtatgtgtttataatttttgtcatcataccagatcacagaatttttttctacttttatctttcacaataaggatgattctacatctacaagagtacagagaagctacagtttatgtaagatacacataagagacatgccgctacagaagaatgaactctgacattcctatcttgtgaccctgggctgatgacttgaggagaaatgtgccattacaggggttggtgtccttt

SEQ ID NO: 42742 - DNA, 382 bp, Gossypium hirsutum
  Clone ID: LIB3196-048-P1-M1-G3
atgcgactttgaacccattttttggcagtgttcatattattaaactagtcaaaaatgctaaaataatttgggtgaaaatattttttaagtagtgttatagtttcatgtttatcttttaatatgttttgtgaaagttgtgtcttttcactaattacctatactatgccaatatttccttatatctatctgtagcatttatagtacatttagaagagaatatgaatatgaaacttaacactttataaggtaaaaatgaggtttccaagacttaataatctgatcaagttcttgttatttccaaatagaatgcactgggtctgttaagggctaaggataagaggaagataatgttacaaattattaatgaccaaatattctaaaa

SEQ ID NO: 42743 - DNA, 288 bp, Gossypium hirsutum
  Clone ID: LIB3196-048-P1-M1-G7
cccacgcgtccggtagaagaccaagtttaaaaatgcatagcataatttattattcatatgtataagaatctagcatgaaagtattaaattgtcatgacctgcccctgtgtattatatttttattagttagcttatatgttgattatgattaaattaattatttgatttgttaataatgctcgtgaccctaaatcgtcgacggagaagggttaagggtggtacatatttaagtgggtaggtttatttgggttttggataatgagtttaattgaatcgggttagtgattt

SEQ ID NO: 42744 - DNA, 361 bp, Gossypium hirsutum
  Clone ID: LIB3196-048-P1-M1-G8
gtagttacaaaaaactaggtgcacaacccctttactaaacactaacagatccatacttattcatttgacccctttaggcccaatctcgttcacatggcctatcaggtccaatcacattcatatggcccaccaggcccaatcacattcatatggcccatcaggaccaatcacattatatggcccatcaagcccaactacttcgcacctaacagttagatttacacaagcaagcccacgagcccatcgggcccatcgaggcccagaacagccctaacacctgagaacgctcgtgacggctttcagcattttttgatttctaacaaagaagggtgtgaatacacacctgtttatgagaacgccc

SEQ ID NO: 42745 - DNA, 373 bp, Gossypium hirsutum
  Clone ID: LIB3196-048-P1-M1-H11
atggacagactgcggggcggacggtggacgctgggacgcgtttgtaactccggccccacggttccgacccccgccgccgtcgccgccatgacggggctagcgctgctctactccggggtcttcgtggccttctgggcctgcgcgctggccgtgggaatctgctacaccatttttgatttgggcttccgctttgatgtggcatggttcctgacggagacttcgcccttcatgtggtccaacctgggcattggcctagctatctccctgtctgtggttggggcagcctggggtatctatattactggctcttccatcattggtggaggagtgaaggcccccaggatcaagaccaagaacctagtcagcatcatct

SEQ ID NO: 42746 - DNA, 382 bp, Gossypium hirsutum
  Clone ID: LIB3196-049-P1-M1-A10
aggatattaaaaattctctccatctttagctttcttcttgttctacggtgagtgactccggtggcttgtttagcaccggagtgggtcaatctttccgtttcctttttgtttcgcttcggtggtatgaagatcaaagaattaagggtgcatcgatatttgtgctggttgggatctagtccgtacgaagtaagtgatatcagatctttgagatctgcggtgtggctctagatccttcttattttgtccgccagatgatgaggaatcgatcatttcctgcctgcatgtccatgtttttttgctgattgctatgtgttcactccatttgtcgatcccctgttaatcaactatctttagactacattggtctgttgtgggtctgatc

SEQ ID NO: 42747 - DNA, 377 bp, Gossypium hirsutum
  Clone ID: LIB3196-049-P1-M1-A11
cctaccttcaccaatgatcaaagactaccaaacctctttttagtaattaaaagtaacataaatttacagttgaaacacaatcctagctttaggatatttttagaatattgcgtaacaaagcttggattgtgctataaatgttattatttgttacttttattattggggaagaaaggtgttggttgtggttggcaacaagtgcaggatgaagaagagaagagagaaaagagtaggaaaatgaaggaagtgaaatattgtcatggcaaaatgctagttggattgccaacaagaatgtcatggaaattctaggaagatgatgcaacattcagtccatgtcactctcagctagctatacttgtactagataaaccaccatg

SEQ ID NO: 42748 - DNA, 301 bp, Gossypium hirsutum
  Clone ID: LIB3196-049-P1-M1-A2
ctgcaggcatatatccagctcgcacgatctagcaactgccaggtttaacttaccttacataccaattcatacatgaccaatggggtaacttactgccatggcactggacgagtcaagacaacatggcaactgtgaaaaccatgctgttacccaagtatatgcacattgcagtacatacaaaactatacagcctagcgtcagtccctagatgaccagaccagtcgtgcttctgaacagactgacaggctcaatggtgaatggctcgcaatgtgtggaatccaatctagcacagctggaacca

SEQ ID NO: 42749 - DNA, 312 bp, Gossypium hirsutum
  Clone ID: LIB3196-049-P1-M1-A6
gcgaaggcttcgaatatagagaggggggcgtggcgtaattggattaaagcataagaccagagacatatatttatggtgaggtattaatcaatgcttgaagtacttttaccattgcccattgcggtatagagataaagagttgcgacaatatactatagtgcctccacttataggtgttcgggttcttaacaaaatacccgagtctcatgaactcatatttactacgtaggtctagtggtttgagatcccaatgccttttctctcgcggatgcttgcactaactcataaagcattattagccttgccagagtt

SEQ ID NO: 42750 - DNA, 356 bp, Gossypium hirsutum
  Clone ID: LIB3196-049-P1-M1-B4
gaggtaccgccccgaaattcgggattcggcccacgcgtacgaactgttgtaataccaaacatggggggcacttacaggccttaactacctattgtgacaaccatcctgccgtgctaattaacgtacactaaagcgagcgagccgtgcccatggagaacaccctgcttctcaagagaacactgacggacatacttgctgcacccaccggggaacctcagaaggaagggagctctgacatttatgccaatggaatgctgaacgtatcagctgtggacaacagtacattaaaagagaataagattgctatcactaatgacaagggctcgagtgagcaaggaagacagttgacgtatggt

SEQ ID NO: 42751 - DNA, 403 bp, Gossypium hirsutum
  Clone ID: LIB3196-049-P1-M1-B5
atccactgcactcctgtctgggtgacagagcaagaccctgtctaaaacaaatgggcattttggacaatatattcttgataatggaacctggacagcatttatcaaacacggtagggaaggttctcattctgcattataaaaaggactgccacatatcaactgttagagataggaaataagatggaaaatttttaactgtttattttcttaaagagacttcctgccctgccagagatcttcaatagcccccagtcagtcatccagaagccattcacataattgattatcttggcttccactttgaaagagaaccaccttttgctatacttggctgcattttttgctttaatgtcttctgcagaactaggttcttctggtgtttagacgtattttcctatttttt

SEQ ID NO: 42752 - DNA, 271 bp, Gossypium hirsutum
  Clone ID: LIB3196-049-P1-M1-B7
gcgtcatattatgctagagatggaactgaactgttggatatgaataatacattcaacactttgtacctagggagaagaaagacttgtatgtaaagagagtacagagaactgcgttgtgatatgatatgatcagtgagatagtagatgacaatgcttgagttgatgcaacagacactactgtagtgtaacatttgattgctttaaatgctacattgaccattgagaaagtagatgtttcctatccaaattatgccatgaagtgtactgtatt

SEQ ID NO: 42753 - DNA, 407 bp, Gossypium hirsutum
  Clone ID: LIB3196-049-P1-M1-B8
ataagctcaccacctatgagtacatcgtgcagcaccgcccaccacaggaggccaagggggttcacagggagctcgagtcatgtcctcccaagatgcggcccattcaggagatggagttctacatgcggaccttcagccatgtgcgcccagagccccctggccaggccaggccagcagcagtgaatgccaatccctcccagtttcttgccaccagtggccaagcggaacctccaccaccctcttccccagacactgttgccctgcctccccggatccgaccccagaaaaagaggaagaggcgcgtgtataaagtgcggacgtctgagacctcggatcgggcgtcggggcccagggcccccggccgccgctccagctcgtcgacggattccgcggacgccagccctgtg

SEQ ID NO: 42754 - DNA, 286 bp, Gossypium hirsutum
  Clone ID: LIB3196-049-P1-M1-C1
atgaagagactctgacacggggcgtaatttatacatactggggatttgtgactgacttgatactaattcagtttgtgcagtgatgatgccagtgtcctaactggcttattgccatggttgggcggaatgagtacagtgctcacacattgtatttaatgacatatacaaagcgaatgggaagcgaggtcttgtcatgtggatatcatgtagaatgcatgtgggtgcaccctttgaagagcggagggctcttgtgtctgagagccctctagctgtccacttggtttat

SEQ ID NO: 42755 - DNA, 381 bp, Gossypium hirsutum
  Clone ID: LIB3196-049-P1-M1-C11
taccgaaccccataattcacaattgaagccatacagctatgggctgaagacagctgggctggggagacgatgaccctgatgtcaggagactagaccagtcctagttccagggggaggcctgcagacccctggccccttccaccacctctgccctccatctgcagacctcggctgcaccaggctctacattcactcccccaagtctttggaaatttcctcctttcctttgaagtcacattttccttcaaaattttttgttttgcatccaaaaccaaaagaaataaagctgtgggaggctgtaaaaaaaaatcaaatatgtttaattttaataaaattataatcaatttaaatattctataataataatttgattataaaagg

SEQ ID NO: 42756 - DNA, 396 bp, Gossypium hirsutum
  Clone ID: LIB3196-049-P1-M1-C12
atgttttgactttttttctatttaatactgtgtatttttaaaatctgggtaatattgtatattttttaaaaagtatttttggttattggttgtggcaaactgaatttgctttttaatacttaggaatccacagcttttattgaaatagctcttttaataaaaacgactactgtatcttggcgtacagtgtagtacgcttttaaaaaaacttctaaatattcacagtttttctttaatttcatgattgttttactttctgtgttttaatggtctctgaatgtcagttttatagggatgttcttgccatagagtccatctattccattttcagtctatttgaaatgtgttattaaagtattatttattttaggttttattgattggattgctttcaag

SEQ ID NO: 42757 - DNA, 406 bp, Gossypium hirsutum
  Clone ID: LIB3196-049-P1-M1-C2
atgccatgggcagtattcctctctaataatgaagggtgtcaggtcagttttttagcaccttttgagagtagtaattggattactcaggccaccaacagagatgaatttcaaattgatgaaattttgatacaatatgaagggtcttttaccttcctgcttaatctgtaaaggtatttttttattctctgagcactgcatctttatcatgagtaaagcttagaaataatgaagtactttaacttgtactgtttctttcatggaaaaggaccaaactcttacccaggatctgccggagcagctgttggagcccatgacgcttaccgggatgcgaaagagaagcgttctaaaagccaagatgcagatttacctggaagttctggggcccctgaaaacttgacattcaagg

SEQ ID NO: 42758 - DNA, 384 bp, Gossypium hirsutum
  Clone ID: LIB3196-049-P1-M1-C3
gttttgaaactcacgagaaactgggttttcatttctttaagcttaaaagaaattctgggttgtttttttttggccattttgagtatagaaaaacatggcaaagcttgaaaattcgtcatcaatggcggtttctctcattcaagcatttcaacagacagatggtgtacaatcgaagaagaaaagaaatctccctggaatgccagatcctgaagctgaggtaatatcactatcaccaaaatccttactggccaccaaccgtttcatttgcgagatttgcaacaaaggctttcaacgtgaacaaaaccttcaactccaccgccgaggacataacttaccgtggaagctccggcaaagaaccgacggcaacgaaacaagaaagaaacg

SEQ ID NO: 42759 - DNA, 379 bp, Gossypium hirsutum
  Clone ID: LIB3196-049-P1-M1-C4
cggacgcgtgggccggtgagccgggttcacgtggggattgatcggaaaaccgggatgtgtaggggatttggttacgtcaattttgtgaagaaggaagatgccgaaagagcggtattgaagctaaatggttatggatatgatagtctcatattgagggttgaatgggccgatccaagaaccaattagatattcttcttttttttgagaattataactttatttttaatttaggttttctttttgggatattttaatttttaagtatctagacatattaggttttttttattaataaatttttatgtggaaattaaattccactaatcattaataaaattcaactaatttagtgtaaatttaatccaactattagtaaata

SEQ ID NO: 42760 - DNA, 375 bp, Gossypium hirsutum
  Clone ID: LIB3196-049-P1-M1-C7
aattaggcaatttacccatttttcaaaaacacgcagatccttcctgggtaatcgggtcaacttccagatcctagtctaaaacgatgtcgttttgaaggccaccgttcaggccaaaacgacaccgtttacatatggctatataagtaaattttttaacctaaaaatcatttggaaacccagtttttttaaaaaaaaaactcaaagaaatcctctgtaggaggattcagggttagccttggagcctcgtcggacctccgttctcaggcacctacacgtgcacgcgccaccgctagggccaccacacacgacggtcggagggttaaaaaccctcgtacttcggagcaaagtggtggtaagctccttccttttaatatt

SEQ ID NO: 42761 - DNA, 349 bp, Gossypium hirsutum
  Clone ID: LIB3196-049-P1-M1-D1
atgcgaccgccgacatattagggaccgcggagcccgggagcccgtcagcggcggctgcggccgggcttgcgggagctgcgggggccggaggcgggcgctgtgcggtgccggtagaggcggtgtcggcgggagccagcgagcgacgggagcgagccaggctaaccttgccgcaggccgagccctgcctcgccatggaccaggactatgagcggcgcctgctccgccagatcgtcatccagaatgagaacacgatgccacgcgtcacggagatgcggcggaccctgacgcctgccagctcccccgtgtccttgcccagcaagcacggagaccgcttcattcccctctagag

SEQ ID NO: 42762 - DNA, 379 bp, Gossypium hirsutum
  Clone ID: LIB3196-049-P1-M1-D10
cccacgcgtccgcgatgtttcaatacaatttcaattttataactttttgctcattttggttggtttctgacatgtttcattcaggttaattatacgtaaagggtagaaagatgagtcgcaggaatgctccgaagcttgagttgaagctgaacctatcgccaccaagggcaagggttaatccaggagtggaatcaccaagccgatcagctaccatatcaccgacatctcctccaagctcatgcgtgtcgtcagagatgaaccaggacgttgatgctgctaacgtcagatactcaagcagccctgaggcgacatccatggttcttgtagggtgccccaggtgcttgatgtacgttatgctttcagaggatgatcctaaatg

SEQ ID NO: 42763 - DNA, 398 bp, Gossypium hirsutum
  Clone ID: LIB3196-049-P1-M1-D11
atgctttattgcgggtggatgtgccacgttcctgtgtcagcccctggatgtgctgaagacccgtctgatgaactccaagggggagtatcagggcgttttccactgcgccgtggagacagcgaagctcgggcctctggccttttacaagggcctcgtcccagctggcatccgcctcatcccccacaccgtgctcacttttgtgtttctggaacagctacgcaaaaactttggcatcaaagtgccatcctgaccggccgtgggaatggctgggctgccaggccggctgcgctaagttcttccaaagagtcccaagcccagcacctgcttctggggccacaacctcgctggccatggccacccgtcctccccagcaggcccctgctgtccccccacctgct

SEQ ID NO: 42764 - DNA, 381 bp, Gossypium hirsutum
  Clone ID: LIB3196-049-P1-M1-D3
cccacgcgtccgcggacgcgtgggctggggcagagccttttaaacacttcctccatcaatataatccatatcccatgcaatatgtcatgtatgcagaatgtcatgcccatatttgaatcaaacaatcacagtcaaggcattcatatcaccaacatatgttcataatcaaatccgtcaaccatacactctaagtcagtcacttgcccacaagggcaaaacagtcatttttcatattataaaggtattttcgtaattttgccaaatatcagggttttccatgttcattacaattatcaatattttcgagtgtttaaataatgatctttaacccactttatcaaatttaggcttttgggcccaaaacccctaatgggccttacg

SEQ ID NO: 42765 - DNA, 391 bp, Gossypium hirsutum
  Clone ID: LIB3196-049-P1-M1-D4
atctttgtttgaagaaagggatgaagtatttttctcttttccatattttcctggtgtccttttcaaagggttgtgtcttagcaggtgtgagagcctgcactccttcctgaacagcccttactctgtgcccaagtcaacccaccggtgctttacaacagataatgatgataggaatagcttgtgagattgcccaggggctctgaacttgtgactgcctttcctgaagatgttattttcatggaaaaacatgcttgcttctttattacagggatgttttctttggagaaattgtatgaggaaaggcaggatttcctagggccgatgaagcaacttgctaaagtggaaggagaagacaggaagtcatgaaaagggagctaaagagttaaataaa

SEQ ID NO: 42766 - DNA, 398 bp, Gossypium hirsutum
  Clone ID: LIB3196-049-P1-M1-D6
atcggctgtatgctgtgggcggctatgacgggacctcagacctggctaccgtggagtcctacgatcccgtgactaacacgtggcagccggaggtgtccatgggcacgaggcgaagctgcctgggtgtggccgccttgcacggactcctgtactcggctggcggctatgacggggcctcctgcctgaacagtgccgaacgctacgaccccctgactggaacgtggacatccgtcgctgccatgagcacccggaggcgctatgtgcgagtggccacgcttgatgggaacctgtatgccgtgggcggctacgacagctcctcacacctggccactgtggagaagtatgagccccaggtgaacgcttggtcgtccgtggcgtccatgctaagccgacgcagc

SEQ ID NO: 42767 - DNA, 384 bp, Gossypium hirsutum
  Clone ID: LIB3196-049-P1-M1-D7
atgttttctggaaagaacacaatcacccccaggtgtgaactacttctctaggggacaattgaagcttagcatctttcacttttctacctactgacccaaagtccttttaccatacgtcgttaccttgctaattattttttcacacatatcttatttactagtttgttaattgcttaaaagtaaagattacatcctatctgttcattgatcagtgattcaacaaatacttagtgagtgccaaggaatgcattagactcaaagatgataacacaggtagctaaaagctgtgcgtgcaaaatcctctcaatccttgatacattccttggaggtaggttctggggttagccccatattacagataaggcaactgaggtcagagaaatt

SEQ ID NO: 42768 - DNA, 378 bp, Gossypium hirsutum
  Clone ID: LIB3196-049-P1-M1-D9
atttgaatgaactttgttcaaagagtgatttttctcctctctaaattcgtatgagtttcgatctgacttatctagcgtgctagtggcgtctatcgttctcttttgaacttatcaccttgctttggtgtggcgttcaaccttctacaattccgcaatcccaccttgaaccgaatagaaatcggggtgacacttttagtgttgaatcgtttctggtgtttaagctcatttatccattccaccgactatcctagattttacccaactataatatctttttacaaaaccgagccatcatttatcaacttccatttttcttatttttatacttaaatcgagcctactacccttatgaaattaccatcaccttagccaaccttt

SEQ ID NO: 42769 - DNA, 383 bp, Gossypium hirsutum
  Clone ID: LIB3196-049-P1-M1-E11
aaaccaaataaaataggttctaaaatggattttaattaagtataaatacaaattcaaccttcaattttatatttttttaactaaatttgataattaatattttaaaatagttaaattgtttttaacagaaatttaattaaaacagtggcaaccctcaatgtaattcatgtgtactctatactaacatgccaatatttgttttatatgtcatgtcatcaaatatttaaaaattataaaaaaattttaaaaatttaaaattcaaaaaaaattagcatgaagtatacgcgaattgtcaaatgagttgtcaataacatgataaacaaatgatgtgcatttaatatgatgtatttacatatttaaatctctttttattcatattttaa

SEQ ID NO: 42770 - DNA, 381 bp, Gossypium hirsutum
  Clone ID: LIB3196-049-P1-M1-E12
aggcctaggtgtgcggactatgaattagacgtatgtaacaatggactaatttgcaatcttttgattggtgcaatatggcatcacattactttatcaattttttatgattatttttttctattgagtgaaacttgcaatcttttttaaaggtatgttagttatacacaatcaacaacgaattctttccaaaattcaaaaggaactaaaagggaatagatttggaaatcgattttggaaggtgttgcactagtttcatgtatgatagacttgcatagcatcaagacttttaatgtagatacatgattcaaaaatgattacctaatgaactacaaagaacaatggaaaaaatttacctcatgcaaacatgaaagcttaaaacct

SEQ ID NO: 42771 - DNA, 384 bp, Gossypium hirsutum
  Clone ID: LIB3196-049-P1-M1-E4
gttcacagtccttgcttctaaaagaaggcatcactcaaaccggatctccgatctgcacagatgaaagtttggaggagcaattggatgacccctttgagccagaggagccagaggagaggtgggagtcctccgaaggtttcgatgttctcgtggataacaaatcagaggatttggattatgggaatgattcggaatatcagaaggaccctgaagaggagcagacagattacttctttagttatgattatgaagattcagttcagcatgagaccaggtacccggatttagaattttcgtatgatcgagatgcgtatgatgcttatgagggttcagacaatgagtatattttcaataatccgaggaatccttttgcccaccccggag

SEQ ID NO: 42772 - DNA, 404 bp, Gossypium hirsutum
  Clone ID: LIB3196-049-P1-M1-E5
atgccaggctggtctcgacctcctgacttcaggtgatccacccgcctcagcctcccagagtgctgggattgcagatttgagccactgcgcctggccagggcaggcccctttaagtgtgcatgagcaggtgcggggtgttgtgttcttcagggaactggggttcaaccctggaggcagcaggcatgcatgcacgttgcacacacaagtggtggggcgcgagggctgagggaagcgggctgccaggccgtcagaggctcctggtgaccgtttgtggcccgtttttctgggtctctcccaagagtgctcatggcccaacatggctcgggtcccccatgcccaagggcagcacagaaccagagagggaacctggcagccacagggggtgggagaggcaggatagtggt

SEQ ID NO: 42773 - DNA, 386 bp, Gossypium hirsutum
  Clone ID: LIB3196-049-P1-M1-E6
gaagaagaagagaaggaaagtagcaaggaggagaaaatcgttacggccacaaagaaaggggtggctgttctggatcaagggatcccagatgacataaaggctcattatcatgttctacaaaagggtgatgatatctatgatgccatgttaaatcagacgaatgttgggcaaaacaataacaaattctttgtgatccagcttctagaatctgatgactcgaagacatacatggttcataacagatggggtagagttggtgtgaagggtcaaattaagttacatggcccctttacttcacgacaagccgcaattgatgagtttcaaaccaaattctttaacaagaccaaaaactattggtacaacagaaaagactttgtttgtcaccc

SEQ ID NO: 42774 - DNA, 374 bp, Gossypium hirsutum
  Clone ID: LIB3196-049-P1-M1-F1
cagactagaatatctgatacccaagaagacatcgctgaggcatcgattgcctatgggggaccaggggtttatcgattttattgctcatttgcttgaagtaaacccaaaaaagcgcccttctgcatcagaggctctgaagcatccatggctatcatacccatatgaaccgatatcagcttgagttgcatgcagatttgcttgactcttattgactggggaaggaggtgtattttattactggctcggagttggttttgatctatttgaagtcatcactgtcaccccccttcacatgcctgcaaaatgcaattgaaaggtgtgtttgattttggttgggtataaatatttatggttttaattcctttcccccgata

SEQ ID NO: 42775 - DNA, 397 bp, Gossypium hirsutum
  Clone ID: LIB3196-049-P1-M1-F10
atgcaaggcctcctgcaattgttcaaacagcatttattaaattcgcagtacacaccgagtagcgttatgtagagaggagtcagattatctacttagattcggcatctacttagatttagcatatactagctgagaaattgtaggcatgtttgatacacatttgattccaaatctttttcttctggatctgctttttattttacaaaaatctttttcatacaaatggtttaaaagtaacaaaatctataacaacaactttggatttttatgtataaactttgcgatttaaatttactgaatttaattagggtgaaaattttgaaagtggtattctcacatgactaagttcagtaaaaccctggattgaaagtgagaattatgttcctagaacaaaatg

SEQ ID NO: 42776 - DNA, 382 bp, Gossypium hirsutum
  Clone ID: LIB3196-049-P1-M1-F11
tctcgaccaacacaaacatttggttttggttttgatttcgattttgattatatttcactttattccctgttaacttgttgttcgttcctctcagagcaatcaattgtccatcacaagaatctctctcactctttcttttccgattcaagactcggacaacccaatgaacgatctcgagcgagtcaagaaggaagacccgtttctcgtcaagtatcagccctccgaactcagaatcgcctctgagttcttaaccacgtggcttcctttcctttccagggatctctgccgtcgatgcactcaaatcctctcccgacgaatccgctctctagacccaggagatgctgagctggccaacaatgatctgaatgcaatccattctacc

SEQ ID NO: 42777 - DNA, 387 bp, Gossypium hirsutum
  Clone ID: LIB3196-049-P1-M1-F4
cccacgcgttcgcggacgcgtggggtcgccatttggagttagctgccatcttggtgcaaaaggatcctattcgtgcagcagcttgggatccgataagcactcgtcttgttctttgcactggcagctctcatttgtatatgtggaccccttccggtgcgtactgtgtaagtaatccgctaccacagttttctataactgatttgaaatggaattcagatgggagctgtcttcttctcaaagacaaggaatcattctgctgtgcagctgtgcctctactgccagaatcaagtgactattgctcagatgagtgaaacaaatttctcttgtaatttgtcttgctgctatctagagaaacagaaatataaataggcattctttagttttttt

SEQ ID NO: 42778 - DNA, 361 bp, Gossypium hirsutum
  Clone ID: LIB3196-049-P1-M1-F8
atgctggggtgagggtagacgtgggggggctgggggggttactggggtgggcttttaatttcctcccctcgctggtttctatgagtctttcagacaagaccttaaatgatttctgtctgctctgagcggacgttaaaatgggcccccgtcccctatccacaccctccttcctcagggcacttactaagggaggggtctccctctccatctacccaatggcctacctgcctccaaccctgcctgccgccccctgcccaccccacatctactggccactgaaacacaaacctatttatttctaggcctgtagaaaggaaatcggactggggttcccggttaagcaccaagatggctcctgggc

SEQ ID NO: 42779 - DNA, 400 bp, Gossypium hirsutum
  Clone ID: LIB3196-049-P1-M1-G1
atgtccagagcagagtcagccagcatgaccgagcgccgcgtccccttctcgctcctgcggggccccagctgggatcccttccgcgactggtacccgcacagccgcctcttcgaccaggccttcgggctgccccggctgcccgaggagtggtcgcagtggttgggcggcagcagctggccaggctacgtgcgccccctgccccccgccgcgatcgagagccccgcggtggccgcgcccgcctacagccgcgcgctcagccggcagctcagcagcggggtctcggagatccggcacacggcggaccgctggcgcgtgtccctggatgtcaaccacttcgccccggacgagctaacggttaagaccaaggatggcgtggtggagatcaccggtgagtccccct

SEQ ID NO: 42780 - DNA, 340 bp, Gossypium hirsutum
  Clone ID: LIB3196-049-P1-M1-G2
cggacgcgtgggctcggctactaattaactaatcaattagttgatacttgcttatctcccgacttcgtcttgcctatgataacttcctagggttgtcaagtctagtggtttaaggatatgtaatttgtaccaactaatccctcttcggaaaacctaaatactctgttaattacaacctcatgcactcgttaatctcccctaggggatttagccactcatgttattcataatatctttattaattgaataaacaatgtaaagaacatgacgagaagaaaagagatttgaataattgtggatttaatatcgaatggggaatagagtagtaaatctattggtt

SEQ ID NO: 42781 - DNA, 385 bp, Gossypium hirsutum
  Clone ID: LIB3196-049-P1-M1-G7
atctccggaacctcaagaacaaactggagaataaaatggaaggaataggtttgaagaggacaccgatgggcattgtcctggatgccctagaacagcaggaggaaggcatcaacagactgactgactatatcagcaaagtgaaggaataaacataacttacctgagatagggttacagcagaaattgagttgcagtttgcccttgtccagacctactttctacttgtgtttttgaaataggaggtgcacgtaccacccaattatctatggcagcatgcatgtataggctgaactattatcagctctgatgtttcagagagaaggcctcagaaactgaaagaaaaccaccaccctcctattgtatctgaagtttcacgtgtgtttat

SEQ ID NO: 42782 - DNA, 348 bp, Gossypium hirsutum
  Clone ID: LIB3196-049-P1-M1-G8
ccaatctttcattctttgctgttgaagtagtaatatctatagcatacagagatggagaggcaaagaagcaagcaggtttgtttgttgatgtgggttttggttgctgcctttttctcccacaatagggtcattgcagcgaccttcactggccttggcgagcagaaaaactactatccaggtcctgaccctcatgctggaactaccccttcaggttcacatggcacaccaccatcttcaggaggtggatcacctgcctgtcatggtaccccgtcacatggaggtggttaccaccctataccaacaccatcaacgccttcaggtggaaattgaggaacttctcgacatgac

SEQ ID NO: 42783 - DNA, 380 bp, Gossypium hirsutum
  Clone ID: LIB3196-049-P1-M1-G9
ctctcccatgcatcatagagggtctctaaatccatctgtacaaaggaagagatatcattcctcaacttagctgtcttagccgatgggaagtacctcaataggaatttatcagtaatttgatcccatgtagtgataaaacctcgtggtaagtaattcaaccactatttagctttattcctcaacgagaaaggaaacaaccgtaggtgaatgacatcgtcagaaatgccatttatcttgaaagtatcatagacttctagaaaattagccaaatgagtatttggatcttcgtcttgtaaaccatctaactaaacaaattgttgaatcatctgaatagtgttcggcttcaattcgaagttattcacagcaataataagtctcac

SEQ ID NO: 42784 - DNA, 363 bp, Gossypium hirsutum
  unsure (1)..(363): unsure at all n locations
  Clone ID: LIB3196-049-P1-M1-H1
atgcgcatgcagcacctgattgcccgtgaggcagaggccggcatctaccacttgcaattatttgaggaactccgccgcctggcgcccattaccagcgaccccacagaagccaccgccgtgggtgccgtggaggcctccttcaagtgctgcagtggggccataatcgtcctcaccaagtctggcaggtctgctcatcaggtggccagataccgcccacgtgcccccatcattgctgtgacccggaatccccagacagctcgtcaggcccacctgtaccgtggcatcttccctgtgctgtgcaaggacccagtccaggaggcctgggctgaggacgtggacctncgggtgaactttgccatgaat

SEQ ID NO: 42785 - DNA, 379 bp, Gossypium hirsutum
  Clone ID: LIB3196-049-P1-M1-H10
cggacgcgtgggtgataactgtaaaccagataggtttacatacaatattctcattcatggtgtttgtaaagccggtgtcatcgatgaggcagttcggttagttaagcagatggaaattttcggatactcaccgaatatgtgtacttataccatcttaattgatgggtactgtaatgccaggagggtcgatgatgcgtttaaacttattgagacgatgaagaaaaggaatgtgtttcctaatgaagctaccgtgagatcgttgattcatggggttttccgttgtgtggctccacgaaaggcattcgagttgttgataatgttcttggagaaggagcctatgatgcagagattggcttgtgatactctactgctttgtctt

SEQ ID NO: 42786 - DNA, 394 bp, Gossypium hirsutum
  Clone ID: LIB3196-049-P1-M1-H12
atgaaagtggcattcattaggaaatgaaaactgctgtctctggcatcctgtagtttatggagggtggaagatgaagccaatctctacttgagaaggctaccaaggagagaaacattgtccccaggggaaagctagattttagacaaggcaaagagcaggaaggggtggttgaagagattgagaatgacattccagaaaggacaatagaaagtcttgggaaggagggagagaggggaagagagaaaggatagctggtcacatagagtatctatagggataaaagtatagctaaaagaacctacattttaggtggaggtaatacagctgcctaagcttaagtgaactgctttttgaatcttagtttgctccttcataaaattggattaatataata

SEQ ID NO: 42787 - DNA, 402 bp, Gossypium hirsutum
  Clone ID: LIB3196-049-P1-M1-H2
atttgcctttatgacaagcatatgttttgacattcaggaggagtagtgtgtgatgtgagatttgaaattcatttcctttttgttaaaatattaataaaactgttaacatgtttgctttttctgaataaatttgacctttaataaaacacttaaaactctacagatccatttgaacgtctactaaaatgtcactttaatatttgaagttgctatctcattactatttttccttctatttaaagatggccttcgccggattttatgtcaggttggtttgcaggaagggccagatggtgaaaactcttctctagtggacagactgatgcttagtgattccaaattatggaaaggtgaatcttttaactacttttaaggtgtggaggaacctatataactaattgg

SEQ ID NO: 42788 - DNA, 389 bp, Gossypium hirsutum
  Clone ID: LIB3196-049-P1-M1-H4
atatcaatcccgaaaaagaaatttcaggttttgcattgaattccatcaagcgagcaacaatgggtttcttggagctgctgtaatgtaaattgtaaatgtagtgtatgtccatacactcaacagaggagtaaaagaaaagagaagatgcaatctcgtgctccgccaaccaaatccaaatgggaaattccatcgctcacaaaacccgttacgcattgaccttcctctgcttcatacttctcgtcctctttacccttttcctcttcaccaaacgtacgctcgaaccctacctctccttctatcaaccatccttccatatccactcttcaaatgccgcattcattgatggtaaccaaactcttgacactgctcacgagaatagggaaatgtgt

SEQ ID NO: 42789 - DNA, 388 bp, Gossypium hirsutum
  Clone ID: LIB3196-049-P1-M1-H5
tgaatattggtttgagtgagtggttaatgagtgagtttgaaacggttcaacctttttaaaggaatgggcgttggaaagcaaaaatattgtgaattgggaaatgatgtggtaagcaaaggaaactacttcatggcgtgaggactacgcacttgggtcatgggttgcgcgtcggtgctcgcaaccatgacaaactggtgcgatccatcgtgttcgagggaggtcatttagcccaaccaaactggcttaaccaaactggcccagtgattggagagattaaaagcccatctcaagagcctgatagaaatgggaagtgttctagaagatataattatggaatcttagagttctatttgtatatagctggttatgtaagcttagagttctaatt

SEQ ID NO: 42790 - DNA, 388 bp, Gossypium hirsutum
  Clone ID: LIB3196-049-P1-M1-H9
atctttaagagtgatactttgaatacaaccttttatcatattttaagttttaatactgggaaataaagtgtctacattaaaactttaagaaaataattgaatgaattttaggcccaaataaaagtttgatatattgtatttattctctcctttgatatagcagagacaaagtatgtcctcatagaagtcatttttactttttctggatatggccttcataaatttgcatagaaaaaatattttctcctaaaacaccataagaaactactactttttttctgcatggtttaggcctttattatttaagataataggcatttttagaactattatcaaatagttatgtttatttagattcaactattttttaaaagaccagactattttt

SEQ ID NO: 42791 - DNA, 389 bp, Gossypium hirsutum
  Clone ID: LIB3196-050-P1-M1-A11
cggacgcgtggggaagacccgatcggccgtgttttgaagaaaacacagcttgcagatggacttattttagagaaaacctcaagtcctttgggtgttcttttgattgtttttgaatctcgacctgatgcgcttgtacagatagcctcattagctatccgaagtggtaacgggctccttttgaaagggggaaaggaggccaagcggtccaatgctattttgcataaggtaataactgaagccattccagacattgttgggggtaaagttattggacttgtaacttcaagagatgagattcctgatcttttaaaggttggtggccgtattggttcttggatcccacgaggcagcaacaagcttgtttcccaaatcaagagttcaaccaaaat

SEQ ID NO: 42792 - DNA, 370 bp, Gossypium hirsutum
  Clone ID: LIB3196-050-P1-M1-A12
aaaaaaacattaaagaaaataaaaatcaccatcgttattatttttcaaatcatggtacaaaagagaaaagatcagttgttctcaggttaataatttatattatgtctattacttttggttcttcgattgtcagttctctatagaccgtagaggaaatgtaatttattttcttggttacaggttgctctttacctctgctatgtcataatgttttataaattggatataagtgactatttaatctttgcattttaaggaggaacttatctgttatttattttagaattgtttttcttcagctgaaataacccttgacaaatgtgacattgaattcctcacttgtattagatttgatgcactggagatagca

SEQ ID NO: 42793 - DNA, 420 bp, Gossypium hirsutum
  Clone ID: LIB3196-050-P1-M1-A3
atcccgcagtgaaggttgcccgaggatggtcgggcctggcgttgggcgtgcggcgggctgtcttgcagcttccagggttaactcaggtgaggtggagccgctatagtcctgaattcaaggatcccttgattgacaaggaatattatcgtaagcctgtggaggagctaactgaggaggagaagtatgatcgggagctcaagaagactcagctcatcaaagctgctccagcagggaaaacaagttctgtgtttgaagacccagtcatcagtaaattcaccaacatgatgatgaaaggaggaaacaaagtactggccagatccctcgtgactcaaactctggaagctgtgaaaaggaagcagtttgagaagtaccattccgcttctgcagaggaacaggcaaccatcgaacgcaacccctaca

SEQ ID NO: 42794 - DNA, 394 bp, Gossypium hirsutum
  Clone ID: LIB3196-050-P1-M1-A6
cccacgcgtccgcagtcggtaacttaattttgatatctcagaatgtaccgcaatataaccaccgcattttttgaaataaaatactttggatatgcctaatttacgctgaatttgcctcggtagaggtattttcaagtatagctttaacaacttccaaactattagattgtataatgacttcatggtgaccccttcattaaattagcctgagaccctccaaaatgccccaaagttcagcattaaaactgttgtaataaagtggctgatgccctttgcaattgggctaaaacaaacaattggtaaaatggattttaacatggattatgcttcggagaaccatgattttgttttgaatgatgccattaattgaaagttgacccttaagtcttttatc

SEQ ID NO: 42795 - DNA, 340 bp, Gossypium hirsutum
  Clone ID: LIB3196-050-P1-M1-A8
atggaaagcaccggaagacaggccgcgacgtggcagttaaggtcattgacaaactgcgcttccccaccaagcaggagagccagctccggaacgaagtggccattctgcagagcctgcggcaccctgggatcgtgaacctggagtgcatgttcgagacgcctgagaaagtgtttgtggtgatggagaagctgcatggagacatgttggagatgatcctgtccagtgagaagggccggctgcctgagcgcctcaccaagttcctcatcacccagatcctagtggctttgagacatcttcacttcaagaacattgtccactgtgacttgaaaccaggaaacgt

SEQ ID NO: 42796 - DNA, 281 bp, Gossypium hirsutum
  Clone ID: LIB3196-050-P1-M1-B1
ctgatttttaagttttctatgtgtccattcggccaaaagagatgattgttcattatccaaagctgccatttatttccttctcattgctggaaatcttttggccattcggttcaaggtgttcacaccttaaggctcttcaaaaccgtccattcacacctgatatggctgcttcaggtcctctctttattattggtaaattttcagcaatagttgcctcttgaatgctcatttaaacccattagctgaatgtagctgctacatgcatctccaagatccatttg

SEQ ID NO: 42797 - DNA, 367 bp, Gossypium hirsutum
  Clone ID: LIB3196-050-P1-M1-B11
atccaacgtgttcagcatcatgtgaacggagtctgccggacgtctccgcgacctccagccatggtgctcagtcatggggtcctggaggttgaggcacttctgtgccgcacgtttttgtggtttatggcgatgtccgagcagagtttgagaggatgggtctcagagtgagaaaaagaaaagtaaaatggcgatgctccgtgtggagagtgtgagagcggtggctgccaagggaaagccctgcacagccctcctgccaccctgcacggggctccccgcacaaccccgcccaagaccacttgatgtggggatggaccatcgaagggagtatgggctttaaaaggtgccagacactgaggaggcacatgcc

SEQ ID NO: 42798 - DNA, 386 bp, Gossypium hirsutum
  Clone ID: LIB3196-050-P1-M1-B12
cccacgcgtccggacgactttgtgtcgatcacatttacctagggctgtatgccggttatgttactctagttgatggctatgtgcctaacataatgcagttatcaatgggtttgtgccacgtattctgttaagtggctttgccacattatctgtttctggtggctatgctacaaatatctgttctggtgtccctgtcacaatatctgtatctggtaactctgtcacaatatctgttctggcagccatgctgcaaattctgtggtgtgtagtaaatggggtggtccagttgtctccccacatggcgtaaggttggtacgggggtgtatacagctggattgggttgggattgcattcacattctaattctgattctattacctaatact

SEQ ID NO: 42799 - DNA, 396 bp, Gossypium hirsutum
  Clone ID: LIB3196-050-P1-M1-B2
atgtgtgatgagaacggctctaagggttatgcatttgtccacttcgagacccaagaggctgccgacaaggccatcgagaagatgaatggcatgctcctcaatgaccgcaaagtatttgtgggcagattcaagtctcgcaaagagcgggaagctgagctgggagccaaagccaaggaattcaccaatgtttatatcaaaaactttggggaagaggtggatgatgagagtctgaaagagctattcagtcagtttggtaagaccctaagtgtcaaggtgatgagagatcccagtgggaaatccaaaggctttggctttgtgagttacgaaaaacacgaggatgccaataaggctgtggaagagatgaatggaaaagaaataagtggtaaaataatattt

SEQ ID NO: 42800 - DNA, 394 bp, Gossypium hirsutum
  Clone ID: LIB3196-050-P1-M1-B4
aaatgatgtcacttttttttatataaactaaaaaatatttcatgtttatttttaaagaactttaaataagatgtcatcatatgattatttgatatatcaaattataaattgtttctccataaaaaaatttagatgaagaaatataaaagcacgttccatatgatcatcttcattccaaagtttttccatcttgccatctcgtaatttcaacacgataagattctttgaattaaaacttgataaagatttgaaggggaaataatcccaacaaagataccttagcttattaggaagagatacactatcaacttggtttgcaagtagcttcgggttccaatcctctttctcaatctcaggtttatagaagtaaatatatctaagattaaacatgttc

SEQ ID NO: 42801 - DNA, 254 bp, Gossypium hirsutum
  Clone ID: LIB3196-050-P1-M1-B5
atgaaaaagaaaacataggtctcttaaaccaggcaactttcacattctgggagttgagactgagcaatttctccttgtaacaaagaatctccatgaaattccgtttcatctgttaactgtcactgagcacaacactcctcctctgggctctcttcctgctcctccagattctgctgctttccaattctctggtgatcttgagactaacaactggagactgaggccggagcagctgactcctggcagctgtgctt

SEQ ID NO: 42802 - DNA, 345 bp, Gossypium hirsutum
  Clone ID: LIB3196-050-P1-M1-B7
atggggtctgggatgggtaccctcctcatcagcaagatccgggaggagtacccagacaggatcatgaacacgttcagtgtggtgccttcgcccaaggtgtcagacacagtggtggagccctacaacgccaccctctcagtccaccagctcgtagaaaacacagacgagacctactgcattgataacgaagctctctacgacatttgcttcagaaccctaaagttgaccacgcccacctatggtgacctgaaccacctggtgtctgctaccatgagtggggtcaccacctgcctgcgctttccgggccagcttaatgctgacctgcggaagctggctgtgaacatg

SEQ ID NO: 42803 - DNA, 488 bp, Gossypium hirsutum
  unsure (1)..(488): unsure at all n locations
  Clone ID: LIB3196-050-P1-M1-C11
ctgtccgtgcttctactaaagcattcagaattcgccacttgcaagggtngtctggagtncttaggcganncagaaggaannatgttaagggcttcannacagcaccanntcagcaacctattctatgctacctaccatctatctagaatccatggtttnntcgatgtattccaacngnngtgatgattacttttngatccactaanncacgtggnngccctganntttcaggnntagcttgattctttagagtagagnntaccttaacttataggtcgagaggtgtcttnntaatttttnntccccccaagaattaaatttaagttatttggagattcattnnagtgaattccaagtttttttgttttttgataatnnntttcgtagactaaaattttctcttttgagtttgggcttttttttcctgccaaattttggcaaactcattaaaccccacttttcttacctgaggcaaatttagtaatttt

SEQ ID NO: 42804 - DNA, 420 bp, Gossypium hirsutum
  unsure (1)..(420): unsure at all n locations
  Clone ID: LIB3196-050-P1-M1-C12
atctgagagtcgcgcagagtggagtcagaggcaatcagtcctcgctccggtctctggggatccggaccgcggcggcggccccgcggacgggatgttccggggcttgagcagttggctgggcttgcagcagccggcggcaggcggtgggcagcccaatgcagacgctccacccgaacagccatccgagacggtggctgagtccgcggaggaggagctgcagcaaacgggagaccaggagctcctccaccaggccaaagacttcggcaactatttatttaactttgcatctgctgccacaaaaaagataactgaatcagttgctgaaacagcacaaacaataaagaaatccgtagaagaaggaaaaatagatggcattattgacaagacaattataggagattntcagaaggaacagaaaaa

SEQ ID NO: 42805 - DNA, 403 bp, Gossypium hirsutum
  Clone ID: LIB3196-050-P1-M1-C5
ggttaacgctgatattgtggagacctataaggctgcttgcgataaatatcttatgaaccgagggagtagaggcaaaagaaagaataagcaatattttgaatccgacagtctccctgttggtccttctggagtttatatgcaatcccctgtctccttggacaaggcattgaaaaatccgtctgagttagaagggatgcagaattctcacttgagggatgcagctgctttggcacagttctggtgctggctggaagaggaaattcataagaacgtgaaacttactgaggtagaccttgcagacaaacttctagaattccgttcgaagcaagatggtttcctagatacgagctttgatacaataagcggctcgggtgcaaatggtgctattattcattacacacct

SEQ ID NO: 42806 - DNA, 404 bp, Gossypium hirsutum
  Clone ID: LIB3196-050-P1-M1-D1
agcaaatatgtggagacattggaagaactgaggaatttcaaggcagctgggaaccctttcactgatgaattctttcaaatatttcaatctgtttataggcaacaaatagcaatgcttgagaagctgcatcagaggaagaacaagcttgacaagaagctcaagtgtatccacacgtggcgtaaggtatcgagcatgatattcgttgccacgttcgccacagtgttgatttgttcggttgtggcagccgccatggctgctcctccggtggctgctgcactcgccgctgcaacgtccatcccattgggttcgatggggaaatggatcgattccctgtggaggaactacgaaaacgtgttgaaagggcaaaaggaagtgatcacctcaatgcaagcaggcacttatgt

SEQ ID NO: 42807 - DNA, 399 bp, Gossypium hirsutum
  Clone ID: LIB3196-050-P1-M1-D6
gtatattctccggagagttcccctttccatacttcttgcaatagtatatgaattttaatatgaggtatacatgatacattatgtgtctttcatcagttatattagtttttaatagaaataactaatttactctttgagcaaaatgtaatttgactcttagtacaatatctctatagcacttttattaaatcaagatttttttatttcaataataataatttcaaactaatacaaccaactttctttataacaatctcatttatttgtcaacattttgtatgttataaagaaatagttatacacctaagctaatatagttcatcctctctataattgtctcatttatctattataaatctatatcattttgcactaagaacaatactgatgctaactaaa

SEQ ID NO: 42808 - DNA, 428 bp, Gossypium hirsutum
  Clone ID: LIB3196-050-P1-M1-D7
acactatataacaagttggtacgcagaagcacgctggtgccccgccgcaatttccgggatgaaaaacacgcatgagaatgctaggttaaagaaggagatcattacccttcagaaagatttgagggataggacagatgtcattgggacgtctgatgaaatggcaagcgcattaagccaaaaaacagacgagcttaacacaccggtaaaagacttgtcacacaaatatgcagaaataaagaatgtgaaagagaagctagtctaagaaaattccaaacagacctgtgagatacttgcagtgcaaaatcttttgcaaaaacaacatgttccattggcacaggttgaagctctgaaaaaatctcttaatggcacgattgaaaatctaacggaagaattgaagaatatgcaaaggcgtgacgagaaagagcagt

SEQ ID NO: 42809 - DNA, 409 bp, Gossypium hirsutum
  Clone ID: LIB3196-050-P1-M1-E7
ataaaatggtgttccatgagaaaaacaacttcatttagctttcagaagtaattacaggtggtttgccccttgatatcctttgtatttgagtatgcagaagtttttgagtattttccagtatcgaattaaaagaagtgtgctgtagtgttgagaaataatagaactaataatttttactgcttcattaaggaccctcttaagtgaaagtggaattttttgtattgtaaattgtggggtccagccccacagggtcggtgggtttttctccctgtgtgtggagatgagagactgtaggaataaagacaagacaaagagatgaaaaacagctgggcctgggggaccactaccaccaagacgtggagactggtagtggctccgaatgccagactgtgctgatatttattggata

SEQ ID NO: 42810 - DNA, 418 bp, Gossypium hirsutum
  Clone ID: LIB3196-050-P1-M1-E8
atggcaagagtgcacctttgtttagatctgggagtaaagggaaagagctgtctgtctctcgtgtgttttcagcttggctctgtgggatcagttatgcctcattcctgaaaagggcctttttatccccccagaatgcttttcctttgccaataccaccttcctcagcctgccctttggaaaggttgagaagcttaaaaagtcaggtaacagaaggcatagatgggcttcagaacctgatttgtaaatgttaaggcaaggctggctgccactggtgagagtgacgcagcagcctataagaagtcactgcgcgtatgaggttgcgatcacagtgcatgtggcaggttagatttgagaaatggttaggattgttctgttggacaagtgcagacacctgcccagggaagcagctctctttttt

SEQ ID NO: 42811 - DNA, 423 bp, Gossypium hirsutum
  Clone ID: LIB3196-050-P1-M1-F11
atcggttgaccaggtgaacggaagcaaggtggtgaggaagcactcagggacggacagaactgtgtgaagcccgccgggccccaccccgcgctgtccatgcactgtgagcaccactaggaaatctcagccacaccttttctgtttaattcccatgcatgccaaactcttttcacacctaccgaccaattctcctgctcctcttgccctcttcttcacaccaaaatatgattgtgtccctgctgcagaatatgtatttcctaattgctgtggccaaacgcctgtgtgccgaatcgcttgcttctgatcccgctccgtgtaacctaagtgcgctgcggacaaagccccggccacggctgcgtcactcctgatgttcacaatgccacatagtcacacacctaattctcaagtcggagcaacacatac

SEQ ID NO: 42812 - DNA, 296 bp, Gossypium hirsutum
  Clone ID: LIB3196-050-P1-M1-F4
attgaagctcatttaaagagaagcatgcacccgattgtacatgaatctcaaagttgcttggtacactcttttaagtgtcctttcgtgaaacgatgagacactcatagatctttgtttgagctgatcagctaagacatcaatggaccaatcgatacttggtgttcacacccaaagaaccattcaaatctgagggttcacactaaaggccattcggctaccacaagatatattcatcagctgattatctattcggtgaaccatgaagcattaacttcagctcttaacaacattgaccg

SEQ ID NO: 42813 - DNA, 264 bp, Gossypium hirsutum
  Clone ID: LIB3196-050-P1-M1-F8
atcttggccaccggctcgcggctcgtggaggcttgtccgagacgcacgcgagtcagactcgggttggggtcctggcggcggcggcgcgagcatgtcgtggcttttcggcattaacaagggccccaagggtgaaggcgcggggccgccgctgcctttgccgcccgcgcagcccggggccgagggcggcggggaccgcgtcttgggagaccggccggcgcccaaggacaaatggagcaacttccaccccaccggcctggagcgcgc

SEQ ID NO: 42814 - DNA, 400 bp, Gossypium hirsutum
  Clone ID: LIB3196-050-P1-M1-F9
gcttggtaggaaaaatggaaagaaattccattgtttggtagagttgaaaaatgaaaggaaagaaaataaaacatttgaaaaaggcataattttcaactatcatacccctcttattttctctcctcattggaatcattagtttttatgcattaggatggaaaatgatcatctcttctatttctttcctctcatttttcattcctaccaagtacattcaaaatttattttcttttcacttttccattttctcctcccatccttccacttttccacccaaccaaacacacttttaaagttcttttgcaatctgaaaagctagagggtatgcatttggtcatacctctggcatgtttgtttttatgttgctcatcaacctgtgtgaaaatgcaaatggacatgc

SEQ ID NO: 42815 - DNA, 270 bp, Gossypium hirsutum
  Clone ID: LIB3196-050-P1-M1-G11
atgttttggctttgcctgcattctacttcgatacagactggcacagcaactgaatatgttgctcatacattagcttttctttcataacctgctatcagttctctgatccatgaggaagagaaagagagtatctgacaggtaagattgctttttaaagttgttttaaatgcattacatgactgagaaaagaaaaatgcacattttattgttgcagtttaaaatttcatttcggtgaaactaaacgtgaaacaaaagggtaaaaggggtttg

SEQ ID NO: 42816 - DNA, 387 bp, Gossypium hirsutum
  Clone ID: LIB3196-050-P1-M1-G12
tcgcccacgcgttcgggcgtatgggtttacaaagccgttggcaactcctttgttttcaaaggttcgggcttgtcttaaaatgggtggcccatctcaattgcaggcagtgatttagtagatggaggaatattgagaaatgttatagacattagtagttagttggatcagcacctaaagtcagttaaactgttaacaatagttatagttttgttaacaattcccacattgtattataaatttcagagcttagtctcgtacaatgaaatgtatttgggttaactttcatcttcttgctttcttctttcgcgtcttatttcatccaaggagaaaaacataaatcaatttcatcctatgtgcatacttggtattaagaatggaagtcaatgc

SEQ ID NO: 42817 - DNA, 320 bp, Gossypium hirsutum
  Clone ID: LIB3196-050-P1-M1-G6
atgtcggtttactcttgcttaccacccaccgtagcccaccttgcatgcatgaccagcccctccattccagcctgagctgtgtgtgcccctgcgggaggacccattgatgccagaaagctggtaactccctcccagcatccctgcggaaggagtcagtttctgagagtgtggcctttcaaggtgaatgatgaggaagggtttcccagtccccacagtggccccacctctgggccctgcaccagagccctcctgtgtcacagggagctgtgcatccatgcacacgcctacttacacacaacatttcacgtacacgctaattt

SEQ ID NO: 42818 - DNA, 392 bp, Gossypium hirsutum
  Clone ID: LIB3196-050-P1-M1-G7
gaaattgtgaactgaataaaatagaaatgaagcattgaattgcatgggtatgtatcgggtctcataggccttatttattatgaatttaatattttgagggtatattgtgaagaattataaaagcatgttaaaatttttttgaaagttttaatttagatgaaattttataatacggttaaatacgtttacaagcgtttgtgttctggtaatgcctcgtaccctattctggtatcgaatacgggtaaggggtgttacattagtcaccaaattttaataagttttcattttggtcaccccgttaactcaatgttattattcactcattttagtcactcaactttaaataaattttcatttttggtcaatcatttaactttttaaaaaatttattt

SEQ ID NO: 42819 - DNA, 411 bp, Gossypium hirsutum
  Clone ID: LIB3196-050-P1-M1-H1
atcccacctggatttccatttccagggcctcctaattttcccccacaaagcatgtttggatttccaccacatttgccacctccattacttccccctccaggctttggctttgctcaaaatcccatggttccctggccacctgttgttcatctcccaggtcagccacagcgtatgatgggtcctctctcccaagcatcaaggtatataggcccacagaatttttaccaggttaaagacgttcggagaccagaaaggcgccatagtgacccttggggtaggcaagaccaacagcaactggataggccatttaataggggtaaaggggaccgcccaaagatttaataggattcacaccacttgaaaagagagcgacatgaaaaggaatgggagcaagaatctgaaaggcataga

SEQ ID NO: 42820 - DNA, 162 bp, Gossypium hirsutum
  Clone ID: LIB3196-050-P1-M1-H10
atccgtggtgctgtccatggacaacaaccgaaacctggacctgcacagtattattggtggtgtcagggcccaatacgaggagatttgctagagcacccctgatgccgactactggtgccacaccacgtactacgagctgctggttacaacaggcagacatgg

SEQ ID NO: 42821 - DNA, 312 bp, Gossypium hirsutum
  Clone ID: LIB3196-050-P1-M1-H12
ggtgacactgtcgctctagaacaggcatgaacagcaggagcgggctggtaccggaccggcagtcccgggatgggcaccggcgcccgggggcgatgccacccggtgccgactgaggccaccggaccatggcccgatcgctgacctggcgctgctgcccctggtgcctgacggaggatgagaaggccgccgccccggtggaccaggagatcaacaagatacttttcgaggccaacaagcatgaccgtgccgagcttaagctgttgcttttgggccctgtggagagcgggaagagcaccttcatcaagcagatgc

SEQ ID NO: 42822 - DNA, 387 bp, Gossypium hirsutum
  Clone ID: LIB3196-050-P1-M1-H2
cgaccaccagctccaaggattgagacttacgatttagtggaacttgactctagccaacaatcgcttctgtgggatcgccttatgctagatcaacacttctcaatggcgaaccccacgccattttgtctcttagctcgccaacctctgacacagtaagctaacaaaccgattttgcaaccttcccaaaacatacaaagcggccgcctttgtatacattgaaaagcttacttcttaagggacatgggcggaagcatcagccccgtagtgcagagaaacgatgaatactcagcaaggaggctaaataccaatttttaagcctcatgaactcttttgggaatttttgacaaccttcggctagatgggtttagtggctcatggttgtggtag

SEQ ID NO: 42823 - DNA, 412 bp, Gossypium hirsutum
  Clone ID: LIB3196-050-P1-M1-H3
atccagggcccagatgggaaaatgcatggcaacacctgctccatgtgtgaggtcttctttcaacaagaagaaagagcaaaagcaaaggctaaaagagaagctgcaaaggaaatctgcagtgaatttcgggaccaagtgaggaatggaacacttacatgcaccagggagcataatcctgtccgtgacccagatggcaaaatgcatggaaacaagtgtgccatgtgtgccagcgtgttcaaacttgaagaagaagagaagaaaaataataaagaagaaaaagggaaagttgaggctgaaaaagttaagagagaagcagtacaagagctgggcagtgaatattggcaatatttgaggaatggacgactcccctgtaccagagagaatgatcctattgagggtctagatgggaaaa

SEQ ID NO: 42824 - DNA, 187 bp, Gossypium hirsutum
  Clone ID: LIB3196-050-P1-M1-H4
cggacgcgtgggaaaagggtcaaaattctgtgtgtttgtgaagcaattttaccaaaactttgaaaataccttattttcccctccatcttcccaaactcacaaaagattcttcccactccacttggtttgacatcatttgttctcccaatcttccaccactcaattttgatttctaaaattatattct

SEQ ID NO: 42825 - DNA, 273 bp, Gossypium hirsutum
  Clone ID: LIB3196-050-P1-M1-H5
atcgcgggggcggcgctgggcaattaatccggcccatgagcgccgaggacgaggagcagcagcccactgagatcgaatcgctatgcatgaactgttactgcaatgtgaggcgggggggtagggcttgggccgggacgagccgggggtcggacccagccaggtgggccttgccggggaccccgagacgcacccggagatagtaaggcggggaacgggagtttcattgattttttttccttcgctgctttctgcttcaccagggcatgacgcgcc

SEQ ID NO: 42826 - DNA, 402 bp, Gossypium hirsutum
  Clone ID: LIB3196-050-P1-M1-H9
atgggagccaatgggagatgggaagaaaatcatttcattggccgataaccatatcctgctgtgggatttacaggaaagctcaagccaggctgtgctggccagctcagcctccctgggagggaagggacaactgaagttcacctcgggacggtggagtccgcatcacaactgcacccaggtggccacagcgaacgacaccaccctccgtggctgggacacccggagcatgagccagatctattgcatagagaatgcccacggacagctggtgcgggatcttgacttcaatcccaacaagcagtactacttggccagctgcggagacgactgtaaggtgaagttctgggacacccgaaacgtcaccgaacccgtgaagaccctggaggagcactcccactgggt

SEQ ID NO: 42827 - DNA, 207 bp, Gossypium hirsutum
  Clone ID: LIB3196-052-P1-M1-A1
ttttgtgaactcaatgtcgaaacgctacgggcctacgttaccgggtgggtggcaacaatcaaacccttttttcaagcagcggtcatggactcctgacgctgaccgagactaggcgatgtttattcggaaggaaaattacggatcgaagatacatcaattgcatagctttacgtaagatgatttcaatgagctcaaaggttgtacaga

SEQ ID NO: 42828 - DNA, 236 bp, Gossypium hirsutum
  unsure (1)..(236): unsure at all n locations
  Clone ID: LIB3196-052-P1-M1-A3
tatataacaagnatgtacaaaaaagcaggctggtaccggtcccctattcccgttatcgcggagtaccccactcgctcctgagaccactgtgcccgaccggagtgctacatctgacgccgatttctcccataaaggcgaccgcatgattcgtgcattacaacggctaccacttttaacgggggagaaccacatgcgcgccttcacctagaaccttggtttaaagacaaccgatttca

SEQ ID NO: 42829 - DNA, 404 bp, Gossypium hirsutum
  Clone ID: LIB3196-052-P1-M1-A5
atagcagctcgcccctctttcccacatatccgtccaggtgagatccggccccaccgagacccgctccccgctctggacggaggatcccaactgggtccggggctccccctccgcgcctccgcccgctgttgcatcatctggttcccaggacccccgacgcacccgcgcccacgcctgaggtcttggccgcccagaagctgggagttcgggcgtccaagtggccccgggctcccaccccagcccccgcgccggcggagcggaccccactggcggcgagtcccggagcgtggagcggtgacgcgggctgggaatctgggggagacgcacgcttcgtgcccagcattgagttttcgctgcattgtggatgggaaatgactgtttgcaaatcgccctttttcggcgac

SEQ ID NO: 42830 - DNA, 275 bp, Gossypium hirsutum
  Clone ID: LIB3196-052-P1-M1-B10
atagggaaagctggagcggctcgcctgccgtaccggtactcggaatttccgggccagacccacccgtacctccctgcctaatatgtagaggccggccatgctatgggtggaaacatgtctccaacatgctatgctagtggtggatgttcagaaaaataacatagtgagcgtggcgattaaataatgaaaggaagggtggtgtaaaaaaaattataacatgggctgatccatacccacatgttgccgtgaattgtggtttgacaaccctaaggaag

SEQ ID NO: 42831 - DNA, 308 bp, Gossypium hirsutum
  Clone ID: LIB3196-052-P1-M1-B11
cgatcggatcccggagcgtgccttggcagcatatcgggggtggctttcgcaaagctcagcgtaccattatgtaccgcctcactaactccatgatctatgcacggcctgaacaacggccagaagctgatgactgttcgcatcgtcaagcatgcctactagatcatacacctgctcacatgggagaaccctctgtctgggctgttcaactccatcatcatcagtggttccaggcaggtcttcacccgcattggacgttccttgactgtaagacgacagtttgtggacatgtctccactgtacttcgtgat

SEQ ID NO: 42832 - DNA, 336 bp, Gossypium hirsutum
  Clone ID: LIB3196-052-P1-M1-B12
tggagactgttcacatgactgggtccttaacagcatgcgggggcgaggccacagacctggagctggctatttcacagctgcacaattaggcacgctggagcacctgctggctggcgttgggacccatcaaccgctttggccatactcttcaaattgctatcgcacaagctaggactgagtgcgccggcctggctgaccaatacgcatactctgcacgtggggcaggagaccctctaagagctcccaccaacaagccctgaggagcaatggctgcacttcagctcgccaagctggacccgccccgtctgctgaaggagtgcgctgaccatacaaatg

SEQ ID NO: 42833 - DNA, 318 bp, Gossypium hirsutum
  Clone ID: LIB3196-052-P1-M1-B2
attataaggatagctgctcttatacattagacaaaattctgctacagactcctgacacagctacatatgtgccaatttctgggtgtaattgcaacaacatacgtaggacccaagtgctaacattccttaactcaagggatggaatgtcacaccaaatgatggctatgccagtggaaccacactgctttaggctctggactccattctaccaccaactggtgcatatgacaaggccttgcgcctggcttttcaggatgtgtacaaaattggtggtattggtactgttcccgttggccgagtggagactgattttctcaa

SEQ ID NO: 42834 - DNA, 249 bp, Gossypium hirsutum
  Clone ID: LIB3196-052-P1-M1-B6
atgccaagtacctccctcacaacgcacggcggtatgccgccgggcgcttccgcaaagctcagtgccccattgtggagcgcctcaccaacttcatgatgatgcacggccccaacaacggcatgaagctgatgactgtgcgcatcgtcaagcatgccttcgagatcatacacctgctcacaggcgagaaccctctgcaggtcctggtgtacgccatcatcaacagtgggtcacgggaggactccaccccca

SEQ ID NO: 42835 - DNA, 130 bp, Gossypium hirsutum
  Clone ID: LIB3196-052-P1-M1-B9
acccacatattatcgacattttagctctcatgacatgattcaggcagtactttgtatcagccaagtcatcagtgatgttactgacgccgatcttaaacaaacattgctttactagcgttcaaaacaattc

SEQ ID NO: 42836 - DNA, 325 bp, Gossypium hirsutum
  Clone ID: LIB3196-052-P1-M1-C1
atacccaggctgccctgaaggtcctcgcccagaaagccagggaggctcagcctcctgttgccaggacccagcgttcacgtggggctgacagtgctgtgggaacgctccctgcaacgtgtccccagagtacccccgtccaggccaaagggaccaacaagctcagaaaacctaagcttcctgagggccagcaggccaccaaagcccctgggagctcatatgacagtgaggacagcagcaacagctcttcatggagcgaggaagatgctgaagggccccaggtggccaagtcggtccacacgctggtaggtcccacccccttcaggac

SEQ ID NO: 42837 - DNA, 376 bp, Gossypium hirsutum
  Clone ID: LIB3196-052-P1-M1-C10
ccccgatttccgcgttggagaccgctcacacgcgccggcctgaagcctcaaggggggtcctgaccgattattaggaactgattttggcaattggtttacaattaaatgtcccgctgcacacgaataatgtatcccatgagaccatcccaaggaacccttttttgccaactgctatataccatttaaagaaacacatggcctgccttccaggcttaataacggatgctgtgcctcgctcggaaattgcacttagggatgctgagatcactctggctggtccatatgctgccatgcaaattgactctcttgacctggcccacctgctgaaggactgccaggtgttattggacgtgaatctggccctgggcgggttgat

SEQ ID NO: 42838 - DNA, 396 bp, Gossypium hirsutum
  Clone ID: LIB3196-052-P1-M1-C12
atgaggaaagcatgatgggagccacgaagggactgtgtattttaaatgcaggcacccaacaggaggatcctttattcgtccgaataaggtaaattttggaacagactttcttactgcaattaagaaccgctatgtgttagaagatggaccagaggaagatagaaaagaacaaattgttacacttggaaataaacctgtggagactgttggttttgactctcttatgaaacagcaaagtcagctgagcaagttgcaagaagtttctctgaggaactgtgcagtaagttgtgctggtgaaaaaggaggagttgccgaagcatgtcctaatattagaagggtagatttgtcaaaaaacctgttgtcatcatgggatgaagtgatccacattgctgatca

SEQ ID NO: 42839 - DNA, 300 bp, Gossypium hirsutum
  Clone ID: LIB3196-052-P1-M1-C3
ggtgggatagctttttataagccaagggtcaataaatggattgataaatcagaggtgagactttgagcctagatctcgaaattcaagtccttctgtctacttgcttcaccatcggaaattgtaaatcaaaaaagaaaatatactttataggtatagacttattatattaatttttgtcgtcaaaatatttttaatgagataattgggatatgcaggcagacttttgaagaaaaaaaattatgattccaggtaaaagaaattggattgtgagaaaaatgaatttggttaaaatattaaacg

SEQ ID NO: 42840 - DNA, 310 bp, Gossypium hirsutum
  Clone ID: LIB3196-052-P1-M1-C7
agtgcactgacctctagtaacaagcataaacaaaagaggtgccggtcccggattccaattatacccatgactaacctgcatgtaaaaggccacaaagccagggggggtcaaccttctgtttccaggacccatccttcatgtccagatcacagagctttgggaacactctctacaacgagtccccacagtacacctcgccatgccaaaaagacctacacgctcagaaaacctattttacctgaggtcaaatgaggcaccaaaggcccggtaagctcagcatacactatgctcaggagcaacagatcttcac

SEQ ID NO: 42841 - DNA, 348 bp, Gossypium hirsutum
  Clone ID: LIB3196-052-P1-M1-D10
atcccgggtttggccaggccctgcgctcccctccggactggcaacccctggtccccttcctctttccacttgcattcgggggtgtctgctgttctgagaacatcagaactgggaagagaggtggagtcacatgcattcttggtgggcattattctaaacttttgtatccaagttcatcccccttcttccacggtggcattgtcgtactaaacagttcccccatgcgtgctgctgaagagctgctcaccggaggcaggcaacggccccggcactgccccttgcattaagtcatgtgtttgatgtgctcttgtgaatttactttgtcggaacagaatatttacatgtcgg

SEQ ID NO: 42842 - DNA, 388 bp, Gossypium hirsutum
  Clone ID: LIB3196-052-P1-M1-D12
atgcgtatattagatattgttcctcctaccttctcagctctatgtcctgcaaacccaacctgcatttacaagtatggagatgaaagtagcaattctcttcctggacattctgttgccctctgtttagcagttgcctttaaaagtaaggcaaccaatgatgaaatcttcagcattctgaaagatgtaccaaatcccaaccaggatgatgatgacgatgaaggattcagttttaacccattgaaaatagaagtctttgtacagactctgctacacttggcagccaaatcattcagccactccttcagtgctcttgcaaagtttcatgaagtcttcaaaaccctagctgaaagtgatgaagggaagttacatgtgctaagagttatgtttg

SEQ ID NO: 42843 - DNA, 378 bp, Gossypium hirsutum
  Clone ID: LIB3196-052-P1-M1-D4
cagaaaaaaagggtatatatttaaatattaaatcgacttgatatatggtttaaatatttgatatggtcttcttttttaagttttgattacatgggttacatattgttttaagcatctcatttgttcatgaagataaatattaacaaatttatttatgtcgctatagtagggtttataattaaataataaatttgattaaaacatatctagtatgcaaatttgtgttaataaaccaatgaattttatggttattcggatttgattcaattcaaagaattgttaaaggtagtagttcatacgttttatattattccatgtgtaaattatttacaaaaatgacatgagcaattgtaaatgaaaagttctatgagcatgaat

SEQ ID NO: 42844 - DNA, 395 bp, Gossypium hirsutum
  Clone ID: LIB3196-052-P1-M1-D6
atcgggttaggaggagctaggctgccatcggaccggtgcagatacggggttgctcttttgctcataagaggggcttcgctggcagtctgaagggcaacgcggtaaaaatactgctttggtgggcgacgcggtacaggtgccgaagagcgttcgttacgggaatgccgaagcgtgggaaaaagggagcggtggcagaagacggggatgagctcaagacagagccagagcccaagaagagtaagacgcccgcaaagaaaaatgacaaggaggcagcaggagagggcccagccctgtatgaggacccccccgatcagaaaacctcacccagtggcaaacctgccacactcaagatctgctcttggaacgtggatgggcttcgagcctggattaagaag

SEQ ID NO: 42845 - DNA, 306 bp, Gossypium hirsutum
  Clone ID: LIB3196-052-P1-M1-D7
ctatacggaaagctggcgcgccctcatgcaccggtcccgtattcgcgattcgagccaatctcctcgacaagatagagatgtatgtgggcctccacgaaagaccgactttcaccctgagcttctctcaattattcgcttgacgcagacaacaagctcttctatacaatctcctgcttaaagagaacacttcacagtcctccctcaatacaacactttcactacttacctctatctgaacatttcaggtcaatcatctatgggtgactacaaggtaccgggtgtgcacctctcatcctaattgacatc

SEQ ID NO: 42846 - DNA, 394 bp, Gossypium hirsutum
  Clone ID: LIB3196-052-P1-M1-D8
atgtcctactgatcataaaacttttgggtcactggtttgtgccttgctagccaaagtctcttaaatacacataggtgggccagagaacattggacagatcaagagagattagaacatctggtttctctagttgcagtattggacaaagagcatagtcccagccctcaggtgtttttgacactaccaagtagttctgggttgaccctctgtgcagtggaattggtgattctgaattgtgctttactgatggtgctgagttgctctgtccctattatttgacctacgttttctcctaatgaaggtgttcatttgccgttcatgtcctgttatacttcacctccaggaactgtcatggatgtccaaatggctttgcagaagggaaatgagatgacag

SEQ ID NO: 42847 - DNA, 392 bp, Gossypium hirsutum
  Clone ID: LIB3196-052-P1-M1-E3
atctcgtagtcgatgcatgtcccagacatgacttacactgtcttacgtctcaaggtcgaagcatgtcccagacatggtcttacactagctctcaaaatgtggctgatgcattagttcacacaagtgacccaaacgtcacggcatgaatatctgatttatttcctaaggttcaataaggaattctactatctctattctcatcacattttctcatttccacaatcaagaaatttatgctataataattttagtacaattcaaatacatatattatttatgtagttgtactatttacatacaacttaccttggattacaaaatgtggcgactagtcaatttagtcgatttgcttagctttccttcggtacaggttcagattcggtatttcttaa

SEQ ID NO: 42848 - DNA, 395 bp, Gossypium hirsutum
  Clone ID: LIB3196-052-P1-M1-E5
atgccgcggcgggagttgagcgcgcagccttgtttagcccaggcgccggcagccatggcggtggaaggaggaatgaaatgtgtgaagttcttgctctacgtcctcctgctggccttttgcgcctgtgcagtgggactgattgctgtgggtgtcggggcacagcttgtcctgagtcagaccataatccagggggctacccctggctctctgttgcctgtggtcatcatcgcagtgggtgtcttcctcttcctcgtggcctttgtgggctgctgcggggcctgcaaggagaactattgtcttatgatcacgtttgccatctttctgtctcttatcatgtttttggaggtggccgcagccattgctggctatttttttacagataaagtgatgtcaga

SEQ ID NO: 42849 - DNA, 361 bp, Gossypium hirsutum
  Clone ID: LIB3196-052-P1-M1-E8
gaagaatagctacatgatagggaagagaaatgagaggatgaggaggagaaaaggaaactaacgatatggattatgaggaggaacattgaacattttataattctatttttaaaagacttgtattaatttttggaagattttaatttaaactttgtagctgtaggattaacagtagattcttagttattctgcctttcgtttaagttttctatgtaggagcccaacatgaaggagaaagaaacaatttgagctttacaggatcaaatgaagaagcacccatcatttgcagttgacgcgacaatgatgaattgggaaatttgtttcctatatttttttatgggcttcacatttgaggacaata

SEQ ID NO: 42850 - DNA, 399 bp, Gossypium hirsutum
  Clone ID: LIB3196-052-P1-M1-E9
atgtagtttaggttttctttgttgtagtttgggtttgggtgtgtttttaggacaccttgttagtggttctttctgttttcagaattcttaggtaacagacattaaccaaagatgcctgtgaacctaacaggcagatcataggaccccatgactgatgtttactctttttaaaaactaaaccagactgcactctgtgcattcccagctggtatttgcatgggggtgtgatgggggggtctaagctgagaggaaaacacacaggtctctcagcatttttaggcagtcacactttccagccgatctttttcatttgtaacaggaaccattgggaggtgtagggttggattcagtggtaggttgtgatggggttttttttttttcatggtggtttaacctacc

SEQ ID NO: 42851 - DNA, 408 bp, Gossypium hirsutum
  Clone ID: LIB3196-052-P1-M1-F1
atctcagatgtcaatacctgcgcagaatgtgcaataaaataatgaactccaggattttaaaccttgggtgtggacactgtcccttctttctctgccccatgatagcatcagagtaatcttactctaaaaggaggttaagaaacaacaaggctttaggaatcatgtcgtttgaggacccccattttataaggagggaaccaaaatgtagaaatgagtgagcaattgccaaggtaattcccagagccaggatggggctcaagtctcctggtatgtggctcggggttctttcctattccaatgtgcttcctaagaaatgacaatgtattctgttcactgctggttgtcaccccagtctgaccacggcttctaagagacttggagtggaggaagggggaagaaacaaacacc

SEQ ID NO: 42852 - DNA, 403 bp, Gossypium hirsutum
  Clone ID: LIB3196-052-P1-M1-F11
atacggcaatgaaagcagctttccagtcacagtacaagagtcactttgttgcagccagtttaagtaatcagaaggctggaagctctgctgctggggcaagtgggtggactagcgcagggagcttgaattctgttccaactaactcagcacaacagggccataacagtcctgacagccctgttgccagtgccaccaagggcattccaggctttggcaatactggcaacatcagtggtgcccctgtgacctacccatctgctggagcccagggagtcaacaacacagcttcagggaataacagccgagaagggactgggggcggcaacgggaaaagagagagatatgagaaccggtgcagcagccgtcacattcacggagagactggcaatcggcatagcgatgg

SEQ ID NO: 42853 - DNA, 404 bp, Gossypium hirsutum
  Clone ID: LIB3196-052-P1-M1-F12
atcccaggccctgtggggctggcagatgagtaagcaggcaggctgggtgcacccatccctccccttcccctcccctaccctcccttctaccccccatccactgtccgccagcacagtgcattcatgcagctgggtcccgccccgtctccagaggcacctcctgctagcaacagtctccccaggcacgacacagctaacagaaggccgggcaggcaggactctgggacagacgcaggccagctgcccagagagcccagacccagcatggacgctgtggacgccaccatggagaaactccgggcgcagtgcctgtcccgcggtgcctcgggcatccagggcctggccaggtttttccgccaactagaccgggacgggagcagatccctggatgctgacgagttcgg

SEQ ID NO: 42854 - DNA, 403 bp, Gossypium hirsutum
  Clone ID: LIB3196-052-P1-M1-F5
atgtgcctcagggggtcccctgaaactaattttctattggtgggattccctggattcattatatgaaatggtgacatgattagaggaaattcttttgtagtatgaaaattgtcccttttcttcttcagtacttgcctccttactggcattgaattatcacagggacaaaatctggtaaattttttatttctaactctcccatcaaacccctgttgcccagtatttatttggtggccttcacccaccggagggaaaaaatgagcttattcaagctgccaatgtttatctatgggctgtagcagtacatggaactgtactgtgccagggatattgagatgctctgggggtgtattgtatacctgccagttttcttcatttctgaattgaggtttcttttcttgat

SEQ ID NO: 42855 - DNA, 399 bp, Gossypium hirsutum
  unsure (1)..(399): unsure at all n locations
  Clone ID: LIB3196-052-P1-M1-F6
atgtggggcacatctaacttaactgtgaaaagacacatgacacaatcaccttgctgctgattacacggcctggggtctctgacttctccccttaccctcccgcctcccaccctccctgcaacaacagccctctagcctggggggcttgttagagtagatgtgaaggtttcaggtcgcagcctgtgggactactgctaggtgtgtggggtgcttcgcctgcacccctggtttctttaagtcttaaatgatgccccttccaagccatcatcctattcccacactcctccactcccacccttggccgaagcatagattgtaacccctccgctcccctctgagattggccttcggtgaggaattcanggctttccccatatcttctctcccccacctttatcg

SEQ ID NO: 42856 - DNA, 276 bp, Gossypium hirsutum
  Clone ID: LIB3196-052-P1-M1-F8
gagggcttgcacatgtgtggcgggcaacttggcgtggggtctcgaattattacatggacaatgggtgttgcactgttagaagctgcgaaatcattttcaagcatactagcgctctcctggatatcaaatactgcaggccaagatctgatccaatgatccttattgccattcttttaatggcttagggtcaggttggtggtgcgtcatcatgtcttcataatcggatgccaatattttttcggaggttatataatgctgtcgggcggtataacattg

SEQ ID NO: 42857 - DNA, 249 bp, Gossypium hirsutum
  Clone ID: LIB3196-052-P1-M1-G2
acaaactagattatgatatgagttacgaatttttcataggccatccaaaattccataattctctaataacaaaatgaaaattaaaaggaaaaaagaaaaagaaaaatggcacattaaattcttattaaggatgaatgttgataagctttgtttgaaaataatgattttgatctgataacaccaatgtccctttccttggcattttattggggaagaccaagaatgcacgtcaaaaaagggtggcgggtt

SEQ ID NO: 42858 - DNA, 351 bp, Gossypium hirsutum
  Clone ID: LIB3196-052-P1-M1-G5
cccgtttccttccggagtttttcgacggtcgctcggcttccaaaggccccagtctttacatttattacaggaactcaattataaagctattcagggaaaacccttcccgtaagattaccttcactgacgtcaggaagactcttgttggcgatgttggatccattcggagggttttcgatttccttgaccactggggtctcatcaattactctgcctcctctgctctttccaagccctccaaagatactggttctaatattaaatcctcagattccccttctgttgaatccacttcttctgctgcccccacctgcaaacactcctctaatttcaggcgaatctgcggggcgt

SEQ ID NO: 42859 - DNA, 393 bp, Gossypium hirsutum
  Clone ID: LIB3196-052-P1-M1-H1
atcaaaattctaaagtgaaatcgaccacccaggttgtaataaaggaatatttgtcaaggtaaaaggaatagaaatgacttcacttatgttgctaatttgatttgaaactattaaatatttaaatacacgatatgtggttctgcagctgcactcttgctccaggcctgcaaaactcataaaataagggcaggacagacagactttatgtgtatctatatgaaagagaatttttgaaaaaagaaaacatcattagtacttctatgtaacatagtaaagtagatctacaatataccttgaaacataaaataaatgtgactattttaagtgttagagaaagatgcttttacatacagttacctgatttagtaagttactaagtgtggcagattgtgg

SEQ ID NO: 42860 - DNA, 358 bp, Gossypium hirsutum
  Clone ID: LIB3196-052-P1-M1-H11
atccaatgttaagcacaacatttactctctgtaagcctccatttcttgactgtgaagtgggtctaccaatcacctgccggtcactgcaaggagtatatgagatgagccatattaccacttagcatggggcctggtgccagaaactagctactctcactgttggagggaaagtcatgatcattcttgcttttgaccatgccactgagtaggccatggcctgggagaaatcacttttcctcccaagcttccttttttttcccccctggtgaaatgagtgatcttgacagcatcacctataaggatccctgcagtgtctacaactcgatgactttggttggatcacttttaggtagtcgag

SEQ ID NO: 42861 - DNA, 410 bp, Gossypium hirsutum
  Clone ID: LIB3196-052-P1-M1-H5
atgctgtcagtgaggaaatggtggaaagacagattagctgggcataatgacggatctggagcaaagctattctgtgaggctgaatgatggacacttcatgccagtgctgggatttggcacttatgctcctgatcatactcccaaaagccaggctgctgaagccaccaaagtggctattgacgtaggcttccgccatattgattcagcgtacttataccaaaatgaggaggaggttggacaggccatttgggagaagattgctgatggtactgtcaagagagaggatatattctacactaccaagctttgggctactttccttcggccagaattggttcgcccagccctagaaagttcactgaagaaacttggactggattatgtagatctcttcattattcatgtaccat

SEQ ID NO: 42862 - DNA, 386 bp, Gossypium hirsutum
  Clone ID: LIB3196-052-P1-M1-H7
ggatcttgtaggattcccaagaaattcttcgatttcttccggaagcagatgattattcatccgcttctcacgttccgtgaatagccgggacattgaggaatatccagaaaggcacttagggaatcggtctgattctatctccgttcgttccgtttgaagaaaggaaggatcccaaagaatcgatctttcttttagttgttgaatctctctttgattgatcaatgtgtgatattccgaatcctcattactaatggaatcgaaacgatctctggattgatcagaagatcctttcaattggcgagaatccgttacttgaacgaaactagatcttgtggaatcatattgaatatttgacgatacattccgtaccttgctaaaaaatcgat

SEQ ID NO: 42863 - DNA, 425 bp, Gossypium hirsutum
  Clone ID: LIB3196-053-P1-M1-A3
atcagtcacaggcgagagccctgggatgcgccggccagaggccatgctgctgctgctcacgcttgccctcctggggggccccacctgggcagggagtaagtcggtggagtctgcccttaacctcctctgcctccctccaggagagccagggcctcacccggcccttgtcccagactaactctggtcacagaaccatcctgtctgcctggaggggcggggtcccctgttctggcagaggttgcccccatatcactgcatggggatttttttcccttttgctctcttttctgcagagatgtacggccctggaggaggcaagtatttcaccaccactgaagattacgaccatgaaattacagggctgcgggtgtctgtgggtcttctcctggtgaaaaggtgagtgaggccatgtccccacccatccc

SEQ ID NO: 42864 - DNA, 413 bp, Gossypium hirsutum
  Clone ID: LIB3196-053-P1-M1-A6
atgcggcagtggctggagaaggtcgtggagcagcacctggcctgcagggtgttccaagaatcagccatgtcatccctgtacccatctctagaagacctaaaagtggaccaggccattcaggcccaggccagagcctcgcccaagatgccagccctgccagtccaggcggcagccatttccccaccaccagttttgtacccaaacttggcagaattggaaaattatatgggtctttccctctccagccaagaagtccagcagagcctgcttcagattccggagggtgacagtacagcggtctcgggccccgcgcctggccagatggtggcaccggtgtccgggtacagcctgggcgtgcggcgagcagagatcaagcccgtggtgcgcgagatccacctgtgcaaggacgagcg

SEQ ID NO: 42865 - DNA, 416 bp, Gossypium hirsutum
  Clone ID: LIB3196-053-P1-M1-B11
atctactacaagcgctgccgtgctgcccggtcctatgaggcagtggcggctgcagctgcctccgtgtataattacgcagagcagaccctgtcccagctgccacaagtccagaatacagccatggccagtcacctcacctccacctctctcgatccctacgatagacacctgttgccgacctcaggagctgctgccacagctgctgctgcagcagcagccgctgctgctgttactgcagcttccacttcatattacgggcgggatcggagccccctgcgtcgcgctacagccccagtccccactgttggagagggctacggttacgggcatgagagtgagttgtcccaagcttcagcagccgcgcggaattctctgtacgacatggcccggtatgagcgggagcagtatgccgatcg

SEQ ID NO: 42866 - DNA, 218 bp, Gossypium hirsutum
  unsure (1)..(218): unsure at all n locations
  Clone ID: LIB3196-053-P1-M1-B4
cccgacccggactgcagtcatgcggcagcgactggagaaggacgntntgcagtgcctgagggggaagatgtaccaagaatgatccatgtaacttacaaggcccttcgtggccgacctccttatgctccaaaccatgcaggcccacatcagattctgagctatgattctcattgtttccagcacaggcagcatccatttgctcgccaccagttatgaac

SEQ ID NO: 42867 - DNA, 377 bp, Gossypium hirsutum
  Clone ID: LIB3196-053-P1-M1-B8
atgccggtgagaagacagcgacatggcgcctccggcccccggcccggcgtccggcggctccggggaggtggatgagctgttcgacgtaaagaacgccttctacatcggcagctaccagcagtgcataaacgaggcgcagcgggtgaagctgtcaagcccggagagagacgtggagaaggacgtcttcctgtatagagcgtaccttgcgcagaggaagttcggcgtggttctggacgagatcaagccctcctcggcccccgagctccaggccgtgcgcatgttcgctgactacctcgcccacgagagccggagggacagcatcgtggccgagctggaccgagagatgagcaggagcgtggacgtgaccaacactacct

SEQ ID NO: 42868 - DNA, 333 bp, Gossypium hirsutum
  Clone ID: LIB3196-053-P1-M1-C10
ggaatatattaaggtcgtattaaaatttcattaaggaattttgatgtttgagtagataattgagtaaaaatgactaaattgcaaaaagtgtaaaagttgagttctattagttaaaacggtcaaatgactttagaaatgaaagttaatggacttgaatggtaattataccatatatgatgatagtggatgtgcatggataggttttaatgtaattagaatactttttaaaggttaattaagccatttgatgattaagtctaatgttaattaaacaaaagatgaaaaaacctatcatctgtttcattctcttattccttggctgaaatcaccatt

SEQ ID NO: 42869 - DNA, 398 bp, Gossypium hirsutum
  Clone ID: LIB3196-053-P1-M1-C11
ccattttaaatactttttatatatcatttgcttagaattgttttatattttattttagatttttttactttgtatttatttgttatttgtgattcatgattataacattttgtttataaattattactttgtgttgtatagtgctattccatcgcattttatttgttgaagttttaaagtcattttattcaaaagttttcaaaataaggcaatactcggtattttgcatcttcgagaaggttgtgccgtaacttactgggttccaattttcctcgttggatctaagtaaccgagtacccatttttttcaatcaaaacgcataagtttcaaataaaagcttattctcaagaattcgaggtgttgtgccctaactcactggatatgacattttgtatctt

SEQ ID NO: 42870 - DNA, 398 bp, Gossypium hirsutum
  Clone ID: LIB3196-053-P1-M1-C12
cagtgacactcaatagtttgtgaagaatcacaatagaaaatcgatggaaaaactttgcaacttcaatcaccaattcgtcattgttcatctgctactcttttcttcacttctaagcttcacaaatccaacaccatccccgacccaagatgaacaatcccaaatcatatcaaggttccaagaatacctccgaatcaacacatcccaaccatccccgaactataaaaaatcgacccaattcatcctatccttagccgaatccctttctttagaaacccaagtcatagagttcgtccaaggaaagccgctcgttatcctcaaatggccaggctccgaccttttccttccttctatcttactcaactcccacaccgatgtcatcccttctgagcgttcgaagt

SEQ ID NO: 42871 - DNA, 246 bp, Gossypium hirsutum
  Clone ID: LIB3196-053-P1-M1-C5
atgcttgggctctggagtcattcagatgcccggagctgtccctgggtcgctgtgggaccatgggcaagtcttcgtatctctggccctttgttttctctctcaaatgagaaagtacccacctggtgggggtagttgagaagattcaatcattattggctctgtttgtatttgaatgggtgctcagtatgccacttgtggaggtggcagctgcagctaactgggtcggaatttcaggcgtatctaatc

SEQ ID NO: 42872 - DNA, 377 bp, Gossypium hirsutum
  Clone ID: LIB3196-053-P1-M1-D10
cccacgcgtccggcacaaacagtagtaggttttgcattatggtgctgcaagaaggggctgttccaccactagtggcattgtcccagtccggcaccccgagagccaaagagaaggtacataccgcttctgccgggttttctctcttttctacatcacctcctttaactccgaaaatttatatatatatcataaacttctggtccttacaggcacaggcacttctgagctactttcgaagccaacgacatggaaatgctagaagaggctgaaagtcagaaaaacaacctccattggcactatccgatgtttcgtgtctatacggtttgttgcacatttgatgttcgcaaataatgcatgcgaagttttgctgcttgaca

SEQ ID NO: 42873 - DNA, 301 bp, Gossypium hirsutum
  unsure (1)..(301): unsure at all n locations
  Clone ID: LIB3196-053-P1-M1-D11
attccggtcgaccacgcgtncgatttttatctaaattatgatatagtaaggtaaacatcatccaaaagctgccttaagactgttgactaacaataagaaccccaaacaaaaaatagttaagacttcatttcatattgaattttcaagtttgtaatgacatattttgagggggggatgtgatgttggtatgtatgagaaaatcatgttactatatttctgatctgttagagaatatttccttttggttcaaggtttatctgtcatctncacaatacagtgaaatggttcaggtgactggcgt

SEQ ID NO: 42874 - DNA, 231 bp, Gossypium hirsutum
  unsure (1)..(231): unsure at all n locations
  Clone ID: LIB3196-053-P1-M1-D5
tttcttcaaacctttctttacacacggggggcggtacaggattatggttctccactaanagactgcttcaccactataggtactgtcccataccattacccctagagcctaatagaaggtacataccgtttattattgtctttctttctattttacatcaccttcttgaactgcgaaaatttataatatttatcataaacttttggtcttatcaggcatcatgcatttttt

SEQ ID NO: 42875 - DNA, 419 bp, Gossypium hirsutum
  Clone ID: LIB3196-053-P1-M1-E11
atcccgccacgcgaggcagcggcgcacggatcaagggattgaagaatgtcccggattccactggggaaagttctcctgaggaatgtcatccggcacacagatgctcacaataagattcaggaggaatcagatatgtggaaaataagagaactggaaaaacagatggaagatgcttaccgggggaccaaaaggaaaatgctacccagcagttcaagccggatgcgcagtgatggttttgatgaagaaagtcaaagagactattggaggccaaagaatgaaatttctgggacactggaagatgattttcttaaggcaaaatcctggaacaagaagttatatgattatgaagctaacatgccagacagatggggtcacagtggttataaagagttataccctgaagaatttgaaacagacag

SEQ ID NO: 42876 - DNA, 385 bp, Gossypium hirsutum
  Clone ID: LIB3196-053-P1-M1-E2
atgcttttttgaaagcattttacaaggttatatcccatcaggttgcttaggaacttttgcagcctccttcaacattatcattttcatttgaattgacactggcagcttgacacctctggacacctggcatggcaggtggggccacctccaaataccgtctttccgtgtctgcaccttcaacaagattttctctgtaaattctgctccaaaacaatttctataaacacagcattacttttgtcttgttcacaaatcagatttggaaagaggtgcttggggactgtcataagtctatttaaagatagcttgatttaaataaaaacaaaaacaaaactttttatccaagacaattttctttcattatgggaaattagtttcaatggct

SEQ ID NO: 42877 - DNA, 127 bp, Gossypium hirsutum
  Clone ID: LIB3196-053-P1-M1-E3
atggcggatttcattggcgcgccgcggagaggccaggcgagtggtgcggagtaggcgccgtcgctgagccgaagaggaggatgcggaagacgcctttgcagtcggtgcgtgtgaccttagtgcggcg

SEQ ID NO: 42878 - DNA, 123 bp, Gossypium hirsutum
  Clone ID: LIB3196-053-P1-M1-E5
atcaacaacattccagctgatatcgtctttgttttaaaggacaggccacacaatatctttaagagagatggctctgatgtgatttatcctgccaggatcagcctccgggaggctctggtggct

SEQ ID NO: 42879 - DNA, 238 bp, Gossypium hirsutum
  Clone ID: LIB3196-053-P1-M1-E6
atggtctgcagaacgtagcgcacgccaccatggatcgcgatcgcgagcacggtctccgtgtggagctcaaccgcattcaggtcaaacgatcaatgaccaaacgtgcgctgtctgtccccgacgactccaagtctgtatgcatgcacatgtgtatttacatgacctccgttgctcccatcagcctgctcattcttcaccttctcttgcaagacacgtttgtgcatatctctgccgacta

SEQ ID NO: 42880 - DNA, 399 bp, Gossypium hirsutum
  Clone ID: LIB3196-053-P1-M1-E9
gcgagaatcctactttgttccttgtccttgtcgtgacgtgacaacctatttccatcaaaatttagcttgcttaaggtaaaaaaatacctaaaaatttatgtatacacttctaggcaaccaacttacaacttatcaataagttaaagtgataaaataccaaaattattaactatcgaaaccaacttcaatcctatatactccaaactaaccaaacaccatttcaagtcattagcaaaagatcatattttatacaacataaacctttgacacatttagccaaaagtccctaggtacatgccaaaaaaccaaaatgaaccactttatacaaactttgttgggttggaaacaataatctagatgctgacttcaattcctaaggcttcaagaagaatctaaact

SEQ ID NO: 42881 - DNA, 393 bp, Gossypium hirsutum
  unsure (1)..(393): unsure at all n locations
  Clone ID: LIB3196-053-P1-M1-F1
gaaaaaagtatcggattggtagatcttgtatacgaacgtttatcaagacacaccttacctcaaaagagcattctgttataagccctcttgagcttcccgttttatggttcctgcgagcatcttgatcggtagtgatcctgcatgtgttgcggactaccgcaactctttgtgagcgtcccgttgtacgactgattgtggtcctgcatatattgaggacacaaatgtggctctttatgagtgtcctgatatgggctcttttttatcttcctaatatgtctcgcttgaacttcctattatatggctatccgaagctccttgataataactcttcggagttacctgttaagctcattgagcttcctattttaaactcatatgaatntcctgttatag

SEQ ID NO: 42882 - DNA, 357 bp, Gossypium hirsutum
  Clone ID: LIB3196-053-P1-M1-F11
attgcgtgccggggccagggccgaacggctcgccagtgcaaagcaggccccttggggagacggcaggcagcaaaaggcttccttggcaggggttctgggcgtttggggaggggaggtgctcagagatagggccgaggatggagctcccaggtgggttggagccgtgggtggctgggctcgagggcgctgttgcagtccggggtctggaagaggcgatccccgggaaagccagcttcagagccgggagaggtcggcaagggacctactgcaggagcccccaggtgggggtagggagggggcccagacctgtgccaggagggatgctgaatccccatcgcctagctccggggccttgca

SEQ ID NO: 42883 - DNA, 400 bp, Gossypium hirsutum
  Clone ID: LIB3196-053-P1-M1-F5
atcgcctggtcctcttccggtcaccagcccacaggcagcagctgggctgaggggatgacagacctgggtcctcagcctccctgggcttggtttctccatctgcatctgagagtgatgggcaggcgggcatcccgggcggggacaggagaagagagagatgcagatgcagtctgcttcctggatgccagaccaagtggtctagttttcaaggcttgtgtttttgggggactcttgatcagatgggaccactccccacaggccgttccttgtggctgcagtggcactaagctctcagactgcctggctgcccctgtgacctcaggagcccactcccatcgggccctgccttctctccttcctatgcctctggtgctggtcctgtgtcttgcccctcttctga

SEQ ID NO: 42884 - DNA, 357 bp, Gossypium hirsutum
  Clone ID: LIB3196-053-P1-M1-F7
atggcagatatacgaaccgattcacagctggtgctggaggcggttataagctttatgagagatacatgccggccgtgtattcagtcctgtctgcctagctagaggtgcctatcagctcgtggctcgaatatgttactttaaaccataatatctatctttactgtcatgtgcagctggatcgaatcatagataccaatactgctgaaactgatggaaagcactccggagtaccacaaactgctgcacaagctgcatagtggatcctacacgaccatcgtgggcctctcacgatgcttaacaacacgctctactattcaaaccacacaccacagtgtgcttactaaagcatcacaggat

SEQ ID NO: 42885 - DNA, 395 bp, Gossypium hirsutum
  Clone ID: LIB3196-053-P1-M1-F9
cccacgcgtacgaattatgtattgattttgagtatgatcctgctaatttgagctatttatgatcttctatctcataggaactaaatttgaggcaaaagtaaaattaagggccaaaagcgtgaatttagatataaaatgggccaatgtgcgacataaggaaaagttggtgccaaaagtgcaatcatggaggacacaagggttgaaatacaaaaagaagagatttattctattaaactctattttaattatattaggataattaatattgagataattattaaggattatttttaggattttattttatttatctttatttatcttcaattaaatgtatttatcttttaggaatttaagtaggattagactatctcccctatcactataaatagggg

SEQ ID NO: 42886 - DNA, 409 bp, Gossypium hirsutum
  Clone ID: LIB3196-053-P1-M1-G1
aacaagtgtgacgcaaaagcagcgctgctggctaccgcgcgcgagtatctcggcgatatcgctcggtcatgttgcatcacgcacgtgaactctctggtgttacgggtacagggcaacacgatgagcaccctgggacactactcgactattaaccagtggctggcaggcacggcggttggagcaatctagggcgtaatgtggtggccgacggagcttgccaagaggcgactgaagattgaggacaggagcccgtgacgcacctacaagggttagatggactgccttgagcagatatacgcgcaccagggtatgcgtggcgtcaacactggcatgttgactcacactgatgccagagacgcccatcttctgcgtctaatcaataacctacgacgcgctcacactagcgctt

SEQ ID NO: 42887 - DNA, 397 bp, Gossypium hirsutum
  Clone ID: LIB3196-053-P1-M1-G10
cccacgcgtccgcactgattttggctagggctaaatgccctattgtttaggctgaacaatcgatttagtttttgtgcaattttactaataggtttgttttggatgtcgttcataaggtctaaaagtgtgttgtagtgtcaatgttctgaaaatcaccaggtttgtgacttgaactcgattaaactatgaaactgtacgaaatagaatctgccagtcaacgctacaagactgtttgtttggtcgtgcattatgccgtgtgggctacacgagttggacttttaaggcatgtaggccacatgggcgtgagggcccattttatacgttaagttatccgaatgtgtgtttcgtaaaactcttaacgactaagtggaatttatgaaatctgttaaaatcatta

SEQ ID NO: 42888 - DNA, 418 bp, Gossypium hirsutum
  Clone ID: LIB3196-053-P1-M1-G4
atgtcgcatgctaaggatggtacttgcatatggtgaattactgttgacagtttccgcagaaatcctatttcagtggaccaacattgtggcatggcagcaaatgccaacattttgtggaatagcagcaaatctacaagagaccctggttggtttttcgttttattttctttgtttttttcccccctctcctgaatcagcagggatggaaggagggtagggaagttacgaattactccttccagtagtagctctgaagtgtcacatttaatatcagtttttttgaaacatgattctagttaaatgtagaagagagaaaaaagaggaagtgttcacttttttaatacactgatttagaaatttgatgtcttatatcagtagttctgaggtattgatagctttctttatttctgcctttacg

SEQ ID NO: 42889 - DNA, 398 bp, Gossypium hirsutum
  unsure (1)..(398): unsure at all n locations
  Clone ID: LIB3196-053-P1-M1-G8
caaagatgttttcccatctttttgttgatggtctaattatcatattaggacctataatttcaagtttcatgactatttggcccttttagcatctagcactcaactttcacattttattcaattcggtcatttctctaatttatcattaaattggtcaaattttcctatcgatatttttcatatgagttttctatcatattacatatcatgcaataacattaaaatatatttcaattctagcttaaatttatggntatgaaaccactattctgatatcaccaaatttaggccgttacaattctcctccttaaggattttcgtctttaaaaaatcttaccagtaaagaggttcggctcccatgtagcctcttcaatcccatgttgttgccaaaggacttt

SEQ ID NO: 42890 - DNA, 384 bp, Gossypium hirsutum
  Clone ID: LIB3196-053-P1-M1-G9
gagagaagagtcccgaagccccaactatcaaaagatacaatctcatccctcccacacccattctcccgctatatctgcaacaatggccattttgtgcccttcataaaataatttcccctctgcaagacatttactcattaatctctagaaagggtctttgtgattatcgaaaatggccacaatcgctgcatgttcttctcacttgttatctgcttctacccatttccatggcttccctaaaacctatctaaaaatttattccccttttcttcataagctcaaggactcaactcagtatcttgaagcacacaaatgtggtttgagcatgaaaacaaaaccaagtcattctgaatactaagccaagtatctgttctgctataaata

SEQ ID NO: 42891 - DNA, 395 bp, Gossypium hirsutum
  Clone ID: LIB3196-053-P1-M1-H1
aaggagagaaagagacgacagacacaggcaaacacacacacatagacatatacagcaagaaaagaaaagaaaagaaaggaaaagaaaagaaaaggagggaattgaagaaagctttcataccttagaagagaaaacgatgtcttaagagctctctctcttacatatcctttcattctctgcaactctctaacaagagaaggtatagatgatgatgatgaaggcttgttgatatatgattctaaagaaattctatggcttcccaaggttaccaccatcaccaccaccaccaccatcaagcagctgctggtatcttcagtttctcaaatgggttcgagagatcagccataaaccaccaagaacagcagcagcagctggtacaacagatccggagagat

SEQ ID NO: 42892 - DNA, 326 bp, Gossypium hirsutum
  unsure (1)..(326): unsure at all n locations
  Clone ID: LIB3196-053-P1-M1-H2
cccacgcgnccgctcgaactctcgggccaaatcntgttttgcgaaaagacgccaaacagataaattttgtgattcctcttttctttctcagatcccttcgaaagcgattcttgttatcaagcttattagatttcttttaaatcgaattgaagttgctgattctaaatgagttcggccgaccttctcagcatcgaccctttagagctgtagtttccttttgagctgatgaagcagatctagtgttcttttaaattttcgaataaatctgataattatgtttcttttcaaggtgataaacgacaaatccaaagaagttctgctttcgt

SEQ ID NO: 42893 - DNA, 422 bp, Gossypium hirsutum
  Clone ID: LIB3196-053-P1-M1-H5
atgtgaattctaccaaaggagactacaaacttgcagcttaaaatgggaaccagttcccacactggcttaatttatataactgcttggctgtattgcgggtaatattagtagcacgatgcacttcatttttaaacgagatgttactattatattgcttaaatgcactagcacttggactttgtgagatgcacatgtgtcactcagagtgctggcttatttaaaggtcaagccaaggagtttgtggatcagccacaactactgttttctaagacgattgatgtgaaggacttagtgaagtaatttttatattttggacttcccagcatgatgtcctttttaatgactgccatgctttttttggactcagtaaatatttggaattgttagaaaagtctcattactttgataaaatgcatgacatg

SEQ ID NO: 42894 - DNA, 419 bp, Gossypium hirsutum
  Clone ID: LIB3196-053-P1-M1-H7
atgcagtgctggaggtgcaggtggcatgtggaggggccagaccaagcatcccaggcaagcatccttctgccgggtattaataggaagccccacgccgggcagctcagccaacgaagcagcagccggctgagctgaacccagcaggtcgtctgctcccgcctgtcctctcgtcagccttcctcttccagaagctgttggagagacattcaggagagagcaagccccttgtcatgtttctgtctctgttcatatcctaaagatagacttctcctgcaccgccagggaagggtagcgcgtgcggctctcaccgcacgatggggcctagaatcaggctcgccttggaggcctgacagtgatctgacgtccactaagcaaagttatttaaattcatgggaaaatcacttctgccctaaacgaag

SEQ ID NO: 42895 - DNA, 390 bp, Gossypium hirsutum
  Clone ID: LIB3196-054-P1-M1-A1
atggccgcgatggcgctggtggccggcgggctctgtagagggctgggctcccacccggccgccccaggccgggacgcggtagtcttcgtgtggctcctgcttagcacctggttcacagcccctgccagggccatccaggtgaccgtgtccgacccctaccacgtggtgatcctcttacagcccgtgaccctaccctgtacctaccagatgaccttgacccccacgtaccccattgatatctggaagtacaagtctttctgacatgaccgcatcgatgatgccttattcccagccagcgtcgacaaccagctcaatgcccagctggtagccgggaacccaggctacaacccctacgtcgagtgccaagacagcgtgcgcaccgtcagggtc

SEQ ID NO: 42896 - DNA, 387 bp, Gossypium hirsutum
  Clone ID: LIB3196-054-P1-M1-A2
cggacgcgtgggctacttgtaaaaactggtttctatacatgaggtgcatgtggcatgtcatgtgtcactattgaatgttgtgttatggcatggaactagcatcatattttccattttcagtcatttagttcctaatgaaaatgggctggtttgcacgtagtccttgaattgctggttggttccttatccggttattttcccattccttttgctccgaatagtcacttgtgtttggctcgactcttcattttgcttgaagtatttgtggccatactcatataaaacacatattcatgcccaaagtttacacctgactttgagtaacattgttgcttccttcgaagtaaacatataatctttccccttatccatgtagcaaccaggatg

SEQ ID NO: 42897 - DNA, 346 bp, Gossypium hirsutum
  Clone ID: LIB3196-054-P1-M1-A7
cttgagtaaagagtagacctttttgggggggttctagaatttgaaagcgagaactcctttactttatctttatttggtgtaactacttgagccggatgagaggaaactctcatgtccgattttgagggggggatcccgcagggccctatcctaatttttcttttgctaggcccatcgctaaaaaacctactttcttacgattacgaggttgattcgaatatgaaattcaatcctggaaatacagtatcccacttttttttactacccaaggtttcgatacatttcgaagtcgcgaaatttctaccggagcaagtgctattcgagaacaattagccgatctaaaatt

SEQ ID NO: 42898 - DNA, 383 bp, Gossypium hirsutum
  Clone ID: LIB3196-054-P1-M1-A8
atcacagcttccgcccagcgtaccgcaaggtgttcctgcacgaagcaactgtgcgcctgatggcaggagccagccccacccgcacccaccagctgctggaacacagcctgcggcggcgcaccacacagagcgccaagcacggagaggtggatgcctggcctggccagcgagagcgggccaccgccatcctgctggcctgccgccacctgcccctctccttcctctcctccccgggccagcgggcagtgctactggccgaggctgcccgcaccctggagaaggtgggtgaccggcgctcctgcaacgactgccagcagatgattgtcaagctgggtggtggcactgctattgccgcctcctgaccaccaggctcagcccacccc

SEQ ID NO: 42899 - DNA, 288 bp, Gossypium hirsutum
  Clone ID: LIB3196-054-P1-M1-A9
cccacgcgtccgttattaatcaatctgttcgaaaaaattacaagtgtacttagacgaaaatactacagttagggcaccagatctaacacaagatgagtccaaccagtgtcattctgaggacacaaagagggcgttacgagattgggtgagggagaatgtcacaggccacggatcaaagtccatgaccattgtacacaaaatgtcccatagaggtcaacttattaaatgatgctcatttgacccatatgaactatcccgatttgtgaaacccatggagaagctcatcta

SEQ ID NO: 42900 - DNA, 392 bp, Gossypium hirsutum
  Clone ID: LIB3196-054-P1-M1-B10
atgcgagctgtgccgctcgcggtaccgctgggtcagacagaggtgttccaggccttgcagcggctccatatgaccatcttctcccagagcgtctcaccgtgtgggaagtttctggcggctggcaacaattatgggcagattgccatcttcagcttgtccgctgctttgagctccgaagccaaagaggaaagtaagaagccggtggtgactttccaagcccatgatgggcctgtctatagcatggtctccaccgatcgacatctgcttagtgctggggatggggaggtgaaagcctggctttgggcggagatgctcaagaaggggtgtaaggagctgtggcatcggcagcctccatacaagaccagcctgggagtgcccgagatcaatgctct

SEQ ID NO: 42901 - DNA, 440 bp, Gossypium hirsutum
  Clone ID: LIB3196-054-P1-M1-B11
acactatagaacaagtttgtacaaaaaagcaggctggacccggcccggatttccggggttggaatttgcagagcctatgaatgggatgacttaaaggtttggagccgtgaaccttaattcttcattgaacatgcttcctgtccgaccccaaactaacactttgatagggggacccatgcctatgagcatgcccaatgtggtgactggccccatgggaatggcccctcttggaaatactccaatgatgaaccagagcatgatgggcatgaacatgaacatatggatgtccgctgctgggatgggcctgacgggcacaatgggaatgggcatgcccaacatagacatgacttctggaactgtgcaacccaagcaagatgcctttgcaaatttcgccaattttagcaaataagagattgttaaagaagcagattgaatgaaga

SEQ ID NO: 42902 - DNA, 353 bp, Gossypium hirsutum
  Clone ID: LIB3196-054-P1-M1-B3
ttttacaactgttcgagacccctccacgagaagcattagaatttcctgaagcaaacaaggaaagaagtattcatatccttcaatctttttctatgtaatttagtatagtaatgtttttatattcacaaaaaaaattaactcaattttatctcaaattttttttccctagtttcacctctgcttttagtcatcctaactttagaagcaaatcattatgattttagtaaacaaagcattatgaagtagaatttttttttaaaatcgaaaaagtaagaggaaattggatagacaaaatttcaaatgttgctaaatacaagatatgacgatatatcttcagagtaaaaataccaaaa

SEQ ID NO: 42903 - DNA, 399 bp, Gossypium hirsutum
  Clone ID: LIB3196-054-P1-M1-B9
atgccgcggagccgggcggagctggcctgcggctcccgtggccggctctccggccggagacatggcccgggggcccggcccgctaggcaggcctcgcccggatacggtcgccatgcccaagagaggaaagcgactcaagttccgggcccacgacgcctgttccggccgagtgaccgtggcggattacgccaactcggatccggcggtcgtgaggtctggacgagtcaagaaagcggtagccaacgctgttcagcaggaagtaaaatctctttgtggcttggaagcctctcaggttcctgcagaggaagctctttctggggctggtgagccctgtgacatcatcgacagcagtgatgagatggatgcccaggaggaaagcatccatgagagaactgtctc

SEQ ID NO: 42904 - DNA, 374 bp, Gossypium hirsutum
  Clone ID: LIB3196-054-P1-M1-C10
cggacgcgtgggtttttatagatagttttcatgaataaaacaaaaaatcaaaataaatattacgattattacatttttaaaattttattattcataactataaatttaaccctcaaaagtctaccaattttttaatttgtccttattcttttggttttttttttcaattgcaccaccaatctttcaatttttatcaaattgatcaaatttggatggaaaaaaactaatgtatccattaattgactaacaattgatgaaattcattgatgtggcatgctagatgtacttaattattgatgtagcactattttatcttatacatcatgtcaacaaattatttaaattttataaaaaaattgaaaaaaaaagatttt

SEQ ID NO: 42905 - DNA, 367 bp, Gossypium hirsutum
  Clone ID: LIB3196-054-P1-M1-C12
atttctcatcgttttttttttcttttactactttttactgaccaaactcatccttttgtatgctttaatgcttctatctgatttttttttttaccgtgattcttcctctttttctgataagaattattggattatatttatcaaattgggtttttttgttctgcgtttggccttttcccttggatctcttatattaaagtggaataatttgagacgaacaagggcttttagggttttctacggatagaacccatttcatgcttttaatggccatctccgctagatttgctcatccctgtatatattgctcctttaatgatttttcagttcctttcttttgttattgaatcctttagatcgttctgat

SEQ ID NO: 42906 - DNA, 374 bp, Gossypium hirsutum
  Clone ID: LIB3196-054-P1-M1-C6
cccacgcgtccgaaaaatttccccaatttattttttcaatcacaaacaattcagtaatagtttattggttctttccttttaatttatttttgaattgaaccgggtggttcaatcttatacataaggtccaatggctggtggctctgatgcggcggagacgctttcatgtgctcgttgtagcaatcctgctagccttcagtgtcctaagtgtgtggagttaaagcttcctcgtgaaggtgctgccttctgcactcaggattgtttcaaggcttcttggagctcacacaagtcagttcatttgaaggcaaagctgtcttcacttggtacggatggtgctggtggacaaaactctgatttagctagtgagggttggc

SEQ ID NO: 42907 - DNA, 385 bp, Gossypium hirsutum
  Clone ID: LIB3196-054-P1-M1-D12
atcccggtccgccctgccctggaattacaaaagtcttagactgtgcctgagtgcccagcctccttaggagaccctcccaggcagcctgagtgccagacccgggagctgggtgctctggccctgcctgcctgcctctcactggaccctctccttccaggtgcggcttcaggtccagagcatggagaagcctcagtaccgtgggacgttgcactgcttcaagtccatcatcaagcaagagagtgtgctgggtctgtacaagggcctgggctcgccgctcatggggctcaccttcatcaacgcgctggtgttcggggtacagggcaacaccctccgggccctgggccacgactcgcctctcaaccagttcctggcaagcgcggcggcg

SEQ ID NO: 42908 - DNA, 391 bp, Gossypium hirsutum
  Clone ID: LIB3196-054-P1-M1-D5
atctctgtgactgcctatgtgagaggcagagagggcgagtgcctgcgagagagaatgagcctcccaccagacaggagggagatgtgcgtggatgtgtgtgatgtgcacatgtggccagaggcgtgtgtgcgagaccgacactgtgatccctgtgctgggtccggggcccagtgtaacgcctgtccccagccatgctgtggttacctctccttgctaccctgtcatcttgcacctcccggagtgagcagcgaggaacagcagcactggtcccaagcagaggccttgccctgctgggaccccgggagtgagagcagcccaaggatcccagggtgcagggaactccggagctgcccacctcctgctgccccctctgtacacgcagccagtcccc

SEQ ID NO: 42909 - DNA, 374 bp, Gossypium hirsutum
  Clone ID: LIB3196-054-P1-M1-E3
cccacgcgtccgctcagtgtttgaggctagacttggtagttggaggtctcagagtgatagtgtttgatttggtttaggtaaaattgtcataagttttgtacggttggtttaagactttttataaagcaattatataaagtgtgttacaaagtttttatgttggactttcgtaaagtgttctttggaatgaactttagtaactgtggattttatgtctgaatgttttgacgcgggtttcatattgtttcaaaacatatctaagttctatttagtttccttaagttgaaacgaacaaaagggttttcttgatttgaattaaagtttttgtatctgccaccttcggtgtctaaacgtaacctccgaaattcgatcta

SEQ ID NO: 42910 - DNA, 372 bp, Gossypium hirsutum
  Clone ID: LIB3196-054-P1-M1-E5
gtccatcttcaattaaagcgaaatgagttgaccttcccaattccgaaatttaactagctttacccttcacgcatgctttgttaaaattgttccaattataaagtattcttgtacttttcataaatttaaattttagtccaagtaattttatttttaataatttaatcccttacatttaaaattttaaaatttaggtccaactgttaaaattattttattaattcaagtttattatagttccatttatttagctatatggctaccaaataagtattttttttatttcaaaaagtaatacaaaaaaattaattaaaaatttttaatagtgttaacaattagacttgaattttcaaatctgaaaaattaaatgac

SEQ ID NO: 42911 - DNA, 392 bp, Gossypium hirsutum
  Clone ID: LIB3196-054-P1-M1-E6
atagagagtactgcaaaatgccatgcaaactttaaagagaatggcccgtttactaattgctgcccttctgatgtctttatgtatagttctgatagaattttcaccagtctgtgtatctctggagtgagatctgtgtgcaaagtgacatacaattggaaagccatttttgttgtaaagacattgtttttccgacttttccgatgagttagaaaaatgtttgtcattgctttaaaatcatagctgttctgcttaagaggaattgaatttaaaaatgagagagtattaaaactcacgtggcagtatcctggtcttaatcagatattgcagtgttcaaacgaggtatggacacatcaacatattcacctttttgaaggactagtgacttgtttaaa

SEQ ID NO: 42912 - DNA, 401 bp, Gossypium hirsutum
  Clone ID: LIB3196-054-P1-M1-E8
atcagcaattgatgctgatgatcccaatgccctcaatgggatgttgaggtacagaatcctgtctcaggctccaagcaccccttcacccaacatgtttacaatcaacaatgagactggtgacattatcacagtggcagctggacttgatcgagaaaaagtgcaacagtatacgttaataattcaagctacagacatggaaggcaatcccacatatggcctttcaaacacagccacggccatcatcacagtgacagatgtcaatgacaatcctccagagtttactgccatgacgttttatggtgaagttcctgagaacagggtagatgtcatagtagctaatctaactgtgactgataaggatcaaccccatacaccagcctggaatgcagtgtacagaatca

SEQ ID NO: 42913 - DNA, 397 bp, Gossypium hirsutum
  Clone ID: LIB3196-054-P1-M1-E9
atagctgagatcacagacaagctggggctgcactccctacgccacaggaactggtacattcaggccacctgcgccaccagcggtgacgggctctatgaaggactggactggctgtccaatcagctccggaaccagaagtgaatgcgacccccctccctctcactcctcttgccctctgctttactctcatgtggcaaacgtgcggctcgtggtgtgagtgccagaagctgcctccgtggtttggtcaccgtgtgcatcgcaccgtgctgtaaatgtggcagacgcagcctgcggccaggctttttatttaatgtaaatagtttttgtttccaatgaggcagtttctggtactcctatgcaatattactcagctttttttattgtaaaaagaaaaatc

SEQ ID NO: 42914 - DNA, 368 bp, Gossypium hirsutum
  Clone ID: LIB3196-054-P1-M1-F10
ctttcataaaggcgctgggattggccaaaaaatctacataacacatttcagagtttctaaaaggggccttttagaatcgatgacgacgcttcagtgttttgattagccataccaaacctgaaaagacccaaaataactctccgatctcgttactgatttgcttctccatcccaaatcattgaatcgtcgattgaggtgtcattaggagcctaattgttgtcaatctacttctactaccttatgcgcgaaagagggaatagctctagcaagataagtttctacatttctttttagtccctctattgccaagagacgtgcaacaccatttgcatgttttgacacataatgaaaaacgcagtgttgatacc

SEQ ID NO: 42915 - DNA, 146 bp, Gossypium hirsutum
  Clone ID: LIB3196-054-P1-M1-F11
cacgggggaggaaaaattcaaattggcaaggggggtcctggattgggaatttaaaaaactagattggggggaatcggttccatgggatggccaatggggggaggggacaactttttgcttggaagtgggcggggaaatataagggg

SEQ ID NO: 42916 - DNA, 392 bp, Gossypium hirsutum
  Clone ID: LIB3196-054-P1-M1-F12
atatttttatatctacagacgtactcttcacttatggtggcgttttatcctgtcacatatataaataaatatatatatatatagcaaacagccttgcaaatcatcggccagaaaagctgcagggcattggcagggcctttttctacctggttggcacctgggggggggggtaaccaggatattggaccggctgataattcaaaactggtaatactggccagggggtccaaggaaaagttgcccaaatattccatctaactggtctctaccccaaatcccaaaaggcccaaatttccctttggaattgggtgactaagtgtagtctgtggctgacctagaaggacacaaagttatcaagagtttcccttcctagaagatgaatgttacctttt

SEQ ID NO: 42917 - DNA, 392 bp, Gossypium hirsutum
  Clone ID: LIB3196-054-P1-M1-F4
atgaataatcctttgaaaaggatgaaggaggaagatattttggatcttctggaacaatgtgaaattgatgatgaaaagttgatgggaaaaactaccaagactcgaggaccaaagcctctgtgttctatgcctgagagtactgagataatgaaaagaccgaagtactacagcagtgacagcagttatgatagtagcagcagctcttcagaatctgatgaaaatgaaaaagaagagtaccaaaataagaaaagagaaaagcaagttacatataatcttaaaccctgcaaccactacaaatttattcaacaacccagctccataaggcgttcagtcagctgccctcggtccatctctgctcagtcgccttccagtggggacacccgcccattttc

SEQ ID NO: 42918 - DNA, 347 bp, Gossypium hirsutum
  Clone ID: LIB3196-054-P1-M1-F6
agccttcggaccccggacccgagacccgtggcgggggtcgacaccagggggtaacagacttaattcacttatttacaggccattttaaaaattttcagaccaggtggcttactgggtgactgggcccttaaaaatcatatcttgaggtccaaaacttggaaataaagttcggaaaaacttcctggaactagactcatatatccatctaaaaatttttttctagaatttttgggcgggccaattaggacattttattaggtaaagagttccctgtgtacacgggtcgactgtgttgaccttcttgcattacgacttatatatattcctgtgcagggattaaatactta

SEQ ID NO: 42919 - DNA, 377 bp, Gossypium hirsutum
  Clone ID: LIB3196-054-P1-M1-F7
cccacgcgtccgaaatgatttagtgatcgagactcgagaaaatagcctgactggaatatgaataataatgagaatttggcaagaacttgttaataattttcttcttattttcatacaaacttactaagcttaaagcttactccccctttcctttttctcttagtgttgtcaggtcgacttggggttggagatcgtcggaggcagcatcacactatcaagtcaccacttttggagtaatgatgcatatgctagtaatttcaagtgagtggcatgtatagggactagacaaatgatatgtgttattatgatttagtcaaatatgttggctatattgagttatttgtatattgccttgagatgtggctcatattgattat

SEQ ID NO: 42920 - DNA, 399 bp, Gossypium hirsutum
  Clone ID: LIB3196-054-P1-M1-G1
atcacgggctcgggccgccaggaggcccagaagacggacgcggagtaccggaagctcttcgacctggcgctgcagggcctgcagctgctgtcgcagtggagcgcgcacgtgatggaagtgtattcctggaagcttgtgcaccccaccgacaagtactccaacaaggactgcccggacagcgcggaggagtacgagcgggccacgcgctacaactacaccagcgaggagaagttcgccctggtggaggtgatcgccatgatcaaaggcctgcaggtgctgatgggcaggatggagagcgtgttcaaccacgccatccggcacaccgtctatgctgcactgcaggacttctcccaagtgaccctccgggagccgctgcggcaggccatcaagaagaagaag

SEQ ID NO: 42921 - DNA, 370 bp, Gossypium hirsutum
  Clone ID: LIB3196-054-P1-M1-G10
aattatctctaatccgtactgtgactgtctcgacagactatctttgatttgtgtttattgtctcagcagactttatctttgtgggttccatggagtatttcatccatgggtttacaccgatccactatcctggcatactaacttatgatgttatatagtattttatccatgggcttacttatcatacttgactgctataacaactttcatctatggtcttacactggatacctcaaaccatatactttactggcatggcgtggttcatctatggtcttagaccattaacattactatgtaccatgctcccatgacatctttcatccatgtgcttacgttacatatcctgtatctagactgtcataacttc

SEQ ID NO: 42922 - DNA, 367 bp, Gossypium hirsutum
  Clone ID: LIB3196-054-P1-M1-G2
ctatgtgtgcgagttcttcaaccgagcactatgtgtgcgagatcggttagtgggcactaagtgtgtgaaatgagattcgtgtaagacctcgtttgggacgaaggcattgatttgagatgttgtgtaagaccatgtctaggacatggcatcgactcgatatgtgataacatgtaagaccatggttggactatggctttaagtaaacgacgtactcagacaagtacgacgctctttaaattgacaaatgttaggaagtagaattgaagttagatgttgaattttaattagatactgatatttggtatctgagtttgaattggggattaatagatataaattgacgattgattattatttcagctgtaat

SEQ ID NO: 42923 - DNA, 197 bp, Gossypium hirsutum
  Clone ID: LIB3196-054-P1-M1-G4
cctttttaataagaacttatactagtcctcctccgaggaagaagaacaacatgaacactaagttggatggagaagggcgcaacacaccagagtgtgagcccacctattaaccaaccacctatttgtagttcgtgcaagccgtacaaccacaatcattggctgcctaaacaaagaactactaatgatcggtttcggac

SEQ ID NO: 42924 - DNA, 375 bp, Gossypium hirsutum
  Clone ID: LIB3196-054-P1-M1-G5
gaaaactctgtaatgccatgaaattgatataaccaagtttaggcaaatttcttgttcttcttaattcaatttattaagtgaatttttccaacattaaccatctcttgtagatatgtagggtaggggttggaatttttgtttgtttttgttttaaataaacttctaacgaattttaaatagctttaaattttatagttaagttccaattacacttttaaattcttaagatgaggatacagattgaagttataaaaattatattagggattttcaaacacttctttaactttaaatttctttatataagtttaagttatgaaaattatattataagcataaacatgtatgagtgtttcgaataattataattaaaat

SEQ ID NO: 42925 - DNA, 393 bp, Gossypium hirsutum
  Clone ID: LIB3196-054-P1-M1-G9
atgctgtgtatgatcagttatctacctcagagtctattgtcttttgtgctgggacaggttgctggccctccctgtttccacagaccaaatcctcctagctcaggagctagggctaagcagttgtttctttcaagtattttttagttcttaaattttatgcttgtatttgatgatagatgtcagtgacatttcatagtttcaaaagtccttgctgctctgagaagtgtagattctagtgaaaattacatagtcataagagaaatgtgtttttgtttttgtttttgtttcatttttttaaaggtggggtattattggttctatgctccctggaatattactgctttgtgaaagtccagactgaacgcagcaccctctgtgtacctagtacaggta

SEQ ID NO: 42926 - DNA, 309 bp, Gossypium hirsutum
  Clone ID: LIB3196-054-P1-M1-H1
atctcctcactcacccttcctggcgctttgggctccccttgcttgttagataagatgtgtcatgtgaaaaagcacgcacccccagccaaatgggctgtggaagaccctgcggcaaagcgagcgggtgagcggactaccgtggccgggctaccgtgactcaccgtgtgcgctgcaaaccctatggctgcgtcaacaaacgaagaggtaactactcttacagcctttccgattgtgggtacactgcttgcattagccgggttaacactggacggcaccgacattgggctcatgctaaccacaccggacatc

SEQ ID NO: 42927 - DNA, 393 bp, Gossypium hirsutum
  Clone ID: LIB3196-054-P1-M1-H10
atcctcaggggtgagaacaggattgcagaactgcgcttacgccttttggaaactcgtccagtggcaggagcagcctcccaggagcagagcagacctgctcggtggtcccctcgccaaccagggacccaagaagccgctcaaggaaacacggtcccgcggtgtccgggaggtcctaacaagaaagctttctgctcatccatggctatgagttcatgccttaatgcaccccacggccagtgacagtggcagtgacaacagcgggacctgcctttgaagattggctgctgcaagggttgatggctggcatgtcgcaaagaccacccagcatgtactggtgtgtggggccggaggagtcagctgtgtgtccagaacgcgccatggagacgcttaacg

SEQ ID NO: 42928 - DNA, 402 bp, Gossypium hirsutum
  Clone ID: LIB3196-054-P1-M1-H3
atcaaaattgatgagaaaaactttgtggtggttatggtgaccaaacccaaagcagtgtccacaccagcaccagctacaactcagcagtcagctcctgcgagcactacagccattacttcctctaccgcaacaactgtggctcaggctccaacccctgtccctgctttggctcccacttccacacctgcatccatcactccagcatcagcgacagcatcttctgaacctgcacctgctagtgcaactaaacaagagaaacctgcagaaaagccagcagagacaccagtggctacaatgctacccctgaatttgaaggtagaggaggtgatgaccttggcaccgagatcgctaacaccctctatcggatatttaacaataaaagcagtgtcgacttgaagaccc

SEQ ID NO: 42929 - DNA, 397 bp, Gossypium hirsutum
  Clone ID: LIB3196-054-P1-M1-H5
ataaaaatatgaagtaccaggaggctaaacccactggcctaagatctcaccaaagttcatgagataaccaggactaggacccacggctcccgacgcccatacttgctgtgttatgctgcctccatatctgtcaggaagagcctttccagaacgactcagcatatactaagaagagcaggtatggaaagatctattgtcaggcaatcttagaattccctatatgagtgggagaaagatgtccaaattccttacgcagtggtattaatgatgatgccattgccttctctaagtccaggactgttttcctacagtgtgcctcaaacgtgtggtagaggacaggattctacattcacagcctgttccatctacgagcttttccagatgctacttgtggtag

SEQ ID NO: 42930 - DNA, 287 bp, Gossypium hirsutum
  Clone ID: LIB3196-054-P1-M1-H6
ataaaaattctaaccacgcggacgcgcaaaccaacattacgtaggggggtagaaaaggctgggcgatgacttacattctggctaacttgatccaagtaagattcctctttggaagtgggaaacacatactacggacgaagtggccttaaagaccactaaaaaggatataacatggggcattaatgacaatgaactaaatgtggccatgtgataccttcataactgactacaagctgagaaaaacaagtgtttttagtgttgtggtgaagcaaaaaaggaggggttta

SEQ ID NO: 42931 - DNA, 266 bp, Gossypium hirsutum
  Clone ID: LIB3196-054-P1-M1-H8
aggacacgtcggtcttccggggtagaacccaacgacgctcacccttttccttctttaaagccaaaacagatgtatgacaacccaagtatcatatgttctaagtgactgaaaaatgtgatggaaaacaaggatttacaatcctttaaagcagatactcggacatggtaccaaggcggtagcaccgagtgccgtatcgccatacgagaattggatatgaaaccgactggatgagctatggggcacactactgaacgtaacaagctaga

SEQ ID NO: 42932 - DNA, 374 bp, Gossypium hirsutum
  Clone ID: LIB3196-054-P1-M1-H9
gaacaactttcaaagtcattaatcgttatattaccttgactgctatgtcaaaattactcatatcttgtgagaagttaatagtttaaaaaattctttaattaagataaacataaatagaaatactatgtttatggtctaaaatggctgttatggcggtgtactgctgttactctttttttacaagatacataaaaaaattctagtttattagaaatgcaattttttattgatttggtgtaattaaaaaccccatcactaatataccattataaatttaaaaacttacctcatttatcagttgtttttctagattcaattaaatctagtgactatgaataaaatagaaactctttctcatttctctaacctttaca

SEQ ID NO: 42933 - DNA, 317 bp, Gossypium hirsutum
  Clone ID: LIB3196-055-P1-M1-A1
gccccgacgcgtactcccaggcgtgacccatgcctccggaggaaaacatgggttctgagcagaataaaggaactagcttgcctccattggtgacaaatcttagtgccgacagacgtggcatattcggaacggcggcggatattaactgctgttcaaagggttaccgtgccctccgtgcccgggaggagcatgctgtcaaggctcaagctgccatgggggaatccttcatcgtaaatacgaagcgggaagatgccgctgacctgactgaaaagactgctcttgagctttctcaaggaggatcctcatctactgagggc

SEQ ID NO: 42934 - DNA, 243 bp, Gossypium hirsutum
  Clone ID: LIB3196-055-P1-M1-A11
agccgctagaagaggtgatgggtctgctggttatccagggcaacctgacagctgtggttcccaaagaccatgaatgactttaggctcagaaggccaagccagttcacacggaagagatagcagtagaggcatttcacaggggccaaggggcaaggtggaaattgccttataaaagcataatgcctataaaaccgacccagaagtcgaagtataaaagaccaataagaaatgggaacattccaa

SEQ ID NO: 42935 - DNA, 341 bp, Gossypium hirsutum
  Clone ID: LIB3196-055-P1-M1-A3
cccacgcgtccgtttagatcgcgagcgtacgaactttttttttttttgctctggactaatgtgatgccaaacagtgaggacgtattggggcttgtggcttgatacgactaaccgagggagtgggaccgggggggtgcgccctgggggaaggagaaggggagaggcatgaaatcataagggagatcgggacgacatacaggtagcggtaaacagtgaatgctataagtaaagagccaaagaaaggaagattggaggcaagaacacagctggatataggataaaaaatgcgcgccaaaaaagtaatggaaggaccatgggacggagccgcaaagaatccagga

SEQ ID NO: 42936 - DNA, 412 bp, Gossypium hirsutum
  Clone ID: LIB3196-055-P1-M1-A5
cgcgttggtgccgggccggaatttccgggatcagacctgtgccggcacctgctgggagggacacgaggccctcccccaggcagaagagcatgccctttgccgttgcatgcaaccagccctgtgattccatgtgcagatcccagcagcctgttggggcaggggtgccaagagaggcattccagaaggactgaggggcgttgaggaattgcggcgttgactggatgtggcccaggagggggtcgagggggccgactcacaaaaggggactgacagtgggcaacactcgcatcccactggctgttgttctgcaaccatccgattggctttctgaggtttggctgggtggggaccgctcatttggccactctgcaaattggacttgcccgcgttcctgaagcgctctcgagctgtt

SEQ ID NO: 42937 - DNA, 327 bp, Gossypium hirsutum
  Clone ID: LIB3196-055-P1-M1-A7
cgacaatgggattctatgatgagagatgtaacgctaatctcgttgaacggaaaggaaggcccaccacaggattggcgcggcttgaaagagggcacaaagactgaccatcttccttgccaaaagacgcggcgatcctcaacaattcattcaagcagccggctctcggtgccggatccagccggacgacgctgtttatcaggccacacaagaatcagaaggcttgattccttggaatggaaaagaagatattttaatagattgattcagaggcctagccctaattgagtttattcaggagccggggacacgacaatttggggatcaaga

SEQ ID NO: 42938 - DNA, 307 bp, Gossypium hirsutum
  Clone ID: LIB3196-055-P1-M1-A9
aacaaatcgaagtacgcggggactgctttcaacttttttacagaaaaatgatagctatccactaggaacggtggttgactttgcgaaggatgccaatggatttacaatattaaaagtgaggaacctggcatatcatgcaaaggccttagtgaatgatcccaaaagctcattgcttgccgatagaaatcctgcagacaggactgatttaccaatcattcctgttcgggatgcacacggtggatcctaaaaagatcaagcggacaaaagggctgcttatttggataaccacccaaatgcattttgaaag

SEQ ID NO: 42939 - DNA, 325 bp, Gossypium hirsutum
  Clone ID: LIB3196-055-P1-M1-B1
tgtacatgatgacacatgtgaaactgacgcgccgccttcatgcattggctgtggggtgatgtaacaccttctttgcggtggttattgtcaaccttgtgctgcgggtcagttatccacaccgctaaattccgatgtaagataatgtgaccgaaaaggtgaaccttctgaacaatgctggggccatggaacacttccacatgaagctttttcgtgcccagaggaatccctacattgctggtttatccttgctgatgcccttcctggttagacacctggtgactctcatttgggagcagtccacactgctggcttctaatgaagcctt

SEQ ID NO: 42940 - DNA, 145 bp, Gossypium hirsutum
  Clone ID: LIB3196-055-P1-M1-B10
tgcgagctactcattcgacagcctctcaactcgggggtcaaaattagcctacgcctgcatagatcctcatacagctattaaagtggtatctaaggtgaatctacgccacctgcgatgaaaaacgcccagacaatagctaaccaac

SEQ ID NO: 42941 - DNA, 378 bp, Gossypium hirsutum
  Clone ID: LIB3196-055-P1-M1-B12
atccaatatcactgattagttacatcctttgtgtgggattagctgtaaagtgtactgctcttattcttgttcagaatagtgaattggtagccaaaaatacatgtatcacagatgttaggtcgaatttaaacagcacagtcaagtgctctggaagtttttctgctaaattagtagattaaagaatactataccttagccatgggaagcagcacgttttcctttggtaggtaggatctctatactagtgaacagtgccagtttcacactttggatttagaactgttctctagttattgtaacacagaatactgtcaatccctaatttacttaatgttacttattggaagtggggctgttgaaaaacgcacaggagggaaa

SEQ ID NO: 42942 - DNA, 315 bp, Gossypium hirsutum
  Clone ID: LIB3196-055-P1-M1-B2
tgtacatgatgacacatgtaaaactgagacggcgccatcatacagtaactttgaggagatttaacacctttaggccgctggatagtgtaaaataagtgacacggggcagtactccctactgcataatatacgatgtaacgtaaagtcaccgaaaaggtgatacctatctgtacaatgctgaggccatggaaaactaccacataaagatcttcccatcccagagaaactcgtacgtcccttctagatgatccaatattgcccatcctgtgcgagcgacctgttaactctcttatttggggaattaaaacaactggc

SEQ ID NO: 42943 - DNA, 310 bp, Gossypium hirsutum
  Clone ID: LIB3196-055-P1-M1-B5
gacccatgcgtcccgcggtgacccgatcggtgggggcaggaacatggaccaccacgccctgcactttgatgtgaatgtcatcagggagtcctcgaagatgcgggtgcaacccttcaatgagtaccgaaagaggtttggaatgaaaccctacacctccttccaggagctcaaaggccagaaggaaatggcaccggagatcgaggagctgcaaggagacatcgacacaccggagtttctaccctgggctgcttattgaaaagctgccaatcaaactttatgtttaaggagggtctgagaggacattggtgac

SEQ ID NO: 42944 - DNA, 390 bp, Gossypium hirsutum
  Clone ID: LIB3196-055-P1-M1-B6
aatttaccggatatctaacaaagtgctgacattacaggcgtgagctaccaggcgcgggcctcctgctcttctttctaccgtctgctcaccattttaggcttcattctaggaagcatctttcctgaatatttcaccactaaacattctggtggtggctagatggcctagttaatctacacatttcattttatcacctccagattttttttgtgtatgtcaaccgatacattcaggggagaacgccttaatacatgaaaataataaacttgcggagcacacactaatgaccaaggacactttaactctgaacctaattcaaaccaaatagagagagcctgatagaaagcagctctgccatccttgagttagaacatccaggaagggaaggct

SEQ ID NO: 42945 - DNA, 169 bp, Gossypium hirsutum
  Clone ID: LIB3196-055-P1-M1-B7
caaaataaactcatattgcgagaggggggttgagcctccgggcacgccaaggtaattttagttaaagtttaaaaaagactgatatctcgagaggatagttcatttcaaagaaaactataaaaagggtggtttttctaatggaacaaagcttacaatcgctggcttttta

SEQ ID NO: 42946 - DNA, 401 bp, Gossypium hirsutum
  Clone ID: LIB3196-055-P1-M1-C1
tcgatgacaccaaactagtgcttggtgtcacgctggcatcatattgcaccaagcctgtgggaaggtggacttacagtccgtagatgaacacgacggatgcggacacggtcagagatagcctgatcctatgggaaatggtggagaaactaaatgtctaagtttattatgataaaaatgtggttatttggggtaatgatgcatcaactcaatatcctgataaaaattacgcaagtgttattactctatctgtagaaaagacctttagcgagcttgctaaggatgatgcatggttaatgcaataataaaaacaggatttgttgtgtgattaaataaattaatttgaaatgagatttttgaaacatcattttgaaattattgattcattaaaggttgaatggaga

SEQ ID NO: 42947 - DNA, 345 bp, Gossypium hirsutum
  Clone ID: LIB3196-055-P1-M1-C10
caaaatttttaaaaacttcacgaacatgactttatgtttatgtttttattaaacttttattttatatatttaatatggtgtgatcttactgtggatttttaaaaaataatgttgtggacaatttggctatttaatgcatggatgttattttttttcttgttaactttagttttgttaaataataaagttttatttgtaaggtttattaaggaatattttatataatcaattaatattggaaaatatttgaaaatattaaatctaatccattgggtgtattaaaatattagattttttaaaacacatcaataatttcaatttggcacttctaaatagtttaataca

SEQ ID NO: 42948 - DNA, 248 bp, Gossypium hirsutum
  Clone ID: LIB3196-055-P1-M1-C11
cccacgcgttcggttgttgagcaacagtggtggtgggtttgagacaagtttgactcatatggaagggcttaacatgtatggcaatggtgctgataatggtttgatgataaggaagagagcgatggttgtagtgaatgcaagctcgcattctaagcatgcaaagacttgggcactcactcatgaggagaacagggttggtaaagttacttatacgcaatgtttttataacaacccaaaagattcattat

SEQ ID NO: 42949 - DNA, 374 bp, Gossypium hirsutum
  Clone ID: LIB3196-055-P1-M1-C12
atctttgatctcggtggccagtacttgcgggtgggcaaggccgtcacaccgcccatgcccctactcacaccggccacgcctggaggcctcccacctgccgctgctgtggcagctgctgcagccactgccaagatcacagctcaggaagcagtggccggagcagcagtgttgggtaccctgggcacacctggactggtgtccccagcactgaccctggcccagcccctggggactttgccccaggctgtcatggctgcccaggcacctggagtcatcacaggtgtgaccccagcccgtcctcctattccggtcaccatcccctcagtgggagtggtgaaccccatcctggccagccctccgacgctgggtctcct

SEQ ID NO: 42950 - DNA, 336 bp, Gossypium hirsutum
  Clone ID: LIB3196-055-P1-M1-C5
ccgattctcgggatcaggtccacgcttccgaagctgccaggaaattacttggtagagaaaaccagcccctcatctacagcataatccggactgggttgattccaaaatttgagttcttcttgagcagaactgattgtagtcccagtcagttggtgtctgcttgggcactcactaacattggttctgggacatcataacagaccaaggctgtggtgagatggaggtgccatcccagcgttcatttctctggtggcatatccccatgctcacattagtgaacaagccagtggggctctaggaaacattagaagtgacggctcagtgatccgagacttg

SEQ ID NO: 42951 - DNA, 407 bp, Gossypium hirsutum
  Clone ID: LIB3196-055-P1-M1-C8
ggggggcgccagcaggcaccgccccaatattccggatgcgaccaacgcgtccggaaactggagaattcggggggaaattataaggcattttgtattttctttatctatcttttttgctctatttgttatttcaattataaaaaaatttaatgttttcaattatttaatgttgtttaaacatattctctttttttagttaattaacattattatttaattctttttgtttcaaacgcttataggatttttttcttagctttattactgatatttcctgaataagagaaaatatgttttcttcatttgttgatgttgacttatttttgttttataaattttgagatttctattttttttgcttatctagaattttatagtttttgtttttacatattataataaaattt

SEQ ID NO: 42952 - DNA, 364 bp, Gossypium hirsutum
  Clone ID: LIB3196-055-P1-M1-D1
gcgggttatgtaaagttgcttggcgccatgagcacctcctaaacatgatatgcagacaagtgatactaccggagttgaatgcagaggaaataaagagcaacttggggaacttttcaggaggtaacaccaattttgctaaagataagcaacataagctatggatggacttactttaaagaagtgaaaaaaaactgcgagagagacttgagggtattagtttttatgcttgtagaagtttggtattcaactcagccaccacttgctttgagccaggaaattggtctccttttggtatggcacaaatggagcaatgggttgcaagtaataatgatcaggtgcacgaccaacttaaaattgtggcaac

SEQ ID NO: 42953 - DNA, 263 bp, Gossypium hirsutum
  Clone ID: LIB3196-055-P1-M1-D10
gagataaataatataatggagctgcatgagcaaaaactatagtttctccaacaggggcaagcacatttcatgaatgatgatgatagggcaatcgacattgaagttctttctagatggcataaattgaaactagattatgatggcaaatctgagagttgcctaaaaacatataatgctggtgaattgttcaaggcttgcattatctgcattgcacgttgtatccattgtacatgttgcttaaaggactgcttattgggacgaaa

SEQ ID NO: 42954 - DNA, 186 bp, Gossypium hirsutum
  Clone ID: LIB3196-055-P1-M1-D11
tgcagactgcaatttatatacatatctgaactgtaattttatgctaaaccgaaaccagatgcagatgctccagtacatcgcgttcatcgcacccagtgtggctcctctcgacatactaggtgttccttcggacagtaaccaccgacgttaaatattgctatacgcatggagaggctgagctaaagg

SEQ ID NO: 42955 - DNA, 377 bp, Gossypium hirsutum
  Clone ID: LIB3196-055-P1-M1-D12
atgtttgccactctgtcaccatgtgtatcttcacctgcaccggccaacactcctttgtgcacctgggccagctggactggtacacttgggtccctaacgcaccctgcacgatgcggttgcccccgccgaccaccaaggatgcaacgctggagacagtgatggcaacgctgcccaacttccaccaggcttctctgcagatgtccatcacttggcagctgggcagacgccagcccattatggtggctgtgggccagcatgaggaggagtatttttcggcccctgagcctaaggctgtgctgaagaagttcagggaggagctggctgccctggataaggaaatcgagaaccggaatgcaaagctggacatgccgtacgag

SEQ ID NO: 42956 - DNA, 386 bp, Gossypium hirsutum
  Clone ID: LIB3196-055-P1-M1-D3
gggcgcgatatccgggattgagaccatggcggcgggtgaggggctttaggcgggacctgtggttgatctgcttctgggacctcatcacatcaccactattcgcgtggtcagtgtagggaccggcacccgtagctactgccgacaggtccaaagggcacattccaataccgtcggggaaaacatattttagtttgggaacgatcctgttcagaaataccactatctccctgaagtgggatggagaaccttgagacctgtctttgaatataacctggtatctgcaaagtgctgattgggacaatgggatctacaacttcaaggcagcaaaagtcaggatgtctggggagcaacttaaggaaaaatgaggcttggctcggccagatcaa

SEQ ID NO: 42957 - DNA, 380 bp, Gossypium hirsutum
  Clone ID: LIB3196-055-P1-M1-D4
atcagtggccttggcccaggcactggcgccaacattttctgaaaccttagaagaaaatagaaaccacagaggtcagagtgagcatcttcacagacattagcaggtgcccaggggacccaccacaggctgaaatgccagcctggcacagatgtggttctcactggcaagaaccggccccggcccacgctccccactcctgcggagagctcacagccaggctaggaggcggttgtggggcccagccttcaggaataagattagtgtgtattcttttctttttttccttaaatcagtctttcttctgaaaacacctaattattcttttctttttttccttaaatcagtctttcttctgagaacacccaatgcatgtggattgg

SEQ ID NO: 42958 - DNA, 193 bp, Gossypium hirsutum
  Clone ID: LIB3196-055-P1-M1-D6
tctgaacgtgcctacatttgcaggctacatgtcggacgtattttaaccctaaacagggtcaacctccctatactcaaacgactaggacttagggccgtgaggggtttactgtataacacaactggcttgaatctagaatgaatcgttaactctcaaaaaaaattcaacatgtgaagagcatggagcagaattc

SEQ ID NO: 42959 - DNA, 360 bp, Gossypium hirsutum
  Clone ID: LIB3196-055-P1-M1-D8
cccacgcgtacgttgaccggcaatagcggcgattttaaataaactccacaatacttctttgcaaaacggctccgttttagggtactttatgacttttgtggcgcttccccaaaaacgccgcaaaaaaattggaatatagcggcgttttctgagaaacgccggtaccgataacgaatttgaggaaaaatctgagcaaaacagtactgttttgctgtttcattttattgctttagtggcgcattttaaaaaacgcctgaaaagaatgcattagcggcgtattcagggaaacgccgataaagatatctagttttgaggaaataattttgacaaaacgctccccgtttattgcttcattttatt

SEQ ID NO: 42960 - DNA, 300 bp, Gossypium hirsutum
  unsure (1)..(300): unsure at all n locations
  Clone ID: LIB3196-055-P1-M1-D9
gtaacccctanggaaacgggaaaaccaaacccggcaatcccatccctttaaaatggttacatatttccggaaaaatgttattaatattgaaacaaaacaggaaatatttgttttttgaattaaaagtgtcgattttaactcaaaaaatgtgttataaacaaaacatttataaggcttcacctgaattctaaaaaaatttataacaacaactcgttgattttacaaaattaggtatcacagagctattacttatttaaagggctaataataaacattcttgaaataaaaaaccaaaaaggt

SEQ ID NO: 42961 - DNA, 229 bp, Gossypium hirsutum
  Clone ID: LIB3196-055-P1-M1-E1
tccatgcgttcggttacagctgacaaaagaactgtttatatctttttggctgaccagtgaaatcttcgaatttgaacgcggattgatacactatgcagatagggtactaatggatcctaatcactgattttcctaggtatgtggcatgtgcaaggtatgcgtatgtggatgtaaacgggtgctgcaacgaggacagcgcggcactggggatggatgctgaagcttctag

SEQ ID NO: 42962 - DNA, 308 bp, Gossypium hirsutum
  Clone ID: LIB3196-055-P1-M1-E3
cctacccggagcattaatgcccatagacttgccaacattacaagttgaaacgtctggctttaaaatgggtggttaaacggtaagtatatattagatgagcaaggtcctaggaatctagtgcatagccgtaccccaccatcattccgttgtaaaaaatgtaacacattcagggttactaatggttgcatccacgacatgcggccatcgttaccattagacagatgcctatacgaatcaacattatgcgacgattgccggttgacgtgcttttcatctcatttgttataagcctataggaggccattagg

SEQ ID NO: 42963 - DNA, 221 bp, Gossypium hirsutum
  Clone ID: LIB3196-055-P1-M1-E4
gagattttaaaaagtgaagcgactggcgcctgacatggattgatgaaacgggcgcgactataataatggcaacttatgctttaattcgacaaattagccggaaatttgtcaaaagggaacctgtacttaagtgctgttgttttgtccaaaacgagtccttgtttcctagtccatgccttgattgaatcacatttgcgagccagagaagctacagggctgtg

SEQ ID NO: 42964 - DNA, 423 bp, Gossypium hirsutum
  Clone ID: LIB3196-055-P1-M1-E5
ccggattacgggggcgggcgaggcggccgggccggggattccggggtgcgacctgctcggaggtatggtgctgggtgtagatgcaatgtggctctcgatagcaccttatggacagttgggccccaaaggagggatgacaatagctactgaagtcctaaagagcaagcctaactcaagccattggcatacaggcattagacagaaaattagaagttgaaatggtggtgtgcaacttgtctggaccagctttatttttttggtaagtataaaagaaaatgctgatagtgatatgcttactgctgagctaatggatcaaggcttggctgatgaatactgactgttttccttgaacatgtttggaacagtgtgtatttaccttgagcatgtttggaacggggtttgtgtaatgatgttggtcaaatg

SEQ ID NO: 42965 - DNA, 353 bp, Gossypium hirsutum
  Clone ID: LIB3196-055-P1-M1-E6
attgtgcacatttgttgacacgaatgagtttcttggttcaatggtaagactttaacttaccctttagtcctgtgtttgagtatctgactgtgcaaatagaaatttacttttgctaatttttctagtgtgctgcccatgtagtggtggtggttgggtaaaatgcaatttttaatctgataagatataaggaaattgaggctagttagttatgattgagatttctgatgttttttcttaaaatagaaaaaagaaaggtttatactatcattatcaaaagatttatattgaacttgtttggattagtttatttttccactagaaatttcccttacctttcttcgtttacccacttt

SEQ ID NO: 42966 - DNA, 359 bp, Gossypium hirsutum
  Clone ID: LIB3196-055-P1-M1-F1
acggttctgcattgcatacaaagtggaaaatgcactggagctgggactcttactactggagcgctctttctagggcctaacgatattcaagcaattagctgcgattatgactccatttcagacgcctcggaattactgagattatggggatacttatgaaacccacgactctgcataaggttgaaagcaagacaatggaggtctacaagcgcaaggcgaatgactgaacttactatgagcattaaaaggagcaacagacccagagcttaataaaccaaaggatcacggctcatattgatcaagctgcgggtttacagcactttggtgctgatttcaatcaacattcaatggcccagagg

SEQ ID NO: 42967 - DNA, 272 bp, Gossypium hirsutum
  Clone ID: LIB3196-055-P1-M1-F10
accaaatagactattaatgtatcacaaaacatgtctaacccaaaagttatgacatttataatttcatatatataacaaatggccaaactgaattacctattccaacccaacctaggtatatgccatataaccaataaaagaaactatacaaacattgttaagtctcggatttttgtttggatgctaaagtcgatgcccgagacctcgatataaacctaacattcgtcaaaataaaaacaaaggaaatataagtatgagggggcaagtaatat

SEQ ID NO: 42968 - DNA, 238 bp, Gossypium hirsutum
  Clone ID: LIB3196-055-P1-M1-F2
cccgcgcgtaatcccacgtgttaccagcgcggcaagtgcgcccccgtgttcgaagagaaaattcttattgaaaaagccaccaaaagtctcgaaaacactttctggggtcctcgcagagtacagggagggcaagaggattacgcttccctgcaccataaagatcattgactccatcctcttaggaaagctccttgacgcctacttccaccaaaaccgctgggttggggccgcagatccc

SEQ ID NO: 42969 - DNA, 423 bp, Gossypium hirsutum
  Clone ID: LIB3196-055-P1-M1-F3
caagttggaacgaagaagcgcgcgggtaccccgccgcaatttccgggatggggcccacgcgtcgggcttggatccttatccgggacaagggttcttggttcttcagaaacaaactacctggcttgcaccctttgccctgacatgccgagcctgttacgccaaggatcgagaacgtctagaactgtcaggatgggcaacacctgcagcctgacatgtccaatgctgacacgctggaagctgggaggcggcacgcataacgggtggcagccctaggaaatgacccgctgtcccggctggtgatgctaaatgtgactcccaatcagcaccagtactccaacatgcacttggacatccacctgcaccagtaagatgctatacatgcaaactctgactcagtgcaaattatcatccacctcatgggct

SEQ ID NO: 42970 - DNA, 385 bp, Gossypium hirsutum
  Clone ID: LIB3196-055-P1-M1-F4
attcggcgcccacgtcggatgtgggacaggcttgggggaaagagcttgtcctatctcaggaacaaactaacaggctgtgggcagagggtctgaaaggtggggctttggggtagtgcccaagcctggccatattgccaggagtggtgacaagtgagaaatgcatcttccatcaaacaaacacgtggtgcatggccactgcctgacagccagatggcctgtagaaagagctaccagggctcccagacctgtggaacaaaaaggatggggaaaaggcacaggggcactgagtgtccctttaaaaactaacacactgaatattctgtgcgatccagaacagtgtggcagctttcacagcacaggaccattcatcaggggcctaaacgtt

SEQ ID NO: 42971 - DNA, 329 bp, Gossypium hirsutum
  Clone ID: LIB3196-055-P1-M1-F5
atgagccacagttttggtggaaagggctccgactattaaagatacaagaaaactggctccaaacggaggaaataaacggggcggcaagaagcctgcgccgaagactaaagccatagctgggaatgcccacacagagaaaaagcctaaggcagcgaaaaagctccccaaggaaggcgcaccggctgccggagacatgaacaagaaaagaggttacaagagcgtcgagacctacaagacatacatgtataaggtactggagcaggtgcaccctgacatcgtgatctatagcacagatttggggatcatgaacagtttcaacagtgattttt

SEQ ID NO: 42972 - DNA, 345 bp, Gossypium hirsutum
  Clone ID: LIB3196-055-P1-M1-F6
aacaattgcagtgcatgtggtaccaatctttaggcaggtgtctcagatagtggatcatctacaaagcatgtccactacatctgcctcagaatccgccagcatcagggttcttaagtttgtcataaacagtgtgttaagcggtaaatgattttgttcaaatttgctagaatatcatcctttttttatttgtcatttttgtttttaaatatagaaatttaggtacttgcagcggaaagacaaatgggggattatttcgtatattcagttgtatgttccattttgtgtgaaatagttgagagcgtatttacttctcaaaatgacttatcgtcaatgggtagtcaaaaa

SEQ ID NO: 42973 - DNA, 159 bp, Gossypium hirsutum
  Clone ID: LIB3196-055-P1-M1-F7
gccccctatcaatttcattccagggggtaccaagacttgggcatgggccttaaatagggggtcatctttttaggggggttactacattcaagcgaagaagccgcccgcataagggttcttaagcctgcccgagatagccaggaaaaacggggaacttct

SEQ ID NO: 42974 - DNA, 307 bp, Gossypium hirsutum
  Clone ID: LIB3196-055-P1-M1-F9
cggacccgtgggagccagggctgtaatgtttcaaaatacaatttgtctgatactcacagcaaaagttttccacttgaacaatcatcattgcaaacaattaaaattatcggaaagaaaacataaattgattccataattctgatattcactaaaccctcatcattcggtcaaaagcaggatcgacccaacacttctttttccaatcgaaaggtcattaatgtattccccagacaaccaatctaggccttatcatcacggtctgacacggaaatatttatttttcatggattgcaacatagcccagggc

SEQ ID NO: 42975 - DNA, 374 bp, Gossypium hirsutum
  Clone ID: LIB3196-055-P1-M1-G1
gtcgcgaagattgcggagtgaagcatgtcctgacagatctccactgcatacacggtggaaaagcttatgtgaatggaacccagaagcttcgagtgggctttctgaagcccaagtttaaagatggtggtagaggggccaatgactccacttcatccatgcccgagatgatgaaatcacagtggatccggacgaaacgcacccatgtgcccaagggtggaatcaaggccaatgccaactacatcgccatggattatgactacgccctcctggaacttaaaacgccccacaagagaaaattcataaagagcggggtgagcaatcactctcagagagttactgggggctaaatccaactgtcttgttgttgttatgac

SEQ ID NO: 42976 - DNA, 409 bp, Gossypium hirsutum
  Clone ID: LIB3196-055-P1-M1-G4
cgcctggggtccgctccgcaatttccgggatccggaccggacttccgagacatcaagaaccggacttgagcaggtccttccaatatagctgccaaagctccgactgaccagggacctttccagagctcaaggatttctggacctttctaccaattgtggaccatgggagggcccagggaggactttcatactgctgaatgttttccagagcatatattacaatctttcaaagtcgtacactagactaaagtggtttttcgagcgatagggcatcaggtggtgggaacagcaggaaaaggcattccagtctgccccactgggtccggcagccctcccgggaggggcccacatccttctactccagtccttgtccaggggtagaggcagaccagcagctggacttgatccc

SEQ ID NO: 42977 - DNA, 354 bp, Gossypium hirsutum
  Clone ID: LIB3196-055-P1-M1-G7
cggacgcgtgggtttgtttgtaaaaagtacttacccaaccaatacaatcgaatcccaagtgaaaaaaaatggaaaaaatactaatattttaaaaagttggaatttgggatgatataataagtttgttgtcatctgcaacagctgagtttggaccttcaatgggtataaaaggtggaaatgcagcaaggatcccagaacatacatgtcataaagttatagagacaaacacatgtgagttgcagaaatgcatccacgaatgttccaaggaacctgctggtgtcggggactgcacagattacaatgtttgttattgcactttttattgtaaggatccccctctgtgattcattcata

SEQ ID NO: 42978 - DNA, 270 bp, Gossypium hirsutum
  Clone ID: LIB3196-055-P1-M1-G8
gcagctaaagacggaaaacatgacaggagttaatgataaggcacgccgtttttgaaaagctcgagaaaaccaaggtggaatgtggcaaatactttttctttgttagccgaaacaatcaacaacatatggtgaatctcttagtaaaaagatatattggaaaaaagacagtacttttataatttctttaacttttttttccattttttaagggtaaattggtctttgtggcagtagttagctaataaaattgacattttgtaaaaaaaaaca

SEQ ID NO: 42979 - DNA, 313 bp, Gossypium hirsutum
  Clone ID: LIB3196-055-P1-M1-G9
agagccatatggcaagggggtaagccgggctggccagaactattccctatgttgggaagctgaagaaggccaatgtggtcagaggccattacttggacctggtgcggcaggacatactcctgcacctggagaagcaattacttgaacaagaaactgcaacgctgacagagcttttataacctccttaactccaggttccaccatgtcagcatgtcatgaagctactgccggtggaataccagcttaatcagccgcagggggggaactaccctgttgagagtggcccctttcatgaggaccgaggctctcatac

SEQ ID NO: 42980 - DNA, 382 bp, Gossypium hirsutum
  Clone ID: LIB3196-055-P1-M1-H1
atgacgccttctagctgacccccaagcagcccagcgaaactcataggagcgcgcgcagcgcgatggacggtcgggtgcaactgatgaaggccctcctggcccggcccctccggcccgcggcgcgtcgctggaggaatccgattccctttcccgagacgtttgatggcgataccgaccggctcccggagttcatcgtgcagacgggctgctacatgttcgtggacgagaacacgttctacaacgacgccctgaaggtgacgttcctcatcacccgcctcacggtgcccgccctgcagtgggtgatcccctacatcaagaaggagagccccctactcagtgattaccggggcttcctggccgagatgaaccgggtctttggatg

SEQ ID NO: 42981 - DNA, 368 bp, Gossypium hirsutum
  Clone ID: LIB3196-055-P1-M1-H10
taaactttttgaaaggctctccttaaaaaaaggtgcctttggtttggtctttggattgataaaagaagtcttcttctttttttttttattctctaaacaaagctgtctcaagtaaaatagtaatttgttcatcatgctttgagacctaaaacacatacatgatgattaatgtagggaaagatgggtttaagatacctcattttatattcttaaatgataatcaaggctttaactaaagatgattacaggtatatcacttcttttctcttctaactttataaaaataattatttcattttcctatttatttttttcgtaactttcgttctcaatcaccattaaatagatagaaaagttaatgtttgtta

SEQ ID NO: 42982 - DNA, 283 bp, Gossypium hirsutum
  Clone ID: LIB3196-055-P1-M1-H12
cggacgcgtgggcggacgcgtgggcgtcaagattgacaaatgatcgcacgaatgctacgagctccgtttctctcactttctaaatttcaggtacctcttgcttcacttccagtccttcttggatctcatggacgttgcggtacacaagtgattgagaataattgtgatcctactggaatttcatcaaataagatctcggtttatggattcagaatgtttttcaccgccactgctaaagatttgtcggctaagaagtgcgtgccatgcaacacgaaggatctac

SEQ ID NO: 42983 - DNA, 400 bp, Gossypium hirsutum
  Clone ID: LIB3196-055-P1-M1-H2
gtccgcaatttccgggatgacacctactcgctgacccccacgtaggccatcctgggtcatatgagcgcgcgcagagcgactcacgcgcgggtacaactgttaaaggccctcttggcccgtcccctctgacccgcagcgcgtccctggaggaatacaactacctttcctgcgacattggttggcgaaaccgaccggttaccagagttcattgtgcagacggactgttacatgttcaagaactggaacactttctccaacgacgcccttaaacttaatttcttcatgacgcgattcacggtgaacaccgtgaagtggttgcccccctagatcaagaatgggggccgcctactcattgattaccgtggcttcctggccgggatgaaccgggtttttgtattgt

SEQ ID NO: 42984 - DNA, 366 bp, Gossypium hirsutum
  Clone ID: LIB3196-055-P1-M1-H3
gtatactcaaatgtatgggatagactatcttgagacatttgcccctgttgcaaagatgaacactgtaagagtgttgttgtcactagctgccaaccgaggctggaaattacagcaatttaacataaaaaatgcctttttacacggtgaccttgaggaggaagtctatatggatgttcctccaggattcagtccaaatacaggacaggcagtttgcagactgaaaaaggctttatatggactaaaacagtccccgagggcttggtttggaagatttaccaaagtgatgctcaagttggggtataaatagagtcaaggagatcatactctgttcgtaaaacattcatcttcagggggagtgactgcttt

SEQ ID NO: 42985 - DNA, 238 bp, Gossypium hirsutum
  Clone ID: LIB3196-055-P1-M1-H4
ccataatgaaatacaccggggggcttgactgaactcagtgggagctagattaacaggtaagactgtatgagagagactatgacaaggtgcaagcgattgctgatagtttgaaaacatgaacagatccgttgacatcgtacacagactcgaattgaagagagattatgtgtctgatagggaatgatgggtttaagatacgctatttgtggttgacaaactttaaatagggcttaaagga

SEQ ID NO: 42986 - DNA, 274 bp, Gossypium hirsutum
  Clone ID: LIB3196-055-P1-M1-H5
tgccacacgaactgctaggtggtgacggtaaatgatctatgcactgtcttttaatgatttgcaactcatcaagaacacttaatccaagttttaaccatgtccagaatctgcctttgaaggacatgtaatatgtgaatgctctccttttacaggatctatctatgttcttgccacatcaatatacatattgctttaacacaactcgtcaaagttgcccacatttaactcagacttgggtgcaattattttaccttttgtttatgttttaaatatc

SEQ ID NO: 42987 - DNA, 230 bp, Gossypium hirsutum
  unsure (1)..(230): unsure at all n locations
  Clone ID: LIB3196-055-P1-M1-H8
accacgcgaacgcgagggggtcgcccacggcgcaagaaccgaacaaagcngaagaagggaagccaaggaaaagcaaaaaacacggccggaaacaggaaacgggagaccggccaggcacgcgaacgccnaggacgccgcccacaaggcaacaacaaagaccaggagcaacgaccaaggcaacggacccagaggaacgaacaagaaaaaacaccacggggggacaaggaggc

SEQ ID NO: 42988 - DNA, 339 bp, Gossypium hirsutum
  Clone ID: LIB3196-056-P1-M1-A12
atgccaggtccccgaagccgactcagtcagcttcctgcaggagctgctggcactaaggctggccctggaggaggggtgtggccctggccctggacccccgagggagctcagcttcaccaaatcttcccaagctgtccgcgcagtgagagacgtgctggccgtggcctgcgccaaccagtgggagcagctgagggggccgggtggcaacgaggacgggccacagaagctggattcggaagctgatgctgagccccaggaccccgatagcacgaacctcttagagagtgaagctcccagggactatttcctgaagtttgcctacatcgtggatttggacag

SEQ ID NO: 42989 - DNA, 322 bp, Gossypium hirsutum
  Clone ID: LIB3196-056-P1-M1-A4
tatcgcaagagggtcttcctgagcgccgagtgagcccactcaccactcagtcaggacgtggacttggaactcaggatggggccgtcacagacaggcctgccgagctgggatgtggaaccgcggtgggtggagagctctgaataaaccgtctgtgtcatggccgcgcctgcctctgagtggtcaggccacgtctgcagggcaaagcccatcggggtcctcttgggtggggacctgatggctgtgggatgtgcttggcctggagtcagtgtgggggtaacatagtcagatatttgatgctggcattccctctagagttaggggc

SEQ ID NO: 42990 - DNA, 198 bp, Gossypium hirsutum
  Clone ID: LIB3196-056-P1-M1-A7
caatgatgcctcctattaatggaggtgttgaagatattcccaaacttctggtggtaaatagaactgaacagaatagacaacgagtcaaatcagcatacaactagattattaaggccaaagtacaacgtattaatgaagcaaaacccgatataaattttagaaggtcatcaagtatctattcaaatagtggttccaact

SEQ ID NO: 42991 - DNA, 337 bp, Gossypium hirsutum
  Clone ID: LIB3196-056-P1-M1-B10
tattgcttggaaaagacaagctttccagacaatgtttgcagagaaagttacctggaagcgcggacgttattcatacttataaccttctgccacgtatgcggcatggtgaacacagacaaactctctgcaaataactttccactgccatagctctaggctgtccactcttgaggagctcccataacccaaaaaggcaagatctgcccaatgtatcagagcatccttgagcacctatagagaaacttggcttccaaatgagcaatggctatgagggcaaacagagtgctagaattcttccatttgaatccgcttgaactaatcaaggcctctggagcat

SEQ ID NO: 42992 - DNA, 285 bp, Gossypium hirsutum
  Clone ID: LIB3196-056-P1-M1-B11
cacacaatggaaacacctacggagggtggacactatgtgcaacatcatcaaactatgtaggaaaaaagttacacaacaaacggaaagcaaataatgttgtaaaataaaaaaataaaaccactaacctgtaagtagtggagaaccgtatcaggagtaaacactaacctgtaaagagttggctcaatactggcttttattaactctgatgctggctatgccatcgtatagatgaaagaattaaaataatttgcatctgagattttgttaacagaaaataataatttg

SEQ ID NO: 42993 - DNA, 351 bp, Gossypium hirsutum
  Clone ID: LIB3196-056-P1-M1-B12
aagcaacatgttttcttcaaggatattaattggagcacacttgcaagacaaaaggctatgttcataccatcaactgaagcacatgacactagttactttatgagccgatatatatggaatgcagaagatgaacaagttcgtggaagtagcgacttcgatgacttgactgacacctgcagcagtgggtcactcagcaacgtgcaagatgaagatggggacgaatgtggcagtttgacggatttcagtgctcctgcccttgcagtgaagtactcatttagtaatttctcatataagaatttatctcagttggctttcatcaattatgatctggttgtaaagaacgcctaggaa

SEQ ID NO: 42994 - DNA, 373 bp, Gossypium hirsutum
  Clone ID: LIB3196-056-P1-M1-B2
ataaactataagaacctgccagaaaaagggaaaaagaagaattagtaaaagaaattagaataaaatttaaattgaagtaaaagtaaatggctaaagtattaaaaatggagtgttcctaatatcttagttccccggaaacggcgccaaaaacttgatacgtgatcttagtgataggttttaaatattaataatgaatcgctcttgaaactaactattatcacgatgaaggtatgtgtacctaatgagcagtagtttatgtttagcatgaccggattgtcgaacctaaaggacctaatagttctaggtattgactgttcttttctttatctagtcctaagaagatatggggtttgtttttaactaactaattaac

SEQ ID NO: 42995 - DNA, 282 bp, Gossypium hirsutum
  Clone ID: LIB3196-056-P1-M1-B3
attgacaatgcccttgctttgtcttcagactagcatgggattctgacaagtaagaaattaggatccacaggagacgatgctctgaagcaccatttttgagccttcctatgagccaggagtggcccaggtgtctgagatctgatctatgcccaatcctttcacgactgtactgattggatggcatatgtcatacccttgtgctttaaaagttcattagagttttttctaaagtaaatggtccagatatttttctttttaggttaggcagtggtgcatttttgt

SEQ ID NO: 42996 - DNA, 243 bp, Gossypium hirsutum
  Clone ID: LIB3196-056-P1-M1-B4
cgcacgcgtcagctgactcgaggaagaaccgttcgaagcgcgtcctcttcatcgttgcaaactgacgtattgttaagaataggaagcatccttgctgtatggggaaactccggatgcattcaccaccacaggatcctctatgacagatattgccctaaagtatttcggtaccctactgtatgaggttcttccacaagctccgtatcatgttttactgccgaattgacaacatcgtcacgcttt

SEQ ID NO: 42997 - DNA, 135 bp, Gossypium hirsutum
  Clone ID: LIB3196-056-P1-M1-B5
tgcagcctttcttaaccttgggaaagtaacatttggaaagtcaatcctataaatgctcaacatatacatatatatatatatcatcaccatgatcgtcatcggcatcgacatcatatatattggggatctaacaga

SEQ ID NO: 42998 - DNA, 388 bp, Gossypium hirsutum
  Clone ID: LIB3196-056-P1-M1-B9
atagacaatgcccttgctttgtcttcagactagcatgggattctgacaagtaagaaattaggatccacaggagacgatgctctgaagcaccatttctgagccttcctatgagccaggagtggcccaggtgtctgagatctgtcctctgcccaatccttccccgactgtacagattggatggcatatgacgtccccttgtgctttcaaagtccattagtttttgttctaagtaaaatgtccagaaatttctctcctagggtaggcagtggtgcacattgtcaggggcaagacacttttgggcaaagtctgtgtggggcccacagcaggttcctcccaacccttgccatttgtttaaaaagttcaaccactggggtttgaaaatcttacc

SEQ ID NO: 42999 - DNA, 264 bp, Gossypium hirsutum
  Clone ID: LIB3196-056-P1-M1-C1
atagacaatgcccttgctttgacttcagactagcatggggttctgacaagtaagaaattaggatccacaggagacgatgctctgaagcaccatttttgagccttcctatgagtcaggagtggcccaggtgtctgagaactgtcctctgtccaatcctttcctgactgtacagaatggatggtatatgacgtacccttgtgcttataaagtccattaatttttgttctaaggaaaatgttcagaaatatctctcctatggttggc

SEQ ID NO: 43000 - DNA, 423 bp, Gossypium hirsutum
  Clone ID: LIB3196-056-P1-M1-C2
acgtaaaagcaggctggcaccgtgccggagttcccgggatgcccgaccgtgaggagagaattttcagcgctgtggtctggcgctgaggaggcggcggtggctcccggggcgtttgagcgggctcacccgagcccgcgggccaacgcggatccaggcccgaccggcgggaccgccccggactccccgcgggccttcctagccgccatggaggacggcgtctatgaacccccagacctgactccggaggagcggatggagctgtagaacattcggcggcggaagcaggtgctgctggcggagattaagcgcctgcggtaggagttcagtgaacccatgagcgagtaagaccttgcagcggaaccggtagttggcatagggctggaagaaggttaacatggtctccacgaagggtgatctgttttt

SEQ ID NO: 43001 - DNA, 299 bp, Gossypium hirsutum
  Clone ID: LIB3196-056-P1-M1-C7
atgtaaagattcaaagtttgtctttattactgtatgtaaattagacattaatccactaaactggtcttcttcaagagagctaagtatacactgtctggtgaaacttggattctttcctgtaaaagtgggaccaagcaatgatgatcttctgtggtgcttaaggaaacttactagagctccactaacagtctcataaggaggcagccatcataaccattgaatagcatgcaagggtaagaatgagtttttaactgctttgtaagaaaatggaaaaggtcaataaagatatatttctttag

SEQ ID NO: 43002 - DNA, 361 bp, Gossypium hirsutum
  Clone ID: LIB3196-056-P1-M1-C8
atgtcaaagcaaaagcaacagctcaagcagcctccttggagaaaatctgaaaattcaacttgttcaagagaaggtcttgtacgtgcctaagttccagagcctcctgacgtgagcatggctgagagtgaggacccctctctgaggatcgttctggtagggaaaactggaagtgggaaaagtggaacagcgaacaccatccttggaaagaaaatctttgagtctagaattgctgcccaagctgttaccaagacctgtcaaaaagcatcccgggaatggcaggggagacacctttttgttgttgacactccagggctctttgacaccaaggagaggctggaaaccacctgtagggaaatcagcc

SEQ ID NO: 43003 - DNA, 284 bp, Gossypium hirsutum
  Clone ID: LIB3196-056-P1-M1-C9
atgttaaacattgcagatggtggttttactgagttgcactccctttggcagaatgaagagcggtcagccacagttaccaagaagactaacgagatctggcatcgacggcatgactactggctgctagccgccatcataaaccatggctatgcccgggggcaagacatccagaatgacccacgctatgccatcctcaatgagcctttcaagggtgaaatgaaccgcggcattttcttagagatcaatgataaatttctagctcaaaggtttaagctcttagaaca

SEQ ID NO: 43004 - DNA, 191 bp, Gossypium hirsutum
  Clone ID: LIB3196-056-P1-M1-D1
cggacgcgtgggcccaaatgggaaccagtggctcgtagtagtgtgagtagcaggtctcacagtacatccaaagccagggctgggttgtaaatccgagcctacccttgtattgagagcgctaggcttacatgaggagggccatccgaactgtgatatttattgccagcttaggcctgaaagccaagtgggca

SEQ ID NO: 43005 - DNA, 112 bp, Gossypium hirsutum
  Clone ID: LIB3196-056-P1-M1-D4
tttcgttctctcatgatccttatagtagcgggttcaatttaaccatcataacgctcatatcgatacgcattatcttatcaagccatggctctggtctaaagaggatccaagc

SEQ ID NO: 43006 - DNA, 309 bp, Gossypium hirsutum
  Clone ID: LIB3196-056-P1-M1-E4
aaaaattaaggattttgtgtatctaaactaattactaaactaagaatgcacagaaagaaaattgggaaaaacttttgggaaaactgattgattaagacaatacccaaggaaaaatccacctagacttcacttgttattcgactctaaatcagacgatttatgcatttgacttgatccgtagaaatccctaattaatatgattatctgtctcgagactaacaacgtttaaccctaggttgattaatggaaatctctctctaataaacttcctagggctgcttaatctcaatctatggattttcttattag

SEQ ID NO: 43007 - DNA, 345 bp, Gossypium hirsutum
  Clone ID: LIB3196-056-P1-M1-E7
atgggtgacagagcgagaccctgtctcaaaaaataataaaattaaaaatatctactttgttactgacagaaccagactagagaatatgatgcaggtttactggcttggtggtctttctagtgctccctgccctgcatccacgccatggaagaacccgacagggggaactgggaacctggcaaccagacacactcacccagggccaaggccactgccgccctctgataggggcagacagaacagaaagagagggcccatctgtgatgcttgcaggagagtattgtttgagttgagaaatgggttgtgtatggccattactttgtcattcaggcctttacttcaact

SEQ ID NO: 43008 - DNA, 295 bp, Gossypium hirsutum
  Clone ID: LIB3196-056-P1-M1-E8
tcggtcattgggataaagactttcttattgttgtgacgtgagctgcttgtctagacatcaagttttatcttatcgagatgccatttcctattttgtctgaaatgcgagacatactacatattattatatacatatatcaattttttttaaaaaaattaaatttgaaaaaatatttgacctaatgagatatattaatacataccaatttcaatatgtattattactaataaaaaaatcaatacatccataaaaagggtgatgactaccttactataaaataaatgtgataatgatt

SEQ ID NO: 43009 - DNA, 393 bp, Gossypium hirsutum
  Clone ID: LIB3196-056-P1-M1-F10
cgagatgccgcttgacggccctcccgccgagcccaagaagaagaagcggatgaccaaattgaagcgccctatcttgtcacccaactcagacggcgatcgtcaagggtctttaaacatcaagccgcaggtccagacaggatatggtacctgtgcggggtaccgtccaatttttagacgaagtgtgaacccaggatgtggtaactgtgtgtggtgccgtccatttttaagacgaagtgagaacctctttgatgtgagtccaggacccaggttatcagattggtccattccgatgcccctgggtgaatttccggtgctgaagttggctcaacatgacaatagtgatcaatcaatcgcttacagtcatgctggaacgtctgaaccacctcccaaaga

SEQ ID NO: 43010 - DNA, 358 bp, Gossypium hirsutum
  Clone ID: LIB3196-056-P1-M1-F11
gatcaaaatagaaaaaaaaaaaaacctaatgctctcaatcttccccaattcggccaaccccaaaacaaccacttattagctctttcggtctaaaaaaaatcaaaagaaaacacttccccgaccccgcttggcttaaacttcgacggtggagacgaggctccaacgacgcgctcgcagccggtcaagggatcaagttgctattggttttctgaaggaacaagtatggggaattctgtgcctgattgggaatatataccagaactctgtcttcttactgtttttgagaaaatagatgaaaccatcagtcgggttcaatttggtgctgttagcaaatattggcattcgctgttcaatactt

SEQ ID NO: 43011 - DNA, 429 bp, Gossypium hirsutum
  Clone ID: LIB3196-056-P1-M1-F3
acggtgccacaagagaacacgtatgtgcaggactgctggctggtcccggtccggggtatgcccaaggccagagtcagcagtctgcaggaggtagccatgttcctacaagcctctgtcctggagcgggactcagaacagcaaaggctgcaggatgaactggagctcaccagacgggctctggaggagcggctacacagcccaggtgcaaccagcacagcagaacaggggtccagaggggagcagggcatgcatctgggagaggtctcaggagtagaggctgagcctagtcctgctggaatggaggagaagcagtcatggagacaaaggcttgaacacctgcagcaagcggtggcccggctggagattgacaggagcaggctgcagcgccacaatgtccagctgcggagcaccttagagcaggtggagcga

SEQ ID NO: 43012 - DNA, 377 bp, Gossypium hirsutum
  Clone ID: LIB3196-056-P1-M1-F5
atccaagttcttcttgacagacaacctcgtctttgactccctctgtgaccttatcacacactaccagcaggtgcccctgcgctgcaatgagtttgagatgcgactttcagagcctgtcccacagaccaatgcccatgagagcaaagagtggtaccacgcgagcctgaccagagcacaggctgagcacatgctgatgcgtgtccctcgtgatggggccttcctggtgcggaagcggaatgagcccaactcatatgccatctctttccgggctgaaggcaagatcaagcattgtcgtgtccagcaagagggccagactgtgatgctagggaactcggagttcgacagccttgttgaccttatcagctactatgagaagc

SEQ ID NO: 43013 - DNA, 375 bp, Gossypium hirsutum
  Clone ID: LIB3196-056-P1-M1-F9
atgtccgacatcctgcacaaggtgcgtatccagaagatggtggtgtaggcaccaccactcgacgcctgggacacaccacggtgctgcccgacgacatgaacaacaatgcgggaacgccggttaccgctggggactaatggagccagcccatccacctgggccccgtattgtccggggccggagggagtcccggtcctgtgggcacggggcccagctccctggtggccgcagcagcctcagtggcagcagttgctggtggagacctgggctggatggcagataccgttgccatcatcacagacgcctccttcctgtctggcctgagcgcctccctccttggagcggcgttcagacagcccactggaccctgctggg

SEQ ID NO: 43014 - DNA, 380 bp, Gossypium hirsutum
  Clone ID: LIB3196-056-P1-M1-G1
atgcagatgccagcaaccatcagacaacgtggagtccctcacgggtgaaggctgcgggggccgtgccaaggctgtgcacacgcagtccgtacgccacccttgggctccactggcagagagccccttccttctggacgccaactgcacctccggatacagcgttgatgtccattttccaggagggaggcggcctcgggtccagggagtggaggggctgcccctgccacgcaggtcctggccgatggtccctcaccctgccgccctgggcttttggcctgaagcaaattcctgagtgggagtgccagggcctgccacatcctgtcctgtccactgcctgcccccttgtgctggctccacagttctgctacggtgggagctgc

SEQ ID NO: 43015 - DNA, 387 bp, Gossypium hirsutum
  Clone ID: LIB3196-056-P1-M1-G11
acaagagggaacgaaaaagcacgttggtaccccgccgcaatttccgggataccccatacccttctgctgaatcttaacaggagagtaggtgtaaggtatggctgccatgtagtggaaactgttaatgaactaaagaaacacatgagatgggctgatccttgtccttaaccaccagaggtggaccatactgtcagacaaaaatggaggacatttgtgcgtgaacgggaacaggatgatgggatcagcaccataaggtcaacactgcctgggtcaatggttaatggtgattatgtaataaaaggaaataaccatggtttcgagacagatgaagaagaggatggtcagaatggaggtttttaagcaagtttggatagtaatttcctgaat

SEQ ID NO: 43016 - DNA, 341 bp, Gossypium hirsutum
  Clone ID: LIB3196-056-P1-M1-G2
gcctattgtgttataccatgaatagatatgtgaaatgtggccataccacttggaaatggtttaggtcataatggacatgagttataaaatgtgtcaaatacaaaaaatatgtgattgttgaaatggtaaccctaacacaaagagggtaatattatcataggataaaatgagacatgtaataacatgtatgaccttggccaagaaagttttaagggcacacttatgtcatgttagttgtttaaggagcatgtgaatgtgaatggatgcttaagggtgaccaaaggcttggaaaaatagcctttaaaatggtccacacgggtagatgcacgggcatgttttta

SEQ ID NO: 43017 - DNA, 376 bp, Gossypium hirsutum
  Clone ID: LIB3196-056-P1-M1-G3
atgaaacagcaaaaaagcacttcgttgctgggtttggacaatgaatgtgggattagtcccaagtttctagcttggaacagtagcctctttgcctgcgtgatccttgtcagctattcacagaaggaaatctgaaactccgtctttcatttcagccatggaggctgttatccttctctgtcaattagcattcatgtggttttcgctctttctagctctgtcactcttgttttcaattaaatattgccccactctgtgtgtttattgccttgccatttctctagcatatcaggtttaattacgggctcagtaataatgaggaactagcttctctcaggcaactaattacttttgtcttttttggtcggattgtgccaaa

SEQ ID NO: 43018 - DNA, 279 bp, Gossypium hirsutum
  Clone ID: LIB3196-056-P1-M1-G5
ctgtattatatatatcatttggtacgttcaattgctcaatacctatttacaacgtattatatagaacttactagtctaataataaaaaaattaaacttatctactatcatgcaaaatttatagtaaatacaatcaacccatatgcatgctcctaaccaatcatttgtatttctaaaagctcaagcccataattgtcaaaaaaataaaataaaattaaataattaaaaataataataaaaataaatataatataaaaaaaataattaaaaaaattaatgg

SEQ ID NO: 43019 - DNA, 391 bp, Gossypium hirsutum
  Clone ID: LIB3196-056-P1-M1-G6
atcccgcactgtgtcattatgccaagagaggtttgggcattctaaagaagtatgaggaatacttgatcaataacatagcatagttctttatttgtgaatcacttctctcctagactatgagttactttagaacagagatttatttttccctgtatccctagggtttggcacatggtcggtgcttagtaaacttattttgtattcaataatgccaagtagaataattcataaattatggaaaaataaaagaatttggcaaaattgcaagctcgaagatcgctttcaggaaaaatgtttcaacccctgctcaaaagtacatagcttgctgtgttgttgaagtgccagcatgaggaggatcatgccaacacatccatttattgcccattctggg

SEQ ID NO: 43020 - DNA, 241 bp, Gossypium hirsutum
  Clone ID: LIB3196-056-P1-M1-G8
gaaagttgtttcataaactatgaaaagatgacaccttaaaaggcagtttttaaaaatatttggtcaactaatggggcacccactaaccaagatttttcaacttttcagttgctttaaaatgccggatgactatctaatgttctacatttacttcttcaccaactttactcatgatcctttgagaggatcagaatttactggttgtggcttaactgtgtcgatatcacactttcaaatggtc

SEQ ID NO: 43021 - DNA, 246 bp, Gossypium hirsutum
  Clone ID: LIB3196-056-P1-M1-G9
aaaagagatagggattgccttctgcgaatgtctagtaagcatttatccttctctaacccctcggaaaagaaggagaatagctttatcccgtcccccatatgcccttcgttctcctgaagtatggaagtctgttttccctttcaagtcccttcaatgctgtcgcattgatgtccctttcgctactttcctatcggttttattcatgcctttccttatgttccgatggttttatgattctccttgttc

SEQ ID NO: 43022 - DNA, 276 bp, Gossypium hirsutum
  Clone ID: LIB3196-056-P1-M1-H1
cctctaggaaggcaattggaatgtcacacacgtgggttctgaacaagaagcgaacgtagctgcttgtgaaagtgtgcccatgcggccgcaaatggacgtgagaggaatcctacatggctgccatcgaggctgggatgtagaccgtgctgctagatgatacaccgtgactgtggggatgactctgtacatgaagagagacgttgcatatgagaaatactcacatgctttggttgaatatggaccagatgaatctgagtgtgtggtagagttgacgta

SEQ ID NO: 43023 - DNA, 175 bp, Gossypium hirsutum
  Clone ID: LIB3196-056-P1-M1-H11
atacaccacccgctgccgtcaattcgtacgggcagaccggggacagcagctgcaagacacccgaggtctaacttcctgccggaggaggccactgaggaggctggggcccgaggtggcgcaaaggaggaggtggaaaaaaactccttagtaaaaaactagtaaattggaaaggcta

SEQ ID NO: 43024 - DNA, 359 bp, Gossypium hirsutum
  Clone ID: LIB3196-056-P1-M1-H3
agaaggtggaccgagcacacgcctaaggaaaagaacccgaaagccactgaaacagccggaaacaaaaccaaaagagaagaagcaagccggtaagaagaaagtgaagaatgctttgaattcgaaaaccttatctggtcaaaactctgcaaaagtaagagacgaagaagtggaatatcagtgtgacatggaaggctgaacgaagagttacggctcgaaacaagctctaatcctacacaaaaggaacatttgtccagtcaaagggtgcgggaagaagctctactcccaaaaaaaactggttcagcatcgtcgagtacattaagatgaccgaccttttaaatgcccatggaagggctgtaaga

SEQ ID NO: 43025 - DNA, 350 bp, Gossypium hirsutum
  Clone ID: LIB3196-056-P1-M1-H5
gctttggttgagttttagggccaattctgtattgcttttcaaaagcacttcttgctccaaaagcacttctagaagaaaagctgtgcagaacaagctgcttttagctgaaatttttagcttttcagaagtgcttttgaaaagcacttctgaaaaggaaaagctaaaatttttaacttttccttacccaaaagcgcttttaggctgggttcatcctttgttatttacttttaatttgtgtttgaatcaaaatagttggcataattctgtggggattattttttattattttaatatcagtattaggatgtttcgatgtaagaaattaaattcatcaatattttttaaatatt

SEQ ID NO: 43026 - DNA, 364 bp, Gossypium hirsutum
  Clone ID: LIB3196-056-P1-M1-H9
tatgctttcttgatggttgaccgagcacacgcttaagggaacaaggcccgggcagagggccgcggccctgccaccccactgcacctggacctgacccagctgaacaggctgagcctggagaacagcccagacgcccttgaccacgctttggaaacttcacacttacccttttatgccgacccttacacgctccccgccaccttctaccgcagggtcaccgatgtccggggcctggaggagttcctcagtgctatgcagagctcacctggacctgtgcccttgagcccactcccattggtacctgtgtctgtgcctgcctttgaccccggctccagctccttcggcccattgggcccctacttgt

SEQ ID NO: 43027 - DNA, 362 bp, Gossypium hirsutum
  Clone ID: LIB3196-057-P1-M1-A10
atccccttcgtggtgcctgtggcttctccgtctggcgatgcccgccgtctcactgtttctagccttcatgagtcagggctaaaggtcaaccagccagcctcttttgcagtcagcctgaatggggccaagggggcgatcgatgccaaggtgcacaggccctcaagagccctggaggagtgctatgtcacagaaattgaccaacataaatatgctgtgcgcttcatccctcgggagaatggcgtctacctgattgacgtcaagttcaatggcacccacatccctggaagccccttcaagatccgagttggagagcccggtcatggaggggacccacgcttggtgtctgcttacggagcaggcct

SEQ ID NO: 43028 - DNA, 202 bp, Gossypium hirsutum
  Clone ID: LIB3196-057-P1-M1-A2
ttccccttgcttgcaacgccttagcttttctatagggtaacctaattcaaatcaactggccgtggttctacaccttcgggcctggaaaaaccctgacgttaccaaacttattggccttgaagcaaatccccttttggccagttggcttaataccaaaaaggcccgaaccattcgcctttccaaacatttgcccagcctgatt

SEQ ID NO: 43029 - DNA, 332 bp, Gossypium hirsutum
  Clone ID: LIB3196-057-P1-M1-A3
gaaatccctaaattatgttaatatctctttcgagagtaagaacaacttactctagggtgattaattggaatatctttctaattaaaacccctatcgtcgcattaactcgatctctggattcccctattagatttgactctaatccagtagatttatgtcatcctatttttgcatgaaactccgcttaattatgctagatctactcttaaataggaacttttgcttcactgaaataagtacattaaacttgaattaatatctcaaaaatattaaaacaagaaataagcatacataattgagaacaggaatcaagtatttatcgcgtaaatcag

SEQ ID NO: 43030 - DNA, 397 bp, Gossypium hirsutum
  Clone ID: LIB3196-057-P1-M1-A4
atgagaaattatctccatggttaatagtggtagagatgaacaagcacccactccagatgaccactgcagcctgtgagtattggctgtgtggccagaagaaagacaaatgaaatccgaatgggtattttgaaactaatcaacataatagacataaatcaggtgtttgaatccctttcgtcttgagggtatacattcttcaggtcaacccacactactcccttctggttgtgtaagtaatggagcaaatgcagagtaaaacaaatctggaaaaacagtggctaaggagctagtatcactttctagtttatcacatgaggattctcttatgtttcaggtggccattaaacgcgaaaatcttgtggctgaaattcagaagcgactgtctgagtcttgatcc

SEQ ID NO: 43031 - DNA, 408 bp, Gossypium hirsutum
  Clone ID: LIB3196-057-P1-M1-A6
atgctgaccaatcacagcagcagccgccgcacagtaaaactgcacctttacctctcagtcaccttctatactggtgtcactgggaccatcttcaaggagaccaagaaggaagtggagctggcaccaggggcctcggaccgtgtgaccatgccagtggcctacaaggaataccggccccaccttgtggaccagggggccatgctgctgaacgtctcaggccatgtcaaggagagcgggcaggtgctggccaagcagcacaccttccgtctgcgtaccccagacctctccctcacgttactgggagcggcagtggttggccaggagtgtgaagtacagattgtcttcaagaacccccttcccgtcaccctcaccaatgtcgtcttccgactcgagggctctgggttacag

SEQ ID NO: 43032 - DNA, 189 bp, Gossypium hirsutum
  Clone ID: LIB3196-057-P1-M1-A8
ttccccttccttccaacgtattagttttttattagggcaacctaaatcaaatcaattgcccgtggttttacaccttgtgacctggaaaaaccttgccgttcccaaactaattggctttgaacacaatccccttttggccagttggcttattaccaaaaaggccggaaccattcgcctttccaaacattt

SEQ ID NO: 43033 - DNA, 363 bp, Gossypium hirsutum
  Clone ID: LIB3196-057-P1-M1-A9
gcatggatcgaataaatgcattcgcacatggctgacttttaataaaatggttcactggtgaacgaacagctaactctagtgagcacttgcagaaagccagtttacaattcaaagctccatgaagggattaactggaactctggactgccttatgagctgtgactgtcatatattcgacttacggcacgctagtgtctgatgaacctccactaaatcatgctagatctactcttaaataggtactgctgcttcactgaaataagcacatgaaacttgaatgaatatctcagaaatattaaaacaagaaataagcatacataattgtgaacaggaatcaagtattcatcgcgtaaatgagaaatc

SEQ ID NO: 43034 - DNA, 369 bp, Gossypium hirsutum
  Clone ID: LIB3196-057-P1-M1-B1
atcgatgaagtggattcccttaaggaagccttgccatacaatggtgcactggtgaagcggaacgaccactaccagcatacattgcagaaggcacgtaacatgacaaaggtgcctcttgattcacaaaaggatgaccagatgacagaggcttcacggatgacttcttaaggagcaggggaggtagtcgcccaggtgaccagcgaacaggccccgccatgggcagcctcttcagagatggcccttccctgcgaggatccaacataggatttccgtgatcccacagaagatgatagagcacagagaccacgactccagcttaaacctcgaacagtcgcgactcctctcaatcaagtagccaatcccaactct

SEQ ID NO: 43035 - DNA, 398 bp, Gossypium hirsutum
  Clone ID: LIB3196-057-P1-M1-B11
agtgacagcgtttaacaaagcttagagaaacctccaggagactgctatcatggcagagaaacccaagctccactacctcaatgcacggggcagaatggagcccatccggtggctcctggctgcagctggagtagagtttgaagagaaatttctagaatctgcagaagatttggacaagttaagaaatgatgggagtttgctgttccagcaagtaccaatggttgagattgatgggatgaagctggtgcagaccagagccattctcaactacattgccagcaaatacaacctctacgggaaagacataaaggagagagccctgattgatatgtatacagaaggtatagtagatttgactgaaatggtccttcttctgatcacgtgtcaacctgaggaaa

SEQ ID NO: 43036 - DNA, 406 bp, Gossypium hirsutum
  Clone ID: LIB3196-057-P1-M1-B4
atgaaacagaccatgctggagagtctcagcacagaaaagaactcactggtctttcaactggagcgcctcgaacagcagatgaactccacctctggaagtagtagtaatgggtcctcgattaatatgtctggaattgacaatggtgaaggcactcgtctgcgaaatgttcctgttctttttaatgacacagaaactaatctggcaggaatgtacggaaaagttcgcaaagctgctagttcaatcgatcagtttagtattcgcctgggaatttttctccgaagataccccatagcgcgagtttttgtaattatatatatggctttgctccacctctgggtcatgattgttctgttgacttatacaccagaaatgcaccacgaccaaccatatggcaaatgaaccaagc

SEQ ID NO: 43037 - DNA, 271 bp, Gossypium hirsutum
  Clone ID: LIB3196-057-P1-M1-B8
atgcaaccgtccatgctcgcgagtgctaactcggacaataacatactggtacctcaagtggagcgcatatctctgcattttaactacaggcatgggagtatgcaatatgcccactttattagatctgttcggacttacaatggtggaagggagaacaatgcgaaaagttcctgttctttgctttgacacagaagcttatcttgcatgaatgtgcggaaaagttttcatagctgctagctcaatagatcagtgttagtaatagactgaggat

SEQ ID NO: 43038 - DNA, 404 bp, Gossypium hirsutum
  unsure (1)..(404): unsure at all n locations
  Clone ID: LIB3196-057-P1-M1-C11
atgtagcctccttgggctactcccacaccggcccggcttccttcggagagtccagccctccatctgagaagcccgggtaatcagctctgcagagcctgcaaggtttagatgcaaaatgcgtctgcaaggttttcaaaacatttctttctggattgtaaatcaagtactttaagaatggtaaaccggctggggtgcggagttaatgtatgtcttgaaaaaacaccatcgtgatttgccttttaaatttgagaaaagaattccacttcgcttagtttcattagagatattgagatttccagggggaagtgctaagaggaggctgtggtaggtgttagctccttccttggaagggcggngaatggtgaatggcttagggctcaactttcatctatttggctgaaggg

SEQ ID NO: 43039 - DNA, 232 bp, Gossypium hirsutum
  Clone ID: LIB3196-057-P1-M1-C3
aaatgattcagaagatggatgaggaacataaagcccagagagtggtggatagaagaattttgtgatgaactaactaataagatgaatatatagaagaaaaggggtcttagttccagtaacaatggagaactcttgtggcaatgagatgatgaattagtactaaggaaaaagaaaatgaacatcgcatgcaccattgattggtggttagatggatttagtggtgtattcaaaa

SEQ ID NO: 43040 - DNA, 390 bp, Gossypium hirsutum
  Clone ID: LIB3196-057-P1-M1-C5
ctccctttttctcatcgtcctgaaactacagatttcagcttgcaaaataaaattaaaagttcagaaaatggttggattgggatccatttccacaccaatgtgcaccacttcaccattaccttctaaacccaatcccagaaataattttccaggaaaactttcacacccacttcttggatttcacaaagttcattctttgtctctgtcaactcatttctcccctcagaagaacaaattaactcaaacccatttcactttgaaagcttcttcagtaggaactgcagattacactgaggaacccgcaaccaaagtgaaatttcggacatccttaagtgtgcctgattgctcaacctcattgtctttgcttggaacagggtacagggagaaagt

SEQ ID NO: 43041 - DNA, 287 bp, Gossypium hirsutum
  Clone ID: LIB3196-057-P1-M1-C9
agaacagcaagccgggcccgttccggtcctccattcctgtgctggcgctgttaacacacccgcgatgtagagactcgcctgaccctcaagtgcccatgctcttaatctccgcggtggtgattgtcccccgcatcacctgggtcgatgctccaacgacctacagactgacgtacaatgctcgggcttctaccaccatactgcggtacacagacgccatcgcgttttgaagtgacactcacatggtcaaatctgacaagtacatgcacataataaactctgaccaggaa

SEQ ID NO: 43042 - DNA, 405 bp, Gossypium hirsutum
  Clone ID: LIB3196-057-P1-M1-D10
atccagcaacctcacacagttttgaagacaatttcatttaaaatctttaatgtaagagatgatgatgaagggagggaggaaattggtattttgatcctcctcggatagcacaaaagtggcctagggaatgaattcaggaaagttacaaaatgcagttgtcaggatgttggatatgcttcaggatcaagtacacgctcagtcaattacgtgtccctccatgcagtatccctggggccaatattggatttatccaaccctgctgcttgtccgattcctaaatgatttaagggtttaaaattaactatgactgtaaaaaatctcaagggaactgtggctccccagtctgtcatgaaaaatattctcgggaaaagaaagttgaaaaggagattatattgtcgctgtgtt

SEQ ID NO: 43043 - DNA, 408 bp, Gossypium hirsutum
  Clone ID: LIB3196-057-P1-M1-D12
atgtcttttctttccctgattccaggccctggaggaagcactgagcatccaaaccccaccatcctctccaccaacagcatttggtagcccagaaggagcaggggccctcctaaggaaacaggagctggtcacgcagaatgagttgctgaaacagcaggtgaagatcttcgaggaggacttccagagagagcgcagtgatcgtgagcgcatgaatgaggagaaggaagagctgaagaagcaagtggagaagctgcaggcccaggtcaccctgtcgaatgcccagctaaaagcattcaaagatgaggagaaggcaagagaagccaacagacagcagaagaggaaagcaaaggcctcgggagagcgctaccacgtggagccccacccggaacatctctgcggggcctaccc

SEQ ID NO: 43044 - DNA, 403 bp, Gossypium hirsutum
  Clone ID: LIB3196-057-P1-M1-D3
atactttcttaagagctttcgtcactgaattactaagcttattcttcttccaggggccactaaatatagatgttgctccaggagctccccaggaaaagaatggagttcacagaaagagtgatcctgaggaactaagggagccgcagcaaagcttttctgaagctcagcagcagctgtgcaacaccagacaggaagtgaatgaattaaggaagctgctggaagaagaacgagaccaaagagtggctgccgagaatgctctctctctggccgaggagcagatcagacggttagagcacagtgaatgggactcttcccggactcctatcattggctcctgtggcactcaggagcaggcactgttaatagatcttacaagcaacagttgtcgaatgacccggagtgg

SEQ ID NO: 43045 - DNA, 405 bp, Gossypium hirsutum
  Clone ID: LIB3196-057-P1-M1-D4
atggaacttgatgggggccgaagaatgtactatttttaagtaatgtggtattgtaccacaaagtagatctaaataagctttatgctgtatttgaactaactggggcatgttactgggaggaggttggggggatttttggttatgttaaatgtttgatgtttaaattgttgcatgttgaattcaaactttttaacaagtccttgatgtttcaatttgaaagtgaccaatggggctgaggctgtgtccactgaggctaagatgactgcctttcctgattggccttggcttttgcatacattgtgtgacccttgccctatgaccctttggctgaccttaccggaagccatgacgacagcagccttttgccattagacgcatggtgatggtgaggattccaagggttag

SEQ ID NO: 43046 - DNA, 407 bp, Gossypium hirsutum
  Clone ID: LIB3196-057-P1-M1-D6
atcgggaggtggcgagcgccatggcgagcccgggccgcctactgtgcgtgctgggcctgctactctgcggggcggcgagcctccggctgtccagaccccacggtgacaccgccaagaagcccatcatcggaatattaatgcaaaaatgccgcaataaagtcatgaaaaactatggaagatactatattgctgcatcctatgtaaagtatttggagtctgcaggtgcaagagttgtaccagtaaggctggatcttacagagaaagactatgaaatacttttcaaatctattaatggaatccttttccctggaggaagtgttgacctgaggcgctcagattatgctaaagtggccaaaatattttacgacttgtccatacagagttttcacgatggagactattttcct

SEQ ID NO: 43047 - DNA, 401 bp, Gossypium hirsutum
  Clone ID: LIB3196-057-P1-M1-E12
atgcagcctccgcgcgagtgtgtggtgccgtgccgttagcgcgcgccgtctgtgaatcagtccgtccgtccgtccgtccgttcgtctgttcgtctgggcgccgcagctgccaccagtcccagcggtcccggcccttattgttcccgtacccggagccacccggtggagtgggctttgccgcgtcagtcatgtccatgggcctggagatcacgggcacctggctggccgtgctgggctgtatgcgcaccatcgtgtgctgctcgctgtccatgtggcgcgtgacggtcttcatcggcagcaacatgatgacgtcacagaccatgtgtgagggcctgtggttgaactgcgtggtgcagagcaccgtcctgatgcagtgcaaggtgtacgactcgctgttggca

SEQ ID NO: 43048 - DNA, 307 bp, Gossypium hirsutum
  Clone ID: LIB3196-057-P1-M1-E5
agaaaatagctccaacacaaaaaaaggactgaaaaaatggcggatgcgagggtgagtgttagagaggttgtcgtgtgtaacgacaggtgtggttgtccttccccttgtcccggtggcgggtcttgcaggttcatttacactccccccttctttccttcattttcaccatacatgttggattgataatgagaaaatgtctgaaaagattaggaagatataaatagaataaaaatttaactctcagaacttggtatttcgtaaaattagtgttatgctttgatagcttacatatttgccttcaaatgca

SEQ ID NO: 43049 - DNA, 409 bp, Gossypium hirsutum
  Clone ID: LIB3196-057-P1-M1-E6
atggcgctgctgcgggacaacgtcactccacgtgaaaacgagctctggacctcgctgggggactcgtggacccgccccgggctggagctgcccccggaagagggacccccatacagacccgagttcttcagcggctgggagccgccggttactgacccgcagggccgcgcttgggaagacccagttgagaaacagctacagcacgagcggaggcgccggcagcaaagcgccccccaggtcgctgtcaatgggtgagtgtccgccccagggcagggcaagggggtccaggaggggtgcttcccgggggctcccggtgttgactccgccccctttttttctgtgtttttccgtcttcctggctcttttcaggtgggtgagatggtgaaggggcgggccggggccgggagag

SEQ ID NO: 43050 - DNA, 386 bp, Gossypium hirsutum
  Clone ID: LIB3196-057-P1-M1-E7
gtttcagtctcagcagcagttttgaacttccaaaacacagtggccacctctgatttctgttttaagaagtaaatccagcaatatctcgataaatcgtcaatgaacagtatgaaatacctgtttccacttaatgactcagtcttcatagggccacacacatcagtatgcaccagttggagtttttcagaggctctccaggcttgattcgagggaaatgggagtctggcctgctttcctagctgacatacttcacatacatcatcatggtccactgagttgatgaagttttcagccaggtcttctctgaccattcgggccatcgatttgaagttggcatgtcccagtctttgatgccacagcttggattcatctgaagtggctgtgta

SEQ ID NO: 43051 - DNA, 324 bp, Gossypium hirsutum
  Clone ID: LIB3196-057-P1-M1-E8
atcccgcccgcttgctcgccgcgccgcactgccgaccgccagcatgctgccgagagtgggctgccctgcgctgccgctgccgccgccgccgctgctgccgctgctgctgcttctgctgggcgcgagtggcggcggcggcggcggggcgcacgcggaggtgctgttccgctgccctccctgcacacccgagcgcctggccgtctgcgggcccccgccggtcgcgccgccggccgcggtggccgcggtggccggaggagcccgcatgccatgcgccgagctagtccgggagccgggctgcggctgctgctcggcgtgcgcccggct

SEQ ID NO: 43052 - DNA, 385 bp, Gossypium hirsutum
  Clone ID: LIB3196-057-P1-M1-F10
atgtcatactctcgtccgactcccgtataatggccaaccgttacaccatggatctgactggcatctacgagagcctcctgtcgatgatccctgacgctcctgggccatccgaccatggaaggactgagttcagcccaggctggggctcctaaagactatgcatcctgagtccctgcgactgcagcacgtacggtgtcacctcccgtcttgctggccgctccaccattctagttgaaggccgcagctgaggctgggttcccccaccgccctgattaggaccgctggctccccgcctgagccccatgctgtaaccgttacccacttcgtccactagaacctccaccaccctgtagggctacaagactgaactatgtccgaccttctc

SEQ ID NO: 43053 - DNA, 404 bp, Gossypium hirsutum
  Clone ID: LIB3196-057-P1-M1-F11
atggaagcccggcagccctttgcaaaggcaccccttgtcttaaaatcactatgtgggaaagctgtagatacttttatatatttgtattggactctgaggaggtgaaacctgtatatattttgcattcgtgctgactttgttatcccaggagatccatgcgatgatcccttgctgtcttccgtgtaaagattgcacagttgtacttgaatctggcatgtgttgacgaaactggtaccccagcagatcaaaggtggaaaatatgtcagcagtggggctaaaaccaagcagttagaagccctatagctgcctttggccaggaagcaaggatggcatgggcacccgccggctccctgggtccctggtattcgctgtgcatgcgtttgccctctgccctggctgtgtga

SEQ ID NO: 43054 - DNA, 408 bp, Gossypium hirsutum
  Clone ID: LIB3196-057-P1-M1-F2
atgaacaactcaaccttctctgcacagtgggtgagtctccccattgggaacatcttaatattctcctatcgattctttgttttgatggagacctctttgctatgcaataaatatatttattttaaaggcaataataacttttgtttaaggtgaccttataaggtcatattttgactttccactcagatcacagctgtggaacttgggatcagaaaaggggagtgatttctgtaaaggctcgttaggttagcaagacaatctacccacttcaagagtactctcctgtcaacatgtattggaaatttttaatttagagggcattacattggcaattttgatgatcaaaaggtaagtttttctttattccacggatgtataatccatcagaaaacatatacttgactaaaa

SEQ ID NO: 43055 - DNA, 404 bp, Gossypium hirsutum
  Clone ID: LIB3196-057-P1-M1-F3
atcgcagggcggcctggcggaattcaaccccttctcagagacaaatgcagcgacaacagttcctgtcacacaactccctgggtcctcgcagccagcggttctccagccatcagtggaaccaacccagccgaccccccaggctgcggtgtctgcagcccaggcaggcctgcttcggcagcaggaagaactggacaggaaagctgctgagctggaacgcaaggagcgggagctgcagaacactgtagccaacttgcatgtgagagagaactggccccccctgccctcgtggtgccctgtgaagccctgcttctatcaggatttctccacagagatccctgccgactaccagcggatatgcaagatgctctactatctgtggatgttgcattcagtgactctgtttc

SEQ ID NO: 43056 - DNA, 409 bp, Gossypium hirsutum
  Clone ID: LIB3196-057-P1-M1-F6
atgcagtatattcatatgtaggctacaataaaatgtatatcttcggtattattgatttctattaaagaagcagttgatcatagagaattttctgcaaatttatcaacatgatataagtaacacttctaactgtttagacctgtcaaggcttaagtaaaacaattttttctatttctaactcgtatatctattttcacagggtgatagagttgtattgtttagccaatttaccatgatgctggatatcttagaggttctgttaaaacatcatcagcataggtacctcagattagatggaaagactcagatttctgaaaggttggtatacttcatgttccaaaaaaaaaaccactcatttgttgttgttgttagaattttaaatgtctagagtacttgatagaattttgtt

SEQ ID NO: 43057 - DNA, 387 bp, Gossypium hirsutum
  Clone ID: LIB3196-057-P1-M1-F8
cttctatcaagcaatgcattgttggctctcggttctgactggcccgttacaagtacttatcctttgcgtgctataagaacagcaatgaatagaattcctcctggttgggacactgcttggataccatccgagcgcctttcgctaaatgatgcattaatcgcgcacacgatttcagctgctcgggcatgctttcgggagaacgaaataggatcattattaactggaaaattggctgatttcgtcatactatcatctgattcatgggatgagtttgccacatgaggatctacatcagttaatgcaacatatgttggtggtatccaagcctatccctgaaagcttttgattttaaaactggcttaactgttttcagacagttcactagtt

SEQ ID NO: 43058 - DNA, 384 bp, Gossypium hirsutum
  Clone ID: LIB3196-057-P1-M1-G3
gttgaatgctaataatttggaaacaacccccgaaatgggtgagaacgctgacccattttttgctgatcgtgatgactatattgatactgctgaatatgagatgctgttcggacagtttgctgagaatgagaatgcatttattgggaagcctccggcttcgaaatctgtagttgagaatcttccttgtgtggtcgtgactcaggaggatgttgtgaataacaatgcgctttgtgcggtttgtaaggatgaggttaaccttggtgaaaagatgaagcagctgccatgtgctcatcgctatcatggagattgtattataccttggctgggaataaggaatacctgccctgtttctcgtcatgagttgccaacagatgatgctgacta

SEQ ID NO: 43059 - DNA, 411 bp, Gossypium hirsutum
  Clone ID: LIB3196-057-P1-M1-G4
atccaggacccaaggaaccaaaattgcatctgatggtctcaagggtcgtgtgtttgaagtgagtcttgctgatttgcagaatgatgaagttgcatttagaaaattcaagctgattactgaagatgttcagggcaaaaactgcctgactaacttccatggcatggatcttacccgtgacaaaatgtgttccatggtcaaaaagtggcagacaatgattgaagctcatgttgatgtcaagactaccgatggttacttgcttcgtctgttctgtgttggttttactaaaaaacgcaacaatcagatacggaagacctcttatgctcagcaccaacaggtccgccaaatccggaagaagatgatggaaatcatgacccgagaggtgcagacaaatgacttgaaagaagtggtcaa

SEQ ID NO: 43060 - DNA, 410 bp, Gossypium hirsutum
  Clone ID: LIB3196-057-P1-M1-G5
atgggaataccaaaccgtaacaggaatgtgtgatttgttccaatgccaccagtctggaactctatactgatcctcaaggagactgagatatgtggttggtacttgggggaccagagtaaagaactgacacaatccctgtccctggtagggagctcccagcatccttgaggagcaaagacaagcataaaagaaatcatttggaagtgatataaatgaccaggcttcatgatgaccgaaagttgaaagttgggattaggttgggagaagtgccctcaggtccccctggagctcttcttgcattgcgtgaccctcagtttatcctatgcctgtttcatagctgtggaacttttgggaggagggggaaccttttgccttcaggaccactgaataccaggaccaatactgctttc

SEQ ID NO: 43061 - DNA, 411 bp, Gossypium hirsutum
  Clone ID: LIB3196-057-P1-M1-G6
atctagttcatacccttgctgaactaaagatgactggaaactgtttgaaaggttctcggccccttttgtcttttgaccctgtaagtttctcattcagtgtatgaggtctaattttcttatctggcgtggttgtttttagtagatatagttgtgtaattcaatttagtttcaccctcaccttgattttatggattatcaattatttcaggcacatttataatgaggttatagaaacaaatgagcaaacagttttaaacaaggcaatctactgttaaataatatgcttcctttatttttataggcttttgatgaattaccacattatgctttgttaaaagaactcttaattcaggtaaatatcttttagctatccaaaatatacatgatatgtcttggaataaggaactaaca

SEQ ID NO: 43062 - DNA, 388 bp, Gossypium hirsutum
  Clone ID: LIB3196-057-P1-M1-H1
aatttggatattttatttggccaccacattctttttttgcggtacatgttgacatttctgtcatcacaatctttccactgtcattttcttgttcttgtcgctattggccactgccaaaccgccactaaccacaactgttagccgccgctattagcctctattgtcaacccttgccatcgaatgtcataatcagaccacaaaaaacatattttcaatttggctaggtcgagtttgtgttgtcttagtctaccttgatgtgtctcggttcttctggttccattgaaaatataggttacaaaaatcctatgtccatttttgattgacatattttattcttaaaataataaaaccctaggtagagatgatagtccaaaatctaagttatata

SEQ ID NO: 43063 - DNA, 405 bp, Gossypium hirsutum
  unsure (1)..(405): unsure at all n locations
  Clone ID: LIB3196-057-P1-M1-H10
atgagcaatccaccgtgccccagcacctgcatcatacacctgcatcatacctgctctaaagcacttaccaagttgtattgcaatggtttgtctacacagttagttttccctagaacgacttattcaaggccaggggctatgtcttactcatttttttaatgtccccagggattagctagttcttgggaaacaactgggactcaaaatagtttgccaagtgaatgattgagaggtccaatcaagctactacttcccttcagtgctgcacagtgcagcaaataaccagctcagatatgggttcaaagaccacaggtttctccttggacagctcagctctcctcataactccatagtatggagtggttgcatctggaagagggggnagagttccaaatactaagtaat

SEQ ID NO: 43064 - DNA, 413 bp, Gossypium hirsutum
  Clone ID: LIB3196-057-P1-M1-H4
atgcctccctgaacagggaggcgagcaggcaggaaaggaagccaccctgaacaggggagaaaacttaacctctcttctcctctccaaacctttcaccttgagtgggcaatgtttggtgggggctgttccttcttggagatgccttgagtcagaccattttgagatcatggaggaaggatgaagaagtgaaaatgacaataatgactctcaagaggctggtgatgtgacatggcaaatgtagaactgacttaaattgaacaaaccctcactgagcacctctgatgttgagcacctgctgaatactgagcactgaatgggggagggggaggggagcacaggggtgagtcaacctgggacttggtctcagggacatgcctaccaatagtgggtatcgtaaggcatgtacccaaaca

SEQ ID NO: 43065 - DNA, 400 bp, Gossypium hirsutum
  Clone ID: LIB3196-057-P1-M1-H5
atagccccttcaccacccccacctcctccacccccacaacctgccccagagcagcagaccatgcccccaccaagctccccttctggtggggcagggagtcctggaggcctgggtcttgagagcctatcaccggagttttttacctcagtggtgcagggtgtgctgagctccctgctgggctccttgggggctcgggctggcagcagtgaaagtattgctgccttcatacaacgcctgagtggatccagcaacatctttgtgcctggagctgatggggcccttggattctttggggccctgctctctcttctgtgccagaacttctctatggtggacgtagtgatgcttctccatgggcattttcagccactacaacggctgcaaccccagctgcgatcct

SEQ ID NO: 43066 - DNA, 341 bp, Gossypium hirsutum
  Clone ID: LIB3196-057-P1-M1-H6
atatgctgaactacctcatcgagtgtttcgaccgagttggaatagaggaaaaaaaagcaccaaagatgtgcagccagccagcagtcagccagcttctgagcaacatccgctcacagtgcatatcccatactgctttagtactacaaggctccctaacacagcccaggtatgaagacccgtgacgtgcttgacattagctggcagaaggccctagccatcagcggacatcaggctctccggccattcttgcaccaccttggataactcccttcctcacctgtaaaatgaagatccctttccttctctaaaataccatgaaaataaacgctccttttttcctc

SEQ ID NO: 43067 - DNA, 403 bp, Gossypium hirsutum
  Clone ID: LIB3196-057-P1-M1-H7
atctctcatagtggcttccatttaacacaggcaaagccctttaccttagcaaattctttatctttcaaaagtgaccaaaatgaggacttcaaccttggttgctcctcaatagagatgctgatcttgagttgtaatgagaaaagtggacatatagattttagtgactgcagtcagctctctggcattcctttctcagtttgcatctaaaagactacaatatgtcaagcttatctccacctgaatttgctgcctactataaaaacatttcattaatatatctcattcttcctacctccatctctggtttgtcattagtggtattctgaaaagcttaagaaaaaagaatcattgagtagaaagtgaacattttaagttattttcctttttcactggcaattagtta

SEQ ID NO: 43068 - DNA, 367 bp, Gossypium hirsutum
  Clone ID: LIB3196-058-P1-M1-A2
gttctccgccgtctaatctgaaccgagtgatccctactactactctacctgcatggccgccatcccctccaccgcctccgccgcaagtaaccgttgaagaaacgaaaacaagcagtccccagaaccagaaccagaacccagccatcaacgacggcgcgggtatctcatccggttcaccggagaccgatttatctccgccgcttttaaaagctctactcgactgtgctacactcgctgactcggaacctgaacgcgcgattaaatcactggctaaactcaaggaatcggtatcagaacacggagatccaactgaaagagtggctttttacttcactgaagctctccatagcagactctctcatcaaac

SEQ ID NO: 43069 - DNA, 140 bp, Gossypium hirsutum
  Clone ID: LIB3196-058-P1-M1-A5
cggcaataaaactccaccgtttcagaacatcctagagagccgagctttcttcgcttgttggaacatattttttaggcttacatcgactgcggggtaagaatgggtgcctttgtttgacagatcgactgcttatttctctt

SEQ ID NO: 43070 - DNA, 390 bp, Gossypium hirsutum
  unsure (1)..(390): unsure at all n locations
  Clone ID: LIB3196-058-P1-M1-A9
atgcgcttcctccagcttggcgccaaggtcccaaagggcgcactgctgctcggtccccccggctgtgggaagacgctgctggccaaggcggtggccacggaggctcaggtgcccttcctggcgatggccggcccagagttcgtggaggtcattggaggcctcggcgctgcccgcgtgcgaagcctcttcaaggaagcccgagcccgggccccctgcatcgtctacatcgatgagattgacgcggtgggcaagaagcgctccaccaccatgtccggcttctccaacacggaggaggagcagacgctcaaccagcttctggtagaaatggacggaatgggcaccacagaccatgtcatcgtnctggcgtncacgaaccgagctgacattttg

SEQ ID NO: 43071 - DNA, 383 bp, Gossypium hirsutum
  Clone ID: LIB3196-058-P1-M1-B1
acttcctgccatacaaggcctcataaggtgccatcttcaaactcgtctgaaaactgttgttgtaggcaaattctactaccggcaaatatttttcccagctaccctgaaattcaaggatgcaacatcgcaacatgtcctcaagaatctgaatcattagcccagactgaccatctgtctgagggtgaaaagctgtactaaagcttaacttcgtacccaaggcttcttgtaatttatttcagaatctcaaagtgaaccttaggtctctgtcggaagtaatcgatagtggtaccccatgcaatcttacaatctcagaaatgtacaagtcggccaatctatcgagggagtaatctattctcaccggaataaaatgagccgacttcgtc

SEQ ID NO: 43072 - DNA, 388 bp, Gossypium hirsutum
  Clone ID: LIB3196-058-P1-M1-B12
attggtcctatacttcatagggaatttcataccttgcaaacatattttcaaaggcattatcttagttacacagcagcccaaggcagtaagctgagcacgttcaatatcttcattttatagaggttctgttgaaaactgagaatcggcgtttaattggtaaggtcacatatctataaaccttctgtgtagcaaaagaagcaagaccttcagttaagtgccatgtcacctataggtatctgaaaagtccaacaataaaacttataattaaaaaaaccctcaaataccttatctgtaaacacacaaataaaatcatacagcaattttaaaaggagataaaatgtatttcttatcataataaaagaaattggggttgttgacacacatcatt

SEQ ID NO: 43073 - DNA, 202 bp, Gossypium hirsutum
  Clone ID: LIB3196-058-P1-M1-B8
atcggcctcccaaagtgctgggattacaagtttattcctactgttttagctcagttcgtatgtatgaggtcatttagtcttcaggttagcatttgagtgagactaggtttattttcaaaacctgtaagagaatggagtggggtattaagaaagaccggtcctaatgactgcaattggaaaggcccttaaggcaaaaattcca

SEQ ID NO: 43074 - DNA, 375 bp, Gossypium hirsutum
  unsure (1)..(375): unsure at all n locations
  Clone ID: LIB3196-058-P1-M1-B9
tatatgggatatggcatcgacatcgataagtgatcccatataataccacgtctgggacatggcatcgacatcagtatgagatcccatgtaaaaccatatctggaatatggcattggcatcgatatgaggtcccgtataagaccatgtctaggacatggcatcggcaccgttatgagatttcgtgaaagaccatagcagggctattggctttgatatgagattacatgtaagaccatatccgggatatggcattgtatgatatatgcatgttttccaagtatcctttagtatttcaagtggttaaatgggtaacccaatgagtatgtcaaatatgagaaagagtatgtaagtactacatatnggtacatgtatgta

SEQ ID NO: 43075 - DNA, 386 bp, Gossypium hirsutum
  Clone ID: LIB3196-058-P1-M1-C11
atggatcgcggaacgtaatggctgtcgtcccggcgtctctctcaggacaggacgtggggttcgtcttacttttctcttccccacttttgcgtaaagctgggcctcatcaggagcctgtggggactaagcggagggcgctcgctctccggtgggctgcgttcgagtcccgccgccgggcgcggcttcccaggacgcctttgcgggtttcgcggactggctcggaggcgaggggaggcggccccggggagggagcccgcccgcggtggctgctcgtaaggatcaggacagggctcagcttcgcggtctgttcctggcggtcacttttcatttattcactttaatgaactcgctttgggggcgttaaaattctccgtaagagttgggga

SEQ ID NO: 43076 - DNA, 259 bp, Gossypium hirsutum
  Clone ID: LIB3196-058-P1-M1-C2
aaaaccctccattattttccgattggaaggctcagatcgaacctagaaaccgacagtatcttctccgtcttcagcaacttcctgtcaatagcgtttttaagtgttgttggctctttttgccaatggagaaaggagtgccatctagcctttttgttaatgatggttccttcatggagaggtttaaacagcttcaacaacagaaggatgacaaagacaaggctgcggctttggaggaatctaaaccccccaaagttgtaaa

SEQ ID NO: 43077 - DNA, 346 bp, Gossypium hirsutum
  Clone ID: LIB3196-058-P1-M1-C4
atcatggagatgcttgaggctccccatcaactggcctgagctcagaccctgacgtggtgcttctcacactggaggagcacacattctagagggactccaagccctggggcagggtggggggccatgttcccagaaccttgatggggtgagaagtacagggcagaaccaagaacataaaccctccaagggatctgcttgatatcccaagttggaagggaccccagatccctgtgaagactggttgtctcccttcagtggccttgagtctctgaatttgtcggggtctcccgtgatttggggtgatttctcaccctctgtccttcccccagcacaaagcactggccct

SEQ ID NO: 43078 - DNA, 347 bp, Gossypium hirsutum
  Clone ID: LIB3196-058-P1-M1-C5
gcgactcaaaagctgctttcctcatcacttttaccagctactctgccttgcatgctgtttcaacgagcactacaaattctcttagttctaggatgccaacaaatattcagatacgcttcattaagaccatgcttgaaccttttacacatagtggcttctgaagacatgcattctcgcgcatatttaccgagcctcacaaattcatgttcatattccgtcaccgatattcagccttgctttagctctagaaattccttcctctgtggatctatgaacctttggctaatatacttatttaggaactctgcctggaagaattcctaagttatactctctgttggtaccac

SEQ ID NO: 43079 - DNA, 356 bp, Gossypium hirsutum
  Clone ID: LIB3196-058-P1-M1-C8
acaactgcacatatatagaacaggtgggtccacacatagacagcatacctggtaccggatcggaatttccgccatagcggatgctgacgctgccgaggtttcaggcagtgagaaaggacgtgcgtgagtgatgatcgtcgagcgctttaatcgggaaacaagtgcacccgtcttcaatacacctactgagttgctggacctgctcacacgtgggaggaataaaacctgaaagcagcacagacagggaaggttaccttatgcaagccacaaacacatcttgtcactcatcccggaggctactgcaccgctggagatatagcgcgaaagattcaaccttaaattgttgagccgtaccc

SEQ ID NO: 43080 - DNA, 383 bp, Gossypium hirsutum
  Clone ID: LIB3196-058-P1-M1-D1
cccacgcttccgattttatggttcatgaaaattaattcgttccacatttaaaattactacttctaataatgtatgaattttatactgacatatcttattattattgcgctcaacaattatttataaaaatcaattccctataccttaccgactgccatccacctttcttaaaaaagaaaaacttcaaacgttaggaaaacctatttaaatagttcaatattaatttttttcataaaataattaattattatattattttaaattgaaatatgaaatgtaaaatatttttttataaattagttaaataattaaaattatatttttttcacatgtataaatatttttataaaatttacaaattttatattcaattaatttataat

SEQ ID NO: 43081 - DNA, 381 bp, Gossypium hirsutum
  Clone ID: LIB3196-058-P1-M1-D2
cggacgcgtgggttttccttcctcgaacaacgccaggaacaacgctgacagcagcgaagacgacgacgacgattctcctgtggcgcgtgatgaaacgcgccgacttggagcggcattagaggaggagagggcgttatctgcgagagaagcggcggcggcacaggaagcggcgacggtggcagagaccaatgctaggccaattggttccaccgaggagccggtgaggatgtcattgatggactttttggaagaaacagagcgacaaatgggcctgacggtatcgaaatgcacgacgggcgacgccgacgccgatgacgaagaaaacgaggagaaagacaaggcggaagggagcggcgggatggagcagacgtgttgcgtgtg

SEQ ID NO: 43082 - DNA, 220 bp, Gossypium hirsutum
  Clone ID: LIB3196-058-P1-M1-D5
aaaaaataggtgagagaaagggttagtttttttgaagatggcctgggaccggtcaagggatccgatcattcctttggcgcggctccgctctgccggccacggtacactgagggccaaaattcgggtaaggtacacggtggtggatgtgacaaaggctgagcatcccaattaatggtggtcacagggatcgaacttctgggcaccacagatattttaatga

SEQ ID NO: 43083 - DNA, 370 bp, Gossypium hirsutum
  Clone ID: LIB3196-058-P1-M1-D8
gagaaattaaccttatgctcagacctgcttcttcttgtcatatgtggtgtctttagaggtggcaaaaggcatgctcaggatctctgcttgacaaatggaatcctaatcaactaaagtgggcagggagagtggaatcttcaacagccttttgttcaataacatccaatggtgagtggttggtttgcatattgcaccttcatttttccatacaggaattgcgtgctctgctagtcataatcacactagtagtttaccagttgattggggctcccacttggccatgactttgatatgcacttgcaaaattttatcataagcttcaacataatacacgcatgtgcttatcatgagatgatttgtatgagtgctt

SEQ ID NO: 43084 - DNA, 164 bp, Gossypium hirsutum
  Clone ID: LIB3196-058-P1-M1-E12
atgcacgctgagccactctcttccctttccccagcatcactccccaaggaagagccaagattttccacccataatcctttctgctgacccctaggttccctctgctcagccaagcttgtatcagctctcagggccatggttaaataaaagatagtaagtagaac

SEQ ID NO: 43085 - DNA, 379 bp, Gossypium hirsutum
  Clone ID: LIB3196-058-P1-M1-E3
cccacgcgttcgcccacgcgtccgcccacgcgttcgcccacgcgttcgtgataatataattttaaataaaatagaataaactttttctctattaagtgatatataagtatttatacttatcatttttataattttttttggaaaattttctatcgagtgaatgctattattaattatcaaatatgtttaaaaatttaagggtaaactacaaaaatagtcacttttgtttgtctcagattacattttagtcactcatgtttgaaatgttacgttttagtcacttacgttatcattttgttatgaagtggccattcttccgttaaactccgttacctccctaacggcagtcctacgtggcagcccaaatgagtttcaaatg

SEQ ID NO: 43086 - DNA, 356 bp, Gossypium hirsutum
  Clone ID: LIB3196-058-P1-M1-E6
atagaaattgctgacaccatggtacaaatattcaaaggacttcaagaaaggtttcagactgaaattcaaacggtgaataaacagttcccatgtgagccattcaaatttttggagccaactctaagactagaatattgtgaagcattggctatgcttaaggaagctggagtcgaaatgggagatgaagacgatctgagtacaccaaatgaaaagctgttgggtcacttggtaaaagaaaagtatgatacagatttttatattcttgataaatattcattggctgtaagacctttctatacgatgcctgacccaagaaattctaaacagtccaactcttacgatatgttcatgagagg

SEQ ID NO: 43087 - DNA, 366 bp, Gossypium hirsutum
  Clone ID: LIB3196-058-P1-M1-F1
cctaaaattcattcaagtagttagtgtgctgcattgtaaaacgtaatataaacagactaacctatatacaaaaattcaaatattattgattattcggataataattcgtctactcaaatagatcaataacttaatcggatccaagcacaacaatcttgatgcatagaagattgatacaaatgcacgtataacaccaatacaattatgtgcacacgtcatacagtacagatgcagatgaaatttcctattgcatctgctacacgccatcttcattcaccttacccaccaacaggtatataatacacatccatccctacacatttcatagtgtcgatatgacacgttgcagtgtttacagtctcacta

SEQ ID NO: 43088 - DNA, 251 bp, Gossypium hirsutum
  Clone ID: LIB3196-058-P1-M1-F12
aaataaatcaatatagtcattatttctaatgttaaatgaatacactctaccctaaactcatataaccacaaacgggaataccttatattattcttatttaaaactacctataggtcctgcccaactcataaataagagaattatgcacttcaacccactcaaactcatgtgcttttgcattagcatcaatgcacatgcccatacagctaagacttaatcaagcacaaaacttatattaggatcatcctaaa

SEQ ID NO: 43089 - DNA, 128 bp, Gossypium hirsutum
  Clone ID: LIB3196-058-P1-M1-F2
atccagagctatggacgacgcaatcgctagggggaacacgcgggaactcaaagactaataccctaaagtggagctggacaacaccgttgcttccatggtcaacgccctcctgcgcgtggagatcgacc

SEQ ID NO: 43090 - DNA, 398 bp, Gossypium hirsutum
  unsure (1)..(398): unsure at all n locations
  Clone ID: LIB3196-058-P1-M1-G1
atccggaacagcctcacatacctcactgtctcgtctgttcatgtgacattaagtagaaatattggttttttaaaaataagtcacagtcctgttgtcaaaactctaatagacagcaaagagggtctgtaccgtagacttcacagttttcagtttttaatgattgtcagtggaggggcttctccagcacagagaccccacccctcccccgtgtccagagacccccctctgccaggtggaggtgtgtccaggggctggggaagccgagatgggcgcttcctctgccggccggcagcgtggtccccagcatgggtcaggggtctgtctctggctatgccccttncgcggcactctgcgccgtgtgacatgggttttgaatcacactgcagctgcttttcatt

SEQ ID NO: 43091 - DNA, 387 bp, Gossypium hirsutum
  Clone ID: LIB3196-058-P1-M1-G11
atggctccttagattgggtcattactaaaagtacattaaaacactcttgtttaaaaatgaattatttccgtaatcgaagtgtattgatgtattctaaagctagtaaacttccctaatgtttaattgccctacagatgcttcttttgctgtgggttttctcctgttagtggtctgaaataatgattttcctgttctattaatatatagtgtattttgcacaaaaaattaacctggtcagtagtgattaccaaaatatgtattaataatcttggcaatttttgacattttagcccacgttagttctacattattcttaaaagaaactcagctactgcaaattttgtctttctgtaaatgttattaaaatatccagtgagctcttttaga

SEQ ID NO: 43092 - DNA, 378 bp, Gossypium hirsutum
  Clone ID: LIB3196-058-P1-M1-G12
tcggatgaagtggacatggttgagttttcagggccttagtagtgtcactctcacaaagttggagaactcttagaacgacatgaacttaagatctcccaagcgattcgtaagtcatggttttaaagaggcaaaaaacatgggaaataggcttatgctactctgatgtctaatggcgcggtacgaagaaatttgtgcctctactccaactgcatcagcgctaagttgaccaccatgtctataaaagcatgccattaacaacctggaactgatccttgagctccacagcggcgaagaacgaaactcagaaactgcaatatgatggtactgtggcgtgtatgattttgtagagcctctaatgggagagggaccttaggtgac

SEQ ID NO: 43093 - DNA, 373 bp, Gossypium hirsutum
  Clone ID: LIB3196-058-P1-M1-G8
aggagatccacttatccaaaagaaaacaacacgtgaataagaatatgttttccaaaatattatgttttactattttaagctaactaacagtgagtaactgcgaaccagacttcacataagtatgtcgaacccagttcgtagttttgtgaccttgtcaaagctctagtttaacttatgtttttggtgttctatgtggtatttctttcttgtatatttactgtgtaacagcccaattttggtgaaatcgaaatagtagtcttgagaccacaaatctgagctgaaaaataaaatttatttttattttaatatatggtccatattatgatatacatgttacgtgaaaattttcagaagaaaattttatcgattatgt

SEQ ID NO: 43094 - DNA, 373 bp, Gossypium hirsutum
  Clone ID: LIB3196-058-P1-M1-G9
atcgattggttgaaaggcctgaaagaaaacgttgtgcttgggggtatgatacccgccggtaccggattcaaaggattagtgcaccggtcacggcaacataacaacattcttttggaaacaaaaaaaaagaatttcttcgggggagaaatgagagatattttcttccaccaccgagaattatttgactcttgcatttcaaacaatttacatgatacatcaggccgctcttttataggtatagaatttaatgattcttaagataatttgttgtggtcatttgagttgttaatttgttaatagtaataaagagaataacgaatagaaagtaatggcttggctcgtggataaacgaccaatccccggtagaagagaa

SEQ ID NO: 43095 - DNA, 311 bp, Gossypium hirsutum
  Clone ID: LIB3196-058-P1-M1-H1
tccccttactgaagattgagacaaataatccctctttgctagctggaaattggtgtcaactttgtgcgacatgcaagattgttaggcctcttcgtgcaaaacactgcttcacttgtgatcgttgtgtcgaacagattgatcatcattgcccttgggtatcaaattgtgttggaaagagaaacaaatgggactttattcttttccttgatttagagggttgagcaatgctcgttacttgtggaggtactattgcaagaattgtgtaagatccagtggctccgtcatcatttttgccatggatgaactatgct

SEQ ID NO: 43096 - DNA, 393 bp, Gossypium hirsutum
  Clone ID: LIB3196-058-P1-M1-H3
atgggagacctcttgggtgtggggtagagaaagttgaggtgccctaggagaacaggcatttttctgtacccacaggctactgatactataagctccaggctgacttcttctcagaccacctgggctgtgtcaccaagtgccggaagccatgcagtgtgaccagctaccagctctaggctggttactcacgatggacctcggtgacatcccaggaatgggtcttcgagatgctatcgcgacagaacaactacaccatcaacaacaagagaaatggagtggccaaagtcaacatcttcttcaaggagctgaactacaaaaccaattctgagtctccctctgtcacgatggtcaccctcctgtccaacctgggcagccagtggagcctgtggttcg

SEQ ID NO: 43097 - DNA, 371 bp, Gossypium hirsutum
  Clone ID: LIB3196-058-P1-M1-H7
gaaaatcgcatcttttttcataaaaatcatccatgaatttcaatttactccattatcagctacgaagtatatgctgagcttaccttcattcacatatctaattgcatgtataggattcacaacttgtatttgatgaaaactacttgctgctggtagtattacaacataatgcctttcataatatagttagtgtatgaatattgcaaaatttgacacttcctcattgcaatttccctatgtggagcattaatactacttatccttatgagtagagtggtaaggtttcaatttcaagtcttacaattgaagaaaacaatgttactatgaacccgacaaacaacgtggaaggacaatcagtgttctttcactcc

SEQ ID NO: 43098 - DNA, 370 bp, Gossypium hirsutum
  Clone ID: LIB3196-058-P1-M1-H9
atctttaggtatgatttgtaataaaagaccatggtttggttggtgatgtaatgaatatgtgctagcttgatttatatgattgagctaacggttgttattcgaatttgaaagcatggttatatgtccattgataaataaaataaatagagttatttaatgtggttatatgaatttacaagtacaatgaatgtatatgtgattgagatttgttaaattcgatttagtgatattggtttataaatatcattgaaatgatttatttgcttatgacttattaagctttcaaagcttactctgtgtgtttttcctatgtctctagagtttcagagacttgctcggatctgggagtcgtcgggaatatcatcacact

SEQ ID NO: 43099 - DNA, 352 bp, Gossypium hirsutum
  unsure (1)..(352): unsure at all n locations
  Clone ID: LIB3196-059-P1-M1-A12
gtgagctctatatagcatagggttccattttccatatatacctaccaaataatggcgtggaataaaatcctgaatatagattggacattcatggaatgaaagctagcggcccggttgcttctcttcctcctcctcatattttcccaccattttcttctttcattttttcatcacaaactaacttgtagtttacaaacagcggcaaagctagcaattcattatcagagaggccaaaataatattttaaaagcttcagggaaaagtttaaaattttatttaaaaaggatttaaattaaatatttcataactaaaaaggattaaaagagatattataccctntagctatccctct

SEQ ID NO: 43100 - DNA, 307 bp, Gossypium hirsutum
  Clone ID: LIB3196-059-P1-M1-A3
atgtcttttaaggatctgcggatctattgtcaaggacatggtaccgaacggtggacgctgactgtttgcagagcgctcacgaagctttacatcattacccacagcaagaggtctgagcttgagtctggttctcccactggacgtgtaatctcacatactacatattccaccctgctaagtaatagtgtgtagaacggaatggttgactttatctaaaatgtgggagtaaaaaagtacatgtgaaactgtaaaggtcatcattctggtgcaggtatcatgaggaaaggagaaaaccctgggtgggagc

SEQ ID NO: 43101 - DNA, 374 bp, Gossypium hirsutum
  Clone ID: LIB3196-059-P1-M1-A5
atcgggcggtggacagtcatggcggcccggcgcggggctctcatagtgctggagggcgtggaccgcgcggggaagagcacgcagagccgcaagctggtggaaacgctgtgcgccgcgggccaccgcgccgaactgctccggttcccggaaagatcaacggaaatcggcaaacttctgagttcctacttggaaaagaaaagtgacgtggaggatcacgcggtgcacctgcttttttctgcaaatcgctgggaacaagtgcccttaattaaggaaaagttgagccagggtgtgaccctcatcgtggacagatatgcattttctggtgtggccttcaccggtgccaaggagaatttttccctagattggggtaaaca

SEQ ID NO: 43102 - DNA, 360 bp, Gossypium hirsutum
  Clone ID: LIB3196-059-P1-M1-A6
gacccacgcgtccgcaggcatatttataggggaactccgaggagacatttgttgactacagggtggagtgctttcgtcaaccggaaaaaactcgttgccggcgactcagtcgtgttcttgagagctgagaacggcggaattcgtgtcgggatcaggcgagccaagcttgggattggggatggtgattgttacggaagtttgggtttttgtgggaattcgaaagggaacggaaaagtgaagccggaggaggttttggaggcggcgaaggcggcttccggtggccggaagccattcgaggttgcttattatccgagaacaagagggccggagttttgtgttaaggcatctgcagtgaataca

SEQ ID NO: 43103 - DNA, 219 bp, Gossypium hirsutum
  Clone ID: LIB3196-059-P1-M1-A8
atgcggcagctgcggtttcgcttcgcggggtagtgttgggcccgcggggcgcggggctcccgggcgcgcgtgcccggggtctgctgtgcagcgcgcggcccgggcagctcccgctacggacacctcaggcagtggccttgtcgtcgaagtatggcctttcccgaggccgaaaggtgatgttgtcagcgctgggcatgcttgcggcaaggggtgcggggc

SEQ ID NO: 43104 - DNA, 262 bp, Gossypium hirsutum
  Clone ID: LIB3196-059-P1-M1-A9
aatgaacttcttgatccaaacggcttcatttgctgcctcactagctgcaatatactaagcctctgttatagaatcggctactgtactttactttgaactcttccagctcacagcaccaccattaaggcaaaacacaaaacttgattgcgatcgagaatcatccttatcgatttggaagctggcatcagtttaaccttttacacttaactcttcctcacctccatatattaggaacgtatccttagttcttcttaagtactta

SEQ ID NO: 43105 - DNA, 346 bp, Gossypium hirsutum
  Clone ID: LIB3196-059-P1-M1-B11
ccatttcccatttcccctctgggatgtttctccctaaccctaagcccgtgccctcctccttttttttctcaattcgagttcacctccagcagcaatccacctccggtcctccaccgatccaagaccagacctccacggctccacccatttccagaatcagaggttaggtactctgtttttgatcgccgactcagcatccaacaaaaatcccgatctcaagtgtggggttgtttaattttgtaatgacatgtacctaggatgtctttgattgttagttgttttgtgaatgtgatgtaatttgagttataagtatatatttgtgtttgaagctaaatgttagtatgtg

SEQ ID NO: 43106 - DNA, 259 bp, Gossypium hirsutum
  Clone ID: LIB3196-059-P1-M1-B2
gtataagcaaagccatcataaggtgtgggggaggcaatgcaaccctgagtaaaaaggattatgatttcacaccatttcgcttgttaatgcttgcattatcccctagatgtgcaaaatgactaatttaaagatattttcacatgtgatttggcttgttattcaccttgcacaatttttaatgtaatggaacagttatacaaatactactgtgcaaccctgttatagacatggaatgcgactctacataattgcacttaat

SEQ ID NO: 43107 - DNA, 295 bp, Gossypium hirsutum
  Clone ID: LIB3196-059-P1-M1-B4
tcctacgcgtccagcttgatctcacttacgtaggggtccattttccatatagtccatccatcatctctcaagatcataactttaaaactttaaatatctatcacggccaacaaccccactgcgcaataccattacaaggttgttgatctaacaaatcataacatttcatctttactcgggcatgctcatatgatgttaatacctaaggaaatgttaaccaccaaaatcaaaagcctcttactcaactaaacacgacccacatacgctctatgcagcatgttcatctacctacatt

SEQ ID NO: 43108 - DNA, 214 bp, Gossypium hirsutum
  Clone ID: LIB3196-059-P1-M1-B7
atgctctctacacttgtctgcccactaaaccatcgtgctgaggcttgaagagacactatgcacccaaaacacactattctacatcatgcacatcataactagggacaagaaactaagcatatcatcgctcatcgacaaaagcataaagactctatatagaatgatactgccatagaactacatgccaaattctcaacaccttatgatacttcac

SEQ ID NO: 43109 - DNA, 338 bp, Gossypium hirsutum
  Clone ID: LIB3196-059-P1-M1-B9
atggaaacaaatcttaagttggtcgtttaagacttcagtgtgcttaaatagagcaggtggattataagcaatatttttataatttgttttttgttttcttccttctgtttatgactaaataatacttttaaaaatgatgatctcttgtttggagtttttaaaaaaaattgtatgacaatggattgctcatttataatgtgtgtgttgtccttggaaaacaagatgacagttatacatttttaagaaaattaaaataaaggagaagagaaaccaggatgaccataaaataaactattgtttataaaatatctaatgcattatttttaaaatctttcaac

SEQ ID NO: 43110 - DNA, 346 bp, Gossypium hirsutum
  Clone ID: LIB3196-059-P1-M1-C3
cggacgcgtgggcggacgcgtggggggaaatagaatcatttggaaatggatgtaggtttccaaaaataaaaatggaaatttccaatcctatatagattgcttaaaaatgatcagaagaatgagtttatgtttttggactatttcgaagcccaaaaatgaaaataaatattgaacatattttgtcgaaattttaccaggggcaaaatcatcaaaattttatcgatggtaaaatcgtcaaaattttgttagggtaaagtagaaatgagaaaattgttttatatataaatattaaagtttattttggaaaataaaaaaattggatcgagttgaatctcgttatagagta

SEQ ID NO: 43111 - DNA, 386 bp, Gossypium hirsutum
  Clone ID: LIB3196-059-P1-M1-C8
ataacttgggaagggttgtctggaagaaaacatacaggggttgcttttggaatgaatatatcagggatcctgattttatcattaaaggggaagatatgttgggaggggttatgaaaggcctacgtcaagttctgttctggaatccagctgcttgggaggcttgggtgggagtatcacttaagtcaggagttggaggcagtaagctatgactgagccacggcactccaggccggacaacagagtgagaccctgtctcaaaaaaaaaaaaaatctaatccctctttccttcccccaccacaccgactgctgagtcagctggtccatcctccaagagcaacggagaggtggggaccgtgatagggtcacagcaagggctcacaggctgc

SEQ ID NO: 43112 - DNA, 367 bp, Gossypium hirsutum
  Clone ID: LIB3196-059-P1-M1-C9
attaccatcattaaccatttgaacccataccgatacaatcaaccaaaacaatcataaaacatattcattacttaccacttagtaaccggacctgttaagttaatataccatcatccatcactctaattatactacatttcatatttctaaaatgagctaactattaaaatgaataccaaaaccaaactcattaaacattttaattaagaacatgtaaaaccaaacttaagcataataagcaagtcattttcgcatggctttacatacatactcattcaaaataattaactccaagactagcctatacatgccatataaccgagtctcaaaatattatttactgaaatgttaacaggatagtgtgatg

SEQ ID NO: 43113 - DNA, 356 bp, Gossypium hirsutum
  Clone ID: LIB3196-059-P1-M1-D11
cccacgcgtccggggagaacgaatttactaggttcatgctgccatttatgaacttacatgccattaaagtgtttaattatgaagatacatgttccatacaagtgcatgaacgtcccaaggagatgaatgcaaccttttggtgcacatacaagtcatttgaagcctttctttatgactaagcattcatgcacaaaccaagggggaagaaagtgtccattcagctagtgcatgaatctgccgaatttatgaactattttaatacattagtgtgaacgtttttattattgtgtgaacacctagatgtcgaatttgaatggtcatctatatgcctataaatatttattttctttcatttg

SEQ ID NO: 43114 - DNA, 371 bp, Gossypium hirsutum
  Clone ID: LIB3196-059-P1-M1-D3
cggacgcgtggggttttgtgggcccgggaccactttgcgactagggtcacattaggggtgtcacaaattgtcccaaatacttgaacgcatcgtttaagaatggattaaattaaaacagcgcataaattttaggaaaaatttaaaacactacaaaagaaatataaataggacttaatcagatggcggcaaacctgggagggaccgaatgcgcaaatataccttcaccgcagaaacacgcggatcctgagggcatcggatcgggtcatcgggttgtgccgtgaaacgacgccattttaaacatatatataaactaaaatttgccctaaaaaatcatttggctgattatttctttaaaaaaaaaccttaaactt

SEQ ID NO: 43115 - DNA, 390 bp, Gossypium hirsutum
  Clone ID: LIB3196-059-P1-M1-E1
atctccggaatcactgcagcccccccctcgccccgagccagagcggcccgggtcccgccaggccctcacactcccagcagaatgggcaaggagaagacccacatcaacatcgtggtcattggccatgtggactctggcaagtccaccaccacgggccacctcatctacaagtgcgggggcatcgacaaaaggaccatcgagaagttcgagaaggaggcagctgagatggggaagggatccttcaagtatgcctgggtgctggacaagctgaatgcggagcgtgagcgcggcatcaccatcgacatctccctctggaagttcgagaccaccaagtactacatcaccatcatcgatgcccccggccaccgtgacttcatcaagaacatgatc

SEQ ID NO: 43116 - DNA, 368 bp, Gossypium hirsutum
  Clone ID: LIB3196-059-P1-M1-E5
ataccaagtctccagtcttgcctttgcacacctgttcagaagatggggaattcattgaatagagtcacctgacgctctccttgataattttccttttattattccaggcatcattctgtctgctgcttccccatctatgacaatttaaatccaattattctttctttaatacttaattcaaatggcaccaccactccaaaagccttctctgatcaccactccaccttcctatggcagatttaacaattaccttatatcatggggacccgtaatagtgggtgagaagagaccatatgagtggcgttttcatcttcacctcaacttcaaccagggctgcctggcttttggctggttaaaattttgggatc

SEQ ID NO: 43117 - DNA, 383 bp, Gossypium hirsutum
  Clone ID: LIB3196-059-P1-M1-E6
atatgaaattgagaaaactggaggagcgcttttatcaaatgacgggtgaagcctggaaattaagcagtggtcacaaacttgggggtgatgaaggtacaagtcagtcatcttttgaaacatcaaatagagaagcagcaaagagccagaacttgcctaaacctttaactgaatttccatctcctgctgtacagcccacatgcaaggagattcctgatttacctgaagaaccttctcaaacagcagaagaagtagttactgttgctctccgatgtcccagtgggaatgtcctgaggagaaggtttttgaagtcctgcagctcacaggtcttacttgactggatgatgagaattgggtaccacacatctctatacagcctttctact

SEQ ID NO: 43118 - DNA, 370 bp, Gossypium hirsutum
  Clone ID: LIB3196-059-P1-M1-E7
atgccaccctccctggccatgcgggcatcagcccagaagtgttggcctgactcagtcagctgagctaaggacacacaatttcaagaagggtctgctgcattgctgcctgaagtgttctagttactcacgtagagaccacactctgcacagaaagacgccttcagtaattgctttactcaatgtactttgtttagtgtttgactaaaaatataattaatttccttcagtttatactatttcataatatttatgtttaagcccttgtaaagtataaactttcaaacttgtgagacagcaaagatctctatcatttgaaagctagaaatcactgtgatcacaattgatttagaaaattaaatgcactagagac

SEQ ID NO: 43119 - DNA, 380 bp, Gossypium hirsutum
  unsure (1)..(380): unsure at all n locations
  Clone ID: LIB3196-059-P1-M1-E9
atgtcatcaatgggggtgtccctgagaccacngagctggggaaggagaggttcgaccacatcctgtacacgggcagcacgggcgtagggaagatcgtcatgacggctgctgcccagcacctgacccctgtcacgctggagctgggagggaagagcccctgctacgtggacaagaactgtggcctggacgtggcctgccgacgcatcgcctgggggaaattcatgaacagtggccagacctgcgtggcccccgactacatcctctgtgacccctcgatccagaaccaaattgtggagaaactcaagaagtcactgaaagagttctatggggaagatgccaagaagtcccgggactatggaagaatcattagtgcgcggcac

SEQ ID NO: 43120 - DNA, 362 bp, Gossypium hirsutum
  Clone ID: LIB3196-059-P1-M1-F10
cggacgcgtgggctaggacacgggttaagttttttaatggacgtggatgaaaaaaaacatatttatataaagttggttaaattaaaatttaaaatttgtatttggttggagtattattttattaaaaaatataagataaaaatattctcctattaatatttcttatttttttatataaaagagtattttaataattgttcaactgagttgatattcaattaacttatgacactattttaattaaaaatttaatataaaattaaatttaacaatatcattaaaaggtgctacaatatcacacaaaataaaacttttaactaccaaaacacagatatattacaattgggacacatactaaaaag

SEQ ID NO: 43121 - DNA, 318 bp, Gossypium hirsutum
  Clone ID: LIB3196-059-P1-M1-F11
cggacgcgtggggcataatcatacatagtgcgcgcagtaggattctgattaacagcaatcgcaggaggtagcagattttcttggtttttagccatctcctcggttgtggttgaagtatcgtcctcttgctcgttctctatgtatcttaagcttcactttatttctctctggtttctgcgaactgtgcgatcgatttcttcgtcaaaaagtagtggtcctgacaggtttcttctagtcataaactataaaaacctgccaagagaaaaaaaaagtaaattaataaatagtaacacaaataaaataaaattaacttgcaag

SEQ ID NO: 43122 - DNA, 429 bp, Gossypium hirsutum
  Clone ID: LIB3196-059-P1-M1-G3
cactatataacaagtgtggtacgctaaagcacgctggtgcccctccccaattttcgggatgggctccaagcttgctctttcccgtcctgacttctctcagccgatgttccgatcccgatcatgaggttcctgatccacttatcgggcggattctggggtgtagacgctgcttatcagtccgccccaggcgaggttcttggcaccgacttgagagcttaaacatgtcccagggtgtgcggattagtatcccaagaaatttaaatggcgttcgcggatttttgctcacctggagtaaggatggacatacttctacaagtgtgcagcaaacaacttgctccttggaacctgagttaagaggactttttacagaacccatacttgagcaagcttttcctgaatctctcacagcatgtagatgagagtggctta

SEQ ID NO: 43123 - DNA, 365 bp, Gossypium hirsutum
  Clone ID: LIB3196-059-P1-M1-G5
gtaattgtggtatatccacttagcacgacgttacacgtataaacgtggtatatccacttagcaccacgtttttccattccgaaggttcaactgagatttcctcatttaatctcaattcatcaaccacaaatcaccgtttgtttccattaattgaacaatactaaaacttatttcacatgtcacaaaataaaatattataacataataaaacaatacattatttacatataaactgtaacaccccgaacccgagaccgtcgtcggagtcgaacacgaggtgttaacagacttcaaaccacttattaaatatttcccagacaagctgccaatctgcgtactagtcactttaaaaatcatatcttgag

SEQ ID NO: 43124 - DNA, 215 bp, Gossypium hirsutum
  Clone ID: LIB3196-059-P1-M1-H11
tcgatcactgaagaaggcgtggatggtaacaagcaaagcgtattgtcgaaccttagaattgacgcttaaacatcagaagtatgtcgactgagaagaactatttcagtcgacatgtcctccacgaaatgtacgaatcaacatggattgatgttcctcaaaaagatagcatcatcctatgtattgctacctccttacattatcgactaatgatatgt

SEQ ID NO: 43125 - DNA, 379 bp, Gossypium hirsutum
  Clone ID: LIB3196-059-P1-M1-H7
atgacaccctcaagcacgagctcccctccttcccctctggaggacagtgccaaagcaagtcccccttctcatttcctcactcagatacgttctttcttgctttgaggctcccccttggtgtgcactagagaacctgggtaaggaccaacaaatcactaggcagttccatccaggtgtgtccctaaatagcatgcgttcatgactctggctcactttatttttggccccaggtcaggtctcccaaagggtttcccagcagtcacttcagagtctcctgcagagtcaccatcaagcagacctcttccttgggaggccgtgtcgtcgccccaacccttgacttctggtatcaccatctcctgtcacctgggctccagtctct

SEQ ID NO: 43126 - DNA, 395 bp, Gossypium hirsutum
  Clone ID: LIB3196-064-P1-M1-A1
atccatattctagctccatgtattaataacagtgctttcctgaaccagatgtgtatatttctccttggggcagtaaaatgttgatatgaataccagatacttggtcagagttaagtcaaatactaaatgaataaaagtgaggtctaaagggggaagacagcacttcatctttcagcagattttcttttgccagacaaaaatgtctattcagagactcggccttcctagagccatcctttcatatgaatgccctgtctaaatgcaccagctatatccaggatgtgggttgttttagggcccataaagtgtctgataaacttataatgaaagggttaagtcagttcaagtctgtaaagaatgctttgaaagaatttataagctctaactacttacct

SEQ ID NO: 43127 - DNA, 327 bp, Gossypium hirsutum
  Clone ID: LIB3196-064-P1-M1-A11
cttatctttgtgaaaaatataacccagatgagaaatttgaaagtttctctaatacgaacttctagtgtgaaactgtaaagataatataaagatattctgcatcttcctcattttttgtttcaacgtgacacccattttgacatatatctttgaaacttactcgagctcacacctaaactcaagcaaggaatgatacatttacaaatcaatctcttcactttagttctaaattgtacattaaagttctattcatcttttaggtctttaaatggttatttaaggcttatcagaccatttttaagatttctctaaaatttggttgcaatc

SEQ ID NO: 43128 - DNA, 344 bp, Gossypium hirsutum
  Clone ID: LIB3196-064-P1-M1-A2
gatagctggcacttcgaagcctgataatgggagggggaaaagagggggctgggtgattaaaaactcttacacacctactggataaaacaattttaatgcgcaaaaagcataacgggaagaagaaaagatttttcacgacgaaacacttgcatgctcttcacaaggccttctgtaatcaaccaactaggtccttgtgtccatatgtgcccattgattcaaactcggtgaatatgaaatgtgaacttaaaaccaatggctatcaaataagccgtaggtcatactctccagccattgtaatggaccgttcccatggaagagcctggcaaccactgctgtcaatgatc

SEQ ID NO: 43129 - DNA, 370 bp, Gossypium hirsutum
  Clone ID: LIB3196-064-P1-M1-A5
gtcgagaatgaaaaggatccatctatccgaaacatatatacgattttggtctagggtttatcctatgataaaccataagatatacatatttttaccccatgcttgatatatttatggatgatttctccttggttttattgaattcgatgcttctaatactttaatttcatgttttatactcaggagagcttaggatagcaaaaagagcaagaaacgggccaaaaatggacaaattaggcctaaatcagtgttgcacacggcttaggcacttccacacgggtaatccacacgccattgtgtgacacacgggtagactacacgcctgtgtgtgacacacgagtagactacacccccgtgtgtcatgaccatg

SEQ ID NO: 43130 - DNA, 378 bp, Gossypium hirsutum
  Clone ID: LIB3196-064-P1-M1-A7
tcatctcctccttgcgagagcagctgccgcccaccacggtccagaccattgtcaaacgctgtggcctgcccagcagtggcaagcgcagggcccctcgcagagtttatcagatcccccagcgacggaggctgcagggcaaagacccccgctgggccaccatggctgacctgaagatgcaggccgtgaaggagatctgctacgaggtggccctggctgacttccgccacgggcgggctgagattgaggccctggccgccctcaagatgcgggagctgtgtcgcacctatggcaagccggatggccccggagatgcctggagggccgtggcccgggatgtctgggacactgtgggcgaggaggaatgaggtggagctggca

SEQ ID NO: 43131 - DNA, 386 bp, Gossypium hirsutum
  Clone ID: LIB3196-064-P1-M1-A8
atgcaaattcatgtttgtccatagaagaatgtactcagaactttgtgttgtgaaatgatgagaacagaccacctttaagatacccacctgccacttaaaatgacttagttataattagtagtagtctagacgttgttcttggtgtgtgggggtcaattctaacgtcatgttcttttgaataaatctctcagtcatatttgaaaaaaaatacatgggaataaagaaaaatatcatctttggccaaatccagcaggcatctttttttttttccttgacgtttaactcattatacgtggtaattggatcacaagatctttccgtgtaaaaataacaaaaacatcctttagtttacaaaagagttattctaggcttgaagcctctgaaca

SEQ ID NO: 43132 - DNA, 384 bp, Gossypium hirsutum
  Clone ID: LIB3196-064-P1-M1-B10
atgccctgccgcaccctggtgcttctgagctgttctgacgggggtctctgtggggaagggtgaggccagggctgtctcaaccccacttcccagccatgttgactttgcctctttcccctcccagcagaaaaatggctacaaacttcctagtacatgagaagatctggtttgacaagttcaaatatgacgatgcacaaaggagattctacgagcagatgaacgggcctgtggccggtgcctcccgccatgagaatggcgccagcgtgatccttcgtgacattgcgagagccagagagaacatccagaaatccctggccggaacctcatgccccggggcctccatcggccccagcggagaccacagagagcttgtcgtccggatcg

SEQ ID NO: 43133 - DNA, 366 bp, Gossypium hirsutum
  Clone ID: LIB3196-064-P1-M1-B11
gatcagacgcccacattcacattcagcggcactcatgggttccaacaccaaactcattctagcgctgctaggcctcctcatcaccaccgctaccgtcgcaaccggttacaccaaccacaccgttggcggtgatgctggctggttctttcattctaaaactaacacatccgccaccaattacacgttctgggctgctaatcagactttcagtctcggcgactatctcatatttaggaccaccacatatcagacggtgatccagacgtacaatgaaacgacttatcgtaattgtactacggacgatgcttcagacaccgataccttccaatacaacggcgggaacacagactttgatcaatccttgac

SEQ ID NO: 43134 - DNA, 262 bp, Gossypium hirsutum
  Clone ID: LIB3196-064-P1-M1-B3
caagctcgcaaaacaatgtgatagcaatgaagttatcaaagctctttgtgatgaagctggtcggactgttgaacccgatggcactacttataggaagggttgcaagccttcggagcgcatggatgtacgtaagtggataacaaaacagagagcctcattttatattaccacccaatgaatgatgtaatctcgcttgatcaaggttaccgtcctcttcggatgtgggacatctcaaacaaaaagggagtattaccatcccata

SEQ ID NO: 43135 - DNA, 384 bp, Gossypium hirsutum
  Clone ID: LIB3196-064-P1-M1-B9
atcttgcatccccttgtgtccatttcatagggtcctatgggtgtggacatcagatgttccaaatgaaatgttccagtttcaaaccctccatcccattctccctataaacattgaaatgtctttaaagtcctaacatatggaggaggagaccacacttttccaacctgcttcttcagacaaaactttgttggtgcaggtggcctgcttttggcttcagaaaacatttgttttcctataggtgatgggcagaattattgggtagggtgggaagacggaaggcagcaattggtggagggagctctataggctgaattgggagtgggggcacacatttttttgagccctggctcatacacatgttgagatggaatagctgccaaagct

SEQ ID NO: 43136 - DNA, 388 bp, Gossypium hirsutum
  Clone ID: LIB3196-064-P1-M1-C1
atggcctctccctgggaaaagctcattccaagagccagaggaaccctcaggcaaggagacggggatgctggcagtgtggagtccagcaggctgtcgtggaagaggggacgcgagcagcacctgcagtgtctactctggggcggaggccacgttagcacagtgagacactggtggacacagtgtgtccgagcagggctggcacatggcactggatggtgctgcttgaaattggcaaattgcctgctaccccaaggcaacttgaaaatcagatgtggctttgccagtaactcctgcaacctgtagttttattcatgacagcagatgctatcaagggcgctgtgccctttgctgatgtagttgaggtaggaagtttgcttgttttggtgat

SEQ ID NO: 43137 - DNA, 376 bp, Gossypium hirsutum
  unsure (1)..(376): unsure at all n locations
  Clone ID: LIB3196-064-P1-M1-C11
cgcatatatatactgtctatagccttgnngtttcaaatttttagtttttaccttttatanaatatatatancgtatgtgttttatatcaatttttcaattttctttacaaatatatgtacatgtatatatgtatttgaatatatacgtatgcaaattttcacgatttacctatgtctatatacttacacattttatttttctattttgtaaatatatatacatatgatttaaattaaaataatgatttcatgttatgcattaacatttatcacactttcaaaaacatatattttggttttttcaaaatttttggtttaaaatcatcatattttataaattttcaaaatatttggtactcatgattctcgagaaaga

SEQ ID NO: 43138 - DNA, 369 bp, Gossypium hirsutum
  unsure (1)..(369): unsure at all n locations
  Clone ID: LIB3196-064-P1-M1-C12
gaaaatgatttggtgatatgtatagttaaaatganggttaatacaaaagaaagttgtgaaagagtgaatttgcaataatactgttttggacagtagcagtgatgtgattttgtaaaatcacaaaaaatagtataaatttaattagaggctgaatgagatattaaattaaagctcaatgagtgtattttcatataaaagaaacagagcaagcaaaggaactctatatttttagatatttatatttgtgtgtgacttgtttagattgactatgtgatcccctattctgactttgataaatctttaaaaattttaaaaaattaattaagaaatataacttatatgtatagattccttatcgagtctagtttt

SEQ ID NO: 43139 - DNA, 196 bp, Gossypium hirsutum
  Clone ID: LIB3196-064-P1-M1-C3
gccacacgttccatttgatttatgaaagagtcaaacccgtatagggacacattctaagtttctacagcgacatgacttataactatctcctaggatcgtatgaaatgaattagaaggtgagcgttgtttcagactgaaagcttatcgaaactactttcctacacaaataatgtgtgtagaaatgaataggatattt

SEQ ID NO: 43140 - DNA, 369 bp, Gossypium hirsutum
  Clone ID: LIB3196-064-P1-M1-C5
atttaatagattattattaattatatccatatataataaataatttttttcattaaatatgttttatttctagagtttaaaattttcatctttaaaatacatataaatgatgaataaaaaataaataaaaccgatttacctttaaaaaaccaaaagaaaatcacaaattacgaaaaaacttccccattatcttttcgcaatctcgaaaagagacaacctctctccatcttactatgtgtgatgcaactctgtcggtgaccgaccttcccataattcaagttttaaaaattaaaactttatctgcaaaccaaaattttaatccctataaaaagaaaaccttttccaatattttattattttttacaaaat

SEQ ID NO: 43141 - DNA, 387 bp, Gossypium hirsutum
  Clone ID: LIB3196-064-P1-M1-C6
atctcctacctgtcttctgggtgccactcctctggctttgtggggagcgggggctggttctgcgagggctccttcaatggcagcgagaaggagaccatgcagttcctgaatgaccgcctggccaactacctggagaaggtgcgtcagctggagcgggagaacgcggagctggagagccgcatccgggagtggtacgagtctcagatcccatacatctgcccagactaccagtcctacttcaagaccatcgaagatttccagcagaagatcctgctgactaagtctgagaatgccaggctggtcctgcagattgataatgccaagctggccgctgacgacttccggaccaagtacgagacagagctgtccctgcggcagctggtggag

SEQ ID NO: 43142 - DNA, 374 bp, Gossypium hirsutum
  Clone ID: LIB3196-064-P1-M1-D10
atccgagacgggctgaagctcatgttgctcctggaggtcatatcaggggagcggttacctaagccggagcgggggaaaatgagagtgcacaaaatcaacaacgtgaacaaagcactggactttattgccagcaaaggtgtcaagctggtctccatcggggcagaagagattgtggacggcaacgcaaagatgaccctgggaatgatctggaccatcatccttaggttcgccatccaggacatctccgtggaagagacctcggccaaggaagggcttcttctctggtgccagagaaagacagccccgtataagaacgtcaacgtgcagaacttccacattagctggaaagacggtctttgcctcaatgccctgat

SEQ ID NO: 43143 - DNA, 385 bp, Gossypium hirsutum
  Clone ID: LIB3196-064-P1-M1-D12
atgccagggtgagcaggctagaaactcaggacaccaggtagccctgcaggtgctgggtgggcaactcagcccagaggaagagcaggctcgggagctctcacagcccaacagggactggcccccggccctctccaccccactgccctgaagccagatttcctgctcagcatggacaagacagcaagaggctagccctctgcccaggtggaagctgaccccaagccacccttcacctggacaggatgagagtgtcaggtgtgcttcgcctcctggccctcatctttgccataatcacgacatggatctttgttcgaagttacatgagcttcagcatgaaaaccatccgtctgccacgctggctggcaccaccatccaccaaggagat

SEQ ID NO: 43144 - DNA, 371 bp, Gossypium hirsutum
  Clone ID: LIB3196-064-P1-M1-D4
ctcaactgagcattttgatatgtggctcgagagtgtgctccctgattaagtgccctaatgggtaccctgattatgagttgacggtttatagttttgtaaaccttttgtgtactacatgagcatccatcgatatttcaataattcaatggagaacacttctaatatgagaaattataagattaaaagcgttacatctcaaatacttctgaatacctgagagagtgtagcatgatgagctcatccatgtttatttgatgtacatgtgaattatgtggctaactagcttatttaagtatatgtgattaggcaatttgcaaattttttgggaatcatgttattgtatgcttgtttgaatgaaaataattggtaag

SEQ ID NO: 43145 - DNA, 349 bp, Gossypium hirsutum
  Clone ID: LIB3196-064-P1-M1-D5
atggtgcggtggtcggcggggaggcccccgcgctggaaaatgatgcccgtcgcgcccgcgcgaccatgcaatggcgagcgcttgtcctggggctggtgctcctccggcttggcctccatggagtattgtggctcgtcttcgggctggggcccagcatgggcttctaccagcgctttccgctcagcttcggcttccagcgtctgaggagccccgacggccccgcgttgcccgcctcggggcccgtgggccggcctggggggctattcggtccgtagtggctggagacgccggggaccgcggcgtcgcatagcccgcgcatggttccgcggcgtgctgagccgggggtgtg

SEQ ID NO: 43146 - DNA, 270 bp, Gossypium hirsutum
  Clone ID: LIB3196-064-P1-M1-D7
atattacatccaactggccctcgccctcctccgtgaggatggtggcatggtgttctctctttgagtggttttctgctttgggagaaggaaagtcgacttcacctcagcctcccacttgcatcaggaatgccttgtgccttctctgggacacgtttcaactctttcaacctcagcattgcacccagtgccccagctgaaggaaccataatacacagcgcggagcatccaaatcaagctgctgtaattagctggaaattatgatgtgcttac

SEQ ID NO: 43147 - DNA, 358 bp, Gossypium hirsutum
  Clone ID: LIB3196-064-P1-M1-E11
cccacgcgtccgcattgagagaataaattaccgtaaatagtaaaatcatccataaatacctctattcctcgctcgatgtgatcagagaaaatgcttaacatgcatcgttggaatgtgaccggagcgttgcaaagaccgaaaggcattcttctataggcgaaagttccgaaagggcaagtgaatgttgttttttcttggtcttcaggcgccaccggaacctgaaaaaatccaaaaaatccatcaagacaacagtaatgtgtttttccagcaagtctttcgatcatttgatcgataaatggtatagaaaaatggtcctttcgggtttgcgagttgagtttcctataatcgatacacattc

SEQ ID NO: 43148 - DNA, 377 bp, Gossypium hirsutum
  Clone ID: LIB3196-064-P1-M1-E12
atgcggcggctgcgggggaacgggcgcggtgggcggtggcggagcgggccaggcctctgccggggcagcgactggcgctactggggccagcgggggcggtggccccatcaacccgacctcgctggcaccctgcgacccgcagatcatcgctctcatcgtggagcatctcaagagccggcgcctttttgacagcttccgcccatactgcctggccgacgtggtcaccaagccagctcaccaaaacctgatgcagaaagtggataattttgtgtcaacacatctggaccagccggagtggaatcctacaatgaacaaaaaccaattgcgaaatggtctgaggcagagtgtggttcaataagtcacggatgcttgaagct

SEQ ID NO: 43149 - DNA, 371 bp, Gossypium hirsutum
  Clone ID: LIB3196-064-P1-M1-E3
acactgagttttcgtaaactcaccccctcttttaaaattttcaggtaatccttagtaggcgattcggctatgggaggactcgaagatggccacaccatgaacggctttaaattttcgtcttttacattacttaaattactttctcttttggtttttaatgtaataaggcattttctccaattttctaccttttaatttggggggtttttaactattatgatttatttctgttaaaggcagagcgtggttttccaaaatgatatttttgttcaaaacatcatgttttttcaacattgttgaaatgcttccgcaacaaacatttttttaaaagtaaggcttgtttaaaatggttaacaaataattaagttgac

SEQ ID NO: 43150 - DNA, 386 bp, Gossypium hirsutum
  Clone ID: LIB3196-064-P1-M1-E6
atgcgagctgactggttgtgtggtcgcgtctcggaaaccggtagcgcttgcagcatggctgaccaactgaccgaagagcagattgcagaattcaaagaagctttttcactatttgacaaagatggtgatggaactataacaacaaaggaattgggaactgtaatgaggtctcttgggcagaatcccacagaagcagagttacaggacatgattaatgaagtagatgctgatggtaatggcacaattgacttccctgaatttctgacaatgatggcaagaaaaatgaaagacacagacagtgaagaagaaattagagaagcattccgtgtgtttgataaggatggcaatggctatattagtgctgcagaacttcgccatgtgatgac

SEQ ID NO: 43151 - DNA, 342 bp, Gossypium hirsutum
  Clone ID: LIB3196-064-P1-M1-E7
atggtgactggaaagtggctacaatccaaaattttaaatttaagtctgcctccgccattcaaaagtctaataacaaaaaatggtaacctaatttggccggttggtacgtttgacaactgtcaacatttcattcctaccaggtggttttcaatgatctctttcattcccccaataagggtggaagaagttcctggatgcctggaagaagctcttaacaaacttcttaatgcaagcaatgggtagattaatttgtggggcagctctttaagacattcagaggtgggaaatactggatttattaaggaaatggctggttgggggattccaaggacttaccctaat

SEQ ID NO: 43152 - DNA, 332 bp, Gossypium hirsutum
  Clone ID: LIB3196-064-P1-M1-E9
gcaactgctggggcatctagctgcacctcatcagatacacgaagacgaaggtttgacccctcatcattccagcagcgtgctgaggcattggaaggattgctcgaatttagtgcaagattgctgcagcaagagaggtatgatgagcttggtgtgctactcaagccatttggacccggaaaggtctcccctagggaaactgcaatctggctgactaagagttttaaggagaacactgtgaagccagaggattaacaccgatgaacctccaccgtttgtatcatatccatagctgtaatctgtaccaattttttagagttcagcctatccgatct

SEQ ID NO: 43153 - DNA, 387 bp, Gossypium hirsutum
  Clone ID: LIB3196-064-P1-M1-F2
atcaaggtcaatacataagccagagtgaatgattctacaagttgagcatctctaattcaaaaatctgaaatccagaagcttcaaaatctgaatctttctgagcactgacttgaccccacaagtggaaaattccccacctgacacctttgctttctgatggttcagtttaaacggattttgtttcttgcacaaaattattaaaaatgttatataaattactttcaggctatatgtataaggtggatgtgaaacctgaattatgtaattagtcaggtcccattgtatatatgcagatattccagaatctgaaatccaaaacacttctggtccctagcattttggataagggatactcagcttgtacctacatattcatatatattcact

SEQ ID NO: 43154 - DNA, 392 bp, Gossypium hirsutum
  Clone ID: LIB3196-064-P1-M1-F4
atgtcgacacatcctgttgcagtatctcattttattccaatatctcaaggggcaggtcaaattcaaaagttcaaactatgttttaactgatgaacaatcactttggattgaagatactacaaaatcagtttatcaactactatctgaaaacccccccgatggagaaagattttcaaagatggtagagcatatattaaacactgaagaaaactggaactcatggaaaaatgaaggttgcccaagttttgtgaaagaaagaacatcagataccaaacctacgagaataattcggaagagaacagcacccgaggacttcctagggaaaggacccagcaaaaaaattctgatgggaaatgaggagttaacaaggctttggaatctttgtcctgata

SEQ ID NO: 43155 - DNA, 384 bp, Gossypium hirsutum
  Clone ID: LIB3196-064-P1-M1-F5
attcttcatcaactaatagagcacctaccacagtgtcttacctggtagaggtaagcaattcatattcaaaggttgcaaagtgtttgtaatatattcacaaggctagaagtaggaagagtcaaaaatttgtcctaattataatgagaaccattctaggtcatgatcttggaggacccatgaataagtttccaaaggtgcaaccaaatccatttttatttctgcctgacttagtcacctttgtaaaggtttaacttggtgttgtcaagtaacagttactgaaagagctgagaaaaggaacaatgaacagcaaagatcttgactgtgcaactcagacattcctgcagaaaagacatatgttgctttacaagcaaggccaaagaacta

SEQ ID NO: 43156 - DNA, 298 bp, Gossypium hirsutum
  Clone ID: LIB3196-064-P1-M1-F6
gcggatgaatgaacaaagaggaaatgctggtgcatgtacgggtagattcaataatggtacaaatacatgcatgggataaatgcatggatggacattaaaggctaggccatgaatggattaaatgcatgggatgattgaatgcatataatggcttaaggacacatatggtagctgtcaatgaactatccaaggcacttatttatgcaagaagtagatggtaactaattatatggtgaccatggagcttctagaacatggttcacactttgaattgacctatgagctacgacacatgcat

SEQ ID NO: 43157 - DNA, 279 bp, Gossypium hirsutum
  Clone ID: LIB3196-064-P1-M1-F7
ttttcgttcatttttcgcttattaaaaataatcaaccaaaaacacattaagaatgatgttaaaacataccaattttagcagttatcaaatatccccacagttaagcatttgtttgtccttaagcaaaactctcaacccttattcaagttaatctccctcaatttattgttttcactaacaaagccttatgaataatctacagataatcatgcattggaaattgaaactatcatgacactaaagaataaaagcaatctaagcagaaatttgtaaagcaca

SEQ ID NO: 43158 - DNA, 382 bp, Gossypium hirsutum
  Clone ID: LIB3196-064-P1-M1-F9
attatcaagtgaattaatcactagaaagatgggtgtcagacttgtagacacagcagatcggcatccttcgctgccccttagcaacttaggtggtcaatctgaagctgtgaaggtgtgatttttcaggagctggaagtcttagaaaaaccttgtaaatgcctacattgtgggcttttgacatatttaagggaccgcttaagacgagattagatgggctcctctggatttgtaactcatttgtcacagataccttgtgattgaaaatcgtgagtgaagtgaaattgcagtgcatttcaagggaattttgtatgtaaatcgtgccttagaaacacttctgttgtcttttctgtgtttggtcgatattaataatggcaaaattttt

SEQ ID NO: 43159 - DNA, 391 bp, Gossypium hirsutum
  Clone ID: LIB3196-064-P1-M1-G3
attgctttgtggggttgtgatgagacccacacaggagtggggaagctgagcatggtccacatgggttcaggggaagggggaatggtcccagccagtggagtgaggagtctggcacagtctctgagagccgtctccactccttctgtctccagacatcaacttcaacgtgtcaggcctcttctcagctgttaccctccaggacacggtcagtgacaggctggcctctgaggaactttcacccactgctgtgcccaccccaaccaccaccccggcttcggctccagctccagttccagccccagccttggcctcagcagctaccaaggaaaggacagagtctgaggtaccccccagaccagccttccccaaggtcaccaggagccccccggag

SEQ ID NO: 43160 - DNA, 368 bp, Gossypium hirsutum
  Clone ID: LIB3196-064-P1-M1-G4
ctccatttgatctcgctaattatgatacaattcaaacaccgtcttcccatcctcttctcttctctgtcaccgcttctctcacggcgccgcgcacgttaggcaatggacctaatgcatcattcttctacttttctgctccctacgattcccctacaccaccgcccttctctaacgtacgcccttgttgttcttaaccaaaccctccccagattcgcccctttgctttggaaacacgctcagcttcgtctctgtgctgatggtggcgccaaccgtgtgttcgatgaaatgcctctgttgttccctgaggaagatgcttccgatgttcgacgcagatacaaaccggatgtaattaacggtgatatggattc

SEQ ID NO: 43161 - DNA, 388 bp, Gossypium hirsutum
  Clone ID: LIB3196-064-P1-M1-G6
atggaatcctggccctatcccacaccatcagccccttcatgaataagttttttccggccacctttccaaatcgacagtaccagctgctcttcacacagggttctggggaaaacaaggaagagatcatcaattatgaatttgacaccaaggacctggtatgcctaggcctgagcagcatcgttggcgtctggtacctgctgaggaagcactggattgccaacaacctttttggcctggccttctcccttaatggagtagagctcctgcacctcaacaatgtcagcactggctgcatcctgctgggcggactcttcatctacgatgtcttctgggtatttggcaccaatgtgatggtgacagtggccaagtcctttgaggcaccaataaa

SEQ ID NO: 43162 - DNA, 289 bp, Gossypium hirsutum
  Clone ID: LIB3196-064-P1-M1-G7
cggacgcgtgggaaaaaatcaaattccaaatttttatttcatttgctcactaaaccgaatacacttaccatgttcacaaacactcttcaacgatttcttttctttagtcaaacacataattttccatctcaaaatttattttcctactaatttaacttactccgaggttgaatgttactttagcattaagcttatattctcttcgttattaagtaattgttcatagctcaactagcatccattttcgatttaacacaaaaattcataaccaaatgttatttatcttaag

SEQ ID NO: 43163 - DNA, 382 bp, Gossypium hirsutum
  Clone ID: LIB3196-064-P1-M1-G8
atgtctttggcaagatatggcaaaagcccatacctttatccactctatggccttggagaactgccccaaggatttgcaaggctaagtgctatttatggaggtacctatatgctgaataaacccattgaagaaatcattgtgcagaatggaaaagtaattggtgtaaaatctgaaggagaaattgctcgttgtaagcagctcatctgtgaccccagctatgtaaaagatcgggtagaaaaagtgggccaggtgatcagagttatttgcatcctcagccaccccatcaagaacaccaatgatgccaactcctgccagatcattattccacagaaccaagtcaatcgaaagtcagatatctatgtctgcatgatctcctttgcgc

SEQ ID NO: 43164 - DNA, 138 bp, Gossypium hirsutum
  Clone ID: LIB3196-064-P1-M1-H1
atcaaactttctgagcacctttctttttttcaggcgactgctcgctcgctcacctccctccttgggaccatgaccacctgcagtcggcagttcaccttctccagcttcatgaagggcttctgcggcatcgggggcggt

SEQ ID NO: 43165 - DNA, 348 bp, Gossypium hirsutum
  Clone ID: LIB3196-064-P1-M1-H10
cccacgcgtgcgcccacgcgtccgctcgaaactccgatttcaggcacagggcattttccttcttgtttgcagaaggtgaaaatgaggaaataaatgcttctcaaacagtggattcacattctttcccacagcattttatcaagtcaaaagatgaattcgggcttgccccagctgctgttgttgtaactcggaaggaactatatgattcttcatcagctttaaaatcactggattacaacaggcagataaggccagagtctcctattatagctgctaggaaaatgaaaggtagcattttgaaggaaaatgaaaacccagattttgttacaaacccataccaggccattg

SEQ ID NO: 43166 - DNA, 390 bp, Gossypium hirsutum
  Clone ID: LIB3196-064-P1-M1-H3
atatgagttcccgcctgatctacacactccgctgcggggtctttgccaccttccccattgtgctggggatcctggtgtacgggctgagcctgttatgcttttctgcccttcggccctttggggagccacggcgggaagtggagatccaccggcgatatgtggcccagtcgatccagctctttatcctctacttcttcaacctggccgtgctttccacttacctgccccaggacaccctcaaactgctccctctgctcactggtctctttgccatctcccgtctgatctactggctgaccttcgccgtgggccgctccttccgcggcttcggctatggcctgacgtttctgccgctgctgtcaatgctgatgtggaacctctactacatgt

SEQ ID NO: 43167 - DNA, 318 bp, Gossypium hirsutum
  Clone ID: LIB3196-065-P1-M1-A3
atcgaggggaagaaagccggaggcggccgattgggggccggggtaggggacccatacctagcccccgctctacttgatcctatctttcttactctttcatcctacttcttaactatcctatcagttctccttacatcctattactcacatttgtactacaacccctggactattaataccctgttgaaccccacttacaagtgccatgctacatccctctttccttccgttcacttataaatacagtacccgcatttattgatgcctctaatcattattgtcctaacatgacatataatggcctggaatatttattaa

SEQ ID NO: 43168 - DNA, 403 bp, Gossypium hirsutum
  Clone ID: LIB3196-065-P1-M1-A5
atcatttacatgcatgcaatcagacaggccactaaggtaaaagagtctgctctatcatagtgttgagagcgtgtgtagtgctgcatcttatgacaaggggacagacaagctgggacgtcagggaaatgaacaaaagggacgcagattatttggggtgagtgggtggtgggagcccagaacaaggtggagggtgcagaggggctggggtaggtcatgtaggagggaggtgggtgggtcaggtgagcggaaggggtgttgtatattgtgttgatgacgtacgttatttccatggaagatagccactgtggcagctgtcacatccccacagcccccagggtctgccgagaaggcaggcaatctttgggttctgttctttgtcacgtcccctacgagtaaattttgt

SEQ ID NO: 43169 - DNA, 347 bp, Gossypium hirsutum
  Clone ID: LIB3196-065-P1-M1-A9
atgactgatgcaaatttgcactctgctccccctctgtaaggatactgatagcacaacctcttcttccccccaccggcccgccttctggtccttcaacccagtccctttctgtccctcttcctgtagcccagtctcaggctttcctcctcctgaagccctacagaggtagggaatggagcccaggcaccaggggtctgaagtgtgagccacccagaagagagacgccaactgcacccttgccacttccaaagcaatagaggcagaggggtcccctctgccacctagcccagctttgaccctggcattaactagccgtcttaaaaaaaacaaggtcctggtaggggggg

SEQ ID NO: 43170 - DNA, 382 bp, Gossypium hirsutum
  Clone ID: LIB3196-065-P1-M1-B10
gcgcccacgcgtccgaccacgcgtccggaaacacaggacccctgcttcctatgctgatgttttcaacccacgaggtggtgcgcatcaccacagctcacagcttcaatctttctattcttcaataccttcaacttagcgcctggaggggagatctttacaataatgctctgtacgctcatcactggaacatgaatgcccacagcattgtttacatcacatggggagatggatggattcaaattgagtctgaacacggagaggcgctattctatgagcaggtagagaggggtccgggcatatccgtactctagaatgatgcagtgctgaaaaaagcatgaaggcgagggtttgaatggatagcattcaagacatatgccaatgc

SEQ ID NO: 43171 - DNA, 380 bp, Gossypium hirsutum
  Clone ID: LIB3196-065-P1-M1-B11
ttcttctagaagagttttaacaatctttttagattgtggagattatcttcaaattttttcttgccaatgtttctatcttggaggggaaattagagccgtttgaagagggttgtagattcttcatgtttccaaggcttcttaggacttccacacgccatgttctatctttccatttatcttctttattcgcttccttaatttttgatttattattttattttagttatttattttaattgttttatctgacttagattcaatttcgtttcaggttgtgtcaaaatctaagtttctttccgaacgattagagccctaagtcaaattcgcgactttgacaaactttacgatccgcttttgcgttcatccttctcatcctttat

SEQ ID NO: 43172 - DNA, 357 bp, Gossypium hirsutum
  Clone ID: LIB3196-065-P1-M1-B4
ggcctgcaatcttgcaaccaaaggagtggtaaattaaggacaagcaagcctgtcttctatgatttcctgaccaaagacagggctgacttaaacctagccccttctttctcgtcatccgtctccagtgggatcacccaagtttcaaataatgacacggatgaccactaggaaagcagttgttgcaatagttttccttatttcagaagaaaaccctaaaaagtcacaggtcacaccctttttttttctctctcttttcctgcctgtaccagtagctcggattctgattagccaatcagtgtaacatcttcaaagaaaagaaaaagataagaaaaactagtctagtggttggtaaattat

SEQ ID NO: 43173 - DNA, 406 bp, Gossypium hirsutum
  Clone ID: LIB3196-065-P1-M1-B6
atggcaagagtacctgggcccatgggcccaaactcaggtcctggctctcggggaattggccttccagggccaaatccatctcccatgtcaagggctcctggccccataggccctaattcagctcatttctcaaggccaggtggccccatgggggtaaatgccaattcctttcccaggggagcaggttcatctgccttttctcagtcttctggcacattggcatcaaacccagctaccttccaaaggtctgctggcctccagggctcaaatccaaccattttcccaagagcctctgggccacttggccccaacccagctaacttcccaagggccactggcctgcagggtccaagtccaactaccttcccaaggtctactggcccattaggccctggtcaagttactt

SEQ ID NO: 43174 - DNA, 397 bp, Gossypium hirsutum
  Clone ID: LIB3196-065-P1-M1-B7
atagatgataatcgtggccttgagcaaggtgtccaggataataagattacagctaatctatttcgaatactactagaaaaaagaagtgcagttaatacggaagaagaaaagaattcggtcagttatccttctctccttagccacataacttcttctttcatgaatcatccagtctttccaatgacaaataagttctcctcacctacccttgatctgcaaggtgaattctctccattacagtcatctttgccttgtgacattcatctggttaatctgagaacaatacagtcaaaggtgggcagtgggcattccaatgaggcagctttaatcctccacagaaaagggtttgattgtcggttctctagcaaaggcacagggctgttttgttctactactc

SEQ ID NO: 43175 - DNA, 370 bp, Gossypium hirsutum
  Clone ID: LIB3196-065-P1-M1-B9
gttctagtgaaaaagatagaatgggagccaaaaagaatgaaggttgccatagaattcataacacaaatgggaaatgcaaggcataggaatttgatcagattacttggtttctgctacaacaaccatatggcttatatgttgtacgattacttgcctaatggaaatttggctgagaaggtaacaatgcctagagattggtcaaccaagtgcagaattataactgggattgcaagaggactttgcttccttcaccatgactggaatcctgcaatttctcatggagatttgaactcaagtaccatagtctttgacgataatttcgaaccccgtttagctgatttcgggttcaagtatctgatagagttgatca

SEQ ID NO: 43176 - DNA, 382 bp, Gossypium hirsutum
  Clone ID: LIB3196-065-P1-M1-C1
cggacgcgtgggcgaaaatggggggaaattgttggaatattttcaaatatttatagtgttccaataactatatatgaaagggtgtaatatcttttggttattgatcaagagttatatcatctgatttttgacaaataattataactatacaagcaatattacttgaatagttatgagatatttgttgaataattatgtcttttaaatatgccattattcaaaaaagacatttatcgaaagttatgtctttatgaagagacatgagaattcctattaataggagtgatattttattcggaagatatacaaaaaatttttaaaagttctttctatccttcctctatactatactattataaaattgttctattaaaaattactg

SEQ ID NO: 43177 - DNA, 398 bp, Gossypium hirsutum
  Clone ID: LIB3196-065-P1-M1-C12
atcgcgggctggagaagcgggtcctacgcacgctttgttgcccgcgctttccctcggtccttccccctactcccgccttacctgacttacttttgggaggaagatccttgagcaaccaacggtgggacaaaggatttggcgaaacccagggctaaagtcacgtttttcctcctttaagccttacctcaacacttcactccatggcagttcccgagacccgccctaaccacactatttatatcaacaacctcaatgagaagatcaagaaggatgagctaaaaaagtccctgtacgccatcttctcccagtttggccagatcctggatatcctggtatcacggagcctaaagatgaggggccaggcctttgtcatcttcaaggaggtcagcagcgccacc

SEQ ID NO: 43178 - DNA, 397 bp, Gossypium hirsutum
  Clone ID: LIB3196-065-P1-M1-C3
atagcaaagagcaggtggccaactcagcttttgtggagcgagtgcggaaacggggcttcgaggtggtatatatgaccgagcccattgacgagtactgtgtgcagcagctcaaggagtttgatgggaagagcctggtctcagttaccaaggagggtctggagctgcctgaggatgaggaggagaagaagaagatggaagagagcaaggcaaagtttgagaacctttgcaagctcatgaaagaaatcttagataagaaggttgagaaggtgacaatttccaataggcttgtgtcttcaccctgctgcattgtgaccagcacctatggctggacagccaatatggagcggatcatgaaagcccaggcacttcgggacaactccaccatgggctatatgat

SEQ ID NO: 43179 - DNA, 402 bp, Gossypium hirsutum
  Clone ID: LIB3196-065-P1-M1-C4
atcggagatcggcatagtaccccctccctcctggaggcagccttgacccaggaggcctcgactcctgacagtcaggtttggcccacagcacctgacattactcgtgagacctgcagcaccctggcagaaagccccaggaatggccttcaggaaaagcacaagagcctggccttccaccgaccaccatatcacctgctgcagcaacgtgacagtcaggatgccagtgctgagcaaagtgaccatgatgatgaggtggccagtcttgcctctgcttcaggaggctttggcaccaaagttcctgctccacggctgcctgccaaggactggaagaccaagggatcccctcgaacctcacccaagctcaaaaggaaaagcaagaaggatgatggggatgcagccatg

SEQ ID NO: 43180 - DNA, 386 bp, Gossypium hirsutum
  Clone ID: LIB3196-065-P1-M1-C6
atatgattcatcaaaaacttgttctcaaaatgttgagttgacagatcccattatttctcgatttgacatcttatgtgttgtcaaggatgttgttgaccctgtgacagatgagatgcttgcaaagtttgtagttgacagccacttcaggtctcaacctaagggtgctaatttagatgacaaagccttcagtgagtcccaagaagaagctcaagcctctgctaggccagatgattcaaagatactttctcaagaattgctaaggaaatatttaacatatgccaagttaaatgttttcccaaggttccatgaaaaagatatggctaagcttaccaaagtttatgctgatttgcgaaaagaatcttcccgtggacaaggtgtccctatag

SEQ ID NO: 43181 - DNA, 442 bp, Gossypium hirsutum
  Clone ID: LIB3196-065-P1-M1-C7
cgccactaaagaacaagagggaacgcaaaagcacgctggtgccccgccgcaatatccgggatggcggcgcaggcggccattctgatgggggacaagagcgagaacgtgcaagacctgttgatgctacacgaggcttctttgtcactgaagctggagacggtcggaggcgaaatgactgtcctgatcaagctcaacttcaccatccgcaccaagcaggcacaaagatgtaccacctactgaaacaaccaaccatgagcgctgatccaagtgtacgagggcgagagggacatgacaaaggacaacaatctggagctgcgcttgaagctgagcgtgataactgctgcccgcaggggcacgcccgagatcgaggagaccttcgacatcaatgccaacagactactgaacgagacggccacagacaagaacacctgcgaggtcaaca

SEQ ID NO: 43182 - DNA, 401 bp, Gossypium hirsutum
  Clone ID: LIB3196-065-P1-M1-D2
atgttcaagagaaaacacaagaaggacatcagccagaacaagcgagccgtgaggcggctgcgcaccgcctgcgagagggccaagcggaccctgtcgtccagcacccaggccagcctggagatcgattccctgtttgagggcatcgacttctacacgtccatcaccagggcgaggttcgaggagctgtgctcggacctgttccgaagcaccctggagcccgtggagaaggctctacgcgacgccaagctggacaaggcccagatccacgacctggtcctggtcgggggctctacccgcatccccaaggtgcagaagctgctgcaggacttcttcaacgggcgcgacctgaacaagagcatcaaccccgacgaggctgtggcctacggggcggcggtgcaggc

SEQ ID NO: 43183 - DNA, 383 bp, Gossypium hirsutum
  Clone ID: LIB3196-065-P1-M1-D3
aagaacggttcattccacttgaggggaaatgtttacgtgcattataaatcactagaatctgctgtccttgcttatgattcaataaatgggcgatactttgctggcaaacaggtaaaatgtgagtttgtcaacattaccagatggaaggttgccatttgtggggaatttatgaagtcaagattgaagacatgttctcgtggaactgcctgcaattttatccactgtttccggaaccctggcggagactacgaatgggcagattgggacaaaccaccccctaggtattggatgaaaaagatggctgctttatttggatatggtgatgaggctgagtttgagaaacagagagagcaagacaattttgggcatttgaggaaccctaa

SEQ ID NO: 43184 - DNA, 396 bp, Gossypium hirsutum
  Clone ID: LIB3196-065-P1-M1-D8
atgcagtgtgtggctttaaaaacttttagagatttttcagtcttagtgtgcaaactggcatttccgattttccaacataaaaatccacctgtgtctgctgaatgtgtatgtatgtgctcaatgtggctttagattctgtccctggggcttaacattgttggccctgacaggaagggaggaagcctggtgaatttagtgagcagctggcctgggtcacagtgacctgacctcaaaccagcttaaggctttaagtcctctctctgaacttgcatttccagcttcttcctttccaggtgagagaagaagcggggaagggttcagtgtagccactctgggttcatagggacacttggtcactccagagtttttaatagctcccaggaggtgatattattt

SEQ ID NO: 43185 - DNA, 387 bp, Gossypium hirsutum
  Clone ID: LIB3196-065-P1-M1-E10
ctgcattcggggacagtccctgcgcgctctgggcgcaccatggcccgcggggctgcgctggcgctgctgctcttctgcctgctgggtgctctggtcgccgccccggatgatggtttcgatttatctgatgcccttcctgacaaagaaggcaagaaacccactgcaacccccaagaagcccagtgctggggatgactttgacttaggagatgctgttgttgatggaggaaatgacgacccaccaccaccgaacccacccaagccgaagccaaatccaaaccccaaccaggctggttcctctggtagcttctcagatgctgaccttgcggatggcgtttcaggtggagaaggaaaaggaggcagtgatggtggaggaagccacaggaaa

SEQ ID NO: 43186 - DNA, 382 bp, Gossypium hirsutum
  Clone ID: LIB3196-065-P1-M1-E4
cggacgcgtgggtttttagactttatgatttaattcctatgtaaaaattcaacccaagcagcctattaaaagccttggccgaatttcccttttgaagttaataattaggtttttttttagtttcctaataggattaggaaaatagttagatggccaataataaggcttggccggccaccttatgaaaattacattgaattgtatattgaaatcagattttgttgagtgaaaattctctttgagttttctccaagaattttctcttgagttttctttggaagtagttttaacaatctttttgattgtgggagccatcttcagccttcttcttgccattgtcctacattggaggggagattagagccgtttgaagggagttgtg

SEQ ID NO: 43187 - DNA, 387 bp, Gossypium hirsutum
  Clone ID: LIB3196-065-P1-M1-E6
aaacaatcctaaaagaaccgtaaagaaagcaatttcagaacaaaactctcttcatgtttagcaatattaaaaattaggatttttctagtttaatggatctgctatggtatgccaatattggtagtttacagagagttaactagagaggtttaatattaattgaaattacacttcaattgaaaatagctggccagtcgatcctagtgtcctaaagacactaaactgccacagattatgcctcccttaggcagcataagcttactagctccgcaagtagcttcccttcaccatatggtcgacttgcgttaatttgggtcacatattaattttgaataagaaattaaaattatcgattaaataattttcaaagattctattttaacccat

SEQ ID NO: 43188 - DNA, 378 bp, Gossypium hirsutum
  Clone ID: LIB3196-065-P1-M1-E8
tgccgtccagccaaaataaagtttgggtctaattgccttttaaatcctctctcattagacacttaagctatttaatcatctcatccacttttacaccttttacaatttagtccttttcatttaattaactatccaaacatcaaaatttcctaacacaattttaataccacattacaaacatttcataaatgtttaaaaaattattttcgactaggtcttacgagatagaggtccttgtactttattttacccaatttcttcaatagatttcttgttctcactaaccattaaatcaataaaaactttttatcaatattttcatacgatgttgctattatatcaattttcatgcaaaaatattgaaatagatctctcttt

SEQ ID NO: 43189 - DNA, 371 bp, Gossypium hirsutum
  Clone ID: LIB3196-065-P1-M1-E9
cggacgcgtggggcctggccgtgtggttcaatttatttgctgatgtcataaacagaaagttacacggcctaaggacacgagcatgcccctgtgtccacacgggcttgtgaccctgtttcacgagaaaaatttctaaatttttcccagagctttccaaagtttttggtttagtcccaaaccctttctaaagtatgttttgggcttcgtaaacccaaataaaggactatgtccatgtgattgaaatgttttaaaatatgaatgaaattttatggcccgatttgcatgattgtttgcgtttaagtccgctaatgcctcgtatcctgtcccggcgttagacacaggtagggggtgttacaacaacatacccacac

SEQ ID NO: 43190 - DNA, 405 bp, Gossypium hirsutum
  Clone ID: LIB3196-065-P1-M1-F1
atcagatttacagaaaagtgaagaactaatcaaaaaagaaatgatcacaatgcttcattatgaccttctacatcacccttatgaaccatctggaaataaaaaaggcaaaactgtagggtttggtaccaataattcagagcacattacctacctggaacataatccttatgagaagttctccaaagaagagctgaaaaaggcccaggatgttttggtgcaggagatggaagtggttaaacaaggaatgagccatggagaactctcaagtgaagcctataaccaggtgtgggaagaatgctacagtcaagttttatatcttcctgggcagagccgctacacacgggccaatctggctagtaaaaaggacagaattgaatcacttgaaaagaggctcgagataaacag

SEQ ID NO: 43191 - DNA, 381 bp, Gossypium hirsutum
  Clone ID: LIB3196-065-P1-M1-F10
aattgtttgtgatgcttaaaacttactaagctttgaaagcttactctgttctttatttctctattttatagattgttgattttggccaccgactcggggatcgtcagtagttcatcacactatcgatctttttggtacagttatattttggactcgatatggcatgtataggttaggctgatgataacgatgttttgaaattgtaaatattttgggccatacgaaaatggcgtataacttaaatatcagtatgtatttcagttcgatctctgtttatgcttattgacaatgtgaatgagataattaaatgtttagttaggtaatacctcttagccttaatccggcaatgggattcgggttaggggtgttacattttattgg

SEQ ID NO: 43192 - DNA, 395 bp, Gossypium hirsutum
  Clone ID: LIB3196-065-P1-M1-F11
atgcccagcttaccaggttgaagggtacaaacttctcaaatcttcaaaacattttagtcaaagtgcaatatacttaaatttcacctaaaatatctttggcgtgcttgttagaaattcctgattcctgttactaatcactaaagaaatgggatgctgccactgtaggatttaagcagtggtgcttctgtactcttagacttctgctgcctgcaccttcgtcagctttgacgcctcttttctgatttaaagacaccaaggaaaactacaactctctttagctttgaagcagttttcatgtaatcaatgccacctcttccctacatgaactattgataccagcatacaagtgtatagcactttacacacaagaggtttattgatgtaaaattgtcagc

SEQ ID NO: 43193 - DNA, 293 bp, Gossypium hirsutum
  Clone ID: LIB3196-065-P1-M1-F12
ttacgatagaacgtatagctctactgcagcaccacggcataagctatttagtgaactgtgcaggagaacaccttgcccctcgcggcctgggggcctctgatcacttggacctctaggatttgagactggtaagatgggaaaaccaaccatatgcattactgaccttgcctgaccactgctacccatctgtactgacagtataaggtgctccaactgaaggtgttagtatcattgcaatacaagatactgcacctgctgctttgctaagatatgaataagacacttgagctgct

SEQ ID NO: 43194 - DNA, 389 bp, Gossypium hirsutum
  Clone ID: LIB3196-065-P1-M1-F5
aaagaatttttcagaaaatattaaaatttttcaaaggtgcaaggaaaacacgcccgtgtagtcaggccgggtggctcacacggtcaagagacacgcccatttctcaggccgtgtggacattcgaatagggacacacgggcatgtcctagcccgtgcccaaacttatatgctctttgactttggtcacacggccaagccacacacccgtgtgctagactgtgtgagcatactgacttgcattaataagatgcaggggtcacatggccaagccacatgctcgtgtgctatgccgtgtgagcattctgttttgcactaattaaaagatacaagggacacacgaccgtgacacctagccgtgtgttttacacggctaagacatacacccgtgt

SEQ ID NO: 43195 - DNA, 426 bp, Gossypium hirsutum
  Clone ID: LIB3196-065-P1-M1-F7
acaagagggaacgcagaagcacgctggtgccccgccgcaatatccggggtgggacaccaacctccgctggcggctgacgatcaccgggctggtgctgcaggtagctatggtgatgcttttatgaggggtcgggcgctacaacttgaatgcctgctcccactggcggacagagagaaagcacaagaactagaacgaggcggaaaacgaatcactactatgactccccaagctaacatgacgtgcacgtcatggtcttaacgggcttaagattgctcatgaccttactgcatcgattcggattaagagctatcggttttaactttctgatcacaggctctagaatgcaatgcacgctgctcatgcaagactatgatcacctattagaaagtccctgcatcttcaagggagcggagaatctcatcaagg

SEQ ID NO: 43196 - DNA, 385 bp, Gossypium hirsutum
  Clone ID: LIB3196-065-P1-M1-G1
gtttgctacagttttatgcctatcgcacatagtttcaccatctcgatggaacggatgctcttgttcatgattgtgctaaaaagaagaaaggaagtgcttatttcccatcattaattacttcactttgcttaagggctcgtgttagaacacaagcaaatctgaaggggcagtatgttcaatgatgcattacaaattatgatcttgaaagattagtagagagggtgcatgaattgaatcaaggcgagcaagaagagccaactgagtcggatacagaggagtcaacagatggaactgaaactgaagctaattcagtcacagacactgaagaggaacaatctgataaggaactgaacattcttgaaccaagggttgtgccagaagaaga

SEQ ID NO: 43197 - DNA, 372 bp, Gossypium hirsutum
  Clone ID: LIB3196-065-P1-M1-G10
cccacgcgtccgaggaaccccacttgttttctttcttcttctcaccccttcttttttccctagaaaaattttaaaaagtttttccaagaaagtttctccctttttttttttcctattcttctttctcccagaactggctccaaatgatcaatattgatcaagaaacaacggttagagaaatcaaaccaaaaagcagaagaatcatgggaggaggtggtccggattatgatgatgataaagaggaagtgaagtggccgccatggctgagaccactgctacaaacaagcttttttgttcaatgcaaactccatgctgacgctcataagagtgaatgcaatatgtattgcttggattgcatgaacggtgctcttt

SEQ ID NO: 43198 - DNA, 385 bp, Gossypium hirsutum
  Clone ID: LIB3196-065-P1-M1-G2
ctctttgaaaataaaatgccgccattaacgtctctgcaactccgtcggctgcttcaccgttgcgtctcttcgccttctccctttcagccccatgctttgctttctccgaaacctcaatttacgcccacccatttccccaaattgccatttgtgatctctaaacccttctccacccagaaccctaaccctcaaaccccagatccggttgctttatctatttcggctgaactcctcaaggacccttctttagaccctctcactatcacccctagactccagcttcacttttctcacatcaaaccaacccctttgttaatctcccagaccctcaatctctcccctgaagctggccgaaccgttttagggtttaacgattgggttttat

SEQ ID NO: 43199 - DNA, 401 bp, Gossypium hirsutum
  Clone ID: LIB3196-065-P1-M1-G4
atcccattataggttgtctccggatgctttcatccaacagagttgaatagttataacacagactgtgtggcccaaaacctataaagtatttactgtctggtttcctggcttaatctgttgttgaaaccttgagttttagaagaagtcttcatgtttactaaattctttttcttgtttttgggcaggcagagaacatttataatgatgaagaccctgaaggaagcgtggatccagaaggacaagggtcctagatatgtctttacttcttgtgattttagactccccttttttcttctcaaccctgagagtgatttaacactggttttgagacagactttgttcagctatccctctatataataggtaccaccaataatgctattagcccaaacagtgggtgt

SEQ ID NO: 43200 - DNA, 304 bp, Gossypium hirsutum
  Clone ID: LIB3196-065-P1-M1-G5
gcgcgcacgcgttacgtgaaaaaaaaaaagcctttggtctatgaaactatggtcccttacttgaggctaggatgcattggggtgggcagactagagttgaaaggtgtcaaacccagatcacagggctgaacatgtaaagaggcgtggaacgaaggagactcgaggaagagtgacaaggttgtagacagacatggataatagccgcggggtacagtgcgatgttagggatggacagagacctgtgatagacaaatttacagcaattgaagccgagatgctatgcatttaagagagaaactagatt

SEQ ID NO: 43201 - DNA, 384 bp, Gossypium hirsutum
  Clone ID: LIB3196-065-P1-M1-G6
cggacgcgtgggcaccttggctctgatgatcgggtcaggcatggggtgttacataatatattaataaatgtaaaagaagaagaagaataagctattgcctccttccttcttcctgctatacttgattttttctattacttcaacaggttcttcgcaggtaaatgttttccttgattttattttttccctagctacaagattgatttagcacttgtatttgtatgaaatacttaatttatttttgtaggaaatggatcaaattgttccatttaagttgtgtaggaattgtatgttagagaaagcctatggtttttcattgatatgatttaattatttgtaattttgctaagagtagtacttggaatcaactatttttcttatatt

SEQ ID NO: 43202 - DNA, 383 bp, Gossypium hirsutum
  Clone ID: LIB3196-065-P1-M1-G9
caagtcctaaagctcaagctacattagtattgagtgttggcagtgtgagaaactgtaacaccctaaacctatatccgtcaccggaacaaagttacggagtattaccagaactttcagaatattttcaaataatttgcaacaatcactagtcacttttcgaaattatttgtaacgtctcttaaatagaccctcgaggccctgtaacacccgtaacccgtattcgtcgccagaatagggttacaaggcattatcgaaatatgcacatcattctcatgcatttgtgcattcataatcaaaatccattcaaaacattcaggaatacttaaggtacaaatatcacgacattcgggttaatgaaatcccgtataagactatatctggga

SEQ ID NO: 43203 - DNA, 403 bp, Gossypium hirsutum
  Clone ID: LIB3196-065-P1-M1-H10
atcctggaccaaggcccacatgtctttttgatcactcacctacccaaagtatccagtccaaaggcccttgtaaatatgtgtcaagtgagtgaacggataacaatccttgtctccctctacctgtcacgtgcatgcccgctgggctgtttttctgtgtgaacatatacctgctctatgtgcctgcacgccactgtcttcaggtcacagtttccttagttcatggacatcccttgctccagtgtcttggctaacactgggtccagggcttctgctgtttggaggatgtaatcctgaccttaaacctatgaggccatggctgtcagcacctaagctcacaggtaatggagcgacacagcttaggagacttctgtgagagtccacaggccgtccgtctggaagatga

SEQ ID NO: 43204 - DNA, 404 bp, Gossypium hirsutum
  Clone ID: LIB3196-065-P1-M1-H5
atgggagactgacttattgtcttcttccttggtatttctgtgtacatttgtgctgtccttttatttatggtatgttgatttttagaatgagttgtgaaattttttgggacagtgtaaaaatctcttgttgactgtggaagaactcttttctccagagccatttgggtctggttccctttaaaaaagttatcttttcaattttctgtattattattgatttatttagttttataagatgaaaagtaaattgcgatcatttaagttttcctagaaaaattattctttatgttcagatttccacattgatacagagttaagcagtgccatagcttctttgttggtgttgttgttttgttttgagacggagtcttgctctatctcccaggcaggctggagtgtaatag

SEQ ID NO: 43205 - DNA, 377 bp, Gossypium hirsutum
  Clone ID: LIB3196-065-P1-M1-H9
gttcattgtgggggatcttgacagcgtttataccacaccagggatgaaggaatatgttaatggtggagatttcaaaagagatgcgcccatgttggaagaagttgtgataatggagggcgttggtcatttcatcaaccaagaaagagctgatgaaatcaactcacacattcatgatttcatcaaaaatttctgatctgctttgttttatctctatgctcaaagctgctttgtttatctcttttgagttttattaatgtgatttctcatgttagattctatgaaccaagtttgaactttaagaaatcataaaaaagtgcttgaagaataattcagacctaaaaaaaaaaaaaaaaaaaaataaagggttgtcgttctaa

SEQ ID NO: 43206 - DNA, 307 bp, Gossypium hirsutum
  Clone ID: LIB3272-001-P1-K1-A1
cgtcgtgagaatggggaattgttctttaaaggggtcactgctgagtgtagaaactccatcagggttttaacagatggtggtgaaatcattgatgttaaaggccctaaacttgcccgagatattgtaaacgattttccggggtacgttatttgtaaaagagatcaagctcaagcttcaatgtttccattgaatgaaggtgagtggttggttagtgggggattttattatcttcttccattagccaaagttggggcaccaaagatgtcgatggcagcagctgattttgttgagaatttgtcaagtgggt

SEQ ID NO: 43207 - DNA, 405 bp, Gossypium hirsutum
  Clone ID: LIB3272-001-P1-K1-A11
cacagttcttaaacctaagatacgctttttctcaggaggttgaggtaaagactggaaatcatagagatgctgagagaaattagaatttggctcttccagaaatttgaggaataactctctattggaactcaaaacttctagtgcatcttgaaattctttggtttggcgaagcttttcctctgtcaccaggtgttttgcttccataaacttctgacgaactagagccatttttttctcattcagattatccttatacctccctttttgtggagagctatctcttgaataagttgccctcggggactgttgccagatttcataaacatctttgtatttgtccagctcttgacaggggtttacttcggatagcatttccttgcccgcaaagccctgatcttgctccca

SEQ ID NO: 43208 - DNA, 403 bp, Gossypium hirsutum
  Clone ID: LIB3272-001-P1-K1-A5
catacttatagtttacattgatttcctacctatggaattcagacgcatgcatacatttgctgtctttcttctaattgcctgttatttagttctctcagtcgagggaagatttctaaaatcactgagcaaaaataattcaaagcaagtattgccaccccctacaccaactaaagcctcggattttggtgactcaattgaaggttacaaagaggattttcgacccactacaccagggaacagccctggtgttggacattcttttgcagacgttgttgaagatattgttgaacaaaacccagcaagcattagcgtgcaaggaaatggcaagcgttcaattgcggtgcacagccctggtgttggacattcttttgcagacgttgttgaagatattgttgaacaaaac

SEQ ID NO: 43209 - DNA, 415 bp, Gossypium hirsutum
  Clone ID: LIB3272-001-P1-K1-A6
gttcttccttgcatggaagtcagctaaacaacaaacgacaaagaggagatggttatactacaagtttgaatggcaatggcttgaatgctgttcacattggtaaagatgatctccgatttaaactcatgcaaaagaatgtgtttagacgggctcagagtgatgaaaacaggaaggacatggaccttcgtgaaaagttgtcaagaatgggacagccttacgagacacatcaaacatctgagtcaagggagcgaatacctgaaccaagggagcgagtgctggagtctagggaaactagcatcttgggcagatttccttccacaagaagtgtggatgatttgcctcgtgttaccacttcaagaagttcttattctccttggactttagatcatttaaggcaacgatctccagacagagt

SEQ ID NO: 43210 - DNA, 412 bp, Gossypium hirsutum
  Clone ID: LIB3272-001-P1-K1-B9
cgtaaattcagttatctactccccaaaatgagttgaagaatactactattgtgggagtggagatggcgtggagatctcccaactttttcctaaggaagcaccgaaaatggccgcttatttcctctcacaaaactaaatggcgccaagctttcacccaaaatcaacccatggtatccttcaaacaactcgttgcccggcataaccctcttcaacctgactttgtcccctctctcttacagtctcttagcctctacaaccttcaccaatcccctcaagcctatcattttctcatcaaaaccttgctccataatagacaattccaccacattccttccctgctccatcacctccaactccaacactttcaaacacccgagtacatttttacccacctcgtcaaattctatggcaa

SEQ ID NO: 43211 - DNA, 411 bp, Gossypium hirsutum
  unsure (1)..(411): unsure at all n locations
  Clone ID: LIB3272-001-P1-K1-C2
gggctttccaagttcctgtttgagtgcaattatttgcctttacctgattctggtctggatgatggtttggtgacgcccgactcggtccttgagccgtcttgttccaccaaaacgtcttctgggtctggtggatacgatgaagtgtggtgccgggcacttgcttgcaccgctgcaacgtcggagattgtgaggaagaaaaggacaagcttgacagcatgtcgtccgacatgtcctccggtatccgaagtttcaggaaatttaatgaaccggagaaagaaagctccacaacgagctccactgtattgaaacttgatttcatctatggaagtgagagaggtaaggggagattgtgacattgntggtatttatatatatttcattttcaggcaatttacggatgaaatctcccag

SEQ ID NO: 43212 - DNA, 412 bp, Gossypium hirsutum
  Clone ID: LIB3272-001-P1-K1-D4
ctttgtcatctcaaaccctagatcagggtttaaagaattttttccttttttttttcaactaaaattcccctcttgatcttcttcgattattatctttttattgtggctgaaaattacggaaaaatggcagcccaagcagcagcaaccactttcaatgggaacttaaagaaagcacttgctggtctgaggcgaattaatctggaaggtctgagatggagagttttcgatgctaaaggccaggttctcggaagattagcatctcaaatttctactgttattcaaggaaaggacaagcctacttacgctccaaatcgtgatgatggggatatgtgcattgtgatcaatgccaaggatgtatgtgttacagggagaaaacttacagacaaggtttattactggcatacaggctatg

SEQ ID NO: 43213 - DNA, 410 bp, Gossypium hirsutum
  Clone ID: LIB3272-001-P1-K1-E8
gatcagtgaaactgaagatctagggttttttattcagaaaattaaaaatttacaccgaaattgaactggtttgagtcgactcgtattgatagataggtgcaactcgaccatgtatagtgggtccagtgatggcgagagccacgaagccgccgctcaacggaagatcccaccggtttcgtcgatgctttgggttcgaaatcttcgccggtacatcggatccggtgctggactcggatccgaagccttaatggagcttgaaacaaagaggatcttgcttgatatatttaaagaaaagcaacagaaaagcgccgaagctggtacaataccaagtttctataagaagaaacctgaggaaggatccatcagtcatagggttcagaagctagcaaaatatcgttttctaaagaagc

SEQ ID NO: 43214 - DNA, 305 bp, Gossypium hirsutum
  Clone ID: LIB3272-001-P1-K1-G11
ggggcggccaaaaaccattggaatttttttttatactaaaccccatttgttttttatgacaacttttgccggtttacaggaaaaaagaaaaaaattttcccttaaaggatctaacccatgttttataaccccaaaaattttttcctccccaaaaacccatttttgaaaagaaaatttggcttaaataaaaaagagatacccctttccttgggtggattttaaaacagtttggatagcaccagttttgcccttgcctaaggggggggccccaaccggggcatttgcataaaatgcaaattggtttg

SEQ ID NO: 43215 - DNA, 189 bp, Gossypium hirsutum
  Clone ID: LIB3272-001-P1-K1-G2
gaactaagacggttgcttttcctcttgagatactgaaagactatgtgtaatgacaaatggagactttatgcacagcgcaaatgattatgctgaacgtttgagttcgagcgctacattgttaattccattcgcatattgaatggttaaggctgattgtgcaaagtgatggtattgtgttacacagcataa

SEQ ID NO: 43216 - DNA, 409 bp, Gossypium hirsutum
  Clone ID: LIB3272-001-P1-K1-G7
aaaaatgacaacggattggaaaactgttcgattgttccccattccctctgtcatttacttaatccataataatgtccagtttgctactcttatgtatctcgatacttcgacgtatcagattatgggcaatttgaagattgtcactactggaattctattcagatgagtttgttgcttgatttaggttatttcttaagaagaagctatctaatctgcagtggatggcgatcattctattggcggttggaacaaccatgagccaggtcaaaggttgtggagaggcttcatgtgattccctcttctcagcaccaattcaaggatacatgttaggaattttatctgcttgtctttccgcattggctggcgtgtatacggagttcttgatgaagcaaaacaatgatagcttata

SEQ ID NO: 43217 - DNA, 326 bp, Gossypium hirsutum
  Clone ID: LIB3272-001-P1-K1-H8
ccgcgtccgtccgattccggtcgcccacctcgagaagcagccatagtttggagagacaaatggttctaagacagttcatgcctctttggactacattcttttttcctagcctgctgggtttgctcttacccccctaccaatgccacccacccacaccccctctactcattcacaggagggccctaggatccctcacatagcgttggccgagtcttaacctatccatgcaccgtgttcaccccatgtgccatgctgtccctctaacggccttggcacctcgactggtgatcctttgcaccgatatcagagcaaacatttagcataac

SEQ ID NO: 43218 - DNA, 180 bp, Gossypium hirsutum
  Clone ID: LIB3272-002-P1-K1-A10
gattccaaatttttcccaaaagatgcaatttttggggaaaccctttattggtaaaaccttaaccttgggggtgaaaggtcttgttcttttggttatggtaagggttaaattcaagaccaaagaagggttccttctgaccaaacaaaggttttttttggccgaaaacaactctggggttgg

SEQ ID NO: 43219 - DNA, 314 bp, Gossypium hirsutum
  Clone ID: LIB3272-002-P1-K1-A2
gggcggaattcggtgaccacgcgtcgacttcacccgccgtgatttgatcagacgatatgccgatcagaaacatagcgggcggcgaaactctatcaatgcttagcagtagtggttatatcaacgtatttgtttgtggatctggtagctggttaatagctgccgcggtcacactcggtggttgtgcgctttactacggattgcctttgcgtgctatcgggtacattcggggcatgtgaatcgcgtacatcggttcgtggcggaacattactttacgggatcttatggatgtaactctggtaacgcgttgctgtact

SEQ ID NO: 43220 - DNA, 420 bp, Gossypium hirsutum
  unsure (1)..(420): unsure at all n locations
  Clone ID: LIB3272-002-P1-K1-A3
attntttctctgattaccttctcttttcttctatcattctagagtttaaacaatggaatagaattgtctaaccatgtgtattgctgctttcatttggcaagctcatccactctaccctcttctgcttttacaaaacagagatgaataccacaacaggcctacgaaggcacttgcatggtgggatgttgatggttgtgagatattaggaggaagagatgaagtagcaggagggacatggttggcttgttcaagacaaggcagagttgcttttctcaccaatgtcttggagcttcatccccgtcccgacgccaagacccgcggtgatcttccacttcttttcctggagagcacaaagagccccatggaatttgcggagcaactggccaccgatgctcatcagtacaatggatttaacctcat

SEQ ID NO: 43221 - DNA, 178 bp, Gossypium hirsutum
  unsure (1)..(178): unsure at all n locations
  Clone ID: LIB3272-002-P1-K1-A7
aaaaaaaccggaaggaacccaaagagnnaanacccgcaaagagcaccangagganccanccgnngccgaagaaaaggaacancaccanccaanacgagaagaacccaaggaccacaaggncncaagcggagacccnngggancggcgggnccaacaagaagcnccggaggggacccca

SEQ ID NO: 43222 - DNA, 253 bp, Gossypium hirsutum
  unsure (1)..(253): unsure at all n locations
  Clone ID: LIB3272-002-P1-K1-A8
caaaggggnagnagggnnccaangggggccnganggnaacanggnnggacacgaggccaanggcaagnncannnggcaaagnnnngaccanccaacnganacacncgnggggggncaggcgcnnagaaacggaggggcgacaaagcnngngagccgggcnncngcncaaaacaangnngacggagccnanagcgnggnganggagccnaaacagnnggnnnngcagnacaagggaangaacncnccnaaacca

SEQ ID NO: 43223 - DNA, 326 bp, Gossypium hirsutum
  Clone ID: LIB3272-002-P1-K1-B3
atatgacatgatcattgcatgttaggcatgctctcaattacaaccgaaagcgctgaattggaggactaaaactctattaatacacaacccaaaactggtgaacattaaacgaccggtctcacaaccttaatatacatactttaaatacattctctattgtacaaactcgggccaaaacacatgtgggttttaccttatttaaccattttacttcttaacgtcgcgtggtcgtatctgacacaaatgtatgctatagctaacatggcaaactcaactttgatgcatggaaaatactagctgatgcgtatgttaacacaaataaattt

SEQ ID NO: 43224 - DNA, 272 bp, Gossypium hirsutum
  Clone ID: LIB3272-002-P1-K1-C2
ccggaatcggcgacccacgcgtcggaggaaaactgggcaattgttacctgtttcttcgcaggaatggaaacttgtttcgagctgtactatcgtatcttcgaaaccctatcgtactggccttaaatgttgggcgtgccaaaaattgtacaccatttatgatctgggtcaaaggcagtaggaaaaaaagtataaaagctgaattaaatatcaataaggggaccccgaagttaagacgctatctataagttaggccaaaaaagactttgacattg

SEQ ID NO: 43225 - DNA, 421 bp, Gossypium hirsutum
  unsure (1)..(421): unsure at all n locations
  Clone ID: LIB3272-002-P1-K1-C7
caggngagaaaaaacccggtcgacttacgcgtccgcttcattcatacgaaagctaaaacagcattgcctcccttctttatgcgggtcaggcgtgattcttgtttatttcgcaattaaaaattcattgtcaggctggtcttgtaaaggaatgttataagctttcaatataaacattcagaatgaagaataccaaagcgacaactctaagccaacccttgacaaaaaaatttcatgtcgatgattatttgtcatcatttggggaaaaatgtggaacatatgggattgacagtgctgctatcgctgctgtgattgtacccatattgctttcctctatcatgagaaagaaaaaggggaaaaaaagaggagttccagtcgaagtgggtggtgaaacaggttatgctgtgcgcaatgctcaaaccac

SEQ ID NO: 43226 - DNA, 407 bp, Gossypium hirsutum
  Clone ID: LIB3272-002-P1-K1-D1
catcttcttcctccatctccgctctttccctgttttacaagcagcaaagctacacttcaacaatggaagatactaaaatggaggactcatcaaatcaaagggaaatgtctcacgaagaaatgcctgaaacacacagcaagggtggcctcattaccatgcctttcataatagcgaatgaatcatttgagaaggtggcgagctatgggctggttcccaacatgatactgtacctgattaaagattatcacatgggagttgctaaaggcaccaatattctctttttctggcaagctgctaccaattttacccccatattgggtgctttcgtcgctgattcatatctgggtcgattcctaaccatcggcttgggctccatttgcagtctcttggggatgatacttttatgg

SEQ ID NO: 43227 - DNA, 411 bp, Gossypium hirsutum
  Clone ID: LIB3272-002-P1-K1-D2
attttcttctctatcttaaaccttgttgttttgttgcaaaagatgagtaacaacagcattgcagaaagctcaaacacccaaaacccaatcctcaaattgctagattgttcccttagggtttcagtgattccactaagtgttgcaaccatttggttaactgtaactaacaagcaagacaacagcatctacggagatgtcaaattcaacaatcttttgggtctcaaatacatggtttgcaccagcgccatatgtgctgcttatgctttatttgctgccattgcctcttggatcagatattttgtcactaaagcttggctcttctttgtctctgatcagattgtagcatatttaatggtgacatcaagggcagcagtgatggaaatattgtacttagcatataatggggacata

SEQ ID NO: 43228 - DNA, 157 bp, Gossypium hirsutum
  Clone ID: LIB3272-002-P1-K1-D5
ctagattctataagcatttcccacttttttttttgtaggctatggatatatatatatcgagtgatttaagtattggagtattggcttctatgtaggaggtagttgcctttgtacaatgtaattctgccttttttaactttggtagaatttttgggtc

SEQ ID NO: 43229 - DNA, 394 bp, Gossypium hirsutum
  Clone ID: LIB3272-002-P1-K1-E1
gcagaaagggaaaattagaaaccctaaatatctgcccctttattcagtccaccattcagccaccactccaccactgggatcgatggacgatggtctatggtggttcctttacttctatgttcaaggttcgtcaattttaacctcaaagtcccccccaaacttcgatgacaacgaaggagatggggatttcagtggctcattcacgaaggtatggagcgtgtgctggcactcggagtagggtgcacagaggtcgctcgtggtggtcgtacggtgctgggggttggggtttggctgcggcgcaaaggggagaaaccctagggtttctttttgtgctttaattttgggccatttgggccttgtattactaagctaggttttaggtttaaagtcgcat

SEQ ID NO: 43230 - DNA, 408 bp, Gossypium hirsutum
  Clone ID: LIB3272-002-P1-K1-E4
acttcagctgccattttcttaccctttgtactgttcgaattcaagacataataccccatgaattttaaagaaacccaacaagcgacaacatggaccgatgaagaagacaaacaagcccagcaatatgccatgcaactggttagctcatcggtggtgcccatggtgttgaaagcagctattgagcttggtgtgtttgagattatacaaagagctggtcctagtgcgcttctgtcaccttcccagattgcatcccaacttccatctcagactaatccaaaagcccctttggtccttgatcgaatcctccgccttctagctacccactccatcctcacttactctcttgtaacaaaccaagcagatggccaggtttacaggctctatggtttggcaactgttgccaaatac

SEQ ID NO: 43231 - DNA, 239 bp, Gossypium hirsutum
  unsure (1)..(239): unsure at all n locations
  Clone ID: LIB3272-002-P1-K1-E7
gggannngcgggnggagaagacgagagcncancncncngcnncaaagcggcgggccgggnagaanncncgnacnacccccgcgnagnngnacnnngangaacaancgccanggcnncaaagcggannnngaaggaacccaaggannngcagaaagaaccacccacnncnnngagngcnggncccagagcngaagacangnngcannggcaagcaacaancangggacccncaganagcc

SEQ ID NO: 43232 - DNA, 374 bp, Gossypium hirsutum
  Clone ID: LIB3272-002-P1-K1-F1
ggctgccttttgtccaattaactccatttctcctcccccaataatccctctctcatttcccgatctgctttagctttagggttctccacaatattcaattttcccttttttttaaagaaagaaagatatactttgttttctaattttcttacatttattcgtcgacgaacaagcgatttatctgtgctttgattctgatctctctagggtgttaattcatcgatcatgacgattccagattcgggatgcgtgatggagaacggcgcgagttgcttgccgtgcacgcccgaagaagagaaaaagatcgttactgatttaagaaacgaatccgaacgtaatttgaaagaaagcaacttgtatttcgttatttctag

SEQ ID NO: 43233 - DNA, 367 bp, Gossypium hirsutum
  Clone ID: LIB3272-002-P1-K1-F9
ggtaagtccagggtatgcgttacaggagccgctggtttcattgcctctgactggtcaagaagctactggagaaaggatataccgtccacgctaccctcagaaatttgggcgatgcttcaaaggttcaactccttaagagctttcctcatgcggacacagaattagttttgtttgaagctgatataaacaggccaaatgagtttgagcaagctattcatggctgtacgttcgttttccatgttgcgactcccttgcaaccctctgatgcttctcagtttaaaaacacgagtgaggctgcagtttctgcaataaaaagtattgcaaagtgttgtataaaatcaggtagtgtgaaacgattaatatacac

SEQ ID NO: 43234 - DNA, 375 bp, Gossypium hirsutum
  Clone ID: LIB3272-002-P1-K1-H11
gagtggttggggacaagaagattatgatcgggattaacggatttggaagagtcggacgtttagttgctagagttgctcttcacaggaacgatgttgaacttgatgcagctaacgatcccttcattcccatcgattacatgacatacatgttgaaatacgacagcaatcacgggcaatggaagcactatgatcttaaagtaaaagactgtaaaactctgctgtttgaaaaaaaacccgtcactgatttcggaatcaggaaccatgaggagatttcatgggctgaacacggagctgctttcgatgttgagtcaactggagtgtgcactgacaaagacaaggctgctgctcacttgaagggtggtgctaactaaagtg

SEQ ID NO: 43235 - DNA, 419 bp, Gossypium hirsutum
  Clone ID: LIB3272-003-P1-K1-A6
gaaccaaaagctatatctgtcctcacagacaacatgatgcagaaagctatgatggctgctacttcaagaactctgctttctgtctctcttctttcctctcccaaacatttctcttactacccttttctcaaaccctctagggtttttcgagggtttaaggctttctgcagtgccccatccccaatccccaccaccgttgatcctgacgacttgaaacactccatgctacttgaaaggcttagaaccagacatcttagacattctacgaaactcccatcctcatcaccctctaagcctccacaaaacctgcctgttttgggtcaagagaccgaggcttatgataaggggaaagggaagaagaagaagaaaattatggccgatagttttgaggagttgggtttgagtgaagaagtgatggg

SEQ ID NO: 43236 - DNA, 311 bp, Gossypium hirsutum
  Clone ID: LIB3272-003-P1-K1-B5
gttcaatgtgatctgcactcgcacatggattatacaacacctacaatactgtgggggcgcttacgacatcaacgcacaacgctagcttaaaaaggtaatcattttaaaattgctgaaccgaaactctccttgctgacagaaaattagggaatgctgagacatctagctgcgcctcctaatgagttatcttttctgtttaacggtcgttccactcttaaaactattctatcggaagtatgatcctaacctagaaagagcaccgtacgtcacttaaagttttttgcgcccccaacgccccttgtaaattcaga

SEQ ID NO: 43237 - DNA, 417 bp, Gossypium hirsutum
  Clone ID: LIB3272-003-P1-K1-C11
tttcgataaaaatatatatatttttttctcaccattttcctcttcttccctggcatttttctttccttttaatctttccttttctcttttcggaaaactcaacgacgttggagtatgagcgaagaagagtgggtcaaagaagctttgaccgattccatgttggcggcaaaggtgttactcagcctctaccaagcgtcgtctccgccgccacggtcagacagtgcttcctcccaggctttgcaagtcgagtggagtgtccgtcaacgtcggtctaagcaatctcttaagaagaaaagcgaaccggcacgagccagtcccaccacgccgctttcttggagtggtggcatttctgttagtggaggcggtagtgctgacggatccgaggagtctagccgtcctcctttgaagccggttgat

SEQ ID NO: 43238 - DNA, 376 bp, Gossypium hirsutum
  Clone ID: LIB3272-003-P1-K1-C7
cttccagcagcagtttccttggggcctatgcaacctcctgtaattcctgattctttggctactttgtctcaatatcttagccatatgaagcatgaatttgatggcattgcgaggaggagtggagatagagattctattcctgcatcaaattcaggaactatacgggaaggtcttccaacacctgcatctttggctgaagtgttacaatctaccaggcaaatgctcattgatcaagctggagaatgtctacaacaacttgcaaggcaactagaggatcaaatgaatgtgaccgacacctcagcacgaatgatcgctcagtcgaatgcatggagaattggagttctgctacataacctaagctcacttttacttgagc

SEQ ID NO: 43239 - DNA, 409 bp, Gossypium hirsutum
  Clone ID: LIB3272-003-P1-K1-D5
ccaaaacgctgtgctcttctacgaacccattactcttcacttccaaaagagcctatcgtcccaatgaaggacagcgcccctactacttcatctaggccagccaagtctggaggtggcaagcagaagacgggcatctttccattatatcttatgctatatatatagtggggtcgatctctctgcttttcaaaagttaaatatgaagcggtggggtctctgtcgttgaaccacacaattccggagtcagggttagcgtggggagcaagcgaacaacacgggtctgtttgctcaactttgctaggacacgcacatatcttgctctcatattaccaggttgatcacttccttaatcacctacacttgcctgtgtggtaacggaacactatcagggtaggtactgctagtgtta

SEQ ID NO: 43240 - DNA, 422 bp, Gossypium hirsutum
  Clone ID: LIB3272-003-P1-K1-D6
ctaatacatatgtttttttgttatcttatattactacaagactgcagtagtttcagaagaccagtagtttcagcttggcttggggctttcatttgatttcctttcaaatttttttcctccttcctattatatgttttagttaacccagaaaggaactgagtcaaagtgacagtagcagtagccgcagctaagctaacagaaaactcgcaatctctttcagtatagctagcagattaatggcagaaggcaaaggagagccaaaaaaaaaaaagaaataaacaattctgcttgctgtgctgttcactaattggaaagccacccaacaaagatctctttctctttctttttatcttcttctgttacaatttcagagattcgaccccaccctttcccccttctctccaactcatataacacctaaa

SEQ ID NO: 43241 - DNA, 367 bp, Gossypium hirsutum
  Clone ID: LIB3272-003-P1-K1-D8
aaaaatctttccttccttcaaaaagccaaactctctcccttcctacctgccatccttcctttaaaaattaaccaaatatctctcaccaaaccctcccccatttcccttctcccttcatatatctaacatccttttttccccctcccatttcctccctcatttccatctccccccaaaatggaagcatcccctgctctttctcgcataggccttgccggcttggcggtcatgggccaaaacctcgctctaaacgtcgccgaaaaaggcttccctatctctgtctacaatcgtactacctccaaagtcgatgaaaccattcagcgagcccaagacgaaggccaactcccactcttcggtcactacactc

SEQ ID NO: 43242 - DNA, 293 bp, Gossypium hirsutum
  Clone ID: LIB3272-003-P1-K1-E10
ggaaaatcaaagttattcgctcctttgtctcagattcgagacgacaccggatgagtcggtatcactaggaaccacaaggcttacaacttttagggaagaagaaacccggccccaaatgggatagatgggcaacgctgatgcactcgtaaactacagtgtacggactgtatctggtacgggtaggaggggggatgatattgcttacacggtcagtgtgaggacgggaaaggtgatgaagtgtatgggctcaaaggctctggttgaggtatcgacaagacagggatggctgatga

SEQ ID NO: 43243 - DNA, 396 bp, Gossypium hirsutum
  Clone ID: LIB3272-003-P1-K1-E3
gggaactacaaccaatctctgggacagtttttcgttcggctaaggttcgcattgctgtgttcagtcaacaccatgttgatgggctagacctgtcttcaaatcccctgctatatatgatgcgctgctatccaggagtgcctgaacaaaaacttcgtggacacttgggttcttttggtgtgactggaaatcttgcactgcagccaatgtatactttgtctggcggtcaaaaaagtagagttgcttttgcaaagataactttcaagaaaccacacataatattgcttgatgagccatccaatcatcttgatttggatgctgtggaggcactaattcaaggccttgtcttgttccaaggagggattctgatggttagtcatgatgaacatctgatatctg

SEQ ID NO: 43244 - DNA, 316 bp, Gossypium hirsutum
  Clone ID: LIB3272-003-P1-K1-E6
gaaaaccggcgcgcccacacatccgtacaaccataatttattcttcaacttctttttcttctacactccctttaaaagttgttttttttcttcaacatacacaaaactaaataatgctcttctacaccatctctcaaattttaatcaatccataatatgaattttaatcgaacaaattattattaagataagagaaatggctctctctctctccaacactaatcttttctctactcttgttctcaatcgaatctctaaccttatcttcacactagtatattcttctccatcacaagaaattgtcttcaatgtaata

SEQ ID NO: 43245 - DNA, 372 bp, Gossypium hirsutum
  Clone ID: LIB3272-003-P1-K1-E8
taatttttcttcactctgttctcaagactttgaaagatcagttcttgaggcgggtcttatgatggatggagtttctcttaataccgatccggttgttgatgatgatgctgatgctgatgaatttgaaattgaaggagactgtggaatggccaaatgtattagttaaagtggtgtaatacaaggagagaatccgcttactccttgttgtcggaatggaatttgattcgtacgaggatgtatattactcttacaattgtaatgccaaggaacaaggatttggtgttagagtaagcaatacgttgtaccggaagaccaaagaaagatactgtggcaaactaagctgcattagtgcaggatttaagaagaagagtg

SEQ ID NO: 43246 - DNA, 422 bp, Gossypium hirsutum
  Clone ID: LIB3272-003-P1-K1-F4
ccttaacataatcatatcctctgctaaagcgttttttcttcactccatttctatattctgcaaatttccgcaccttgctatggatgagaggatgataggtgctgcacaaacaggagacataaacatcttgtacgagttaattctgaatgatccatatgttttacagcgtatcgatgatgtaccttttttccatactcctttgcatgtagcagcctctgcagggcatattgattttatgatggagatgatcaacttaaagccatcgtttgcaagaaagctaaaccaagctgggtttagccccatgcacttggctctgcaaaatcaaaaaactctagcagtgcttcgactcctcaggtttgatgaaggccttgttcgtgtcaaagggcgggagggcttcactcctttgcatcatgtggttcaaa

SEQ ID NO: 43247 - DNA, 187 bp, Gossypium hirsutum
  Clone ID: LIB3272-003-P1-K1-G12
cgacccagcgtccttttttatatacaattaatacccatttaaacccccacactcacagccagggcgaagcttttttcctacagaaaacttactctgaaccttatccaatattaaagaatcttcaatttataatactctgcccactaaactaccaagcctgatcttctatataatcgtctacagaaaa

SEQ ID NO: 43248 - DNA, 355 bp, Gossypium hirsutum
  Clone ID: LIB3272-003-P1-K1-G2
gacgcatctgttgttcatctacgaaccaaatggcctgctttcgatatcgaaacagcgcgctctcttactgctaacaatagtgctgggtgcatcaaaagctcaactcagtgccaacttttatgccaaaaccttccctagtgtgtccacccttgctagtcatgtgctctagcacgctcaagggaaggatcttaggctctcgactaataccggtccgcttcattaagatgcttgctccgatcatgggtgggacgcttcggtactgttaaaccccacggatggagcgaaaccggccaccccaaacctcacaactgggggatatgaacttatctacaatatcaaaccggcgttgccgaaa

SEQ ID NO: 43249 - DNA, 348 bp, Gossypium hirsutum
  Clone ID: LIB3272-003-P1-K1-G3
taaaaacttaaatattctctctcccaaaccaaaccttcaaatttcagcaagagagggagattgaacttacatagctcacacttctatcatcaatttaaggttatttaattatattcctcgtttacccgttaccccaattctacagatcacttcatattgttctattctttcccctgattctatcctctaagtttcatgtcttatcttgacatccatattactactgcctttgatccttttgctgatgcaaatgcttaatacacttttccttatgccaattgaattccttcacattcgtattcaacatctgaactatttgaaaagccataccacttttcatgcatataa

SEQ ID NO: 43250 - DNA, 394 bp, Gossypium hirsutum
  Clone ID: LIB3272-003-P1-K1-G8
gaagcagcatacacttactaagatgtatcatgtcggcgggagaaaaacccaggtcccttcttagttcttgctacctagactgaccattggagtgttaccacggtggagccattacttggcatgtgaagctgctctcctaatagttaaaaaggacagctcttgtatatgatcaacacaaaaagaaaaaaccgggtctatcggggcttccagctccataagaaggagcagcatttatacatcttgacaaacacatctgtatctatatctattgataaaggcgtaaacatggcgagccttcgctggggcgaaaatcatctgacacaaccaccatcggagaacactgaaaatccctcagaagcgaatgaggtgcaccttaatacttctgaaagacaca

SEQ ID NO: 43251 - DNA, 206 bp, Gossypium hirsutum
  Clone ID: LIB3272-003-P1-K1-H10
gacttactttctctctaaccgtttaatttattatagtactgacaaatcatggggagagtatattcataagatctgattataaagtacatgtatttacatattgctcattgtcttagttatagtgttcatggacacccttctgattcatacccttcacctccttactaatattcacctgctagtatttacccatcttaaggctatcc

SEQ ID NO: 43252 - DNA, 409 bp, Gossypium hirsutum
  Clone ID: LIB3272-003-P1-K1-H2
tatcctcccattttcttaatctagggtttctttcgcgcaaacagatatggcagacgaagcacagtactcttcaggtctcgatgccggcagcaacaagcgtaaatacgatgaccaaccccctctcccctccggcgctaggaggcctactggtttctcttccccagattcagctcctccttactacaacagcgttccgccgccgctcgatggcatcgagatggccaagcagcgagctcaggagattgctgctcgcctgactgcctacgtcgcctccgctggggccgagcccaagcgccctcgttatgaaaacggctccggcggtggttttgatcacgacaaggggtttagctccgctccttctgatgtaaaacctctttcgaattctgctccttcagctattaccggtttc

SEQ ID NO: 43253 - DNA, 406 bp, Gossypium hirsutum
  unsure (1)..(406): unsure at all n locations
  Clone ID: LIB3272-004-P1-K1-A12
gttttcctcaatttcctctcatctcctacaatttattatgtactatttttacaccgccattgataatatatataagtgtaattgcttttgatcactggttcacgagtagagtattgactgatagtgtttgcttagagagaaaaaaaaaaaggaaaaggagaaaaagctgtgctttgattttttatttggaggaatttgattagatatggttgagattcttggtgagattgagcctcctagccctgtttatgaggcggagctaccggaggaggatgaagaacaagaggagatcagctacgaagagctgaagaagcggatgtggaaggatcggttgcggatgcagaggttgaaggagacacgagagagttcaagttccgatcatcnagtcgnggtgaggcaagaagcg

SEQ ID NO: 43254 - DNA, 276 bp, Gossypium hirsutum
  Clone ID: LIB3272-004-P1-K1-C6
gatccgttggtgagacgaacgatgcttgccataaccacctctcacgcacatgacgtgttacgaagctaaagtaacatacgtctgatgagatgtgcgctgatcataccaacatgtggatgggtggttcatgttgatcaatgctcatcgtgtgaggtctgattgttcctttagatgtccactttatgacagcctgttccacttgtgacgctgcacatactatgccttatgaatgggaggataagctttgcgcaagcagaggatatgtcttttatttca

SEQ ID NO: 43255 - DNA, 419 bp, Gossypium hirsutum
  Clone ID: LIB3272-004-P1-K1-D1
caaatttagattataagtatgagcagcaagtgccctgattctccaatttgttcccaaaccaaaggaacactattttcaccaatatggacccaaatatgccgaaaaaaaacacaaacagctgttggacaaataaccatcaatgtggcatgcttagactctttcccttgtgacaaaaaaaagtgatcaaagctatgctgaatcatcttagcaaaatggatacctatcttaatgtgaaggaaccattgagctttggagaaggaagttcagattagagctatttatctgaagtttggaattaatgcctaaactacatagtcatggttgtataaagttaaattacaaacttagggcatatctgtttcccattaaagcatcatacacttgtttcataatactttaatattgatcttaaactggaa

SEQ ID NO: 43256 - DNA, 418 bp, Gossypium hirsutum
  Clone ID: LIB3272-004-P1-K1-D2
ttcatgcaaaccatgtgctacggaggtgctatgactatgacggctccgccggcgagcggaggctccgcgtttgcatatactattaaggatgtgatgctcgagagagaaagcgagctgataatcgaggtgtgtaatgaaacgccgcttaaacttctattactaaacgggtcagccgagattctggtatgctaattgtgcccctgagatgcgaattactttccccactcacctgaaatgtcgctagttgacacttcgtatggtgctacaatctacatggatggtgctactgaagactgattatacagcagatgagacacctatggtcagatacgtgaatgtacatgctgtactacaaggactaataagccgttctgaagctcagtcaccaaatgactatgacgcatactagggacccaga

SEQ ID NO: 43257 - DNA, 255 bp, Gossypium hirsutum
  Clone ID: LIB3272-004-P1-K1-F1
gcgaaacgtgttgaaagcctgctggcttttgccccccgcagagaggtcggttttactagctactccttctttacctaaccaacttctggatcatgagcttcccagggggaggcctttcctagatgtgaagcaaccacaacacaagccattccatgcacaccgaccgacaatacacactggacctgccggtctaggtcaggagccaccacatggtgaaacacctactcatagaaacttattgagtgtggaagttgc

SEQ ID NO: 43258 - DNA, 411 bp, Gossypium hirsutum
  Clone ID: LIB3272-004-P1-K1-F10
gtcgtatattgctggatggcattgtccctaagcatgatgcacaaatacacagagatagacccaaacgccggctattttatggcatttcggagtgtaggaatgaaacgggccaggtatcttgtagcgcttggagctcttaaggggatgaccactgtgcttctggtaggagcccttgggcaggcacgatatactactacatattgcacgagcacacatgatcccaccatggttcgcgcttgtccacccaaagactggaacaccatataaatgcgacgcttttgatgaccatttcaagtggcctgattgcatttttgtgaagcttggatgtcttagcaagcttgctatctgtgagcactctattcatattcatgatgatggctgtagcactacttgtgaggagatactatgtga

SEQ ID NO: 43259 - DNA, 398 bp, Gossypium hirsutum
  Clone ID: LIB3272-004-P1-K1-F12
ctttgtatgtatctcttggtggaggaatgcttgtcacctactctttttttagttggtcagtccctttaaaactttctctcacgacacagtccagaattcacacactttcagacatacacagacctgtagaactgtgttttctctgtttatcccactccttttttctgggcaatggataaacataagtgtaagttgtgtttcaaaagctttgcatatggaagagctttgggtggtcatatgaggtctcatatgttgaatcttccaattgctcccaaacttgcagaacaagaacgatcgggattaccacgaccaacgaatcaactcagccaagagtcagagtcagagtcgggttcggcatcttattccgcgtcttcatcggaagaagaagaagaagggga

SEQ ID NO: 43260 - DNA, 310 bp, Gossypium hirsutum
  Clone ID: LIB3272-004-P1-K1-F2
gttcttgagattatttctgtttactgcaaggcctggcaacattgtatgcagccgtggactgcaaaaagagcatatcgccttgtttgtctttggggattcacagtgtgatcctggacataataactacatcgacacgattgctcggacatattattatccatatggagaaaccttattaaaatacccgactgggaggttttctgatggacgtttaattccagactacattgccgggtctgcacttgtacctctagttgcaccatatcttcaacctgggaatcatgagcttactactgatgtcaactttgct

SEQ ID NO: 43261 - DNA, 423 bp, Gossypium hirsutum
  Clone ID: LIB3272-004-P1-K1-G6
gaagatgctttgcaaggatgtgctaccactgtttgccctcccatcttcatctgcatctgtatctgtttcggttcctatttcagtaacatactacaaggatgcttccacatctgtctcatcttaccagactcacgaacacgggtttatagattatatttctttccaaatccccggtgactcttcctcaaatattgctaattgtataggcatatcaaggagattcatgcacagtttgagcaatagtagtattgaggaatctgcttctttggaagctgttttgctttctgttcctgatggttatcactgtgtggatctatctttatataaggaaggccaaattgttttgctattaaatgaaacaacttctgcttctgaatgctccggtgaatcttgtatgatgatcgtccaagctgatgatctccc

SEQ ID NO: 43262 - DNA, 425 bp, Gossypium hirsutum
  Clone ID: LIB3272-004-P1-K1-G9
ctttccagcaagcaagcaagcatgtattccacaccttgcctggaatcccaaatcctataaaccctaaattcacaatcacaaccccactttcacaatataccttactagagaaaaagagcccctattacgttcattgattcactatcattcctttgaacatcttagattatcttgactccaagtcattcacacaaccttaattagattcttaagttttcttacctgggtattatgcatagatctggagcaacgatggcctggaacgtcttcaagttttgtacagctctgaggggtctgggatcgatcatgatcctgttggttttaggggtcgtgggtgtctcatactactctgtcgttttgaccaattttggccctgctttgtacgatggtggccttgattcccttactgctgttgtcgtcttgat

SEQ ID NO: 43263 - DNA, 401 bp, Gossypium hirsutum
  Clone ID: LIB3272-004-P1-K1-H12
actacttcaatcttagagcgcacagatatgagatgtccgtgattgaaatttatgaccagtctcgggctgacaacaaagacgtttggaagcttgttcttggaaagcacaaccttacttcaccaatttctttattttctcgacctgaggtcataacaaaatcacagtcctacttttttactcattctttgaaagctatagctgtgacatctacggcaaagggtataacttccaagcagcttctccttggtacaattggtgatcaggttttggcacttgataagcgtttcctagatcctcgtcgaacagttaatcctacacaagcagaaaaggaagaagggattataccactaacagattcattacccatcattcctcagtcctacgttacacatgcgctgaga

SEQ ID NO: 43264 - DNA, 371 bp, Gossypium hirsutum
  Clone ID: LIB3272-004-P1-K1-H5
gattgaaatttatatatatatatatttgatccaagaacattaaaaaccaatagtgtatactaatgtcaaagcctaaaaatgaaaagggggagaaacggtaataactaatccatagtgtgggggagtgaaatctacacattctttggaacatggtttcatttgctcatttagatacctccattaaagtaatgagcttcttggacgaatcgggaccaataccagtgagatctacagactcggttcatctattctattggaataccctcggactcaggcaagaagttgtccacacagatcgacatttccaccacaaagattgcgaagaacaggaatagcccgaatttgaagtggcaaagcatggataagaacac

SEQ ID NO: 43265 - DNA, 425 bp, Gossypium hirsutum
  Clone ID: LIB3272-005-P1-K1-A1
gcctaaagcactactccttccagtctcaaaagatgcttcaactctccaatatctcactcaaatcaagcaaagaacccctttagtgcctatcaagttgacccttgatcttggtggtgaatatctctgggtcgattgtgaccaaggctatgtctcatcttcctacaagcctgcccgttgtaactcggctcaatgcaacttggctaggtctaaggcttgcggaagttgcttcgatggtcccaagccaggctgcaacaataatacttgtagtctcctcccatccaacagcgtcaaaaacagtggcaccattggcgaggttgcccaagatgttgtatccatccaatctaccaatggaaagaatcctgggaaagaagttacagtgtctaagtttctcttcacttgcggttcttcttttctcttggacggtc

SEQ ID NO: 43266 - DNA, 383 bp, Gossypium hirsutum
  Clone ID: LIB3272-005-P1-K1-A7
ccgggattcgcgcctcgccccacgcctgcgcgcgtgttttaatagatgttctccccccttttccttttttctctttctttgctattatcaatccttatcttcttcttcatccaaacgaacccattaacacatacttcttttttcccttggatcaaactttgttttgaaatcttctgggttttgcatgaaaatagtgttttcccaataagaatcatctatgacggtggaaactggtggattggtggagcaaagcaaaaataatatcacgacgactgtaaagcatgtaaacaacagggttaggtatggtaacaagacggagaagaagaacagatcatataagaagatgagaagaggaggttgtgtttccaagagttccggatgta

SEQ ID NO: 43267 - DNA, 137 bp, Gossypium hirsutum
  Clone ID: LIB3272-005-P1-K1-B10
ccgtttgaatggatcattgtagtctaggctagtcagcaaacagaatccgtgtcctggggaaaaggaacgactctgaggactggacacagcagtaccagtccaaaaatcttcggctgtctgcgcacgtgtaaagctgc

SEQ ID NO: 43268 - DNA, 406 bp, Gossypium hirsutum
  unsure (1)..(406): unsure at all n locations
  Clone ID: LIB3272-005-P1-K1-B4
gaaatgattcttgtttacgagtatatggctaatggaccccttagaagtcatctttatggaacaaatctacctcctctgtcatggaagcaacgacttgaaatatgtattggtgctgctaggggacttcattatcttcacactggtgcagcccaaagcattattcaccgtgatgtgaagacaacaaatattctcttggatgagaattttgtagccaaagtagcagattttggtctttcaaaaactggtccagctttagatcagacacatgtgagtactgctgttaagggtagcttcggttaccttgaccctgaatatttccggaggcagcaacttacagagaagtctgatgtgtattcatttggngttgttctgatggaagttctctgcactaggccagctttaaatc

SEQ ID NO: 43269 - DNA, 391 bp, Gossypium hirsutum
  Clone ID: LIB3272-005-P1-K1-B5
atcaaatcttttgttttagataagaactttgctttaagaccaaatttttatttttggaacacaaataaagggtctttcttttttctcttttttacagtggggttgtgtttgtgtttgtgaatttggagttggtttagaggctgaagaaaagggtactaaagaaaattgggtgtttttgagggagagaaatggaggggaaagtttgtgattttacagtgttctgatagattgaagaaaaggatatccaaaaaagtttgatttttttaatgaaagatcaaaggtgcaagtaagaattgattccaaacccctttctatatctttttcgtttcattttcctagaaattttcagagagaaaatatggcaacgcttgtggagccaccaaatggggtg

SEQ ID NO: 43270 - DNA, 425 bp, Gossypium hirsutum
  Clone ID: LIB3272-005-P1-K1-B9
gaaaatccaggcggcttgctgtcggagttgacggctaacaaaaattcatcccacgcccccccttacgaagatttcgaagctgctcctagaaaacagccacaacaaactcccccaaaacaatatcccgattagagaaaaaaaaaggagggaagatgggcgtgaagcaagctattaaaaatctggatgcgttttcctcgcgcggaggaacatctgctgcagaagacgcaatcgggagcattagtgtccatcgttggtttagtgataatgaccacgctgttctttcacgagcttacctattatctttcgacgtacactgttcatcagatgtctgtagacttgaaacgtggagaaacacttccaattcacattaatatgacatttccttcattaccttgcgatgtattaagtgtagacgccattgacat

SEQ ID NO: 43271 - DNA, 241 bp, Gossypium hirsutum
  Clone ID: LIB3272-005-P1-K1-C10
aaccatactcactgaagctcggctgtgattgcgccaaatctcgttggtttgagtataatgaactgaagacactcagaggcgtgaaagaagagggccaggtacgtcacattacgtcgttctgttgttatctactttgctccattagctggtagatgtgtatatgatagagaccgagctcatgtccgtaagctcggcggattttagggctatacgacttacaatggctctaagacagctgttg

SEQ ID NO: 43272 - DNA, 407 bp, Gossypium hirsutum
  Clone ID: LIB3272-005-P1-K1-C12
ctctctttagcactcagttatttggtttcgtctcatacattttcttttttctttttcgcttttttctctttggctgggcccgatctctgccacagccagcgatatcaacagggctgcaactgcttattatattaattcctacccttaagcgccgagctccctactctcaccaaatgctcccttcttttcccttctaataacctctctttgctgcttttcttttggcctttttttttcttttttttttctcttgctggttatggcggaggttttagacgacggtgagttttggctttcgtcccagttcttaaccgacgatgattttttcgccgacggagttaagactaccaacgataccaatagtcttaaagatgggttcgggttagagcttgatggtaacaagtctt

SEQ ID NO: 43273 - DNA, 307 bp, Gossypium hirsutum
  Clone ID: LIB3272-005-P1-K1-C2
aatgctctcaacttcctttcctgactgtctcgagacacttcttcctcttttctgttcataaacacttaccctctgttgcaacccataatcgtcgagatgacctgcagagtcaccagcttaagccctgggagggctagtctcctttggaagatgcgcggctttttgaccaacaagcgtagtcctaagaagcttgggtgtaggcacaagagatcgggttgcgcgccaactaaaatgcccgatggtgctgagactctcgacactgagaggaaaagttgcccgttctttgcagcggtatgggtgaggatcc

SEQ ID NO: 43274 - DNA, 317 bp, Gossypium hirsutum
  Clone ID: LIB3272-005-P1-K1-D11
cgaaatgaataccaatactgttaacggttttactactccggaatggacgcacagcacgggccgtttttatacccaaggcgcttagccgccgatccgggcggaagacttgcaggaaggagtttggtccgcacacatctttaaaagatacaaaggtatctaagatagctcatcggtcagacatctccgcgaacatagggtgaaagctcattcgatttcatgcagctcaatcgaccggaaagctgcctataatcatttagaccttgctattgaatctagaggcgtagactagtaccacaggtgactgcttgatgcagcca

SEQ ID NO: 43275 - DNA, 421 bp, Gossypium hirsutum
  Clone ID: LIB3272-005-P1-K1-D6
ctcttccaactctcttaaaactcaataaattttcttcttctttttttgttttttgttgtatttgtattctctcatcaatatcctttgcatgtttctaccaatgtcttctctcaaaacccttgctttcctttcaatctttcttcttttgcatcttaagattgccaaaactgactttctatccccacttttatcacccttatttgatgatgtatgcaaagaagtggaatgtggcagaggaaaatgcaagccatctattaatggaacattgcctttttatatatgtgaatgtgatcctggttggaagcaaaccttttctgataaagatgatcatgctcatctcaagttcctcccttgcattgttcccaattgttcgatgaacaatgtttgttcggcagctccatccccggcgcaagagaaggca

SEQ ID NO: 43276 - DNA, 343 bp, Gossypium hirsutum
  Clone ID: LIB3272-005-P1-K1-D9
ggttcacggtcattgcactttgttttctcttttgtgaatgattatggaagcctatccgatagcaattcctgtgcgagcttctaaatgatatctggttattagtgttgaacgactacacgataattgaccgaaacgattgaaatttctaccactcattcttgaaccattgctttatcaatatttgaggttaaactgcctgtacacaatagtgacatttaattactatgtagggtacatcatgcagaagagcacgactacgcatcgtaataagacagatgcaatccatctgtatttactattaaatatgctcatggggcttgcgtaccacgttggactaataact

SEQ ID NO: 43277 - DNA, 325 bp, Gossypium hirsutum
  Clone ID: LIB3272-005-P1-K1-F3
ctttaaggtatgagacgattgttccttcaaaaaccatatacggatccatatatggacgagaaagcaatcgagtcctttcaatgctgagctcagaagaagacggcggtcgccgcaacgcactgcaagaggggccgagctttgatcaaaaccaacgcctgccccattgagctagtcgagcccagaatactccattttaaggccggcgagccaattattctaatctgtcgatagcgtaccaactgcgttgacacgaggatccgtgtcaaaggtggaggtgacactttttcagatcttcactctccgccaaagcatgtatgaagccctt

SEQ ID NO: 43278 - DNA, 420 bp, Gossypium hirsutum
  Clone ID: LIB3272-005-P1-K1-G11
ggtggcttgtgttgtgagtgttcgtttttgctgcaggcttcattgagatgtttgtttattgcatcaatctacggttggtactgcatctgggaaggttagacatgttaacggtgggcaatcgaattatatggattctaaatccatgcaggcatgtttctatctgtgaaatctgctccagaagagtagttgcatactgaaagaagttagttcagaggacgtggaggatccgagggaaacaggaactacaaattttattatggatctctcaaggtcgtaatatgcctacccctaaacatgattcaccctcttattggttactaattatggtgtagacggttcaatagtcaaaactgttgatgaatttattcctatttgtggttgcaccttttatagcctctttaattcaaccctcttattaca

SEQ ID NO: 43279 - DNA, 227 bp, Gossypium hirsutum
  Clone ID: LIB3272-005-P1-K1-G12
gaaaattgccagaggagtacatagtgtgcttttcaaaacacttaacactgacaggtggctgatgcataaaacggagtttgcttcacacttcacaggattgaagaaagatggggcacaatggtgggtcgataacacagacatcaaactttgtggacttgattacctatcaacttgtgcttatgttgatgctgccacaactcatcatatatttgtaatgaagagggaaa

SEQ ID NO: 43280 - DNA, 339 bp, Gossypium hirsutum
  Clone ID: LIB3272-005-P1-K1-G3
atggattaaggtgtcaagaaaagagaacatgagttctgttaccgtatcttcgactggattacttcacatggctgatgtcgagtgccataccaagcgatctaaatcaactttcggctcataccttctgcctcctgctcgatgacatcacatgattgatcacactgcttgtgtcctgatcggctgcggcatacatcccggatatgtaatgggtcttactttgcgaaacaccggggagcttgcaatcatgatactgtctaaagtccggggacagaccaccgtcgatcacctgaacgtaacttattctgaccaggaatttgacttgtacgttactgattcaga

SEQ ID NO: 43281 - DNA, 240 bp, Gossypium hirsutum
  unsure (1)..(240): unsure at all n locations
  Clone ID: LIB3272-005-P1-K1-G6
caaaaacagtgttcatcgcatctaactgtttgaaacctgttcaattcagataaagctaaagcattattcgagcctcttaaatggggaacgaaactgttcctaccatccactcactctttctttcgcatttttgactcgtccgcgcttggggtcgtatccacccggtcccctgctgtgctaactatngctcgcgtttactatggggtaaaagagtcgagcgttaagtctctactctggtcc

SEQ ID NO: 43282 - DNA, 399 bp, Gossypium hirsutum
  Clone ID: LIB3272-005-P1-K1-H1
ggaaaaatcaaggccaacgaagtccctggtctgccgggtgggtgatatcgatggcaccacgtccatgaactcgtagttcccggcggttagaccaccagaagaaccccacttggtcttgcagatcgctgcattgtagccgacctggcgaagattagccattactttacgcctgaaaatagctttatccgtcttgaaaaacgaaagcatttctattgcattcaaaacggtatccgcgagccgatttaagtaagaacccgtgctgttaagaaaggacgacttgatcatgatctggagggagtcagcagcatcaatgttggagtcgactagttcagattcggatcggtaaccggtttgttcagcggcaccgtgatcatctcccaagaaactatgaacgagttc

SEQ ID NO: 43283 - DNA, 301 bp, Gossypium hirsutum
  Clone ID: LIB3272-005-P1-K1-H10
atggagcttgcgtgtttgcctaaagaatcctgaacttgacttcatagagaaaggaaaaacttacgcagggagcaaccgaagatctatctgaacgggctgatctggctgtaatgacggagagaactgctcaatatacctgatcctgagatgctctgagaagacatcgaacactcagaccatcctatcccgagccgcgccaacgaagaagacatgtcgagtaccagaaatgggcactaccaaagcaggacatgcgtgcaattggagatcgagcatgaaatgctattcatacacctgttgcaaa

SEQ ID NO: 43284 - DNA, 418 bp, Gossypium hirsutum
  Clone ID: LIB3272-005-P1-K1-H12
ctagaataccgactcatcatctgcccttcaatggcggaccaaccacaaccacccccccaagtcctcttagtaacattcgcttctcaaggccacattaacccttcccttcaatttgccaataaactcatcaacaatggcgtccacgtcacgttgatgtcggcttcttccatgattcaccaattcaacaaagcttcacctgtccatggcttgtcctacgcctattactccgacggctatgaccatgcctttcaactttccggtgacacgaatcattacctttccgagacaaagcgtcacggtactcaatccttgagagagtttcttgctgatcaaggcactaggttcacttccattgtttactgtactcttctcccttgggtggcaacggtggctcgtgagtttcacatcccagccaccc

SEQ ID NO: 43285 - DNA, 336 bp, Gossypium hirsutum
  Clone ID: LIB3272-005-P1-K1-H2
cgaagttctaccgtcatggggtgaagacctgcaaggtgtgatcgtcagataaaaaacaaaccttacccgaagtcacgttattgacgaagcgcacctgatcccaagatgaggattgatgatgcgggaatgaaaaagaggggtgtggatgagttgcgtatctgagttcacttgtacttttgtgagaaggaaaacgtctgtagctaatctctggaatctgctcgtattagtcgccacaagtctatggctaaatatgctggacaggatgccttacacttgcgagttcgtgttcaaccaattccatggcttgcacttcaacaaaatgctttcatgtgcttg

SEQ ID NO: 43286 - DNA, 283 bp, Gossypium hirsutum
  Clone ID: LIB3272-006-P1-K1-A3
ctgagagaggtaaattaggttgttgaacaaggctaatttcatagcacaaaaaggtgttgaccctactgttcattggtttttcaaggccctgccaaacttaattcctttattaaggaccccttttccaaataaaacttaaaaaaaacccctgttttttgtttccccattttttcaaaccaaaccaccggccacttgtttaataaaaacaaaaccttccattaattaataaactcttccaaatgggaatcgtttaattcccagcagttatgaccagaatacccaa

SEQ ID NO: 43287 - DNA, 375 bp, Gossypium hirsutum
  Clone ID: LIB3272-006-P1-K1-A6
attgaagtgaactttctcgattttgtatttagccaaacaagatgcagatcttggtgaagactctaaccggcaagacgatcactctcgaggtcgagagctacgatacaatcgacaacgtgaaggccaaaatccaagataaggaaggcatccctccagaccagcagcgtctgatcttggccggaaaacaactcgaagacaggcggaccttggccgattacaacatccaaaaggagtcaactctccacctcgtcctccctctgcgcggggggatgcaaatcttcgtcaaaaccctgactggcaagacaatcactctcgaggtcgagagctccgacacgatcgacaacattaaagcgaagatccaagacaaggaaggca

SEQ ID NO: 43288 - DNA, 401 bp, Gossypium hirsutum
  Clone ID: LIB3272-006-P1-K1-A7
attctgccattcggcgggtgcattctgtggaaattatgctcggttcttgataggaaatctagtgttgataaaagcttttatttttggattttccagatttttaatacatacagcctcggcacttaacggcagatttctcagaacttttggctctgttttctttgttctattttcaccttttttaaaaaaaattattattatttcatttccttaaatttctaaaccggggactgagataatgggaggggcttcactgccaccaggttttcggttccatcccactgacgaagaactgataggttattacttgaaaagaaaaactgaaggccttgaaattgagcttgaagtgattcctgtgatcgatttgtacaagtttgatccttgggacttaccaaagaagt

SEQ ID NO: 43289 - DNA, 262 bp, Gossypium hirsutum
  Clone ID: LIB3272-006-P1-K1-A9
ataaaacaataaaaccacaaccttattacttatttataactaatctactttgtttattattattttttataacacctttaacacacctaataataactttatatatcatctaaattttatacatactttataccctaccacaccatatatatccaattaaaaataaatattactaccttctttacatactttaatcaccatttcacttccctaaatctacactctctatgactccatataaaaaataggttactcactcaca

SEQ ID NO: 43290 - DNA, 245 bp, Gossypium hirsutum
  Clone ID: LIB3272-006-P1-K1-B1
cgcaaaaccctacaattggactggttgtatttattgataccaaatcatcccgggtggctctcaataaaacgataccgtctaccgcgacaattcatttgatttccagtaagaacggcatttttaagcttaagtatccggttactgcaatttgtattttgttgcagggcatattgggaaggcattattggaagcatacaaaacatgctcgtcctgagccacccccggtagcacaacaacaacttaga

SEQ ID NO: 43291 - DNA, 366 bp, Gossypium hirsutum
  Clone ID: LIB3272-006-P1-K1-B11
gttacttcctcacaaactaacaatccttcaaaaatggctactcttcaactggcgtccatttccaaattttttttaacaacccacccaacacagaacgataaacattccaagacctatactatcattctctcccccaccaaataagttactgtccaaatccaaattcaattactcataaaacaaacttaataatgataataatagcattggacaagtactttccatcaatgacatatataataataaccctaccaagaacaataattattatatatgtctcctctaccaaacccgaaccagatatcataacatatacaaataataccccaacactactctaaacttaactcttcaacaaatttacac

SEQ ID NO: 43292 - DNA, 399 bp, Gossypium hirsutum
  Clone ID: LIB3272-006-P1-K1-B4
gaaaatggaagctagaaattttggtaaaagataaacacaacaactcctcccctttggctctctttcttgcttctgccaataattttagatcgaatcccaaacgtaactctattctcttttgtgttttttattagattatttttttgtttcgtttcttagaaggaaaaaaaaagtcatttataaagtcaagtgtttgggaactttgggttgtttacgaaaaagaacatgagcaaagagattgtaaaggaagaagcgccttcctcgtcccctgttgtttcgggtagctttgcttctctgagaagcgtccgatggcgtattagtctcagtattttgccttcttcttcttcagatgatgatcttcgcagggtaactgctgattctcgccgaagatatgctggg

SEQ ID NO: 43293 - DNA, 403 bp, Gossypium hirsutum
  Clone ID: LIB3272-006-P1-K1-B6
gtaccctacagtgacagcaatttattcttcttctttttattatatttgggttgtgtgtgacgtataagcagctaaataatcatcttctgctcttcattgattcttacaaatgctaaatctgctttgtttgaactctagttcttgcaaattgtagaactgaaagaggtaaaccatgaatccaacaatgttattgcaacaatggtggcaactgtttaattcaactgatgtgttcaaccctctcaccttagttcctcttctcctcaccattagttttctctttaagcttttaagaacttggaagctcaatctcccaccatctccacccaagctgcccatcattggcaacatccaccaagttgggaaatcgccccaccgatctttccgagccttgtctgagaaatat

SEQ ID NO: 43294 - DNA, 323 bp, Gossypium hirsutum
  unsure (1)..(323): unsure at all n locations
  Clone ID: LIB3272-006-P1-K1-C1
agaatgttcattcttttgggaaagtagtatttatggatacacaatctcgtaggtggttcttanatctgtgaaactgtcaacccacgactctttattggcgtttcagggaaaactcgcattgatgcgcttaaggatccaaataccgcaagatgcactgattgctatggcagattgattgaacagatcgagatatcaaaatgaagatgcacgtgcgattacacccgcggcagctcacgctaatcctagtcctggaaccgatcatctgcggctgggacatatgagagcaaggaatcggcctgctattaaccttgatatagggttag

SEQ ID NO: 43295 - DNA, 402 bp, Gossypium hirsutum
  Clone ID: LIB3272-006-P1-K1-C10
cacgtttcaatggcgttactttctctctcctctctcagtcctctcgctccgcgatgtccgtcttttcctttgcaacttcaaacgcgaatctctttctctcgtgccagaatcggagcgtcttcgacttcgtctccgtcgacttcgcaagtgattcagcatgcttcttcgaatccgaaagtcgtcgtcaccagggaacgaggcaaaaacaccaagcttattgacgctctggccgaacatgggatcaattgcttggaacttccccttattcagcatttacaagggcctgactcggataggcttgcttctgttttaagtgaaacggcgtttgactggattgtcataacttcacctgaagctggttcggtctttcttgaggcatggaaggcagcaagaacaccaaat

SEQ ID NO: 43296 - DNA, 339 bp, Gossypium hirsutum
  Clone ID: LIB3272-006-P1-K1-C6
ggtgagtttaccctttcttcctctgctttgatcttgtttttcatgtaaatcagagccccattttgtttatctgcctaaaaaattcatttcttctttcttaagctgcaaacgagaagttcaactcgatgatcaagacctttcctttttcactagttaatgtttgggatggttgaataaaatctccaaattcttgatcttaagtcgataatctgttgaatttcctgttggggtatcctttgtttaaatctcgaagcttttcagctggatttctgttatcatgaataactatccatttgggtcaaatagccctaagtccttcaatgcctatccaaggggggc

SEQ ID NO: 43297 - DNA, 365 bp, Gossypium hirsutum
  Clone ID: LIB3272-006-P1-K1-C7
atttcatactcatttagcccctctcattagcatccaaatcactccagttgtgggtatcactgaaaaatgtcttgctgcagaggaaactggggctgccgtactggctgcaagtagcgcaaaggctgaggaggatgcaagatctacccaaacctgaacgtcgcctggatgaccacatctgaaactctggttcttggtgtagcaccccagaaagcacactttgcgggagctgggatggaattcgaagctgctaaccgctgccagtgtggatacaactgcccctgcaaccctcgcaatcgtaaatgattagcgaccaaagccaaagctcccttgaagcacagacgcctttgtctttaagaaataatatg

SEQ ID NO: 43298 - DNA, 390 bp, Gossypium hirsutum
  Clone ID: LIB3272-006-P1-K1-D3
ccgccagggtttccaggcctttgggggagtccaatcggcccgtccgtaccgtccgtacacaaaacttattagatcccgaaccctcaaaaaagtttacccggcattctatccagaaaaaagaattgaagtttcatatgaaccaaatcaagctaaagaatttttcccccgatcccgcgatgatctatctgctttattttgaggtccccgtgttcaggtcatttacccacaacaccatattctctttgtacagattttttcgtgacgcggaacataacacactcaatttcataaccgcagtatgtactccttggaatttttgggaatataggaagaaacatatgcacgtctcaatgaaggcgttgaagaagaggtcaaagcagatttttaaag

SEQ ID NO: 43299 - DNA, 216 bp, Gossypium hirsutum
  Clone ID: LIB3272-006-P1-K1-E11
gaaaattgttgtcgtattagtatgttctgattgctttatctataatcttcctgtgccttctcaatttcggtgagcaaagtttcaatcgacaccacctccaattttcctttttacaaaaatggcttttactaatgaagggcctgcctggcctccttttatggtttcaactaatatactgttacaaattctggcttttgcattatataacaacttggg

SEQ ID NO: 43300 - DNA, 396 bp, Gossypium hirsutum
  Clone ID: LIB3272-006-P1-K1-E12
ctgcaatctatcttctaatttcgagtcttccttgaattttctttgccctgtggtgcttttaaagttcaccagtaccactctttatttttttccttcgttttcactgggaatttctctgccacaagtcgagatttcatttccaagtaatttgttttccttctttactggggttattctagtattcacttcgcaagatttgaagcaaaatccgtttccgtgtgatggatactcacgaccaaattgaagacaaaacatcgcccaatgcttttaaatctggcatatgcccccaatctatgacattgaaccagttgcaggagttatacacatttaatcatgatcacacacccaaggctagaaaaccctacactataactaaacagagggagaaatggactg

SEQ ID NO: 43301 - DNA, 402 bp, Gossypium hirsutum
  Clone ID: LIB3272-006-P1-K1-E4
gtaattttctttttatttatcgttgcccatttgttttcagtacacctcttttgtttttcttcttctttttctagtttcagatctttgcttttcttagggtttttgtttctgcttgcgttttaattccaaaaaaaaatagagatttaggggtttcttttggaattttcctgagaaaatggagaaggacaaatccccaggcttgccaccgccgtctggtcggtatactgggtttgcggccgtcgggaatgttttgaactcaactggatgttttggtcaaagttctgatgcgaatctttttagtcaggatattatcaaaatgcctgataatccaccaaagaacttgggtcatcgccgcgctcattcttaaatccttactcttcctgatgatattagctttgatag

SEQ ID NO: 43302 - DNA, 401 bp, Gossypium hirsutum
  Clone ID: LIB3272-006-P1-K1-E5
agcacgcatgggtgtctctacataaagagctagctcagcgccaattaaacaacgagtatcagtccaattttgcacacccaagctatctaatgtacaaaccagactggtactctccttttaggactcatatgtgaaaagtatgatcctacctgcacacaaatatgtgtttgctactgcatgcttgacaacaatctatcaaattcatctgcagtcaatcaactttacaaaggaaacaacacacccgcgattaatgctgatctatccaacatcaacaagcatatacacgctctatagaggctccaacatacaaataatattacgcgatcaaaatgatcaactacaaaaccttgctgaccccaacaaagcacaatcatagttccaatcaaagagctgagctcatt

SEQ ID NO: 43303 - DNA, 128 bp, Gossypium hirsutum
  Clone ID: LIB3272-006-P1-K1-F1
atatgacatcgttctatcatatcgaccactagatacaggcactgaatcagaggtggttaatgccgattaggtatcacccacatcatcaatgtcctatactggaccaggtttcgttgtatcttctctta

SEQ ID NO: 43304 - DNA, 404 bp, Gossypium hirsutum
  Clone ID: LIB3272-006-P1-K1-F11
gttgcagaaaactgcaaaccctaattatcaagaaaattgcattccctacaaaggatcttcatggcgaagaagggcaaggccaaatcagcaaaatttgagatcgaagagaacgaatcgggaccattagattcgaaaccattgatggtactaagcattagtgacgacgaggaagccaatgaagacctaagcttgaagatcgtggagaaagcactattggtgaaagcgacgaggtttagtgaaggatgccacggcgtttccgatgacccaggcgtcgtttctgtggtgggtttggcttcgtcgtcacgcgggggatctgatgtagctggtaccagtggtggccgtgaacaggcagatttggatttggaaagtaagaaaattgttagaaggaaaaagaagaaaacgaa

SEQ ID NO: 43305 - DNA, 391 bp, Gossypium hirsutum
  Clone ID: LIB3272-006-P1-K1-F4
gaaatagataaaccaatacactgagagaaaatattgcccacatcacccaaaaagtgtgtgtgacacgagcccgcggctaccttggctcttgcgatgtcaagcatgttttctacaacaactacacagttcacggcactcatagacaacctgggggtgccaaatatgcccatttgaatcaatttcagagagcatcccacaacctacaactcttgaaggctgatgttctggattacgattctgtttgatccgtcattacaggtttaaccggtttcttctttattccctttcccgttccttcaacataatttctaatccccaggaagaacttattgaaccggctgtctaaggcacacttaatgtgcttaaagcatgtgttcaatccaatgttaaa

SEQ ID NO: 43306 - DNA, 400 bp, Gossypium hirsutum
  Clone ID: LIB3272-006-P1-K1-F9
cgcagctttggctaatttcttgagttacgatgtttacgacattgatttgtccgaagtttccgatgactccgaccttaaacttctcttgttacaaagctcggccaaatccgtgattgtcatcgaggatcttgaccggtatttgtcggagaaatcaacggccgtcagtttgtcgggaattttaaactttatggacgggatgttaacctccagctgcggcgaagaaagggtcatggtcttcacaatgaacggcaaggatcacgtcgaccaggcggttctcagaccgggaaggattgatgttcatatacatttccccctatgcgatttcacggcatttaaaacgctggccaatagttacctggggctcaaggatcataagctgtttccgcaagtagaggagatt

SEQ ID NO: 43307 - DNA, 340 bp, Gossypium hirsutum
  Clone ID: LIB3272-006-P1-K1-G12
atcgaactctacttttcctttacacgttccttttcacgcacccttcacagttgtgtgcaaaacccacttgtccttttctatttaaatccctttctccgtttcaaactcaactcacggccaactctatcccatctgccagacctgccttttttccattcccactcttccaaacctcacacgttcagcacctaatttaccacatcctcttgaactactgctctgtgtcaccagcatccaacttcgatgtgaacaacgaggtggactcgatccacctcaagtttgcagaggcaccagcaccaatcccgatggcaatggactctaaaaagaccgtttatttcaa

SEQ ID NO: 43308 - DNA, 405 bp, Gossypium hirsutum
  Clone ID: LIB3272-006-P1-K1-G4
gccatctttagcttctaggctgagttcagatacaccaacgatatcagcatcacgcaggatcagtgtcggatcctccattgtcccctttccaaccattatcacctgatattgctcctttgttgccatctcctggtggagtggtgcctactactggctcatctatgccaaccatccctttcaccccaagtccccctaaccccgacgacttcatcgcccccggtccaacctccgcgttcccaccgttcggaccattgccggtttcttcttcatctccaatatttttgctttcgtctctacacttgacaactttttcggttctggtagtaccttactacttactgcacctactgtaaattcatttgttgattgtaatactttactctttaatttgctcatcttccttca

SEQ ID NO: 43309 - DNA, 403 bp, Gossypium hirsutum
  Clone ID: LIB3272-006-P1-K1-G9
gagaactatgatgatgggttcagagaaaatgaataaccccatggaaatagagggcaagaacattgagaagacaaagataagtcttatgagaatcttggttgaaaaacaagatccatcttccaaggaagttgaagatgggacattgagaagatttctaagagctcgtgatttagatgtagagaaagcatcaaacatgttccttaaatacctcaactggaaacgaaactttgttcccaatggttccatttcaccatccgaaatcaggcatgaaatccaacagaataagatgttcttgcaaggttgggacaagaaaggacgaccgatagcccttcttcttgctgcaagacatttccaacatgaaggcggtgtggatgaattcaagcgttttatagtctaccttttc

SEQ ID NO: 43310 - DNA, 263 bp, Gossypium hirsutum
  Clone ID: LIB3272-006-P1-K1-H1
gtgactaaataaaatactatctttccctaaaaaaaggttacctctcaccattagggtggggccaacctgttggaagggctcacccaccagagagccaggagcataccaagatctatatgatgatgctctgggccaccaatgagggtcgggccaaatccaaatactggtacttcttgaggaagctgcaaaagggtatcaagagcaatggtcaagtccttgccattaaagagatatttttgaaaatctctaccaagatcaaaaat

SEQ ID NO: 43311 - DNA, 276 bp, Gossypium hirsutum
  Clone ID: LIB3272-006-P1-K1-H11
caaaacacacggtcttgtgcaacatgtaagtgactgggaacacttcactctggggttaatcaactttttatgggaaccgtcccaaatttacttctcacagcataactgtggtcagtgggtttatgctttcgacctggaatatatttaacgtaataagccaattgtttactcatccagacatggacatgctagttttccgcatccccgaacttaccttcaaaggtcagttaaactcgggataaggattaggaacgatgcttcacgaaacaagtattt

SEQ ID NO: 43312 - DNA, 317 bp, Gossypium hirsutum
  Clone ID: LIB3272-006-P1-K1-H2
gtaagagtgacacacacactactatttgctgaaggggtaaatacactaatacaagcgctgttcgtaactcggttgcctaccgcgaaaggaaggtcttatgccaagaaggctcccattatatcaataatgcacgacacttccattgtgagcctagaacacaatcacgcgagattattaaacactatgaaagctttccaaggtccattaatacatgcatcaaccatacaaaacctgctgggatacacacatatgaggtccatttactccaggtatttaaaacccctaagaaatgatccagccatttcacaaaccctctt

SEQ ID NO: 43313 - DNA, 191 bp, Gossypium hirsutum
  unsure (1)..(191): unsure at all n locations
  Clone ID: LIB3272-006-P1-K1-H6
tgcctnaaaataaataattaaataaataacggctttttcttcagaaaacaantaagggtggtcgctctcttcactaaatggtcactctctaaaggcagtacttaattttctactgctccaagtaatatcgcgctatgtaaattctcattaagcaacaagatgagcaacgaccttttttattggctgatact

SEQ ID NO: 43314 - DNA, 278 bp, Gossypium hirsutum
  Clone ID: LIB3272-007-P1-K1-A1
gacacatgttacttatttcacaatccgtggacatctactctggtgttttatcatagtgcctacccaggttgaagttctactacatttagggttctatgaaactaagagcagttggactacccaagaacataataaccaccccgcttctataaagcctacacgcgcccttcactgtactatgttcacctaacattaataagcgtaggccgttttcaaggccaacattgccctggactacctatcgtttaaccccaacaccgctgcacaaaccataatat

SEQ ID NO: 43315 - DNA, 147 bp, Gossypium hirsutum
  Clone ID: LIB3272-007-P1-K1-A10
tatttaaaccctaactttcctttaactttgaacccgggattaacaaaatcctctttcaaatgggaaattgaaggagaacccatggagggcacttaagggaggatccaggtcggtttattaccgaatttaaagcgccatataaaggtt

SEQ ID NO: 43316 - DNA, 370 bp, Gossypium hirsutum
  Clone ID: LIB3272-007-P1-K1-B2
ctcacatccttgtgtcatggcagcaccttccagcattccccttaagttcactgtccgacgttgtgaaccagaacttgttgctcctgctaagcctacgccatatgaacaaaaactgttatcagacattgatgatcaggcgagtttgcagtttcaagttccggtaatcaacttttatcaatatgaaccttccatggaaggaaaagatccagctgaggttattagggaggcaattgcacaaaccctagtgtgttattatccatttgcaggtagattaagagaaggggccactggtaagcttatagtggattgcaccggtgagtgtgtgatatttataaaagccgatgctgatgttacacttgaacagtttggt

SEQ ID NO: 43317 - DNA, 366 bp, Gossypium hirsutum
  Clone ID: LIB3272-007-P1-K1-B3
gcaggatatatattttccggcgatatgatccgagccttggaggcctatggcaatgacctggtgaattcagtgatgggtcgagctgaagatatatgtggcaaatttagcagcaatataaaagtggaccgaattgttggaagtggagatgcaagggacgttatatgtaatatagtggataaaatcaaagcagatacgttggtgatgggaagccatggttacggtttcttcaaaagggcgatattaggaagcgtgagtgatcattgtgccaaacatgttaaatgtccagtggtgatcgtgaaacatccagagaagatataaagcttattcttcattgacggagatatggcttttactaccatgtacacc

SEQ ID NO: 43318 - DNA, 320 bp, Gossypium hirsutum
  Clone ID: LIB3272-007-P1-K1-B8
gctttatttcctcttttgttctttctctaacttttgctctgcatctaactatatatattttgctcgaattatttccatccttcatacattatagaggcttttttgtttctgtttgcttatttcgattggtggattgatggtagctggcctatgtaacgtgtgccacattcacagatctaagtttgtagtcatatcaccgacaactgtcccgggctggtaggggctttatataactataccgaactctaactgaatagtgaatgaatgagcgcaatatagatcccttaccgaggatccaatagaggtcgagattgttgcca

SEQ ID NO: 43319 - DNA, 395 bp, Gossypium hirsutum
  Clone ID: LIB3272-007-P1-K1-B9
ctcgtaagtaataaggataaacaaaaacccttctgatcattaaaattagggttttagcaacaaataaaagcaaccatcaccgatgattcatgcagcagttaagctatcgaaatcggtcatttccctgtctcgaacttcctcagtagctgcaacttcatcgcagcctttgagattcctccacgatggaaccaacggtcccagttccaacccagtcgctgttcagatgatcaattacgctctgtcacatgccaggtcccagaaatcagatgaatcatatgctcaaggcatgttgatattggagcagtgtctttctactcagtcaagtgaaagtgaaggtcaatttgctcaaaattctattggagcggtgttacttgcaatgtctaatttgttatatg

SEQ ID NO: 43320 - DNA, 232 bp, Gossypium hirsutum
  Clone ID: LIB3272-007-P1-K1-C5
tcggtggaagggtagcctctttcttattggttcaagaactggttttggtctgatccggtccgattaaaatatgaaaacatttttgggagagcacccaagaaaagcgattatacccaattcttttagattttgggaggttcgaaaaacgcttcttaaggtggtctaaagaaaggttattgaaaagccggtattaagaattattccgattaagggcgggattcttgaaaggtta

SEQ ID NO: 43321 - DNA, 197 bp, Gossypium hirsutum
  Clone ID: LIB3272-007-P1-K1-C6
tttctttccgacaacgtctgtgatgtctgccagtgctacttagggcttcgtcttcttcttcttctttcttcatctccatctttatcttcatttcagggttgttgggttacgtttttttcctattggttgggacgaattattgaatcatgagataaccttcgccgctggaacggctgaggcagaggtacatctctgca

SEQ ID NO: 43322 - DNA, 394 bp, Gossypium hirsutum
  Clone ID: LIB3272-007-P1-K1-C7
cttcaatcctcatagcaattagctatggcgactaggactttttttctctttatttgattcttctcctctcctctaagcccggtcttttctctttatgaagatcaagtaggtctcatggattggcatcaacaatacatcggcaaagtgaagcaggcagtgttctcctctcaaagagctggtcgaaaacgagttgtagtttccaccgaagagaatgttattgcttcacttgatctccgccacggcgagattttttggagacatttgcttggggctgatgatgttattgatggaattgatatcggtcttggccaatatgtcattaccctttcatcgggaggaagtattctaagatcatggaaccttcctgatgggcaaatggggtgggaatcttcac

SEQ ID NO: 43323 - DNA, 397 bp, Gossypium hirsutum
  Clone ID: LIB3272-007-P1-K1-C8
aaaaaagttatacatacttcccctttcttgcggttctctctctcttccactaactttttttttttggtccacagctattctgatcgaaaccaattaaaggaatcgcaggtgggactgatagaggtttgtgtattgcctgcatggagacacccgccatggctacgcagacgcaggcaccaaaacttaatcagaaattgaattattccatggttggtaaagagaatgatatgatgatgataggtggtctaatttctaagaagtctggtattgatttgatgcaaaactgtgatctccctccacctctcaaggtgtttgctgggttggataaggcggtggagttgatgtcgttgaataacagggcggtttatagcatcatgggacaagaggacgattaaaa

SEQ ID NO: 43324 - DNA, 298 bp, Gossypium hirsutum
  Clone ID: LIB3272-007-P1-K1-D10
ggagaatagcggcattcactaggccaacccaggagcatgaatcataatctggtgtggatgctttggccaatgctgctacccttggagacaatgcagataattcaggcacaacgtcagtggcaactactactaaacatccaaggcatcgtcctggttgttcttgcatcgtatgcatccagcctccaagtggaaagggaaaacacaagccgacatgcacatgcgttgtgtgcatgacagttaaacgtcgttttaaaaccctcacaatgcgcaagaagaagcgtcaatcggagcgtgaagc

SEQ ID NO: 43325 - DNA, 380 bp, Gossypium hirsutum
  Clone ID: LIB3272-007-P1-K1-D7
gtcaatgaatagcgtccccaaaaaggtcattgcacatcttctgaagcctcgtggttggaaaccaccagtttgtcgacagtttttcttagactgcaacgaaatagcagatctgtgcgaaagtgctgaacgaatatttgctgttgaaccaactgttctacagctgacagctcctattaagacttttggtgatctacatggacaattcggggatcttatgcgtctttgcgatgaatatggtgcaccttcaacagctggagacattgcgtatatcgattatctattcttaggagattatgtggaccgtgggcgacacagcttggagaccattactcttctgcttgcattgaaggatgagcatcccaattatgtacatttaattc

SEQ ID NO: 43326 - DNA, 155 bp, Gossypium hirsutum
  Clone ID: LIB3272-007-P1-K1-E10
gcgcgaacttcatcttcatcttaatcttctctggtcggccttccaggaaaaggaattcaaggtcggagtcttggacaggtttcttttgggtagctcctgttgggccaacacttttgccccccatatggagatcctggttacggaaggtcttaccg

SEQ ID NO: 43327 - DNA, 222 bp, Gossypium hirsutum
  Clone ID: LIB3272-007-P1-K1-G6
ctacttaaccatttcccaaatctcctccctactcttctttaacgtggtttttatttccgctcatgcagcgcgctttgaaatccgtaatgagtgcttctacaccgtttgggcacaacctcttcttgcggtagccgtcccctagacccttatcaaagtttgaccattgatgttcctgctggcactgctatggcttgtatttgggggtcaaaccaattacaattt

SEQ ID NO: 43328 - DNA, 200 bp, Gossypium hirsutum
  Clone ID: LIB3272-007-P1-K1-G9
gaagacgggtaattatattcataaaggtagcgtttgaactcgatcttcaatccagagtaactaactcagatcgaacctgaaccaagccctttctgagacgctgtacatttttataacctatgaccactcagaacttatactgatcggaaggggtgtatttatatgacatacaacgactacggcggatagtttcaccatac

SEQ ID NO: 43329 - DNA, 105 bp, Gossypium hirsutum
  Clone ID: LIB3272-007-P1-K1-H1
ctcacatccttgtttcatggcaacacctggcagaattcccataaagttcactgatcgacgttgcgaaccaaagcttgtcgctctagctcagcctacgacatctga

SEQ ID NO: 43330 - DNA, 417 bp, Gossypium hirsutum
  Clone ID: LIB3272-007-P1-K1-H10
aattttaaagattattcctcttgttctgttttctgctcaaagctcttttatctgtcccttttttttagtttctgacatggcatcctctggcactggctccccttgtggtgcatgcaagtttctgagacgaaaatgcgcctctgactgtatatttgcgccttatttctgctcggaacaaggtcctgcaaggtttgcagccatccacaaagtttttggtgctagcaatgcctccaaattgctgttgcatatcccagctcatgatcgctgtgaggcggttgtcaccattgcttatgaggcccaagcaaggattagagacccctgctatggttgtgttgctcatattttccgcttgcaacaacaggtggcataccttcaaggtcaattaatgcaagtgaaagcacaactagctcaaaatgc

SEQ ID NO: 43331 - DNA, 435 bp, Gossypium hirsutum
  Clone ID: LIB3272-007-P1-K1-H5
ggcccggaggcggtggaggaattagtcgagtgttgcaagacggtgacgttttcgaaaaggctggtgtcaatatctctgttgtttacggagttatgccccctgaagcttatcgagctgccaaggctaatgtcactgatcagatgcccggtcccgttccctttttcgctgctgggatcagctcggttttgcatcccaagaacccctttgctcctacgctgcattttaactacagatatttcgaaacagatgctcccaaagatgctcctggagctccaaggcaatggtggtttgggggtggaactgatttgactccatcctacatctttggggaggatgtcaagcacttccattcaatacaaaaaaaggcatgtgacaaatttgatccatccttctatcctcgattcaaaaaattgtgcgacgacttcttttacatta

SEQ ID NO: 43332 - DNA, 265 bp, Gossypium hirsutum
  Clone ID: LIB3272-007-P1-K1-H7
gccgaactgagctatgtctgtatatctgtctgtctctctctgtgtctactatgcccctgcatgggcggctatggtaaaatgcgcgcgtgtgtcggcctatgggatattattatgcgccgggggctcggaagcgaaggtcagttagacgagccgtaccgactctgatgagctatgcatcattacatctatgacggagagctccttaagctcaaactactcaactcttcaggtgctggctttgcctatactagcaaggatctatttg

SEQ ID NO: 43333 - DNA, 425 bp, Gossypium hirsutum
  Clone ID: LIB3272-008-P1-K1-A5
caagaatccattttccaaatcccccattttgcctctcaagccctccaagaatgtcttcaagcatccctccctctccctctctctcaaagctgtcctctctcagaaccctgctaaaaccctcaacccaacttttcaacactgcttcactaaatccccagatgggtttctctactgtgaggataccaaggtccaggatgtcatggaaaaggtcgaaaagaggccgttttatttgtatagtaagcctcagattactaggaatgtggaagcttataaggaggcccttgaaggcttgaagaattccattattgggtacgccatcaaggcgaataacaatttcaagattttgcagcatttgaggatgttgggttgcggtgctgtgcttgttagtggcaatgaactcaagttggctcttcgtgccggcttcg

SEQ ID NO: 43334 - DNA, 156 bp, Gossypium hirsutum
  Clone ID: LIB3272-008-P1-K1-A6
ttataaaaccatctcatataattttcacttttttctttcaagcccaccaagaatgtccggggggtattcttaacttgttctgatctcttaaagcacccctatcttcagaaccctgcttaaacctttaacccaactctttaacactgctgtactaaa

SEQ ID NO: 43335 - DNA, 337 bp, Gossypium hirsutum
  Clone ID: LIB3272-008-P1-K1-A8
caacaattaggggagggattaacatttcatattacaacaaaacgacaaggcgcggatgtttggcgccaaacgacagcgtcccagattgacctatcctttatccttgcctgccgttgaatgtacttccccaaatcgtttcttgcaatcatgcttgtttggcaaatgaatgtttagttgattatgtaacactttaggctgtgatatctagctttgtctgcctctcactaacaaatgcttaaagctacaatggggccgacgatgaatctacataagctagggaaagaatcggaggaatgcgcaacgccgcttaaccatctgtaggtcacatatctttcgg

SEQ ID NO: 43336 - DNA, 419 bp, Gossypium hirsutum
  Clone ID: LIB3272-008-P1-K1-A9
aaagcacccaaagcttggcgccattcaaatgctatatattcttctcttttcttcttaaccaatccttcctaaaaaaacccaacctatatcaattacacatgactgatcagagaagaagtaaccaaaaacaggggagactctgtgattattgcaaccaatccaaagctcttttatattgcagagctgactccgccaagctatgtttttcgtgtgacagggaagttcactcggctaaccaactattctctaagcactctcggtcacagctctgtgacgcttgtgatggttcccctgcttccatcttttgcgaaacagagcaatcggtgttttgctccaactgtgattgggaaagccacaagttttcgtcgtcttcgttgcataataggaggccaatagaagggtttactgggtgtccttcg

SEQ ID NO: 43337 - DNA, 419 bp, Gossypium hirsutum
  Clone ID: LIB3272-008-P1-K1-B6
ggttcttatggcgtgctagacataaggattgaggagactgaaatgccaatcatagggcagatactatagtcgatccgagaagtaaacaatgctgcgacagtcgctcaaggagtgctgtactggaaaccacccaaacatgcatcggattaagggaaagcacttgtagaggatatcttcagatgcagtgatggtgctggtgaaggtgttcctagaattagaggatcattgataagaaagttacgtgaggagaacaatgtgcataggtctacacagatggtcactgcagcgagcaaatgaagcgataccgagaactatcggactagacactgacgatgcatgggactacaacgtgatggaacctacatactagtggaatggctacatcaactgctagatgacaggtccaactaagacatgag

SEQ ID NO: 43338 - DNA, 275 bp, Gossypium hirsutum
  Clone ID: LIB3272-008-P1-K1-B8
gctctctgtttcttgttagttaatcagccaagtattctttcaaaatctcctctctctctctctctctctctctctctctctatctctctctctctatctctctctctctctctcactctctctctataattagaggatcaggctttaggccaaaaactttggtaatgtccgatctgtgaattggggcaagtgtctgcgaaaaaaaaaagccgctctaatgatcctgcgtgcacaatgagcatccgatatccctacgcatcgcatccatattcttc

SEQ ID NO: 43339 - DNA, 423 bp, Gossypium hirsutum
  Clone ID: LIB3272-008-P1-K1-B9
ctctaccattgattttttttccttttttccttttgttttgtttctggttctggtttcctttttctcttcacatttctttctcccgatgagcaaacgctcctttgtcgttacaattagagtttattgccactcaactcaccactatttgatctgaccttggttatttctgcttcagttttttctcttttaatttttcttgtattttcttgaagcttctttccaacggagaaatagatagaagagagagggagagccagagagagtcaactgagaaagttttgctgtatgtcagtagattgtattgagacttactgcggtggatttggcgagcttgcaaaccctttacaatggcctcagctaagaaaaagacgacgcttctttcttcttcatcttcttccccttcttcatgttgcgcatcgcact

SEQ ID NO: 43340 - DNA, 429 bp, Gossypium hirsutum
  Clone ID: LIB3272-008-P1-K1-C3
acgaagttgattttggaaagagtacagggggaaattcgaaacttatttcgtgtgcaaaagggctgcaaagtttggccaagagaactatcgaaagaagcactgctggtgaagcagggaattttgaatgggatgattttcgggaggacgaaggagggggtgacatctatcggagaatgaaggaagaattctatggtaatagaagccaagcacggaaatcttctaccaacctacggaagcctaaaggaaagaaactaaatgaatcttgtaatgtagaccaaccaaagtccggtgataaaaggatggttcattctgagtcaaaattattgttgtgcaagttgaaagataatgacatgacgttacaagaaggtcaaatgaattttagaaaaaatctttccaatgagtttgatgaacagtttaactcagattcct

SEQ ID NO: 43341 - DNA, 390 bp, Gossypium hirsutum
  Clone ID: LIB3272-008-P1-K1-C9
gaaaaccctaaacgtccgttcacgtgcgttgcgtgtgctctacgctcacgttatgtccgggctgatcgtagcacacgccttctacctgttttttttctttagccataagctaaacaacacgcagaattggtcttaaaatgcctacacgtaatagatgcataggatttggttgggtaaatacggcggaaaggtggtggatcagatcgacgcgtgtcgcgattgtcagtttcgaccgttgcaagcccaagaagtgccgtatggaatgcaaggcgagctgccctgttgctaaagctgggaaacttggcattgaggttacaccggacttagagattgctatcatctttgaggaggagcgcattggttgaggtatctgtgtcgagagatgcccat

SEQ ID NO: 43342 - DNA, 382 bp, Gossypium hirsutum
  Clone ID: LIB3272-008-P1-K1-D12
gtaataatgaaaggaggtggtgctgttggttcagcgaatgatgacccaatgaggggtgtactcaatgctttacaggagaaaggcacaaaacttatccaatcgtggttaaactgcgggagtgactgatactatctgaaggtaccaaagtgcctctcacatctaacaacggacgccgcaactatgaattaacttagagtagaaccggcatagcatactatgatataaaccgcatcctagggaactgctttgccttaatcagtcttgaaagaagatcgagggatcttgactaataggcggctgcagaaactgacaggagaggcaacagagaagtcaaagctgttggtccaacttacaataccaatactgctgacgctactagact

SEQ ID NO: 43343 - DNA, 400 bp, Gossypium hirsutum
  Clone ID: LIB3272-008-P1-K1-E11
ctttcttcggccgatgcagtttcttcttcaagagacagctctattctttttgctttacttaaatagactttctgggttttccgtgctgatcctaccactggcccctcacccgaaggcctcttgatttatatacacagcaagtagctttaggcggattctccatcatcagttaacgctttttgtttacggacaatggaggtgtacagcaaaaccaagactcgcgcccctgcaatgaaacagatttcgatactattctggaccatgacggtcctatacctgctcacaaacgctcatgcgaaaatcaaaactgacataatgccctcaacagctatcgtttcgtactaattggaattacacacatcggtgcccagtactgcaacccgcgcatcttgaatgaaaa

SEQ ID NO: 43344 - DNA, 409 bp, Gossypium hirsutum
  Clone ID: LIB3272-008-P1-K1-E8
ttctgtaatagttgaattaaaggcatggtgctaaagggcattgctttgcccattattacattgatactagctttgggaatccaggctgggttttctcagaatattagcaaagccagttttccaaagggcttcatttttgggactgcctcttctgctttccagtatgaaggagcagtgaaggaggatggaaggggaccaactatttgggacacattctcgcatgcttttgggaagatacttgatggtagcaatgcggatgttgctgtggatcagtaccaccgttatcctgaagatatacaactcatgaaagacatggggatggatgcttataggttttcaatagcttggtctcggatattccctaatggtacgggcgaaataaaccaggccggtgttgatcattacaaca

SEQ ID NO: 43345 - DNA, 251 bp, Gossypium hirsutum
  Clone ID: LIB3272-008-P1-K1-F11
gttactacgacatatacaatttagcccaactttggggatttcaatcccggaggatgcctttaaaaccttggcaaccctttctttccttttcttaaccctttttaacttaggccaaggcagcaaatttgatttaagaaaccactggccttacaccggttgggctggcgcatttacgggtggtggcaagagacttggccaaggttaagcatgtgaaattactgtgggctctggaaccacacaagaccgaattt

SEQ ID NO: 43346 - DNA, 413 bp, Gossypium hirsutum
  Clone ID: LIB3272-008-P1-K1-F5
gtcggtaaaaactcgcatgatcaccgatcgtatttgtatcccgcagatgaaagacgaggcgcaccattaccaatctatggcacgcgctgtctcctataaaagctatgctcatcctgccggtactatctcgatgatcgtgtatataccacataaaaaacacgccgatgcaggggtgagggagtgtccatcttctagactgcaaagcatggacaggctaagcggcactatgcaggaacatacattttaattggcgagatactggaagatattgcacgatcctaccacagctgagacgctacacatgtaaacacgcactgattacaagttgattgacatagctgaggacggatccgtgagtttgctgactgaaagtggagacaccaggggtgatttgaggctgacaactgatgaca

SEQ ID NO: 43347 - DNA, 382 bp, Gossypium hirsutum
  Clone ID: LIB3272-008-P1-K1-G10
ctctaccggagggtgcttatgctcgcgacctatacccgggcgtctgggtatgggtcactttttctgttgacattggtttgtcccgatgagcaaaccctgctttgcgagtacaatcagagtgtattgccactcaactcaccactattgtgatctgaccttggatattaatgcttcaggcctttctgtgttaaggtttcttgtgtactgttgaagctcatggttcaacggaaaaataaatacaagagagagggagagcccaacagagtcaactgaagcagttttggtgtatgtcagtaaattgtctggacacttactgcgggggttacggcgagcttgcagactctttacactggcctgaggtaataaaaaaacgacacttttt

SEQ ID NO: 43348 - DNA, 430 bp, Gossypium hirsutum
  Clone ID: LIB3272-008-P1-K1-G11
gtgtgtggactccccattttctcttcaaaaagaaaaacaaacactgtcgaaaatttagggttttcgatttcaatctcaatggatcaagaactagacccatatatctgcggttgcattattgaattccttgtcaggtactcacccgacgatatgcatgtaaagaaagttattgaagctttcccgccattgaagcccaggcctcagttgaaaaaagccgtgctcctccgtaccatgcgaaccgaagtctacgccggtgacgtttccgagaaaatactcgacgctttggagaagattgggcgcattgacagcaaccaagggctcccgattcccgattccatgaaggaagcctactgcgccgtcgcattggaatgcaccgtcaagtacttgcccggagatactgacacgtgcggcggcaagtacttggatgcgg

SEQ ID NO: 43349 - DNA, 355 bp, Gossypium hirsutum
  Clone ID: LIB3272-008-P1-K1-G12
agcattcggtggctgctattgctcgaactggataacaggccgcaatcaatcgggataactgctcttttgtcactctgcacgcttattggactagaaaatgccaccttagtatctgtcacacttcaatcaactctggaatccatgggagttctcatggctagccccatgcactcttacctcgaacaacaactggagaaccgtgtacagctattgaaattctggacagcgcccctcaaataatgctttcgggcttctgacaaggactcaatccagggcgtcgtaagaaactcctttgccggtgcctgtgctaagctgatcgaggcgtcggccaagttggagattgctgccaccttca

SEQ ID NO: 43350 - DNA, 430 bp, Gossypium hirsutum
  Clone ID: LIB3272-008-P1-K1-G2
gcgaacattaaagggatagaaagagaagaagacagcgctaaagtcccactaacatatagattagcgggccatatacatgttggaacaaatatattgggacgcttcgtataaccggaaagactgtaactatctattctacgtcgtgacaagacggctaaacagtatatcccatgatcggggcttattcttgttggatcatgaaccgggagagtagatgcaagtgcagagtcaagcatgaaacttatgacgtacacaaagccatgagaggctgagggcatttgatgcttaactacacactaaccatgtatagtacactggtaggacatacaaggagcgcgtatataggacgtaagctgtgcactacaccggccgcggttgcgtatccattgacagccacggcagaaggcatggggagtgagatgatggctta

SEQ ID NO: 43351 - DNA, 352 bp, Gossypium hirsutum
  Clone ID: LIB3272-008-P1-K1-H6
accatactcattattatctataacaacgcgcacttcaaagaaaaaactggagcttaaacctgcttgattacttttaatcaccgccgcagcttacggcatcggctaagcgttgtgcttagctttggcggaccaaggattatttgagtctatcgcagatttgtctgaagacaagggaggggtaggttctggtttagctgtgaaacagaattgtagatccactgcaaagaacgagattccatttactatttgtgttaaatgcgatgctccgactccatgagatatcacaatggcgtttgagaagcatctgtccacatacggaggattggatggttgtatgaacagctccggcatc

SEQ ID NO: 43352 - DNA, 401 bp, Gossypium hirsutum
  unsure (1)..(401): unsure at all n locations
  Clone ID: LIB3272-009-P1-K1-B6
atacacaaatgattttagacagttgaaaggagcacatattcatataccacactcgcatctgctgatatgccattgggctttaaactaacctattttgattctactgataatctgcatcatttgggcttatttgccccctatgaggcgaaaagtgttgtaattctatctctgccaaaggcattttcccccattttaggggtaggaacgcagcttgtgcgatacacagagcgcaggtgttgtcataaagagaggcaccgttgtcatattcgccagagacttggggagaccgtctagatttgcgcatgagacaacacgggccgagaaaacacangtgtttgcaatcataatagagtggtcggatcctacaaacattagggtagcatttgaaggagccctctcac

SEQ ID NO: 43353 - DNA, 380 bp, Gossypium hirsutum
  Clone ID: LIB3272-009-P1-K1-B8
gaggaatccaaattgttcatcgtgtaattaaggtccatgaaaggcaagatactggtgaagttgatgccctcaccaaaggagacatcaattatggcgatgacaggcttttatatgctcaaggtcagcaatggcttgatcggcaccatatcatgtgcagagctgtgcggttcttgccttatgttggctggattaccataatcatgactgaaaaaccaattatcaagtatattctgattgcagcattgaggttgcttgtgataacttctaaagactgagcagcatttatgaagggtgggccaaatctacaaggaaatcctcctacaattgccaacgcttctaccctctccttggcatcggtcatttcttgcttttttatacac

SEQ ID NO: 43354 - DNA, 301 bp, Gossypium hirsutum
  Clone ID: LIB3272-009-P1-K1-B9
gtccaactgatcgctaacctaaaacccacaaagggagggggtggattaacacaggtcgactggtgggcatggaagacgaaatccgctagggagtggctaacatcttacctgcataataaactagccgttagaatggatggcgcttaagtgcgccacctataccaacacgtcgacgcctgggccaggcccagatgacgtaggagggcagcggccatcgctgaaaaccacggggcgcgagccctttcgtggacggcgtatgggcacatacaggtgatgggggcatatatacaaatgagaacct

SEQ ID NO: 43355 - DNA, 402 bp, Gossypium hirsutum
  Clone ID: LIB3272-009-P1-K1-C4
gtcgtacggcccgttgatcaatctctcggaagcttctaatcatatgggtcatttcgtccagcttctcgttttcgtccatcgctctactcccgttcagtataaattgtccaaaggcggagaaataatcaggacagacattcaggtgggcgatgacactcgaccctttttctccgtatctttatggaagaaagaattgcggtctattgttgctgctggcgacatcgttctattacgaaatgtcaagattacaacatttcgagatgttttcgaggccagaactgttgactggtcatctttactccgtctagtccacccttaccagtcccttgtttcaaagagtgcaattgaattagtagcagaatgtagaatggggattgtggttaaagaaaagctttccaaggt

SEQ ID NO: 43356 - DNA, 376 bp, Gossypium hirsutum
  Clone ID: LIB3272-009-P1-K1-D2
ggcttcatgtgaacggcactcgcacatgggttagtcgatcctaagagacgggggaagcccccacgacagcccgtccagacccagcttctaaagggaatagtattaaaattcctgaaccgtatcgcggcagctgacggcaacctttgggagtccgtaaacgtcggctgcggccatacgaagagttatcttttctagttaacggcctgcccaccctggaaacagctcaaccggaggtgggagacaacggccggaagagcaccttacgtcgcgtggtgttcggtgcgccccacaccgcccttgaaaatgcacaggaccgagtgccgtccgagcccgcacgtactcataaccgtatcatgtacccaagtgaacaccctct

SEQ ID NO: 43357 - DNA, 272 bp, Gossypium hirsutum
  Clone ID: LIB3272-009-P1-K1-E4
tcgatcgtaaggactacttgaatcttgcttttaaaacaccgtatttttccagatggggcttttaatatgtaatgaggaaaatctgcattaaatttaatcaaatatacccgcaaggcataaaataacttaacccaagacgccttaccacctcatgattgattacaatgggtcattgcctcccataggacgtattatcaattattgtttcattaatgtggtttcagattaattatacctcttcttataaagtaattttcattctttagtaaaaa

SEQ ID NO: 43358 - DNA, 409 bp, Gossypium hirsutum
  Clone ID: LIB3272-009-P1-K1-F2
cggacgcgtgggtcaacttcctggatcgttgagggtaaggatgtggaatggggaggttctcaaggtccaaaaaccctcagtcttaagatcagctggaaattgaaagatggatggagtagccgtttcccaagatacaatatctatgttgagaaactaaagaaacaagcagtgagaccccaaggaagaaagctagagatccctgctctagcaccacccaatgctcggaatggcaaaactgaagtcgcaggggagtaccttggagaatcacaagttgaagccttctatgtatctgactttatcatcccttctgccatttcaagcctcaagtatattattcaaccatgtgattctggtggtgctagccaagttcttgatgatgccccattttttcaatttaatgttgaaggtc

SEQ ID NO: 43359 - DNA, 404 bp, Gossypium hirsutum
  Clone ID: LIB3272-009-P1-K1-F3
ccaaaggaccctctctcgctggctgcgtttctattttctggaaactttcacggtagttacacgtgttcgcaatttatcgtccggtcacttcccgcgtgaagaccttcccgactcgggacttgctatcatcttcaaaaacttcctaagactcttcttcttgaacggcctcattcaacggctttaaccaccaaagtgatgaaaatgaatattatgccctccttctcagacagtaaacaccgacggagtccccgaggagaggctctcctcccacaaaagcagggctaccgagtactcgagactcccgaagccggctttgatggggcttcaacttcaggagccattttcaacctctcgaccacagttgtgggagccggtatcatggcgctcccagccaccgtcaatca

SEQ ID NO: 43360 - DNA, 375 bp, Gossypium hirsutum
  Clone ID: LIB3272-009-P1-K1-F4
gaggggaaggaaggaaggaaggataagtttttatccaatggaatcttatacgggggcacatctcaattttgtttattatccgttcacttccctcttgaataccttccctactcgtgacttgctatcatcttcaaaaactttctaagactattactcttgaaccgactcatttatacgtttttaaccaccaatttgttataaattaaatattatcccctccttttcatactgttaacacaaactgagtcctctaggagaggctctccttcaactaaagcagggctacctgtttctataaactcccgtatccgttttttatggttctttaatttaaagatgccattttcaatttctctatcacagtttttttatgct

SEQ ID NO: 43361 - DNA, 394 bp, Gossypium hirsutum
  Clone ID: LIB3272-009-P1-K1-G3
actaaaggcaattgtactgtctccctatcacgtaaactttcacttgtatttatggagagaaatatatttggtagagcccgaggacgtaagcaaaatttgctgaacctcgttaaaattctagtgcaatgtattttttgatctgcatatttggcaagtgtcattgtagtgatttattgagctatcaaattacgatagagggatattctacctaggaaagatctggcatgtaagcaatactggtgatccacctatctttcctgggaattgaacttagtgtgatctttcagaacaataatgctactctttcacacgctgacgcacatcaataaagtacaagaactactatgcacaatcttgaagtcgggggagcagaatgcactgccactcatagtac

SEQ ID NO: 43362 - DNA, 189 bp, Gossypium hirsutum
  Clone ID: LIB3272-009-P1-K1-G4
acttaatgcaattgttctctctaactatctgtaaactttcacttgaattaatggggagaaatatattgggtagatcccgatcacataacctaaattggcctaacctcgttcaaattctaatgctattaatttaatgatctaaatatattgcaagtctcattatagtgatttattgagcgatctatttac

SEQ ID NO: 43363 - DNA, 406 bp, Gossypium hirsutum
  Clone ID: LIB3272-009-P1-K1-G6
attgaaccttgtggagtgtagtcagtctttcggtacccatcatggcacaaatcacaccatcatctgatcttgatttcgttgatgatttttactactcggcactctttgatgaagacgaacatgaaatctttccaccatctgacgacaagtatgccgaggagttgcagtttcaagaggctctcatgtcatccaccgtcttttccaaaatgggtaacaatgacatctgcaacccatgcatcgcccatgcttcatcacccctgttaatccaagccgtgcctctgcctgagttactggagatggaaacagaggaaaccggtgaatcctccttaagcttctgcgagatttgcgccgaaaggaaagaaaacgatcagatgttcactacgcaaagctgcaaccactcttactg

SEQ ID NO: 43364 - DNA, 124 bp, Gossypium hirsutum
  Clone ID: LIB3272-009-P1-K1-H1
ctcactcctccatcttcaataatttcttccgttgatctttgttagagattagctttttaattctccattatgggatcgatcatgatctttccacaatcgtatttacatggttcaactctttttt

SEQ ID NO: 43365 - DNA, 305 bp, Gossypium hirsutum
  Clone ID: LIB3272-009-P1-K1-H4
aatgatggacaaaaccctgtcatgtgtgttgtcagttggccttggttggagatagctcttatttattttcctttctttttgctgtcttgaatctgccctgcttttttcaccgtatgccattaaagaggttctgctagttgtttatggaggtctgcatcaaacgtcatggattttagggatattttgcaaaccttcatggtgtcttgattggtggaaattagggattcggtttgatatactgcatacatagaatcacggttttgttggtgggatgttgacacccatgttgctgctcatgtctcagg

SEQ ID NO: 43366 - DNA, 365 bp, Gossypium hirsutum
  Clone ID: LIB3272-009-P1-K1-H5
atttcttttttttaaggaacaggccaaaatatgtttaatggcgcggttgtcgttataaaacccggtgctcgagccctggcatagcgtgcgcttgatcaaagctctgctgttggatcttataaccaaatgaaaactccggacgcttacatggaacacggtaccatgtccacgagaacaagacatttgctacaacatcctaagagaccactaaagcccagctgaccatgaccaacacgatggctacgcaagagactggattagtaaactcgaaccactcgctgcgggtgaccttgctgtcggtagcccagagactttcctccaggtctcaagaacagacataagccttgagtcatgatcacaaggga

SEQ ID NO: 43367 - DNA, 323 bp, Gossypium hirsutum
  Clone ID: LIB3272-010-P1-K1-A4
cttccttcgccgtctactgctcttgttacctccacatcaagtcggacagagtggatcttttaaagtttcacattcaccctaccttgatcttcttagtaaggttctagtgaaagcattcctgttggtacctgaaagattgtgtactataccttatcgttgctaatctatattatactcttttatatgcctttatctatactgacttttaaatctttattcttacttttttatatttttctattgactatattaactttctatatttcttgttccttttcgaattttaccttatgatatcatttttttttttatctatttcttat

SEQ ID NO: 43368 - DNA, 381 bp, Gossypium hirsutum
  unsure (1)..(381): unsure at all n locations
  Clone ID: LIB3272-010-P1-K1-A8
caaacgtncgaaataatctactaatggtctaggtcgaggatgcgtacttaattagacatgctgccacacactttccatcgtgtaacctcctatcaggccaagcttccttcccatcattcgaagcttaaatcctcaaatttatctatccaatccattggttgtcatttcttcggcgattctctctcaccctaggtatcttttcaacgttttcctgtcattctattttagcctggggtatccacaggcaaaaaaaacacacgctatagtaggaagagagttttcgggagaaagaaaccctatgttttctatggcgtttctggtttttgcgattttggaaattttttgtttaaccggagactcattttaggatgtttgggttaa

SEQ ID NO: 43369 - DNA, 398 bp, Gossypium hirsutum
  Clone ID: LIB3272-010-P1-K1-B10
caaacatggaaactctcctcttaaaccaaacactatgccgtctcgacctttcccctaaaccaaaacgcccactgtgtattgctcctcagatcttccacttcaaacccaacaaaagctttgccctctttgctgtccaaaatcaagaaagggacttccaagaaacagggaacacactccaagcggacgtcagcgatgaatccttcggtgaagtcagtaaaatcatcggcagcagagcagtccccggcgggaaagccatggagtatttaatagaatggaaagatagtcacgctccttcatgggttccacaagattttatagctaaagatgtggtggcggaatacgaaaccccatggtggacagcggccaaaaaagccgacgacaaggcgttggctgaactt

SEQ ID NO: 43370 - DNA, 387 bp, Gossypium hirsutum
  Clone ID: LIB3272-010-P1-K1-C12
cagaagattcttctgtcagtttttgttctgctgtggcatctcggttgaattcagttatccttcctttgcttgacatgcggatgctgttggtcattcctcttattgcttattcaggattacagcaagcttttgtatgggctagttacaccaaggacattgtaaacccaactcttggagaggctggtgtgggtggtgcaatggcagtttatggtgcttttgatgcaatttgttccctggcggctggtcgactcacatctggcctcagatcaattactgtcatagtttgtgggggagctttttttcaggcattgatattcctgtggcttttgctaaaatacagtgcaactagtggagtgcttggcgtaatataccctcttctcatggcgg

SEQ ID NO: 43371 - DNA, 297 bp, Gossypium hirsutum
  Clone ID: LIB3272-010-P1-K1-C2
gaccgaacaagcaagctgctgcaactatagaaagaaacacatctccaatggagcccattgaggtctgtgactaccaaccgcccaggatattctccgatttaaccgcgacaaataaaaagcactataaatcaactcatgtttggacagtcgctaaaaaggctgaaactggatggagctctcgtggccacgacctacagtggaaacgggtacgatgttaaagtaaagatcgaaaatgcgcgtaagcaaaagtctaatgtctttgacaaggctattcacgttggctcagatgatcttttt

SEQ ID NO: 43372 - DNA, 305 bp, Gossypium hirsutum
  Clone ID: LIB3272-010-P1-K1-C8
gttaattttcagaacatatttcagaggttcactgcaaagtatgggcataacatgttctttgtcatttatgatcaacaggtcactctccctcttctttgcttcgaaatttttcagatttttatacacatcagggtttctcacgttaaactaagctcaaaaaaggggggatactgttgaccagactgacatttatacaacgttccttcattcatgtacaaaaccataatcttaaaccctgttctttaatgtcttaaagacccaccttctcagtcctttcttttgaccgatcagttttaccggctttt

SEQ ID NO: 43373 - DNA, 212 bp, Gossypium hirsutum
  Clone ID: LIB3272-010-P1-K1-D12
gcggaactaatgggtcaagccggtgtgttaggttatgaggaacttatatatgggttggatactagcacactcaatgctgctgacaaatgcgcttggccataacaccagcctattgattgggccaaaactcgagcaactgggctaccaatggcatactttgcaatcgaccgaacgatcataagtctatatcacccttgctgctaacactgtta

SEQ ID NO: 43374 - DNA, 397 bp, Gossypium hirsutum
  Clone ID: LIB3272-010-P1-K1-D6
attctttatttccagttttcttctgcttattccttttaacttaacccctttgtatttctaacacacactttttcgaggcctacatactttgaaccatagctgtagaaaaaaaccgtacttttcttggaaaccgaacacctatgattaatttatacacagacagtggccaagaaaaaaaatgcaccaccagcggctgaatctacaggaacaagccttgatgcaccaaggttttattgaacagcagtatgtctattatcgaggcatattagctactgctgagatagagccaattcccagtggaaatgtgcctgctggttttgctacacgcacttgccgaagcgagtatctgggaaatatctatacacaagtgactgaaccactacttaaggaggttttt

SEQ ID NO: 43375 - DNA, 322 bp, Gossypium hirsutum
  Clone ID: LIB3272-010-P1-K1-D8
gtttaactaaaaagttaaaggagcaacagctgtgacgaagtattttttcaatggagaaggatctttacaagagcaacaactgtgattaggacgttgcatgtgttgctataaaaaacgttgttatattgagtggtgaaagtttttataaagggcatgatctttcaatcttaaatgtcactaaaacgcattaccttttgtaaaccgatcaccaagaggtgaccgatttgaaaatgcagagcatcactattcaccaccaatactacagagcttgagcatgctattacctcaaccaagctgttgtgttgagccacggtaaccaatg

SEQ ID NO: 43376 - DNA, 247 bp, Gossypium hirsutum
  Clone ID: LIB3272-010-P1-K1-E1
gtttattatcgatgtgaaaccgtattaaagatctcattcatgacatcgaagcgctctgtcatatgaagcccagcttctgatcttgcatgcatgaaaaacaaacaaaaatgcctggagagcactcattgctggataatatagcggcgtgcaagccaaactggctgagaaacatgagatgggtgacgacataagacctctgatgacatgaagatgaaccctgggaggaatgtgccacgtgtggaaacac

SEQ ID NO: 43377 - DNA, 388 bp, Gossypium hirsutum
  Clone ID: LIB3272-010-P1-K1-E10
cttgagctcagtcctcatatgaaaattaaggtgtgggtttataaaaaaacacaagaggagaagttttctactctgaagaaatactcagaaaaagcaccagcaagtaataagcttgcaacacatcaagtcaaggtttcttatgagtacaaaagtgttgatggctccagtactttagttataccaccagagcaaaggattaaaggctaccgttatggacctcaagtagttcctatatcaactgctgaatgggatgctgtcaagttcaaaccagaaaagggtataaaggttctgggatttactgatgcttcaaaaataaagcgacactgctacatgaaagatgtttatctttttattgctgaaccgggcaatacaagagccactcttgctg

SEQ ID NO: 43378 - DNA, 393 bp, Gossypium hirsutum
  Clone ID: LIB3272-010-P1-K1-E3
gcagcctccttttttaaaagtcattgttttagcggcgattgctccaaccttcaattttatcagcgaaaccccatcgccttcctctcccctgaaaccctttctatctctcattttagcaatggctcaagtggtggccactagatccatccatgctaacttcttcagcaaggcctccggatcccttcaggacccagtggagaagcttaagcctgcgtccttcgcttccaaagtactcttacctgaccacaggaagagcaacgccgtcgtgcttactaggaactctaggattactgctaagagagccgcacgtgccgagcctgaacttattcccgtttcacctgaggatgtacctaagagggaggagcaatatgagcagttaagggggattcagca

SEQ ID NO: 43379 - DNA, 385 bp, Gossypium hirsutum
  Clone ID: LIB3272-010-P1-K1-E9
caaaaagaagggctaataaacgcagctttgatctcattccctcccctccacaaaaagaaaaagaaattcatcaaaatcgattgaaaatctgagggaatgagaaccaattgctgccatgtttcgtttgcttttgttctcaagttattgaattctctccaaggtttcgttggagtatccattattctctattcaatatggatgttggatcagtggagccatcacgtcccaatatctcctcctcctcctccttcagcgccgtctccggtttcttctgtttccaattcgatcctcttcaattcgggaccggagatgggagaacaagcagctagggttttcgacgattttgctgtcggtttggtttccgggttggacaatgatgtccggt

SEQ ID NO: 43380 - DNA, 244 bp, Gossypium hirsutum
  Clone ID: LIB3272-010-P1-K1-G10
gcctctccattggatgctactgcaggcaacctgcatgtctgatgaacaataggatgcattgcttatctcggccttacacacagacgtgtggtcgcaggaatagaaggtttgcagacagattaagtgttccttgaaccttcaaatagcctgcttgtacaagaaaaagttaccctgaaacaggtgccgtcttgaacataatgcaaatcattgggagagtcttgattgattaatatgttgtagcaac

SEQ ID NO: 43381 - DNA, 366 bp, Gossypium hirsutum
  Clone ID: LIB3272-010-P1-K1-G11
ttcaaattagacatgctaaaatactgggaaaatactattatagtttaagaaacgaatctcataactttaggggaaaacatggaggaaattaattagttataccatactgcccgaggtgtgacttacccgatgtggggatattttagatagtgaaccggaaccggtgacggaaccacatcctaacattgttggacccagaaatgcaagaagaaccgccagagttttggctgaccctgacgatcaaccaggcgtctgaaaacggccgaaaacgtcagaagcttgatctcgatctccatcgcccgcgtgatgatcgtgactgcgataacactgctgagagctccactactaacaagcggaacggagatc

SEQ ID NO: 43382 - DNA, 370 bp, Gossypium hirsutum
  Clone ID: LIB3272-010-P1-K1-G12
gtttcacttgaattccaaaggagcaacagctttgacaagttttcttcaatgggaaggagctttgcaagagcatcaaccgtgattaggacgttgcatgtgttgctgtaaaaaaagttgttatattgagtggtgaaagttattataaagggcaagatcttttgattttgaatgtcactacatcgtattaccttttgtaaacccatcacggagaggtgaccgattttgatacgcagaacatcactattcacccccaatactacagagctttatcatgttattaccacaaccaagctgttgtgttgatccacggttaccaatgtgaaacaacatggtccatagacaacaactggctctgttgatctaagctatt

SEQ ID NO: 43383 - DNA, 388 bp, Gossypium hirsutum
  unsure (1)..(388): unsure at all n locations
  Clone ID: LIB3272-010-P1-K1-G9
gaaaatcatgtgaatcagacatttccattgtcgcattgatcactaaaatccaatccacggagcccatcgaatttccctatcaattatcaagccaccctttttggagatagaaaataatactaattatctgtttttagcgtttcatagaaacagaattatgatatcttagctactcttctttttctttttttccccttacgattaagctagcttaaccctagcttttctgttaattttaatttttttttggcctaaaaccaagatgggattctagatctttttctttttatttccttttgatttgttttaattctattacgtgatcgaaaattatgatgtatatgaattgttggagcgngtgatttggtgttcagtgtctcaaaatgat

SEQ ID NO: 43384 - DNA, 408 bp, Gossypium hirsutum
  Clone ID: LIB3272-011-P1-K1-A11
aaatgactttctctctctttttctctattgtctggtcttcttctcggcaagctcccccgtcagagaacccaagggttctccggcctccagtagtggagcacggtggccggtatactaaaaactttatttgaaatttttttgtttcttttatttcgtttctgttttcatttctttttcggtctttttgttcggtctctggcgtagctccgttaccggagaaccgtcctgtctccggcgctggagctccttcacggtggactcaatataaaaaagaaataaaacaagccactatttaaaccccgcactcttctttcttttaaaaagaaaaagccgacatcgtcaaactctttttcttccttatttctcttcttcgagtgaataccttcgaaagggcctctttcttcgctt

SEQ ID NO: 43385 - DNA, 413 bp, Gossypium hirsutum
  Clone ID: LIB3272-011-P1-K1-A2
attcacatgaaaaaactctgataaattcccataagagctccacaaaaaagatttcatattcactcaataggaatctcctaaaatccaagtttctctatcccccccccttttttctttcatttaagctcaaggatttgtgttctttagtttactagtaacctgttactggtttagtaagaaccctggatttcagctctttacattctgttgtttatttctaggattttgcaaaaaaataaaaaaaaatgggttgtagagtatttgaattgctggtctgggtttctttaattttgtgtttagcatgtctggttagaggatttacacctgcagataattaccttattgattgtggatcatttactaatactaccgcgggtcatcgagttttcatggctgataatttagcctcaaag

SEQ ID NO: 43386 - DNA, 265 bp, Gossypium hirsutum
  Clone ID: LIB3272-011-P1-K1-A4
atccccctttaaaaaccgccttttaagcgctgggctatctctctttttttatggatgggatcatctcctttccttctccttcatgaaggtttagatttgaagaccgcttttgatttccttttgcatgccaataaagccttttcgctataaacacatccccgaaatatctcgtatcgaaaacgcttctactttgtggcgttttctgaatttgattctatggataacaactgggaattttgaatgccttggccgtaatatgggatat

SEQ ID NO: 43387 - DNA, 262 bp, Gossypium hirsutum
  unsure (1)..(262): unsure at all n locations
  Clone ID: LIB3272-011-P1-K1-A9
gaangnaaggggcgacccacgccacccgtctatatcatattcttacctgcatttcaagtgactagctaagctacagtggaagttgtggggcatcacaactagctttttgcacgctcgctataataatagacgtcaaatatacttaccataaattcatatacattccaatcactggtgggatttgccaggcgttgaattgaaaggttcaagaaagaactctttttattactaaaagttccttcacgcttgcttttttgctgca

SEQ ID NO: 43388 - DNA, 403 bp, Gossypium hirsutum
  Clone ID: LIB3272-011-P1-K1-B11
gcaaagttgatttcttgcctgaagaatcattccaaaattggaacacctacctatctgcactctcacaaatatattcccgattcaatgaccgccttctaagccgctcggatgatgcaaacgagataacacaacttcgtaaacaaagtgaaaatgacatgaaacgttgcctcacttggtgggatcttacctggtttggatttgggtcggttattggagcaggcatcttcgtgctcactggccaagaagctcatcatcatgctgggcccggcattgtcttgtcctatgttgcctcaagtatttcagcaatgctttctgtattttgctatactgagtttgcagtagagaaccctggggcaggggggtcatttgcttatttaagaattgagttaggagattttggtgc

SEQ ID NO: 43389 - DNA, 410 bp, Gossypium hirsutum
  Clone ID: LIB3272-011-P1-K1-B3
gtttcgagtttttttctttttaagactttcccaattctgatctcagccgttgagacatggctactgctgtcccagccgttagagctgtcaacagactgccgctgaagtcgaatggccgtggtccaactccaagctcaatattcttggggaaaagtgtgaagaagggtacctcaaaggtcaaccagaacaaggtttttcccaagaatttcaaggttgttagtgaatatgatgagtcaaagcaaacctcaaaagacaggtgggtgggactcgtctatgatgaatctgatgaccaacaggatattaccagaggaaagggaatggtggacactctcttccaggctcctgtgggaactggaactcaccatgctatcatgagctcctatgactacatcagtcaaggtcttcgcacg

SEQ ID NO: 43390 - DNA, 413 bp, Gossypium hirsutum
  Clone ID: LIB3272-011-P1-K1-B6
catacatgcccatttctcaaaaaaaaaaaaaaaaaaaaaaaaaaatttcccagaagattgattccctggaagggggattattggtgtgttttgtaatggatcaagatttggttgaaacagagaaaagaaggaagagagaaataaatatagaccctggtttgcagtggagccaatggcaactccttgattcgattcttcctacaggtgggtttgctcattcctttggtcttgaggcagcaattcaggcacgtttagtctcaggccctgatgatctccaaaattttgtcatacatttgttagagaatactgggagtttactcctcccttttgtttactccgcaactatgaaccctactttagacaactgccagaaacttgacagaatcttggatgcaactttaagcaatgaagtc

SEQ ID NO: 43391 - DNA, 378 bp, Gossypium hirsutum
  Clone ID: LIB3272-011-P1-K1-D10
attctcttctcctccaagcttcttcttctttttctcctctctagttttcatcttccttgtattattctcccattttcagtttttattgttataaggtttatatcgataaaaagaaaaaagaaaaaacaacacttaaaaaggtgatggctggtcgtttcgatgaaaacccgttcgctgaaaaaagagaaagaaaaagttaatcctttcttcgatccagctgtgagagggaaaggcatctggccaagctaaaattggggggaggcttattttaaaagaatgttccagggcctcaatttgcttaaacttaaaaattttaacaattacttcctgaaccggttggtttaattattggcaataaggcaccattgacatttcttt

SEQ ID NO: 43392 - DNA, 111 bp, Gossypium hirsutum
  Clone ID: LIB3272-011-P1-K1-D7
gacaaagaataaaagggctcataccatagcgccaagtgtgtgcgtccaaacccatttgatatgcatcgcatagctattaaacaggggcttttatccccgccggatctgcag

SEQ ID NO: 43393 - DNA, 409 bp, Gossypium hirsutum
  Clone ID: LIB3272-011-P1-K1-F11
ctagaagatgctcggtggcacagccgagaagatgtaaggaaggcattgagatttgccgaatacaagaaggcgcaaagattggctgcagctaaggtagatcagatgatcaaaggagttaaaaagcgatggagttcatcggcaggttatcttgcgaaaagtggggaattcgctcccatgtttgttccgggaccgttcgcgatcacccatcatctcatctcggcctgggctaatcaagatccaccaaccggcgccaaagctcaaatgaaaaaaccgcctagcggttttgttttgaaactatagccgtgccaattctcttccgaaagctgcagaagatccgccgtatgcctcgttctagtgcgtctgttaaaaggcaagtttatccttctatcctttcagataagaaagcaat

SEQ ID NO: 43394 - DNA, 183 bp, Gossypium hirsutum
  Clone ID: LIB3272-011-P1-K1-F9
gatgatggctatcaaaagccaccattgctgcttcagatttatctttttgatattacgattactcctacagcttgattgtgtaaaaggcgttctccagttcaactactatgcccaaaggtgccccgatgctgaagagatcatccaacaacaagtctttaagctgtacaacaaacatggtaacac

SEQ ID NO: 43395 - DNA, 282 bp, Gossypium hirsutum
  Clone ID: LIB3272-011-P1-K1-G2
gcgagatcaatagcgctaaaagcagtgaataccgccagtttatggggtctaaatcggagtcgtttcgggggtttgcccaaggtccaaaccgtgagggcattgtcgacagtcatgtctccgccgtccaaggcagtcgtctacgagcaccacggtccacccgacttcgtcaccagaatgatagagctacccccagtagaagggcaggagaatcaagtttgtgttaaaatgttggctgctcccattaacccctctgatattaaccgtattgaaggagtatattct

SEQ ID NO: 43396 - DNA, 410 bp, Gossypium hirsutum
  unsure (1)..(410): unsure at all n locations
  Clone ID: LIB3272-011-P1-K1-H10
tcgcccacgcgtncgcccacgcgttcgcccacgcgtncgaaaaggaggagaaaatttttggaggaaaactcaaacaatggcagttgcaccccatatggcgaaactgagcttttttcctctaaaccgacctgggtttttctctcagctttcctgcaacaaattccttcatatataaaaaaacaaaaaccttacagagaaccaatgtggagctgggtacaatgggtcaagggacctaacaaaacccctgtgtattttaggggtggggttctcttttgggtcccgggaagatgatagtgtttccaaaaccccgggttataacccagttgttgtttactccaagagttggtgcccgttttcgttcgaggtgaaatcttttgtcaagaaacttggtgtggagcctttggttattg

SEQ ID NO: 43397 - DNA, 415 bp, Gossypium hirsutum
  Clone ID: LIB3272-011-P1-K1-H3
cttttcactgctcttaacggaaatagggaaacggtggaaaccctttttttttaattgtcctccaaacaaaccctaagtcggattcggataaaccgaagagagcaagatagagccagtcgttgatggggtattgaatcgctgagttgaaccggtcggaagaagatccaagttagagttgtagacgaactcaattctatatctaatagatgggcgcggcgggttcgaagctcgagaaagctttgggtgaccagttcccggaaggcgaacgatattttggtctcgaaaactttggcaacacttgctattgtaacagcgttttgcaggcactttatttttgtgtaccatttcgcgaacagctgctagaatattattcaagtaataaaaatggtgttgatgctgaagataatctgctgac

SEQ ID NO: 43398 - DNA, 215 bp, Gossypium hirsutum
  Clone ID: LIB3272-011-P1-K1-H5
agaagaccctggtagtttcactagttcgttcatgcgtggcgaaaaggaagattatatgttgggggtgaaatttatttggtagttttataaatttttatatttaaattatttttattttaaaccgacctgggtttttttcttagttttcctgcaacaaattccttcatattcaaagaaacaaagcctccacagcaaccagctggagcttggttaaa

SEQ ID NO: 43399 - DNA, 216 bp, Gossypium hirsutum
  Clone ID: LIB3272-012-P1-K1-A2
ggctactctggcttttcttacttctaactgtacgtgggaaactctttcccctgcgaaatctcaaaccctaaaataaaaaacatgtcgattttcccatagggatttcacatttcttaaatatttaatcacatattctgtcctttttgtattctattttattctgggaaagtgtaatcagtttttgatttgggatggcgatgttgttggaagatattt

SEQ ID NO: 43400 - DNA, 407 bp, Gossypium hirsutum
  Clone ID: LIB3272-012-P1-K1-A5
cagtactaggcaactaatgttaatgtcgttcctttcctcccttctataactaaaacaataacacctcaaatttctcaacccccaaaattgttgcacggtgtgcagtattcattctcatagatagcatttgagtattgaggaactcatttcttcatatccccatccgcaatgcatcgcaatgatggcgtttgtttcacctcctcttctttcaaaatccctgtcccttctccctcccaaaccctagcctctcccctctccagagctcgtcactcccttttccaactccttcactccctcaggaatcgctccctccctcctaccacatccactcactctcccctactatgctgtgcgtctctctctctaacagcccagacctacgaccttcttaatgcgcctctgctatg

SEQ ID NO: 43401 - DNA, 334 bp, Gossypium hirsutum
  Clone ID: LIB3272-012-P1-K1-B10
gggggacgaaagttatggctccatccttgatgtttagggctacatttatgacgcggaggtctaccgatcacacaaaggtgagtggtgtggagcaactatgagacttgaagcttaactgtcctatcctttaagatccaatcgaaagacacgtcaataaactccccactgctgcatgggaagctgcactgaattctagattttataattacacgcataagcgagtacaagcaccttgttggagctaaaccaacacctaagaaagaactcttgggcgtcacctattgtaacttatgacaaactgctcaagttaggcaacttcttttgatgctagaac

SEQ ID NO: 43402 - DNA, 384 bp, Gossypium hirsutum
  Clone ID: LIB3272-012-P1-K1-B3
gctgtggaagcatggacttgagaggtactattcggagcttagctattggttgctgctacaacacacggcgggtgcatatatggaatgggattatcggacacggaaaacttggggcattgccaagagtggggccaatatgttaaggggttggcctaccttatgcacacaagggtgctacactggatgcagtacttgctagagcatctgacgctgcgtgacagacgtggctcgcactgaggacaataaaaattcttggggactattgatgatggttcaatgacctacttataagtgcataaggtcttaaagttaacggtggaattgaacctaatgcataccttgatgcagagtttagcaaacaggttcaagaccgaatatacaggt

SEQ ID NO: 43403 - DNA, 256 bp, Gossypium hirsutum
  Clone ID: LIB3272-012-P1-K1-B4
gaacggactagaaaaggcgccaggcgcaaggaagctaattggcggcatacctcgcggatgcactgtcgaccgacctttatcttatcagaagggttcccgtgagagcatgcttgtcgccacattaaagaggaccaactatgcctgagcgtgccgaaagcagaggaaactgttggggaggctcgcatacactcttgcgtgcaaatcgttcgattgacttgggtattggggcgaatgaatactcgaaccgtttagtagc

SEQ ID NO: 43404 - DNA, 413 bp, Gossypium hirsutum
  Clone ID: LIB3272-012-P1-K1-B7
cggacgcgtgggcgccaccaccaccactcttaaagatcgacctttgggccatccgttctgggtacagccggataatcaaagcccactcccgccacttcctagctctctcactcctcttcctcctccctttctctttcttcttatccatctaccccttcatcgccattgaatcctacctcagcttccttcagcaagatccctccatcttccccactaaaatctttatcctaaatgtcctttacaccatccccatctctatcttctccctgttggccaccggttccatcacttatagcattttccacggcttttacggtcgacccatcaagcttttatccgctattaaggcggctttcacttccttcttccctctcttctcgacttgccttgtaacccagcttatcgtttctggg

SEQ ID NO: 43405 - DNA, 230 bp, Gossypium hirsutum
  Clone ID: LIB3272-012-P1-K1-B9
gtcttaattctggcgaaggagaacatggtttctgcacgatgaagaatgtctaacagatgtagccttataagctcttaattagagtgacattagaatagcccttctgggagtgtctctctatgtatcaactttataggggggtcgctccctgcacttatagagctatacatatattgtatataaggtttacatgatctatgtccggtaactaaataggattatgattactg

SEQ ID NO: 43406 - DNA, 409 bp, Gossypium hirsutum
  Clone ID: LIB3272-012-P1-K1-C11
agctgcaccacggagaagagagaaaaactgaaaaaggggaaaaaaagcgtcgtcgatattgcttcttcttcttatttttcttcttccctctctctctttctcagaagctcctctttcgttcttttgttcactaagtattgcaaaagatggccgacagcgaggatattcaacccctcgtctgtgataatggaactggaatggagaaggccggcttacgctggagatgatgctccaagggcagtttttcccagtatcgttggtcgtccccgacacactgctgttatcggtgtgatgggtcagaacgatgcctatgtaggagatgcagcacactctaaaagaggtatccttacttcgaaatatcctattgcgcatggtattgtcagcaactgtgatgatatggaaaagatct

SEQ ID NO: 43407 - DNA, 407 bp, Gossypium hirsutum
  Clone ID: LIB3272-012-P1-K1-D12
ggagtttgccgaggaactgttcgaagctttggctcgcagaagagggataacatcatcggcagtaaacaaagctcagctaagggaattttgggaacaaattactgatcaagctttgatgctagattgcaaactttctttgacatggttgacaaagatgctgatggaaggatcacagaagaagaggtgaaagagattatcacattgagtgctagtgctaacaagctgtcaaaaatccaagaatgtgctgaggagtatgcagccttaatcatggaagaactggataaagacaaccttgggtacattgagatatacaatttggaaacactactactgcaagctccaagccaatcaaccaacttagtgacgggcagccgcattttaagcaagttattgagtgaaaaattggt

SEQ ID NO: 43408 - DNA, 228 bp, Gossypium hirsutum
  Clone ID: LIB3272-012-P1-K1-D5
attttattataccagaccggtgaagcccttccttcattacgtacagcgcgagcttggagggggaattggggtaaaattcctgaaccttgacactttttctgacttgcaacttatagggagtccttagacatttttaaattctctgagaagtgttaacttttctgtttaacggcctgtctactcttgaaactgtttagtcggagttagggttcatcgtttttaatagct

SEQ ID NO: 43409 - DNA, 370 bp, Gossypium hirsutum
  Clone ID: LIB3272-012-P1-K1-E5
gcatcattatccttctatttcttctctcttttcacaaaccaaatcaactcttttctctaattcaggcagtggcagctcatggttgcaacataatcccttgcatcgtgatgcgagcagtggtgttggatcgaggcagggtccaatatattcagtttctcgcacgaaacctgcagaagttgcctccgtagaggacctcttcgagttcatatgctctggtcctcttgtcgacaaaatgggactgacccaggaaaaggtggcagagtctattgacaagtggttgttttatggctcgaagctttgtcgattgtttcagctggatgaactttaccttactactcctcagaaagcaaggttttatcactactacata

SEQ ID NO: 43410 - DNA, 412 bp, Gossypium hirsutum
  Clone ID: LIB3272-012-P1-K1-E9
cgaaaatctcaatttccatgaaagttctggggacacctcgtcccttaccccttgctttagataccaacgactctcgtgttctctctcatacacactcttctccatcagtactctcatccacgaaacattctcacaagctttccaaatccatggctacttgtatcgacacctcaagaacaaccgagccttcccgagtttcccagcgtccaaacaggtctcaacctgatgaaatccattacaagtatgtaaaattctgcagacccacttttactgaccatgtttcaagcataccctttagcgaaaaccacacaaatggcattcaccaccagaaaattgctgatttatcttttgaagaagaaggagaagtagcagagattggttctttatggctgaaaatgaacgaagaggcaag

SEQ ID NO: 43411 - DNA, 410 bp, Gossypium hirsutum
  Clone ID: LIB3272-012-P1-K1-F11
gcgaaggagaaatctttaagctaagcttattcgtgagtgaaagcaatagaaaacaaaagaaagaatctcaagtttcctcttcctccacgactctctctctgtgtttttttctttatttgggtgcttctctccatcaaagttggagctttggataattggatatattgaaaatggcaagtttgaatcttggtcctgttttgcctgcaaagtcaaggctctctctgtttgaacataatggatctctttttgtttctagaagaaaacccaagaagaagaaccaagctattgtccctgtagcgaggttatttgggccagcaatattcgaagcatcgaagctaaaggttttgtttttaggagttgatgaaaagaagcacccaaggaagctacccagagcttatacccttacacac

SEQ ID NO: 43412 - DNA, 392 bp, Gossypium hirsutum
  Clone ID: LIB3272-012-P1-K1-F4
cttaacgttaactattccctcgtcatggaaccaccgccgccgccactgcctccgcccaactccacctctaatcaaatgtgaaagcggaggagtgccactaacaaagcaagctcaccgcttcttctcttcattaacatccacggctgccgtcgacgaccccgccaccgctaaccggttgataaagaaattcgtagcgtcatctccaaagtcaatagctttgaacgccctctctcatcttctctctccccgtaattctcaccctcacctctccgccattgccttccctgtaagtccgccttgtatactaaaataagtgaagcatcatggtacaattggaacccaaagctagttgcagatttagttccattgcttgatatacaaggtaagcacga

SEQ ID NO: 43413 - DNA, 288 bp, Gossypium hirsutum
  Clone ID: LIB3272-012-P1-K1-G2
aactatctcaaatctcctccttctactcagaaagcttagtattatcaccatggcctcaaattccaaggtcttctttgacatgactatcggggcgtagcccgctggtcggattgagatggatcttttcgcagattgcactactagcactgctgataacttacgtgccctctgtaccggcaagaaaggcagtaggcgcagcggtaagccactccactacaaaggctgctgtctacattgagtgatccctaactttatgtagccacggaggtgacttcacggacggaaacg

SEQ ID NO: 43414 - DNA, 228 bp, Gossypium hirsutum
  Clone ID: LIB3272-012-P1-K1-H1
ccttaatcgaatagagaaataactgtgagaggaaaatggggaaacagcctgataagaggggtgcggctgacaacaaagacgtttgtaagctatttattggaaagcacaaccttactttaccaattactttatttttttagacttgggggtcattacaaaatcacagttctacattttttactaaattttttgaaaagtattagctgtgacatctacggcaaatggttt

SEQ ID NO: 43415 - DNA, 144 bp, Gossypium hirsutum
  Clone ID: LIB3272-012-P1-K1-H4
tctttctattgctctccttagagtaaatctctctcgcatttctttgtatagatccatgggtgctcagcctccatgtcccgctcaaatcttacaattccataccaaccaatgcattttttctttccgtttccttatccttttctt

SEQ ID NO: 43416 - DNA, 269 bp, Gossypium hirsutum
  Clone ID: LIB3272-012-P1-K1-H5
gacaaaggcaacttgctacacgtgcataaagagagtcgtctctggcctattatgctgtggatctataagcctatatgagatttggaaacgagagctggagcgaactgttaactatgcttgtgcttgaaacaaataatcatcttgttgattcaagatctgctggatatgcggctcaagaatctgaacattgagattgcctagtagatgcagggtgatcaggatccaattcatcgaatctggatgctcatgatgatagaactcatggcgtt

SEQ ID NO: 43417 - DNA, 399 bp, Gossypium hirsutum
  Clone ID: LIB3272-013-P1-K1-A5
tagcagttcaattaaaagcaccaaattcctcaaaatgattcgcccaaaaccctaatttgaaaccgtctcccttttattttacctatcagaaatgattcatggtagcgatgatgatgcagcagccgcagcatgcgacaccgccgaatcctcctcttccttccgactcttcacttagatcccctacctcaactcccactcaatcccctctccctctccgcccacgccagccccttgagcatgtcgcggttccaatctccgccgctcatccttccggtgagcctctcgtaaccatggggaccgccgcactttcactcgccagagttaggctatccgatatttccccctatgatggtgccccttctggttcctatgtgagggccgaggaggctttttcgggtt

SEQ ID NO: 43418 - DNA, 372 bp, Gossypium hirsutum
  Clone ID: LIB3272-013-P1-K1-A8
gccccacgcgtgcgggataaaacccagaggattccaaccctatggctttcatatttttcagcacagtatgagaaactaaggcgagcatcttatgaacggggttgtttcagggtagacatccacaacattccttttggattgatgcacgaaatgaagcatgttgtgcgatcattgcttgaccttcccatccaaatcatatcaaacaactgtcctataatttgccggagatggtattgggctcccagtactaaaaaccctctctatgaagctttgggtgtgtattatatagcactgctcccatgctgttcatacattaagctctcagttggatgcctcttcttcacaaagagacacagttgcgatgtatgctaa

SEQ ID NO: 43419 - DNA, 396 bp, Gossypium hirsutum
  Clone ID: LIB3272-013-P1-K1-B1
acgcgcccactcgtacggatctctttgacactctattttaatttatgtcacctgtcacgggggctagtgatgctggcgctgatgatgatgatgacaaggcaggctataggaatgaaccttatgacctacgatccaaattcctgattttggtcaaggttctgcagcttgattctagtgcttgtagggacggccgttggcggtgtgtcaccctatactataaagtggaaccggcgtttcttggtgctgggaacacaactcgccggtggggttattttttggacagccacgatacatgtcttgagcgatgcgaatgaaacttttgctgacttgacgagtagagaacaccctttcggctttatggtggcatgcgctggatatatgtggactatgctagct

SEQ ID NO: 43420 - DNA, 318 bp, Gossypium hirsutum
  Clone ID: LIB3272-013-P1-K1-B10
caactgtcctgtcgcttgttcttcttttgcaacttctcgttgcgttgagttgagttgggtttttttttttcttgattaaatgaaccaatgaaggggtaaaaagaggggccaaaccatgttttgcttaattcttaaaggtggttcttttttggttttggttacctcattgggttcggctcttaattctgatgggctttctcttcttgctctcaaggcagctggggaatctgatccaactcgatgtcttgaaaggtggtcccagtctgatgccaccccatgtcactggttaggaatcggttgtactcggaaaccagtcac

SEQ ID NO: 43421 - DNA, 369 bp, Gossypium hirsutum
  Clone ID: LIB3272-013-P1-K1-B12
acggcatatacaatttagacaacagttgtgtctcacatcctcgatgaatgcggtcaaatccttgccaagcctttcttttatcttactaaccctttctagctgaccccatgcagccacatttgatataagaatcaactgcccttacaccgcttggtctgacgtatcttcgtgtggtgtcttgagacttgaccaacgtgaagcatgatatatcactgtaacctctgggaccacacaagcccgcatttgtgctcgaaccaaatgcggtttcgttgcctacgataaaggcttatgctagacaagctaccgcggtggagctctcgtatggtggggatacggttcaattcccaacacactagtcgaatacgcagt

SEQ ID NO: 43422 - DNA, 396 bp, Gossypium hirsutum
  Clone ID: LIB3272-013-P1-K1-B6
cagctagaaaaattagagaaactaaaagaaagaaagaaatgggaagctcgtcgaaggaggagacggcgaccgacggcgatacgtcgagcggagatacccctccttccaattccaatctcttctctgagggtgaacgtgtcctcgcctatcacggccctcgtatctacgaagccaaggttcaaaaagcggagcttcggaagaaagaatggaaatactttgttcattaccttggttggaataaaaattgggacgaatgggtaggtgccgatcggctgatgaagctgactgaagagaatgtcatgaagcagcaagcccttgacaaaaaacagggtgttgataaaagttcaaagtctggacgatcaagtcagtccaagccaaaaagctctgctgatgcaa

SEQ ID NO: 43423 - DNA, 385 bp, Gossypium hirsutum
  Clone ID: LIB3272-013-P1-K1-C11
ttttgctctcagatatggaaactcaaccttcttccgataatggttatgccgggaacaacactagttctgaagaaaatttaaaaaggcagaaagaaattgatgcatggctgccaattacatcatcaaggaatgcgaaatggtggtattcagctttccacaatgtgacagcaatggttggagctggtgtcctcagtctcccctatgcattatcagaacttgggtggggacctggtgtggctatcctagtcctatcatggatcataactctctatactctatggcaaatggtcgagatgcacgagatggttcccggaaaacgtttcgaccgataccatgaactcggccaatacgcctttggcgaaaaactcggtctctacattgtggt

SEQ ID NO: 43424 - DNA, 397 bp, Gossypium hirsutum
  Clone ID: LIB3272-013-P1-K1-C5
agtttgaaattgtatctttggaagcatggacttcatagctactatcctgtttgtagctcgtgtgatctcctcccccaaagctttagacccttgcagatctaaagcagatgactggctccttttgctcatcccaatctatggcaaatgttcaccattcaacccacccaaacctgacttatggttcaacacagtcttgaacatggcatcataagacccaacaagggtcaagtgcttgtagagccttctatcccaaaacaccactggaggtcccattgctttacgccaacaagtactaaatattggcaactatgtgcgtcgagtaaagattggcactactgtcatgtcatgttcataggatgggacactaacaatgatgtgacttgcgtcccatgctccg

SEQ ID NO: 43425 - DNA, 399 bp, Gossypium hirsutum
  Clone ID: LIB3272-013-P1-K1-D2
gccgccatcacccaaaaaatccccccaaaaggaactaggcttgagccatgctttcttgcaatgcgcagaccttatccttccatggctaacccctcaagaactggctaatgtctccctcacctgcacaacccttcaccgagcagcccagtccatcactctctaccgctcccttgacgcttcaagatcctttgaaaactttcccatcccatttcacaacaccgtcgatcaatacccttatgcctatttcttctataccccttctcaaataatcccttcttcttctttttctttaaaccgccaattttggggacccaactcgccgcaaactctggtccttcccgagtcgggcttgttggatgctgaaatgggttgtgctcttgactcaatggatccactcgg

SEQ ID NO: 43426 - DNA, 345 bp, Gossypium hirsutum
  Clone ID: LIB3272-013-P1-K1-D5
ggaaaacaccattttggtttcagtttgaggcaaccattttataatttgactggccagagagttggaaccatgtttttagtaaggcttgcacaaccatctactgcgtcggtacaaatacgatctctattcatactgatagcagtgatagcccggcatgggcattccattgtttggtctgctaatcataacctgttatgtatggatcttacagaagaagagctacaaaaagcaccgcttgttctctacatagagcgatacattattagcttggaatctgggaaggtcgtagcctacaagatagtgttcttgcaaatagagattacttgcaaattcaaggcagatcac

SEQ ID NO: 43427 - DNA, 372 bp, Gossypium hirsutum
  Clone ID: LIB3272-013-P1-K1-E3
gagagactgatgcatttatgggtgcccgcaaagaccttgaaatggaaattggcgctgagaagaccttgctagcacaaaagatgatgatatacaagtgctatcgttgcagcaagcgtggtgatacggccactaacatgcttgaattgatgataaaatctccgaggccaacccgagctaaaccgacccttgttgcttacgctgtgctggacgggaccgattgtgtcatgctcactgctgagagtgctgctggagcctctccagagctcgccgtgaagatcatggctcgtatttgtattgagagccaatcttgcattggctatcgagcattgctcatagaactgatccgatcgactgcacttgaaatgagttcac

SEQ ID NO: 43428 - DNA, 317 bp, Gossypium hirsutum
  Clone ID: LIB3272-013-P1-K1-E5
cggccctcataaatcattatcctttcgaaactcatggttaaagctttgattcccaggtttttgattttaaaaaatggatcaggcaagaggccgtgcaatagcgatggcagagggggcggcggcgggcctctgcttgtagctgagtcacttcaagtggcttcaagcaccaacgattactgttgggggaaccgttggtggggcctttaacgtgggtgttgggacaaaaaatatcctttttagggctggtgttccccttcgatccaaatccagcccatcattcgccattgtgggagtggtaaccaggggggttgccattt

SEQ ID NO: 43429 - DNA, 390 bp, Gossypium hirsutum
  Clone ID: LIB3272-013-P1-K1-F11
gcattcttgaaatcaaaggcagagtcagacttgaagcattcgagaagttcctccaagagcttccattgtctcggagtcgtgctgttatggttattcatatcgtttgcaaggagggatcgtccgagagcgaacggcagagcctggtcgagacggctgattcatatatttcagacgggagagctggtcttgctgagcctgcttgcggggtcgaactttattgttgcccacccgatgcaaaaacacttgaaatgctcaccaaggtactttcaaaggaccaaattcaagctcttaatgcgttagataatggtctaattggtgttgttgtatggagaagaactcaattaacatcaccgaactcaacttcacaccataaacacatctcgaaaaagc

SEQ ID NO: 43430 - DNA, 387 bp, Gossypium hirsutum
  Clone ID: LIB3272-013-P1-K1-F7
gacaaactgaagatcccatacccctcaatcccttttctcaaccgctccaaatcgccgccatggccggtggccggcgtcacgcgacggagttcccggtctgcgcagttgaagcatattcagagggcctgaacttttggaaggggagtcgaggagaaaacaagacctttggcccctctcgagccgaatccgacgacggcaaaggaccatcgccggccagtccaagggccgattcagatggagcaggtacacggcactggtgcagatgggacgtgcggcgatgggacaagggcggtggcaacaggtcctagcatgcggcgccctagggttaggttttttaatttttgctgaaattgttttaagttaggccatggttggtttgggtctggg

SEQ ID NO: 43431 - DNA, 300 bp, Gossypium hirsutum
  Clone ID: LIB3272-013-P1-K1-G3
atggcggctaccactgcaaatacatcattactcaagccttctcctttagcttcctcctccaaatcttcaatacctatttccaaatccgtcctccactttcgaacaatccctcgaaagctcacgccgccacgttccctctccgtttccagctctctttcacaatcaaattccacccccggatccaccgtcttcttcgtcgccccaacgaaggcccctacccatgatttcatttcccgttatgcccccgacgagcctcgaaaaggcgccgatatcctctttgaagcccctgaacgcgaaggg

SEQ ID NO: 43432 - DNA, 394 bp, Gossypium hirsutum
  Clone ID: LIB3272-013-P1-K1-G4
acggcataaattgttttctttgaactcaaagtcccctgtagcattagggccatgggcgtcgtgacttacaactatgactctacctgccctgtcgctcccgcctggcttttaagggcacttcgttcttgaagctgacaaggtctgatccatagctgcccctcatgcaatctagagtttggaggttgtatcttatgctggccctccatgtatcagctaacgatcaacttggctgtgagcactgcattccaatatatagatacatcatatgctccaggccgatgaaatcattctatgcttcattgacagctatactgcatgcaagactcatagtgacaggccaatacctaatctctacagcattcattctggggttgctattggaatcattaccctg

SEQ ID NO: 43433 - DNA, 334 bp, Gossypium hirsutum
  Clone ID: LIB3272-013-P1-K1-G9
gtggtggccgttcgataaaagatctatacaccttttcgtttaaggaaaccgattggaaatcgaaccaagctctcgatgagatgaataaacggttcttggacttgacattactcgaccttctcaggacccatgatgggaagagggactatcatggcggacaaacaaagcaacatgtgctgtgactgtaccgtaaggactcctggcattattattacttgatcatcccatatgtgattgactatgcccatcctttacttgaaaagctagcctcggggggatacaatcacaggtttgagaaaactgatcatgacttgtgtgatatcgacgaaggatg

SEQ ID NO: 43434 - DNA, 269 bp, Gossypium hirsutum
  Clone ID: LIB3272-013-P1-K1-H4
tttttcttgcgtcaaagcatgggcctttccctttttattaggaaggcgcggtctgtcgacttataacccgtttggcgagcccagtctgagcggtcatatgtgcacatcttggtggtggtaccaaaacaatatatgagatcttttgaggccgtagaatgaaacggttacatgtgatctgtccttgctcatcggttagtccatcctctcagacagaggaagtccgtgctacaagtcgttctgggcgtgctgctgaagggaatcgggttaaa

SEQ ID NO: 43435 - DNA, 397 bp, Gossypium hirsutum
  Clone ID: LIB3272-013-P1-K1-H6
gcttgggcacgagaagaaagagaaatgaagttggaccaaaattacacatcacaaaattgatgtcaatcagaagagaatcatccatgagaaaatgcattcaacagcatattcttcagctacttcaattttccaccgccttagcactgtagcttcttcaaagctccctcttttaccttccctctctctatatcgccatgtccagaattttgagatttgcaaatattaggaaagctgtggaatctgctatttcgaaccagaggtcgaaccgttcgggatttaggaagtatgcgacagtggtttctgtcgggttgcatttgccacagtatagagtgttctcccattataggttcaacagtggaggaaaggctccaatcttgttgcagaatacaaaggaagg

SEQ ID NO: 43436 - DNA, 417 bp, Gossypium hirsutum
  Clone ID: LIB3272-014-P1-K1-B5
gaagattatggagaagagagagaggaatgaacggcctagtgatttagatgaagttcttgtcaagtatcaagtggcgcttgccgatgggactattgtagcaaaaacccctgaagaaggatatgagttttacgtgaaagatggtcatctttttccagcattgacaaaagcaattgtaacaatgaaaaggggagagaaggtcaagctaattgttcaaccgaagtatgcttttggagataaggggaaggaggctactgatgggttcccaagtatcccaccaaattcagttttgaacgttgaactggaattgatctctttcaagcctgttatcgatgttacaggagattctaaggtattcaaaaaaattctgaaagagggagaaggtgctcttgtagcaaatgaaggtgctgcagtaactat

SEQ ID NO: 43437 - DNA, 409 bp, Gossypium hirsutum
  Clone ID: LIB3272-014-P1-K1-C1
attagctactccttctcacgactctgcttcaaccacgatggctaaacacgtattggtgccggttgcgaatgggacggaaccaatggaagctgcgattacgatgcgatgtcataaggagatcgggcgctgaactcatggtggcttccgtcgagaaagagcttatcagttgatgcttgccacggggttaacatagtcggtgatgctctggattgtgattgaaaggacaccgggtttgatctaatggtactatctggaggcatgcatggtgctaccaactttaaaggttgcgcaagtctggaaagtgctgggaagaagcaagctgcagaccgacgtctatatgctgacgtgtgtgctatacctgcattagcgctaggttcatggggtctgacgaacggactgaaagctactt

SEQ ID NO: 43438 - DNA, 309 bp, Gossypium hirsutum
  Clone ID: LIB3272-014-P1-K1-C2
cgtacgcgtggatgctttgaagaaaaatgaagcgatgcatgcgtaagtatgtacaacttcagactgtaaacctgggaatggatgattaaattacatctagtgggcgtgcgggtccttgatactcgaataacggtagatgttctagcactaaatcttcaaacctacgcaccactattggtagggatgtattgattagatataaggtcgagccacgcttacggcgtcgatctgatgattcatgatagactcgacagagcgcactgcctctgtgccttcgtctcatcaatgaaagaactgacctatcttctt

SEQ ID NO: 43439 - DNA, 416 bp, Gossypium hirsutum
  Clone ID: LIB3272-014-P1-K1-C3
tccgttctatttatccttaccaaacaggttgagtgtgcaggaaaagaagcatttacttggagcgggggtggtgcaatctttacaagtggaagcccatttgacccctttgaatatgatggcaaagttttggtgcctggccaggcaaacaatgcatatattttccctggatttggctcgggtgtaataatttccggtgcgattcgtgttcacgatgacatgcttttagcagcctcgtatgctttggatttgcaagtgacggacgaacactacgagaagggattgatctacccaccattttccgatatcagaaagatatcagccaatatcgcagctaaggttgccgccaaggcatatgaactcggtctggcttctcaccttcctcagccgaaggatctggttaaatatgcagagagctg

SEQ ID NO: 43440 - DNA, 285 bp, Gossypium hirsutum
  Clone ID: LIB3272-014-P1-K1-C4
aaatatgtggaagcttgggcgccgctcggaactgagcttgctgaattcgcgggagcacgggggaaagaaattcacactaaagaaatggtcgggggcttatcattgttaacgcaagggctctactgctggaggggctaaaattgctagtacttaaggtgctggagccatgtcttctcctgatgctgcagcggttgggcgtagccctcattatgagccgctttcttggctgaaaacttaattgtgacatgtacgccatgcggctgaacattgttgaggccctaagaa

SEQ ID NO: 43441 - DNA, 267 bp, Gossypium hirsutum
  Clone ID: LIB3272-014-P1-K1-D9
aactcaaaacacctatattgttgaatgcacatttcatactaatcactactgcggctttacttctacctgcttggctgcttactcaatgcatatgactaaatttaatgcccttcaattgtccctgctatatattgagacgatgaatattgcaaaatactatgaccactctattgaatccttactgggggaggctactgatatgatacacggatgtttttaaggctatcttaagattacaatctgtgagacgggcctaaacagacaggg

SEQ ID NO: 43442 - DNA, 409 bp, Gossypium hirsutum
  Clone ID: LIB3272-014-P1-K1-E1
gttttaagctatttagtttctaaatttagttatggcgtatctatttcaagttaaaattcattactagaagccgggttttcctttttaggttggtgcagatgatgggaaagttctgaatcagatcattgattcattgacatctatagctaatccaactgaaaatcatggaaccccaagtcaacaactgaataagatttccctcaaagttggtaagctccaggagactgggatgaagaaagactccgaatccgaccccaaaaggaagaagtcggtgcttatactcggcgccggccgtgtttgtcaaccggcttgcgagctgttagcctcaataggaaccgcttcttcttgccaatggtataaaagttgcgtccaaaatgattccgaagagcagatggacgttcatgttatt

SEQ ID NO: 43443 - DNA, 296 bp, Gossypium hirsutum
  Clone ID: LIB3272-014-P1-K1-E11
gtaaaggagctggctggaaggttaataggaggacttaatttgttgcctaaagatgctattaatgctgcctgacattagcatctgctgttcaaacatgcatgagggtagaaacataatcctcgtttctagtgctaggggaacctaggactggcattcaggaggtggcacaccctgctctgtactatactcttgcacttgctgcatctacaaggctggtataactgttatttgtatcaccgaccactatgaacgacaccgtaaatacttgactgactagaggttcaagaagcacaacg

SEQ ID NO: 43444 - DNA, 399 bp, Gossypium hirsutum
  Clone ID: LIB3272-014-P1-K1-E3
ctcattcactacaacatacttaaaatcatggttcccggtgagttaagaggacttcactacctagcaccagaaaacccgatcctgattgcagccaaccttggcatgatgcaaaactctataccatcttttcatttcaatacatttgaaagcagcctaccgaattcccacatcgtaccatctgcccaggaatttgctgcggtgtcctcaagtatcagcaacacttcaacttcaaatgaggctggggagcagcaggtctatttcatcgacgaaagggaacagcggggaatgatatctaacagagaatctgctcgtaggtcgaggatgcggaaacagaagcacctggatgaactttggtcacaggtgatcaggctccgtaacgagaaccagagtctcctagac

SEQ ID NO: 43445 - DNA, 412 bp, Gossypium hirsutum
  Clone ID: LIB3272-014-P1-K1-F2
ccctctcccagtctcttttatttctctctctttctttcactgctgttgtttttggttgctacagtactgcattttgctttgggggtcagtgaatgaaaaaggaaaaccaaaaagcatgagcttcagttgagctaccaacaagtttttctatacagcccgacttggcaaagcctttgttttacttctcttcgaagaagccaagggtttcttttttattcttctttctctcttcttcatcattgaagatgcctagacctggtccaagaccttatgtctgtgagagaagagcttggcacagtgatagacaccaacccatgaggggttctctcattcgggaaattttcagagttgtaaatgagattcatagctcagcaacaaagaagaacaaggaatggcaagagaagctccctgt

SEQ ID NO: 43446 - DNA, 413 bp, Gossypium hirsutum
  Clone ID: LIB3272-014-P1-K1-H1
attccagttgtcaaaggttgaaggacgaacgacggagaaaccagtgcaaaaatcttctactttattttctttgaaatttattttcattttcgttttgtaatttttttttgttttagactcttagttataaattgaagatattaattttaaaaaatataattgtacagagaaaaaataagcaatctctctcctcttcccgaccatatcgtcatcgacctcttcctgagaacgctgagagctggaaagttaactgagagagttctcaagttgtttatagataccggtaaggacgaggtcttttctcttatacaagcactcaacattcgactcacacttacccctgtccttcctaccagatgttctgagaaattctgagattggtttaatcagtggaacacaaagtacattggact

SEQ ID NO: 43447 - DNA, 415 bp, Gossypium hirsutum
  Clone ID: LIB3272-014-P1-K1-H3
ctccaacagctactgtcactgccccaagctaccccaaactcgccactgtcgccgttcttcggtctaaagtttttattttaaaccgacacaaaccgagatataagtcctcggttgttacattaagctcaagtttgcgggccaatcctatgttgtcaagcaacagtggttcacagggtttcttgtcttctacaggcgcacggtgtaaggcactttcggccttatcatcaccatttttaggcgaagatgacgatgacttgtggcgtacaacgaatgttttacctctacggtcgagatctctctctttaccaagagcatataaggatgacgtattcaaatttcgctaccctgtaataaccgagaagcctgaatggtggttgaggactttagcctgtgttccatatctattagctttgca

SEQ ID NO: 43448 - DNA, 365 bp, Gossypium hirsutum
  Clone ID: LIB3272-014-P1-K1-H7
gtcgctcagaggacaacctttggtatgtttatgcggtaaacatatagcagctgctacctttctttgggatggtctcacttgactgaaaatagcttttaatgctctatgcgccataatccaaattctaacaagaaactgaaccattagagttacattagatagatatatcaatattgataggattctgtgcagaacgtgtcgtcggacaacacaaaaatggagctgacaaatttgcataacacatgttaagggggacttacagtgctaggaatgaacacagctcttgcagaatgctatgatgaaaaacatacggagatctttacttcaaggggggggcgcggtctctacctcaaatttagatattg

SEQ ID NO: 43449 - DNA, 406 bp, Gossypium hirsutum
  unsure (1)..(406): unsure at all n locations
  Clone ID: LIB3272-014-P1-K1-H8
attagatatggttttgaatgtgacataataaataaacacaccgatcttcgtccagaaaacatgaaaaattcggtgggttttgttttaattcttgttttttcatagtttagttccactttttgttgttgttttggggttcagattcaattcaatctgttgctgagttcacccttcaatgttgcttggtatataaagtggctttaggagaggaatcatcaaacatggttcataaactggaagctatccatggcggtggtggatcaattaagttggggactaaagggacaattagttcccttatgacaaaggaactagattccattaaaacaccaaagcaaacaccacctagacacaaatctcangcgattcctgcatgggttgcctgttcttcaacgactctaaaacg

SEQ ID NO: 43450 - DNA, 409 bp, Gossypium hirsutum
  Clone ID: LIB3272-014-P1-K1-H9
aaaaaaacttcatcttctttcttttttctctgggtttgcccagaaaccggcgaggagccagccgtccgccgctgtgtcgtccgccatgccagctaacgtacacgatggccgaaaatcgccccgaggtgcttgtggcggtggacttaatggggcggtgctgcagcaaagacggtggccaggcaagtggtgatgggacagggaggcaacagctagggtttgttgttcttttcgttttaggttttgaattgggctgctgttgagttttgagtttagtaggttttgaggttattggcttagtgagttttggggttttgggcccaaaattggacttgtacaaacataatttgttgagaaaaagtggcttttcagaataagccttttggactacaaaatataaaataaaataaaa

SEQ ID NO: 43451 - DNA, 157 bp, Gossypium hirsutum
  Clone ID: LIB3272-015-P1-K1-A2
gaagcttttgtagacctggtcaagcgcattttgattaaaggttggttgggcgttggagctcaaaggtgtaccatatgaagcaattgattaagatctgtgcaaccagaacgctttgcctcttcagttttaccctggccaccagaaaattccaggtttt

SEQ ID NO: 43452 - DNA, 195 bp, Gossypium hirsutum
  Clone ID: LIB3272-015-P1-K1-A8
cacccaattcacatttcccaaacccttagtttgacttgatcgccaaaatcctcaaacctacagcttcgtcctttgccgttcgatcaaaactcctttataaaacaaaattgttacgaaagatatcatcgaaaagcttagcgatgccgtcccacggcgatctataccgtgagatcgaacacttaatgcagtgcaagc

SEQ ID NO: 43453 - DNA, 405 bp, Gossypium hirsutum
  Clone ID: LIB3272-015-P1-K1-A9
tgccctcaactcttctccaaactcatcctcatcggcgcttctcccaggtttctcaatgacgaaaattaccacggagggttcgagctaggcgagattgaggaagtattttcagcaatggaagccaattacgaagcttgggtaaacgggtttgccccagtgttggtgggggccgatgtgccgacggcggttcgagagttcagccggacacttttcaacatgagaccggacatatcattgttcgtttcaaggacgatattcaacagtgatctgagaggggaactcgggaaagtgagagtgccgtgttgcgtgatccagacggcgaaagatgtgtcggttccggcatcggtggcggagtatttaaagacccatcttgggggacgaaccacggtggagattttgagaaca

SEQ ID NO: 43454 - DNA, 272 bp, Gossypium hirsutum
  Clone ID: LIB3272-015-P1-K1-B12
gcaaaaaggaagtacgtctaaaacagtaacacatttgatacatttttgatcaatttcactgccatggcaactcaaacaccccatatcatcattcatccgagtcctggtatgggtcacctaatcccactcattgagttctctaaacgactcgttcaccaccacagtttaaccatcaccggtcgtattcccaaccgccggttctttaacaccacttaaaaaatcgccgttggatcccttcccgccctcatttattaccttttttttccttccgg

SEQ ID NO: 43455 - DNA, 284 bp, Gossypium hirsutum
  Clone ID: LIB3272-015-P1-K1-B2
atcccaagatcccatcatcttcttcgtcaagcctcgaaagaagatggagagagaagacacgaagtctctaacttcagctttgattcacataacgccagaaaacgatgatttcactctacaacaagcagtgagcagcaatggaattaatgaagtcagaagaaagaaaatatgggatgaagcgaagaaacaagtttggctggcaggtcctctgataggggtgagcctattccagtactgcatacagatgacatcagttatgttggacgacatgctggagagctagc

SEQ ID NO: 43456 - DNA, 311 bp, Gossypium hirsutum
  Clone ID: LIB3272-015-P1-K1-B3
cggacgcgttgttggacatggaggtggttgaagaagctgacaaggctggcatagcatgccgttgtaaagccattagtcctcatcttgatcaactgaccaaactcagtttagactcttaatgatcgaaactgacgaagcgcgtagtttaggaacaaaagagcagattatgtttttagggaccttggcagcgacagatgatagtccaagaaaatctcatgaacatggcctgactatatattctttgatactgccaagagctcaactactttataacccagactagctcaaggctaccctcattctaacctatc

SEQ ID NO: 43457 - DNA, 427 bp, Gossypium hirsutum
  Clone ID: LIB3272-015-P1-K1-B8
ctactcttaaccatgcaataccaagccccttttctctttcatcgaattctatagaggttcttcaggcttaaccttcaagcagaggaaattgagtcagaaaacaagttccatatggcctggaaatgatcatctccaatctgaaaaaaagtcaagtctggtttattagatggtgaaaagcggagaagaaacattggacagtgtgaccaacaggaggtccattgccatgggtaagcatcaggagggaacaatcatgagcaagaagccagtcaaagcttcagcagttgtggtatcacatgttgatgagaaggaacaatcacatccaggtacaggttctgcagattctgaagttagctccaaatgcattgtttgctcaggaaacaacagttgccagactgttcgtgcaagaacaaaactaatgaacattttg

SEQ ID NO: 43458 - DNA, 405 bp, Gossypium hirsutum
  Clone ID: LIB3272-015-P1-K1-C11
ctcatctacgcaagccccctggcgacatacgaacattgagcacaacgtacaaaatgatcttgggcgctccccaggtcgattaattcatgttgtatctttcatcgtctttggtcatcccaacctacagctcatactcggtgggttggaacagagcataaccggattatcttgctcgcccacattgaccctaaactatcgaggtttgatatcacaggctgcccacccttacttgtaaacgaagtgccagtttctgctagattggctaacccacgtgtatgagattggccttatcttatcaccaggggtgcaatgactctgcatacataccacggctggtttagcctgtaactaatataccgcattcctcgtgcacatctgcaaggacgtctactctttctttaaaac

SEQ ID NO: 43459 - DNA, 425 bp, Gossypium hirsutum
  Clone ID: LIB3272-015-P1-K1-C12
gttttaggctccctttgcagacaattatagctacgagagtttaaactgacccagagcttcaaacttaatcatggggattgcaagggcgcaagatgaagagagtgaaagaagggagtttgaagacttcaggaagactttagttgctttggctgccacggaaagaagcaaagaaaatgacgacttcaaaggcctaacgagttcccatatcgccgaccttgatcttcaactagacaagcttgtttgtgtgaccagtggcgtttctttccttgggcttgccttagttaatcgtcttttgctccgtggatactctgttcgaatccttgtggataaccaagaagatgtagagaagctgagggagatgcaagtttcaggggagatgatgatggcttgtaacaataaaatatcagtggtaatagctaagcaaa

SEQ ID NO: 43460 - DNA, 322 bp, Gossypium hirsutum
  Clone ID: LIB3272-015-P1-K1-C5
gcacgagccatgaaagggtattgtgataaatttcctgaaccatcacgcgtcggctgacggaatctttagattgtacgaagacttccgagagagcctagcgaagagtcatgtcttatgtttaacggcctgtcaaccctggaaacgggtcatacggaagaagggtccaacgttcagaagagcacctcacgttgcgtggtgtacgctgcgcccccgactggcccttgaaaataccgacgaccgtgtgccgtgcgagcctactcgtactcataaccagatccatgtctacaaggacgtacagactctgacccatggaacaatgtag

SEQ ID NO: 43461 - DNA, 416 bp, Gossypium hirsutum
  Clone ID: LIB3272-015-P1-K1-E10
tggaaacagtattacagagattaaagatcatcgaacaagaaataagagatttgaaacaggagattcagggaatgaggtattatgagcacagacttctaatcgagcttcaccgtaaagtgaactaccttgtgaactttaatgttcacgtcgaaggacggaaagttcccaacatgttctattttgttcaaactgaaaactactcgaggagattggtaaccaccgttatttccggcatgactgctcttcggttgcacatgttatgtgaattcaggagagaaatgcatgttgttgaagatcaagttggttgtgaagtaatgcacgtagataacactgttgtaaaatgcttagctccatacatgaccaagttcatgaaactggtcacatttgctctcaaaatcggagcacatttagcagcc

SEQ ID NO: 43462 - DNA, 425 bp, Gossypium hirsutum
  Clone ID: LIB3272-015-P1-K1-E4
cacagatcgtcaaagcttgtctgaatggaaagtatttgccattgaactgcccaaaaacgaaaatcaacaaggtatgtgaagaagcagcaagaactttggtgattcaattggatggagtcttgcaactgtatcgagccacaatggcctccggatgacctgttgatgaaatatcaatatatttctgatttcttcattgcacttgcttatttctcgatccccttagagcttatatacttcgtcaaaaaatctgctgtctttccatatagatgggtccttgtgcagtttggtgcttttatagtactttgtggtgcaactcatcttattaacctgtggacttttacggtgcattcaagaaccgtggcgtcagtaatgactactgcaaaagttttgactgctgctgtatcgtgcataactgccttgatgct

SEQ ID NO: 43463 - DNA, 427 bp, Gossypium hirsutum
  Clone ID: LIB3272-015-P1-K1-F9
gaaaataacacgcagaggctgagagcaccctgttcttcaattcacgatgccctcaaccggcggttaatagctctgagctcaaagcaccgataacagccggccgacaacggcggcggagccacacacactctaagggatgccgaaccaagggctggaagctatgcagtaccactgggctggtatggccctgattcctcaacatcaagggatgatgacctatccttctcatcattacatggcttataatcaccctcatcttgattatcaacaacagtatcaacagcaacagttgcataaacaacaacatggatctaattcagatgaaggtaaaacgatctgggttaggagaccttcttcattggacggatgaaacttatcttcatagtttcttctgtcaatctcgcgaggactctgcttaaaaatgata

SEQ ID NO: 43464 - DNA, 433 bp, Gossypium hirsutum
  Clone ID: LIB3272-015-P1-K1-G5
tgaaagaggaaaaagtgcaattgcattagccgcacatcgtgccaaagttgctgccctacaaaaggcacaagatggcaatgctgacagcatgatttggaggatggaagcctgatggagtgcatggcaattgttcatattggtagctagtgcagacttgttgactaacccattagatgttacaaggtagaagtcatttttttggactttggtttatatgcctctattaatctgtaaatagagtataatcattctcgggttcgaacttccaatggacctgcgtgaatctttatatactcttaaagcagaatccaactatggagttggagcttggttttccagttagggatagagctaatggaggtttgatttttaggttaccttcctcgcttcatggtagatggtaaagcactcccattaacctttctatagtttt

SEQ ID NO: 43465 - DNA, 277 bp, Gossypium hirsutum
  Clone ID: LIB3272-015-P1-K1-H3
cgcatcgttaaccccatctactggcggcgtcgtcggatgcaggatcatcggttacttcgctaggcagttcctaatgcaatacttacatatcttccgttccaaaacggacctcgccacactatgatcctaaagcgtatctacctcccattggtgaggcatggccactgccctacatcgagcagagcatctttcgaggctggcgcttaaatcttccacggcaagaactacctatctctctactactccgatgtcaccggtggggaggccaaaccgtcac

SEQ ID NO: 43466 - DNA, 342 bp, Gossypium hirsutum
  Clone ID: LIB3272-015-P1-K1-H7
ctcgctctctgtagccgtcaactgcgtctatctcttcatctctctgaaccaaagaggctgtagcttttagcttcgagagagaccatgttggcttaccaggtatctcatgtccggcgacgagcttctttctgactcattcctctacatggatattgtgaatgggatgctctggcaaggtgacggactgtggattgtgcaaggagctggcaatgcttacattgctgcccattattcagccgatggtgctggtctggatggaggtgttgttaaccaagcctcgaaggctgtagacaatgtcgacactttcaagctttaggagcctccccctttcaacaagaagca

SEQ ID NO: 43467 - DNA, 365 bp, Gossypium hirsutum
  Clone ID: LIB3272-016-P1-K1-A5
tggtgttggtaatttaacgagtgagattgaaaaaatacatggcttgaaatgtttgtcgatttttagttcgactgtcataagtttttatactttcttcagagcataaagagaatcaaagtttaaaaactcatgacagtcttactaaatctcaacagacaccctaacccttgacacaccaatgtctcaccccatggcttatgcaccacacaaccgcagttctctatccggttacaccctaccggtaccttccgcccttcttgcatcatttataaaccccctcacatcattttcttgactgataacacccccatcagagccttcaaaaatgctgaatccattgatcttccattccccatgagccaacc

SEQ ID NO: 43468 - DNA, 348 bp, Gossypium hirsutum
  Clone ID: LIB3272-016-P1-K1-A8
tccggtagagtagactcgtaagcacttttactttacacaaacacacatgagatgcctgctgccgagcatggtaagggcaacgcaacatggtgtctctccatatttatagcttatatatcgcatcagtttctcctcttctatgcactagcatgagacatggtactgggtggccatacgtgcgattgtcgagagcgcccaccgtacgcgcgtcatctccaacgcgaggcaatactgcggtggacccaatgggaatccccaactggagcacgaacgattcggtgtagctcgagtgcttcggctaaaaagcgtaccgtggtgtgctgctcatcgtaccctacagcctgcacg

SEQ ID NO: 43469 - DNA, 380 bp, Gossypium hirsutum
  Clone ID: LIB3272-016-P1-K1-A9
acggcatttacgaggagtgtaggcgatagtatagcggagaagattggtgtgattgctgctcctgagatctcgggtgttccgcttactcgtaatcatatattttttggtgttgcaagtgatggagttttcgagtttatctgtatcaaaactggcgtcaacatggcagacagaatacgcagatcctagggatgcatgtgctgcaactgctggagaatcccacaagctctggttggattatgaaaaacaccccgatgattttacaatcatcattgtacagattaaaggcttgtgtaattcgggtgctagggctacggataatgaagtagattgcaggccactggttatgaagtcacataagggtagttttgatacgagcagcg

SEQ ID NO: 43470 - DNA, 384 bp, Gossypium hirsutum
  Clone ID: LIB3272-016-P1-K1-B1
caaactctctcttttctaaattccctcttcaccaggtccgttactctatcacaccagcaacaaccttgagcttgaggatgactcattctcactcttctcaaaatccagtgattgagcagcagagagttataattccaaacaagcatggagaaaagcttgttggattgttacatgaaactgggtctaaagaaattgtgatcttatgccatggtttcagatccaccaaggctgatcgtactatggtcaaccttgctgttgctttagagaaagaaggaatcagtgcctttcgttttgactttgctggaaacggagaaagtgaagggtcatttgagtttggtaactactcgaaagaagccgatgatttgcattccgttatccagcact

SEQ ID NO: 43471 - DNA, 299 bp, Gossypium hirsutum
  Clone ID: LIB3272-016-P1-K1-C10
cacattctctcatacaaccatttctttaattcaactacactacatatgggcataaataatttaagtttccactcctattcacaaatcaaattgcgtgaggtccttcataccgaaggaggtcagatctgtgaccatatggtggctaaggatggcatagaggtttgcgcagatcacgggataaatcccaccggttgattccaaagagactgggatcgtcatctcgggagaattaacgattactacaatgaatccagtgggggaggattcggtgctcgagctcggctcatgagatcttgcac

SEQ ID NO: 43472 - DNA, 385 bp, Gossypium hirsutum
  Clone ID: LIB3272-016-P1-K1-C3
ctcggatccaagctgtgcttcagttcttcaatcagtcctctgtgctagatgcgatccattttcagcgcagttgttcgcaattgataccgagactcgtacggtgcctctcctttgcaactctactgtttcaacaaattcatctcagtctaaccaagcaacaaatgatttctgctctaatgtatgggatacatgtcaaaatgtatctatgttgaattccccgtttgcaccttccttgcaagggcaagccggagcacctgccaattcgaatttcaccaaattgattgatctttggcagtccaaaactgatttctgtaatgcctttggtggagcatctactgatgaatcagtttgctatgatggtgaacctgttagattaaatgagacg

SEQ ID NO: 43473 - DNA, 348 bp, Gossypium hirsutum
  Clone ID: LIB3272-016-P1-K1-C8
ccaaaaacaaaatttttggttacccggtcattactacctctttttctcatctccatcgcgcgccctatgtaccccaaattttgtacttaattctatttccctcttaatttcaaaattccttgaggtcctctgcccccaatatctagcaataccgttcaaattcctaaaccttttctttttctctccatgaatttatatatatgcatataacaaacgattcattgccttggggttgggagtctttctgaatcaagacacatgggttttctgatctataccaaaagaccactgggactgatctatagaattcccattatgagagaccggctgaactgtactggaggccga

SEQ ID NO: 43474 - DNA, 388 bp, Gossypium hirsutum
  Clone ID: LIB3272-016-P1-K1-E5
gagagattttgaactattttctctgctttgggggagttcgtttatcccactgtttccatcaccatgggaggatctcgagctcaagtcaataagcctcacaaaacccgtttctcctctaaatcttctaggaacattcataaaatctctcaaaaagataagaaccggattgcaaaatcgaaccgtaatgtaacgcagggagctcgagctgctcggcttcagcgaagcaagatgctacgagagcagaagaaggaagctcttttgaaagaaaaaagggcttcaagtggatcagccagccctccccgtgtcattcttcttttccctctttccgcatccgtgaatgtaagttcacttgctgaagacattttgagattgctttcagcagatgtta

SEQ ID NO: 43475 - DNA, 382 bp, Gossypium hirsutum
  Clone ID: LIB3272-016-P1-K1-F11
cgtgacttctggttattgcgttatacttctgttctagaagatggaagcctcgttgtctgtgagagatctctgaagaatactcaaaatggccctagcatgcctccagtgcagcattttgtgagagcagaaatgttgccaagtggataccttattcgaccttgtgaagggggtggttcaatcatccatattgttgatcatatggatttggagccatggagtgtgcctgaagtgttgcgcccactttatgaatcatcaacagtgcttgctcagaagacaacgatggcagctttacgacaactgaggcagatagctcaggaggtttctcagtctaatgtgactggttggggacgacggccagcagctttacgggctcttagccaga

SEQ ID NO: 43476 - DNA, 280 bp, Gossypium hirsutum
  Clone ID: LIB3272-016-P1-K1-F6
aatacctaaacagtcaaatgtttccctggatggacgctgctactcatgttgcatctgaaaacctattctataggagcctgctgacttgacctgtgtcatcaaattaaatccttttgtcccaactactaagattttactgacttacgtggtgtactgaaaaacataaactaactccactctggactcaaattgagaaaaagcctttgcttaacaccgtagttcctttgggatggtggactgacactctaacggacacttctgtccatacaatagatcgagg

SEQ ID NO: 43477 - DNA, 378 bp, Gossypium hirsutum
  Clone ID: LIB3272-016-P1-K1-G12
aaaatttctctctttttttgtacttttggttggcctggtgacttcttggttgttgcccctgctgctgagctgccgtgtacagacttcttttatacaattgaacactgttcttccaaaattccaagctatttttgaggtcttttgggggcattagactaatgggtttctcttaaaatccttaaatttgggagtctttttcaagttttgtacctaaattcatgccaaacaagaaaactgaagctcttggctttgcagttacttcgatctctttctggcatctggatctgcactgtggaatttattgtgtttttagttcttcgagggctatgaagtgttttatattcctcagctggagaagaaaagatgaaccaaagaccc

SEQ ID NO: 43478 - DNA, 335 bp, Gossypium hirsutum
  unsure (1)..(335): unsure at all n locations
  Clone ID: LIB3272-016-P1-K1-G3
ctcggttcacaataacgagcgttaggctttatgtgccttaacaccaagtcaatgaatgggtgtaaaaatcgcaagtgacgtatcttcctcgcgatttgacagagaatacggggtaaatttggtggttcagaaggagcttactcttgntctgtaatttttggtggtttagattcattaaaccaggtgatagaaccctgaagtgggttctttacctcggttttgaaagagaaaataaagggggacgacaaattcttgggtatcaatagtgcctcgatctttcgtgtaattgttctggttcaccataggnnnagctttgtttagatgcattaaacaag

SEQ ID NO: 43479 - DNA, 384 bp, Gossypium hirsutum
  Clone ID: LIB3272-016-P1-K1-H9
ctttcccatccttcgctgttaaactcttccacacttaacttctctttggtgtttccgttttcatttcgaagatgaagaaagcggagctagtgttcatcccattccctgcaaagggccatttggtatccacggttgaagtggctaagcttttagtggatctcaattccaacctctccatctacgctctcatcatcgagcgaaccgtcgacgctgaaagcaccgtctacgccgactctctcaccgccgccagcaccaccactcgcatcaaattcattcacctccctcaacctgttcaagacacagatgcggctaactttattaggagtgtagttcaaacccatgaaccactcgtgagagaggccgtcaccataatagttgagcact

SEQ ID NO: 43480 - DNA, 414 bp, Gossypium hirsutum
  Clone ID: LIB3272-017-P1-K1-C10
aaactaccccccatcagatgccttcctctttgcagctccaccgcaccaccaccgccgttggcacctgccaccaccaaaaacaacaacctccaccccctaccactctcacgacctttttccctcttcctactggcgtctcctttcccgacatggtctccgcctaccacttccacaccttgggtcctaaccagtgttgctccgctgtggttcaaaccatcaacgcccctgtcgaaaccgtctggtcggtggttcgccgtttcgataaccctcaagcttacaaacacttcctcaaaagctgtcatgtcatcgtcggtgacggtaacgtaggcagcctccgtgaagtccacgtcatatcgggtctccccgccgctttcagcaccgagaggcttgaaatcctcgacgacgaacatcacg

SEQ ID NO: 43481 - DNA, 418 bp, Gossypium hirsutum
  Clone ID: LIB3272-017-P1-K1-C9
attcctgctcttttgttaatcaagtagagatcagaggatgagtgaaggcaacggccaaggcggcagccgcagtggagatgatggaagttgtagagatcctggaagcagtaacagcaggccgccgaaaacgcctcagacacccattagcgacccaccaatgaagccaccacagaggggaggtgtgatgaagaggattataaaagattttggcaaaaccttgtcttctcactcttaaaccgcttagattattatagtctcgtctcttccatatgtttaattatgtagtgagcagctagagatcaaaataacccacagacgaagtctaggataagggtttgtgtgttggtttgtctaaaattatttctctatattatgaatccaagataccccaaagaaactgaaaggtccaatttcacta

SEQ ID NO: 43482 - DNA, 415 bp, Gossypium hirsutum
  Clone ID: LIB3272-017-P1-K1-D11
gtatcttatccatatccgacgaacagaatttcctgccaaagtagttcattggtgtttcctatccgaattctccgcttagaaaattttgctttccaaatcaaaagaatcataaaaaaggaaaaatggcgacctctgctttagccattgcaactgcaaagccattgacccatcgtttctccaactctaagcacacttcatcaccatccttctcctgttcttgctcttcttccacgccactcccacctcccaacgaacccaaactctctttcagctcaaaacctgttgcgaaacaatgtgttttcaatgtgggtgttgggcttttagcaacttcacttcttgcttgttcaccattggaggctgatgccaccaggatcgagtattttgcaactgtgggggaacctcaatgtgagctcaa

SEQ ID NO: 43483 - DNA, 429 bp, Gossypium hirsutum
  unsure (1)..(429): unsure at all n locations
  Clone ID: LIB3272-017-P1-K1-E5
cgnntccgttctnnagatgaggcncnncaaagcanntaaaaaactcanttagaactnnncaagttgctttagggcgcgtgtgtngtgggcncnnttcgtngcgtataacngtannngatggtngnncttgtcnnntgggaccttccannattcnaaaaatnngccatntnngatgacncnntttatanngctanncttcanngatttctngnnagatatgnnacccatatgctnnngtttacaagnntcattctgnnttctgccatttaaaaatccnnncaatttctttaaaaatccnaagcaaaaggggtattccnnngaaattgcaagggcttatctnntgcagaccaatannatgttnnacgtcgcnnaccaaagctttacactttttcttgagtggganannaccaattattttaacnnttgcca

SEQ ID NO: 43484 - DNA, 416 bp, Gossypium hirsutum
  Clone ID: LIB3272-017-P1-K1-G11
tttaatttttcttggtttcatttggtagcagaaacatggagttctcgctcagacttcagtattaccgtcttgtgtgtgtcatggtgctattacctgcactgtgttactcaaaggactatttcgtgaagtccagagcaacttactatggcagttccgacggcttaggcactacaagtggagcttgcgggtttggagaatacggaagaaatatctctagtggcaatgtcgctggggtttataggctctacaagaatggagttggctgtggtgcttgctatcaggttaggtgcacaacaaaccctcaaatctgtactaagaaaggggtgaacgtagtggtgactgactatggccaaggcgacaacaccgatttcatcctcagccaccacgcatatgaagcgatggcacgaccaggcacc

SEQ ID NO: 43485 - DNA, 302 bp, Gossypium hirsutum
  Clone ID: LIB3272-017-P1-K1-H12
ttgaaattaaaataacacctatcttctcttctctcacaccttaataaaagggggcgacttcttcttttatggagaaaccgaccccatctccgatctcattccccatcctccctgtttacttcttactacactccacagccacactctccatctacctgttccttcgctattccctattccagaaaaactttctcttcacgttcaactttcttaaatcaaccatcatctacttcttcaccacgttttaacctgcacagaatctcatcatcatcttccaatgcgcagttcattctctacaacct

SEQ ID NO: 43486 - DNA, 379 bp, Gossypium hirsutum
  Clone ID: LIB3272-018-P1-K1-C9
cggacgcgtgggcggtctgttcattaaaacagtgccacatgtagggttaaggagagttttaccagtttaacttcatttcatttgattcaacaactactacagataaaaggaactgaaagcattctacatttcaaaatccggtgtcaaaggtttggtaaatgctggaatcactaatgctcctcggatgtttatgacgatatacatttcatctaacactttactgacaacctagaaaacccaatacaaatttggttttattagtttacaaagtattgaatatgatcctagatctcttatagagatcattgttgaagttaggcattcattagatacatgggtctattttcagattgttaaccatggttatactgtatgtgtt

SEQ ID NO: 43487 - DNA, 351 bp, Gossypium hirsutum
  Clone ID: LIB3272-018-P1-K1-D2
aagagactgtgcatataaactgaccaactagcccgaccggccaacttaccgtaggccttaaacgatggcgtttcgtaaacctaacatcacaaatggcatacttagctggataaccttccaaggctgaaaagaaaatcttgtacgacgcgaaactgtgccacctgttagatgagcacactcagatctggattggcacacgcgacaaagtatactcgaaccatctctaaaacatgttgtaaagtggctgacactgcatactcagcgtgctgtaatggtgactagcattatgatgcacaacgtggtcaggatgcatgctgagaagactgtgaaccaagctttcattaactttat

SEQ ID NO: 43488 - DNA, 436 bp, Gossypium hirsutum
  Clone ID: LIB3272-018-P1-K1-D3
aaagaaatggataaagtaaagtttgtgatgctgtttgtatttttggttagcttactaggagcaacaatgggcgagcaatgcggtcggcaagctggtggggccttatgccccaacaacttatgttgcagtcagtatggatggtgtgggaacaccgatgattactgttcaccggaaaaaaattgccagagcaattgcagaagtggcccccctccccctacaggagaaggagcgactgtgagatctacttaccatttctataatccagagcaaaatggatgggatttgatggcagtgagtgcctattgctctacatgggatgctaacaagccatattcatggaggagtaagtatggttggactgccttttgtggccccgttggtccttctttcccggctgcttaggggaggtgcctgagggtaagaaactcaaggactg

SEQ ID NO: 43489 - DNA, 411 bp, Gossypium hirsutum
  Clone ID: LIB3272-018-P1-K1-D6
ggcattacatatcgaaaatgctccccttctgactgatgtgcttataggtgggaacttagatgatgaaccagctttcgctttttgccccctttcgggatatctttgtcagctgaaaagtcttacattggagatgagtgcttataatatgacatttccgaatttccctgaattgacaaatcttaggcacttagcagtaagtgcgtatggtggatatgatgacgatcttcttgtcttgacttccttgattgatgcatctccttctttgaacaaactctcgttggagttgaatatttggagatcttcgacatacaatcatgcacataatacgagtaatgttaccggaaaacccatccctagtcttaaagtggtacaggtgatcggctttagaggttttaaaatcgatgtggattt

SEQ ID NO: 43490 - DNA, 436 bp, Gossypium hirsutum
  unsure (1)..(436): unsure at all n locations
  Clone ID: LIB3272-018-P1-K1-E2
ctcaagacaagtttcaaagcctctctctattttactcctctttctctgtctttcattgacatggatctcctcagtttctgagctatcaatttcaaacaagattcaatggccacgactgaggaatgtcattcaattcaacttattgatggagatggattgttcaatgatgttggaactgaccgtcttatcaaggaaattaagcttgctgaatgtgggttgtcatatgctgtggttgctatcatgggacctcagagcagcggtaaaagcacactgttaaatcatttgttttgcaccaatttcagggaaatggatgcatttaagggaaggtctcaaaccactaaaggtatttggatggcaaaatgtgctggtatagagccttgcactctagtaatggatntggagggtactgatggaagagaacgaggggaggatgaca

SEQ ID NO: 43491 - DNA, 409 bp, Gossypium hirsutum
  Clone ID: LIB3272-018-P1-K1-F1
agaattccacttttcttcgaattataattttttcgctgtcctcaactctttgacagtgttttttttttcctggtgatttcatcgtgaaaaaaatcgcagattcttagtctcatcattttattttttatttttaaattctgagatatttttatttttgtttacattattatagttgtagagagagatctgaagcttttaatttttttccgtcagcgatctgagaattttctgggaaagaatcgaaggtttttgcgctttgttttcccccctttcttttacattgtctttactaagacgccattggctgttcgctgaaataaagagataaaaaaaaaaagggctgaagaagatcgtctcatttttaccattttcaagagatccaaaacaataaatattcttttttttaaaa

SEQ ID NO: 43492 - DNA, 279 bp, Gossypium hirsutum
  Clone ID: LIB3272-018-P1-K1-F5
gggcagtccatgcttgttgataattcactgctggtgtttgagcttttatgcttcagctgattagcgaaatgcatctgctggttttttttttatttcaggcatatgcttttaagagtgcacacctgcaactagaatgatgttgtaagagctttgagtttgtagtctttttttaattctataatccctctatatgtgaatattgtaggtatgaagatctcatgttttatgttatatacatgtgaagttttatcaataaaatgtagtctgcacttagctttt

SEQ ID NO: 43493 - DNA, 281 bp, Gossypium hirsutum
  Clone ID: LIB3272-018-P1-K1-F7
ctccctgatatcaaattgcagaagaaacgaaattcagcaagcgcccgtcccatgggagattccagccttgcacttggtacatcagttcataaagcgcttggtggcggctcactttctgatgtgctattggggagaaaatggcgtggcggatctgtgatgctagtcttggctacgacgatgtgggtcttattcgaagtagccgagtttaatgtcttaactttcggggccaacgtgttggtgcttcttattgttattctcttctgtgggaccaaatctgcttt

SEQ ID NO: 43494 - DNA, 151 bp, Gossypium hirsutum
  Clone ID: LIB3272-018-P1-K1-G11
caagcgtgttctgtattacatactcatttagcccctttcattagcggcgaaaagactccacttttcaatatcagtgaaaaacgtcttgctcactatgaaactgagacttcaagggtcgctgtaagtggtgccgtgactaccgaggctacat

SEQ ID NO: 43495 - DNA, 441 bp, Gossypium hirsutum
  Clone ID: LIB3272-018-P1-K1-G2
attcatttggcttctgtcggctaaggatgtctcactttcggcggcttctttctctgcttgctcgaaatcaacctcaagcctctcttttcaaagaacctctttcaccagccatctcttctgcaagtgtatccttcaacagtagatatgacttttatagaagatggctccaaactcaacctgatccttccggcctggctattgacaacaccgaaaaccaagaagccgacagtttaaagcctgcttcttgctcagctaatgtaccttcggagacaaacgattctgccatgaagcatactgctatatctaacttgaaaacatctgcaaggcacgatcttgccatgatattcacgtgcaaaggctggggaaccccgaccggtaaaaacggttgccggggatcatacgaaaaaggtgtggttgtggtgagatgtggaggatgtaata

SEQ ID NO: 43496 - DNA, 384 bp, Gossypium hirsutum
  Clone ID: LIB3272-018-P1-K1-G4
gtttttcttgcatccctttcatagagtggaagccatggaaacttcacaacccctgtccattgggagcttttcatacagttggttagtgaacctaaaaccttctttagatagtgtagacagctcccttagagcttcacttgatgcatatgatgaagcttccttcattgaaaaggacccgaggatgccaccttccaagaggttcttcagaaattctcaggattttaagtttgattttcccattttacaaactcccctcacccttgttcatgccgatgagctcttttccaatggccatgtcatgccttttttcattaacccttcgaaggtggaggcatacgaagtcttcggttcgacttcatccctgcctactaccacttcacatgc

SEQ ID NO: 43497 - DNA, 314 bp, Gossypium hirsutum
  Clone ID: LIB3272-018-P1-K1-G8
gatgaagcagctgaggatttcagttcaaaacaacccaacaagaacttggatgctacaccccaaagtcagcttctgaaaggagaaagtgaagagcaagtggccatattggtgaaggcaccccaagacactagcccaaaggcaaaagggaatgcaccgttgtggcgtcaggtagtgggatttcttcatcagattttggaagagctcatggcaccgccaacacttggtgcaattttcggtttcacctttggagcgatcgactggctgagaaaccttgtaattggtccgggggcttcactaccgggtaggccaaagac

SEQ ID NO: 43498 - DNA, 273 bp, Gossypium hirsutum
  Clone ID: LIB3272-018-P1-K1-G9
cccacgcgtccgcggacgcgtgggtctatttcttctcattcttctgctctcccactgtttctctcttcaccctttgccattcatctacaaagaaatttattattttaaccagagaggaaacaagaaacaatttggagccatttagttaaaaaaatgaaaggtgaatgtctagaaccccaaaatgaaggtgaaaaccccaataataatatgttttcaaagcttcaccaccctttttctcatcactgtcaactcattcatgattccgataacacc

SEQ ID NO: 43499 - DNA, 230 bp, Gossypium hirsutum
  Clone ID: LIB3272-019-P1-K1-B12
gaacggaagggccgggccgacctcacccgtccggaaaaaaaaaagctttttcacttctattctcgagacaattccactacaggtggtgtgcttcacactattgaaaggctatcacagagatctcactaatataacgagctattcaaggtagagtctctttttataatactaaaactaatgcaaggcgccttttataagatcaatactacctgaattctctcttattttaa

SEQ ID NO: 43500 - DNA, 377 bp, Gossypium hirsutum
  Clone ID: LIB3272-019-P1-K1-B5
taccttctggctcaggtctacccatctctcccactttgtttctcacttctaatgcccgagggccgtcactttctcaaatcaacacaccgagtctgcacttaaagctgttaatgactctctctctggaaaatcatccatctctgggacttagctgaccaaggatgacataaaagttcatgctgctgtcatgaagaaccctggagattctttccataatgcaagccaggggtgtaattctgggtcttctcaacttgcggccagcttccctggcaaagctgttgacgtcgggtttggtggcatagctgctccagctgagtctgctaaagctgaggctgcacatgatgaccacgacttggatctattccgtgatgagacag

SEQ ID NO: 43501 - DNA, 373 bp, Gossypium hirsutum
  Clone ID: LIB3272-019-P1-K1-B7
gacttttcaagtcctttctcctccccatttccatcaaaaggccgccgttaagttatcggcgatgtcgacggcgccgccgatttccgccgaccgggtacagaaattcatcgaagaccttgaagcccagaagaaaatcgtatccaaatgcaccgaattattcacaaccctaaccaatcatttcacttccctccaaaattccctttcccaaaaatcccaatccctggatgccaaattcttatccctttcttccaaattctgccaaactctcgattccctttctcaacgtgaatcttccctccccgaccgtgaatcctgcggcgctgcccacatcgaaaccctaaaagaagcaggtttcgccgaattcaaggaccct

SEQ ID NO: 43502 - DNA, 328 bp, Gossypium hirsutum
  Clone ID: LIB3272-019-P1-K1-B8
attttcacaaacttttttgctgatttttgctctcttttttctttaatcctaagtctgttttcttttttacatttatgggcaaaagatggggtcttacccctggttcccaacccggtactaagaagttttttacaaacaaattctattccaccaaccgtggcggcggttcttttatcgggttgtagcaacaccaccaccaccaccgggacatgtttgagttccctgttagtcttttgggggagagcgatgacgaccgccgtggaactttagatttttctttgccgtgtgatgataccaagattcccgtcgatgagggggattttttctc

SEQ ID NO: 43503 - DNA, 182 bp, Gossypium hirsutum
  Clone ID: LIB3272-019-P1-K1-C11
gcaactgcttacgcaatggataaattcacgcatgctgacaaatgaacggtggggaacttcgccactcgcggtgaaacagtaaatgattacttattatctgtaatggtagccgcaagcctaattatctaactaatgacacgcataagttgtccaacgagatcactactgaacatggctactat

SEQ ID NO: 43504 - DNA, 308 bp, Gossypium hirsutum
  Clone ID: LIB3272-019-P1-K1-E3
ggaacggaagggcgcggcccgacccacgcgctatcggcctgagtaatgttctctccaactaacctactttcttcgagtaccctggtgcgtgcttctgtggatgttatcatgttaaaaccgaaggtattgatttccccccactcagattggaaaagggtacccttagatttcagctaaagagacccctgcccgtggttttctttgttaccttaaccccaagcaaaacaacaacatgtgtgtttcacaggcttttcaaataccactttatgataagcatgagacgggagatcgtttgatggtacacataa

SEQ ID NO: 43505 - DNA, 323 bp, Gossypium hirsutum
  unsure (1)..(323): unsure at all n locations
  Clone ID: LIB3272-019-P1-K1-F12
cacgtccgactacaaacccctcttctccaaggattcaaagaaaccaaaaacccacgccggtatccttccaagattagacggaaaacangaggcaactatccccatgaagcatcgctttacactaaggaaccatatcgatactaaagaagcaaccacacttatacaatgcttacaagacaacggactcaactgtttgcgcaactgccgaagacaccaccaatgctcgagccggtgcatatcattggtgatgctattagtgcccttacaagcaaacgatcctatatcgttgcaactaccaagaaggtttacgttgatcctaaacc

SEQ ID NO: 43506 - DNA, 282 bp, Gossypium hirsutum
  Clone ID: LIB3272-019-P1-K1-F6
ttgttcaaaacaaacagcaaagaataatcatggtttcacaaccaaacactatgtcacagaggcaagctaaagttcatggcaagtggagacgcaatttcagagtgatggctagctaaacagagcttgcccctcctgggcggttgattgcaccccccaccaccgctgttcatggtgcttctatcggggctttcatggctaccctcaccaacgatgtctcctactctcttccaactccccctcaggcttccctaaaactcaaagcctggttttgttaaacaagcc

SEQ ID NO: 43507 - DNA, 254 bp, Gossypium hirsutum
  Clone ID: LIB3272-019-P1-K1-G6
tttattttggaaaagggggggattttttttgaattttgaccaccccttttaacccgaaaggaaaaccttccttttccgaaaaaaggttttccattttcctccataaaaaaagacttgaataacaagtgcttttttcttttgcaatacaactcgtttcaaaaaaaaatcccatttttttttcacaacggaaaatcaattccaaagccaattgttttccttaaatacattgagaaaacttgaaaaacctatcccat

SEQ ID NO: 43508 - DNA, 418 bp, Gossypium hirsutum
  Clone ID: LIB3272-019-P1-K1-G7
aaaaaaaacctccctcttattttccctcaaaaaatcgcttgaaaaaaaagaaagagcttgaaaatgggttcgagtagcagtcgaccggggttgaacccatcacagggaagactcaacctccgattcaaccggtttcccagactatcttctttattcacctgcagtagcggttcttcttatgctcctcttgagatggaagattatcccacccaaatcccagtgaagagttcggaacaccgtgactcgatttccaacatggtccaaactcccttagaggaatctggttcgatatgcagtacggaaacggggctcagctgcactggtactgaaaccggaacttcaagctgaaagcaataacgaagccggtggggatctgtcgattgatggtggttcaagagatgtagaagcaaatgattgt

SEQ ID NO: 43509 - DNA, 406 bp, Gossypium hirsutum
  Clone ID: LIB3272-019-P1-K1-H8
gtcgatttcgctttcgctaagatccagctacaaaattccacaagtccatcctgacattttcctttgtatttcaccaactactgaaatttgatgttcttctgagattcgttaataggacttactagatggtttcgttgatggaagcatatgcaatgaactttagaaaagaaaattttgatttaaatcgatttgaatgcttataaattatcgatttagaagtttaatctgaaattctcagattcttcgattataaacagttgttatttagttagtcgatcgatcttcacttcgttttagtacttaataaggaaaccatgacattggcttccccaaaaggcaatggtaaaatggttgctttccctcggggccttacttccattgcagcctcagttgtgatactagcaat

SEQ ID NO: 43510 - DNA, 290 bp, Gossypium hirsutum
  Clone ID: LIB3272-020-P1-K1-A4
ccaacgtggatcaatactaacctaactccctcttttcgagagggctaccatgttttcgggatggctcacatctttgattcatttaatgtcacattcattcatgtcaccgatttctctggaaagcaaacaatcgttcctatttctcgtgacctgatggtcaaagctgatagggagaattcttccccttatgcatccatgcttgcagcccaagatgtttctctactccccaaagagtacgatattactgccctctatattaatcataagaacctctgaacggtattagacca

SEQ ID NO: 43511 - DNA, 381 bp, Gossypium hirsutum
  Clone ID: LIB3272-020-P1-K1-A5
tacatttcccggcctgggttcaccgatcattcatgtggatgttacccatgttgggtggcgggttttggtcacatctgatacgtatgtagtactaattataactctatttacagatgaagacggtaagccaaaaaccggctttagcagtagaatggtgctatgaaattgcaggacccagattgttcaagatgactcccctggattcacatatagctgacaacaacaataagtcccatggtacccacttctcatggttcacgcgcataccccaacaggatcgacacctagttgcaaccgtggggaaatgcatactgatatggcaacccatgcaagcgagaacagcgctcactaatgctatcggaatcaaacatgtgttaagag

SEQ ID NO: 43512 - DNA, 386 bp, Gossypium hirsutum
  Clone ID: LIB3272-020-P1-K1-A6
cctttctccgttcttggcatctcctagtgttaatcttttagagagagagagagagaaattaacaggtaaagcagagggagaatcgtgaaagattcataaggtggatctaagacaagggaagaggccattgccgccgtccgatcatgaatcggaagagaaagaggaagcaccccctcagttctacacggctaggtctcaacaagacaccaacgccatgattcaagccctaactcaagttattggaaacgataatgataataataatccactacttgttcaacttcatcaccataatcaataccaataccaatctcaacatcaacctcaagggaacgtgaggagaatacattatagaggagttaggcaaaggccatggggcaaatggg

SEQ ID NO: 43513 - DNA, 295 bp, Gossypium hirsutum
  Clone ID: LIB3272-020-P1-K1-A8
atgacgcgtggggttttgaatctagggatttgcgggtggagaagacgagagcgtcatctctctgattaaaagctcctgttcaggtagaatacttttcctgcttagcgtcgtgacctttgctgcccactccccatgactctactgcgtattctggaggaactaccggatttgcagtaagatccaccctctcgttgcagtgctcatgcactagctgaagacatgtttcattgccaagcaacaataaccttacccttaaatagcccttatgcctgctgtgtcgttttagttaccattc

SEQ ID NO: 43514 - DNA, 300 bp, Gossypium hirsutum
  Clone ID: LIB3272-020-P1-K1-B1
ccggtatctgaattgtccggcgccaggccacgcgtgcgattctttgttattctccttctattggactcgctccgtttgctctcattcggaggagaccatccctctgtgtcaaggtgcatgcatcagtaaacgaatctgatcagccaaaatggtgcaaaaggaatgcaggaccaaatatgattgatgttcactctacaaaagaatgtatcagtgccttaagtgacgctgaggatagattagttattgtagaatgttatggaacttggtgtgcttgctgcagagcattatttaccaagctgt

SEQ ID NO: 43515 - DNA, 400 bp, Gossypium hirsutum
  Clone ID: LIB3272-020-P1-K1-B4
atgcaatggctttaattttcccgaaactagacctcgccaactgcaggaacagacgggcgtcctcttacctcaatggcggctgctcaaactagaaataccccttgtccttcccgcgcaatatgcacttaacgagaaagaggaaaccttcgtttctacgacaaacatagcacagagcctataggttgtaaagcctgtccatgcaggcactgttactattgatgttaccactgacaaattggacgagacttttctctaaccagcatttgcaagcactggtgcacctcctcctgcttatgaaacaagcactgcaacaaatgcttctactgggaacagttttcaagatgctgcagattgaatctggtgtgactctgctggaactccagactcaaacttgatactg

SEQ ID NO: 43516 - DNA, 392 bp, Gossypium hirsutum
  Clone ID: LIB3272-020-P1-K1-B6
aaaaaactaaatcacggttggtgtgacgtacgcaacctaaatgacccttctgtttggctgcgctgcagttgaatcaactcgtaacaactacaaccccatgcagatggaatccaatggcctaaccgaataaaaatgctccgttcttagtgttatctgtcacactaaagatgctatggtgttaatccgtattgcatacaatcatgggaagaggcttgaactcgtggacgaaatgaagcatcagattcagattttcgacgacaactagtagttaatcatatccactaacaagaagggactgacttatactcttgcgtgcaatcactatactgacaggagctgcgaagagtccatgtacacagagtgggggctgctcaaaactgctctgctaccac

SEQ ID NO: 43517 - DNA, 397 bp, Gossypium hirsutum
  Clone ID: LIB3272-020-P1-K1-C2
cgaacatatacgccatggccgatcgtatgctttttgggttagggggcccgctacctgggcgtggaaagggctcatctggtttggaagcaggataattctttacccatggctgtggagggggttccttggctaacaagggccggaaccaaaaaactgttcctagaatttgttgggggggcataatccaggaaaggttccatccacaattgggggccaaccaattccaccaggccgtggggaacttgttgtttaaggtgcaggtccttccaaccgggaacttaaggaaccaggggggtttgcggaccctgttttcctgccttgaccacccatggaaacgtggccaggtgcccttaaccttaacgtccccaattttgtgtggcacccttaagggggaaaa

SEQ ID NO: 43518 - DNA, 402 bp, Gossypium hirsutum
  unsure (1)..(402): unsure at all n locations
  Clone ID: LIB3272-020-P1-K1-D2
ggagaaatacgatgaggttaagtgttggcaaggggaattgatttatgtgccggaaaaatggacaccgtttgatgtcatatttctctattttctgcctgccttgctattcgaacttgaccaaatatttgcggcgctggcgaaacgttgttcatcaggtgcaagagtggttattagccatccccaagggagggaagtgctagagcagcaacggaaagagtttcccgacattgtaaacggaaacttgcccgacaaaaccacgttacagaaagttgcagctgaccattcctttgagatgactgaatttgttgatgagcctggattttatctagctgttttgaagtttagcgaggcanattagttaaaaacttatttggatttctacttaaaactaggtgcttcatt

SEQ ID NO: 43519 - DNA, 323 bp, Gossypium hirsutum
  Clone ID: LIB3272-020-P1-K1-D4
cttcattctcattctgtttccactgaactctcgctaaacggtgtggttttaatcggtctggggtcaatgggcgaggaaccaggccacgttctcagtactggggctgcatgacatagctggtatgcggttgaacccatgattgccaggggagtcatgaagggggctgtccatcccgaagtccttgacgtgctcctatttaccacctgctgcggccgctttgtatggatctaaaatcgagtagagatccactgcgtgctctataataacgggggttaggcctacaacagattctggtagagggatccactgtactctgaggttct

SEQ ID NO: 43520 - DNA, 370 bp, Gossypium hirsutum
  Clone ID: LIB3272-020-P1-K1-D6
ctgatacactctgaataatgtaagcagatcgtgacatgggatctatagcaaggctagtgacctcttgttgagcgcatatactatgaaaataaacactgccaaacatgttttcttgtttgctaagatcaactttgcagctgccttggcattagcacaggttgtgagataccaaaggctcagaatgaacttcgacacggataatggagctaaagctaaaaacattataaaggatgaagtatagctactgttcaatcgacacaaaaacactgcttttttttgacggataaacatttcttatgactgtactgtccattcatgtgacgctttactgttgctgctctccaaaagctggagcttttctgagaaggag

SEQ ID NO: 43521 - DNA, 391 bp, Gossypium hirsutum
  Clone ID: LIB3272-020-P1-K1-E10
aaaagctaagcatcttttgtttgtttttctttttgttcgcaccttttggagatgtagccctttctttgcgctccatctgcttacttgtttcgtcaacactctagagctttcacccagtttattttgctacattgtcttcctgaaccctttgcttcccctcttgtttgtgtttttgattcacccattttagcatccttctgtgtttctatcttgctgcactttatggctccaggcgacaatcctcgtctaaaggagaaaaaggacgacgaagggaccaggcatgtaccaccgtagttgccactctctatttttttctaggctcgatcactttgtcctattgttcttatcttcactattttccatgcaaggaaggtcaaattccctctaccta

SEQ ID NO: 43522 - DNA, 398 bp, Gossypium hirsutum
  Clone ID: LIB3272-020-P1-K1-E2
ccaatggggtcggaatcggaacttattcccatggcgacgacggcgacgacgttaagcgaaaagctggtttaaaagctctaatagccatggttttcgctagtgttacttccatcaaagctgcttacgccgagctgcaaatggctcaacatccttacgacggtgaagctatccaagttgccgaccaagctgtcgtggaacaactcaaggttctgtcagagttgagacacaagttcttaaaacaagaccttgatctttcacctcaagttactttaatgcttgctgagatccaagaacaacaaagcatgatgcgaacttacgatatcacaatcaagaatctagaatctgatatcgaagaaaaagattcagccattgatttacaccataaacagctcgaacat

SEQ ID NO: 43523 - DNA, 433 bp, Gossypium hirsutum
  Clone ID: LIB3272-020-P1-K1-E3
acgcctgagtaccggttcttttcggtgggccccacgcccgcggcttcttgttgacatgcttaggagagagagaaaacatgttgccggtggtctgcaggggtggtttttctttcataaatggagatgtggatttgtctctgtataagatggaaccatgcttacagctgttaggtcattgagatggaatcatttgcctatcgaattacagagatgatatagttctatgtaaccctgcatctagggagaccatggtcctccccgaatcttgtctcccttgttattcgtcaatctgaaacttgttcccgcataccagcgccttgggattcggatatgattgtagaactcatcactgcaaagttgttatgattattgcgcactgcgaggagcgaagggacagtggctcaccccaccattgcagggtagaagtatactc

SEQ ID NO: 43524 - DNA, 173 bp, Gossypium hirsutum
  Clone ID: LIB3272-020-P1-K1-E6
tactctgatttgaacatcaccgctggatatttttcatttgggcaggtctgagcatcaggtggtattaagtactccagcgagccataaatatactaagaagccgaatcagacgggagagaccctgaatggtgtgagtatctcatcacacctcacaacacttgtgccaggagctt

SEQ ID NO: 43525 - DNA, 238 bp, Gossypium hirsutum
  unsure (1)..(238): unsure at all n locations
  Clone ID: LIB3272-020-P1-K1-F3
cgcacgccaccgtcgtaacagtgtcaagaacgatgagaattgtgaaaactcagcgttaatggttatgccattgaaagaagagccaatagaacccggcccggaccggaaaacccatccttcgnggcccattcgggtagtcccagttagcaagcagatgtcaatgcaaatccctatccccacgcctgttaccaccgctaaacgctcctacaacaaggaccgtcacacgaaagttgaaagc

SEQ ID NO: 43526 - DNA, 398 bp, Gossypium hirsutum
  Clone ID: LIB3272-020-P1-K1-F7
ctctggtacaaaaagagaaaagaaaaactgaagagccttctccacttcttagctttaatctaatcgaaaaatcctccaaaagaaggggaagattcctgtttctttctcctctttttgggtgcataatgacagggttttggtttcaccatttttggctgcctcgctttccaatcatgggtcgtggcctgagagttatgagagctactttgtcaaggacgcgaagggttaatgggcgtgtgatgcgatcgctgagagattcgcaagttgcagcttcagagatggtgcggcagaatagaaggaccagggcaaagctggagctgatttttgtagccaatacacttgctaatcaatgggtttatgatcgtcttgttgagattgagaacgacccgttgatgagg

SEQ ID NO: 43527 - DNA, 158 bp, Gossypium hirsutum
  Clone ID: LIB3272-020-P1-K1-H3
cccgaatttccgggcacgcccaacgcctcggctggctttattattcttacaccacatcgggtgaagcacacaatgtgggggcgaggggtcactttatatgcggtcacagatgtatcaccacatatttcacattatacatatactctcagaacaacacg

SEQ ID NO: 43528 - DNA, 381 bp, Gossypium hirsutum
  Clone ID: LIB3272-020-P1-K1-H7
gccaaaaagaaaagtttcgtctttgatcgttgcttcatttaagcaacaccaaaagttgctttttttcggttggcgttaatcagaagcgatgccttcagctgtatcgcagcagtggcacgagaaggcgactgcttttttttcttcctcaggggtgaagctgaaggaagctagccaaaccgacgtcacgtttgtcggagaagctgcaaaggatgccaatggcaacgtcactgacgtggcgaaacgagtcggttccatggacaaaaaccgatgggcgtttcttcgtcagccagcgacaagacatgctgtgcaagacagtcttatattggctgctgcaacgaccggaacctttttgaggaaaggcatcaccgggactaaagacag

SEQ ID NO: 43529 - DNA, 275 bp, Gossypium hirsutum
  Clone ID: LIB3272-021-P1-K1-A3
cccgttccggatttccgggttgcgcccacccgtccgctggggactccggaaaggtttacctttttcgtttaccgacctgcccaccttggtaacggttaagccggagtgtgggcccaacggccggaaaagcaccccctttttttgttgtcggttgccccccgcctggcctttgaaattccggaggaccgcttgccaccttgccccgtttttcctaatccccggttctgtgttcgatggtgaccaccctctggtcattgaaccaacttaggcagggt

SEQ ID NO: 43530 - DNA, 360 bp, Gossypium hirsutum
  Clone ID: LIB3272-021-P1-K1-A8
aaaaaaaaaagatggatgaaaatgttgttaattcctggttggacattgatttgatcagtctatgggtgtttccaaaatgcatccattagtttgaagaaatgctggggaaaggtgcaatgaaaacagtgtataaagcaatctatgaggtgctgggaatggaggtggcgtggaaccaggtaaaactgaatgaggtgctccgatcgccagaggatttgcagaggctgtactcataagttcacctgctcagcaccctcaatcatgattctatcataagattccactccttctgaatcgatgttcatcgcaagaccttaaatttcataactgaaatgctcactttgggatctctcagagcataca

SEQ ID NO: 43531 - DNA, 408 bp, Gossypium hirsutum
  Clone ID: LIB3272-021-P1-K1-B6
gttaaattaaagatcacttttgattcttcagcttttgaaattcaggtacgttatatattatttacattaatcgaactctaaattgtattgggtttcgtcgaattttaatttcgtttggtcagttgtttacttcttttacgaaaactttgggctttaggtttaggtttcccaagacgtaaccgcttaaataattgctttttattgcattttaattaaagcttatcaaatttcggatgaggaattagggatgtcttgttattcctgtattttcatggtatgtcatgaggatgattcgataattggggaatttttggaaggtggatgctggtgattgaaataaataggttaaaaagtcttgaaatttgttgtttatcattgataaagctcttgttcttttatcaaaatatt

SEQ ID NO: 43532 - DNA, 300 bp, Gossypium hirsutum
  Clone ID: LIB3272-021-P1-K1-B9
ctcaaacagaaaaccagaatatgggtgccgtttctagaacagggttacttcacaaggctgcaaacgatttccctaccagacgagctccatctgtttgcggcaggatcgatatgacacatgctcaatcaccacacataacataccatgctgctattctgctcatcgcctgcatcatacatcatggcgataagagatactttactttcacaaacaccgggatgcatgacattatgtgatcggctgtacatggatgacgctctaccgccgatccatgtacctcagctgatactgcccaccatt

SEQ ID NO: 43533 - DNA, 404 bp, Gossypium hirsutum
  unsure (1)..(404): unsure at all n locations
  Clone ID: LIB3272-021-P1-K1-C9
cctttgtcccctttctctctcttcccgtagccggcctctcttaatttaattcagttccacttcttctcttgctctttaataattcaatctcaaatctaaatttaggattgaaaatttcccaactttttggtgttcttttttaaaaggatttaatcatttggatacgaattgaagcacctgatcttgttgaggtggaaataattcagttatttccctttgtttttttagtttttattaggagggtttgttctggatttggagtttagggctgaaggaaaaaattgatttattgggttctctttgaagttaaatttcagggtttgatttgaaatggtatatttccatagatcaatctccgtctgcaactcggctgaccaggcttctccaatggcanattctgggaa

SEQ ID NO: 43534 - DNA, 315 bp, Gossypium hirsutum
  Clone ID: LIB3272-021-P1-K1-E1
gtagagatccgactttagatggcgacattgtacgcgctgttttctcgtttatgagagatgctagcgctgatcacgtgggcatataattacgcaggtgcgatcgccaggcaagtgatatgcaagattgcggacgacaccgacgtttacgtgtcattattaacaagatcgatacatattgaacgttaaacgcaccgagggactaaccgatcttttgatggatgagcaaagtgcctaaagagccaatgccttagcggttctatgtgacacttatcagagattccgggggacgtatggccacccaatgttttgagccct

SEQ ID NO: 43535 - DNA, 410 bp, Gossypium hirsutum
  Clone ID: LIB3272-021-P1-K1-E5
gaagaccaccgccggcagcggtaagaagaagaaaaagaatagtaatagcggtggtgtgagtgatttcgacggtgttacgggagcatgtgggaacgagttgggtgactcgggtcgggcgaatttgagatccgactcgctgagtttgcggttggggaatttacagaagtatgttgaaggtgaacacgtggcagccggctggcctgcttggcttagtgccgtcgccggagaagccatccatggttgggttccactcaaggccgactcttttgagaagcttgagaagatagggcaaggtacatatagcacagtgtttcgggctcgagaccttgagagtgggaaaataggtgctctaaaagagggtcgttttgacaattttgagcccgagagtgttcgattcatggcaagagaga

SEQ ID NO: 43536 - DNA, 340 bp, Gossypium hirsutum
  unsure (1)..(340): unsure at all n locations
  Clone ID: LIB3272-021-P1-K1-F11
gaagaagcccattagactgggaatccagagtaaaaatctccctcggaattgccagaggaatttcccacgtccattctatgggcggtccaaagttcactcatggaaacatcaagtcctcaaatgttctcatcaatcaagaacatgatgggtgtatctctgatttgggtttgacccctcttatgaatgtccctgcaactccatcccggtcagtggggtatcgtgctcccgaggtgattgaaacccgtaagcatacgcataaatcagatgtatacagctntggtgttttgctcctagagatgctgactgggaaagcaccactacaatcacctaaaagggatga

SEQ ID NO: 43537 - DNA, 395 bp, Gossypium hirsutum
  Clone ID: LIB3272-021-P1-K1-F7
gaaacatcctaaaattttcgtggttaaatgcttctgaatcctttgttgagagcatagccaaattgaaaacagcgtgtttggcaagaaagaaatttgttatcatggcgttagaagctgttgtgtttcagcgagaccctttctgctatggcggaagtggaccctgcaacacctatggcgttggttttcaacaacaagaagaaaaagctaattacagtaacaatggagaaatggtttccaaaagtggaggaggaggaactagggggtcttcatcgtcttctttcatggtgcaccaaaaggaatggccatgggatttcaactcttcttcttccccggatattggcttttccaccggtggaccgatattctctccgacggaagcaccagcaatcgacacc

SEQ ID NO: 43538 - DNA, 370 bp, Gossypium hirsutum
  Clone ID: LIB3272-021-P1-K1-G10
gatccagcggtctactctacaacttatacatatatttcccaattatgaaatccacccaacgctatgatcagtcaaccctcgacacggtttacgggttcaaagacatcggagacaactggggcgttctttgcggcttactgtacactttcaccactccatctaaccgacggatcgcttatttcggtggaccctgcttgctccttgcggttggtgctctacaatgctttatggactacttgctaatcggggcttacgtggttgaaatgatccctaaaccttcagctgcagggatgtgcatactcaagacttcatcaacatcatgctcagactctcttttatactgagttcgatgtcactgctgagccgaact

SEQ ID NO: 43539 - DNA, 296 bp, Gossypium hirsutum
  Clone ID: LIB3272-021-P1-K1-G5
gctaatcacagtataactgtagaaagggttgcaatattgtacagaccaagaggatgggggtggatggtcagcaggaagcatgttctttgtaaagacagagtcgcagatcattaaagggatgcgtacgaagcttgcgaggcctgtctccttactgactatagcgatagcttgaaccacaacgacttgcactgggcgtgaaagtataacaagtgatgatgatttcagcatatccacagctggtgctccccctttatgcctttgggcagacatagaacacatggcttattgtctaatgc

SEQ ID NO: 43540 - DNA, 262 bp, Gossypium hirsutum
  Clone ID: LIB3272-021-P1-K1-H10
ttcccgcctcgacccacgcatacgttgtattgtaagaatccgttttcattatacaagaaaggcaacaatggggcggcggaatagtgacaacgcgcaggcatttctttgacttactaaactatattaacatccttgtcgacaaagtaacattgggtggtgataactgggtgtacatacatgccaacagcgcatatagtcatatgtctctacagaaagcattgtataaaaattagcatcttgatccatggtggttccatttgcc

SEQ ID NO: 43541 - DNA, 393 bp, Gossypium hirsutum
  Clone ID: LIB3272-021-P1-K1-H9
cccatctctctttattagtctccattaaaagaatggatgttaaagcaaggagtagtagtggtccaaacatggtaagtactgaagaagaggacttgaaaagaggtccttggactattgaagaagattttaaactcatcaactatatttccattcatggcaaaggtcgatggaactctcttgctcattctgcaggtcttaaacgaactggaaaaagttgtaggttgagatggttgaattatcttcggcctgatgtccgacgtgggaacatcacacttgaggaacaacttttgattcttcaacttcactcgcgatggggaaatcgatggtccaaaatcgcccaatacttgcccggaagaaccgacaatgagatcaagaactattggagaactcgtg

SEQ ID NO: 43542 - DNA, 427 bp, Gossypium hirsutum
  Clone ID: LIB3272-022-P1-K1-A11
ggaatatgtgggataacaatcaacaccagttcacattagagatgacagtggtatcagctcaagggctgaagaacacttcttcttttatcttcacacaccgtctcaggcctttcattaccatcaccaccttcccttcgccgttagaagctgccgatttaaagagctgccgtgggtttcaaacgagggtcgatgaccaaggtggtgttaaccctacttggggtgataagttccatgttcccattcatcataccttctttgctaatcgatactcgtgtatatatctccagttattcaccaaaaggctcatttccggcaaggctcaactgggttggtgccagattccggccgccgatatagggttgccgccccggggatccgttaggcaactgtattaccggctgagggaggcagatgggacgaggactca

SEQ ID NO: 43543 - DNA, 222 bp, Gossypium hirsutum
  Clone ID: LIB3272-022-P1-K1-A2
gtagccggcagctgcgtctctctcttcatctctctcaaccaaaaagactttagcttttacctaagagagagaccatgtcggtttaccaggatctgcatctgcgctgacgagcttctttgttactcattctactacacggcaatctggtatgacttactctgcttacgaagagggaatgtgagttgcgcacggtgctattgaagatagcactggtgccaatcc

SEQ ID NO: 43544 - DNA, 388 bp, Gossypium hirsutum
  Clone ID: LIB3272-022-P1-K1-B10
atttcttaatcactcaatccccaaaaggaatgaaaacaatgagcactggcctcttccgaccactctttcactcgggttcttctttagtagcttgctagtttccattgtgaaggccacaaccggaagcagcgacaaacaaggatggttgggagaacacataaacaaaggaagattagattgtttctatgggctcctagctgcattaagcttccttaactttggattattccttctttctgcagtatggttcaggaagaaaacagttaaacaagctcccaaaatggagatcgttgttaaagaatcaacgatcgaggagaaatgctagttttccatactgaatgttacttgaaatcttctttaataaccaaattattactatatatatata

SEQ ID NO: 43545 - DNA, 226 bp, Gossypium hirsutum
  Clone ID: LIB3272-022-P1-K1-B12
gttttcttgtagtttaaacctttcactgattccaactattgaggtttgttggcctgggatagcgaattttgtattagaaaatgtcatggacgacgatcgctatgttatggatgatggtagcgagagaagtgtctgactctgattctgactcagaatatgtagatgtgagcttcgcccaccccttttaagaactctatagacaatagagatgggcttagtgagaagc

SEQ ID NO: 43546 - DNA, 304 bp, Gossypium hirsutum
  Clone ID: LIB3272-022-P1-K1-B6
ggtacaagattgatggtctaggaactgctcctaaggggtaatatgcgaaactaggagcactcaaacctgggtctggcctgatagtctacttactactgtgctgacaacggtagttaagtttgttgcaattcaacattaatctttgttgtaagtggatcgtgctgacgaatgggctttaacaagtagaatgacaactgttcaagctcttaaactgggcttggatgcttcaatctagatgattgatccggtcaatgaagctgtgaatttgacgtcacaagcatttaacgtggacaagtctacccta

SEQ ID NO: 43547 - DNA, 433 bp, Gossypium hirsutum
  Clone ID: LIB3272-022-P1-K1-B7
gacgcactagataaacaatgcgcatggactattatgccgtctaataagctagattgagagagttatgccttgtgagcacagctgtacgcagcaaaatatgatgggaacaaggtctgtgtctgtcccctgcacattatatatactgaagaactagctactcgtcccatctgagagaatgatggcatctgtttcatgtacatggcactatccctttatacacctcaaattgtattctttttttatgctaactttaatactgcatggaaaaatgggtgagaagctcgtgtttcatagcaaggatgtctaagtgggcctgggagagacaaatgctagttgtccggaacaatgatcagagctatgtttaggaggaagcgctgattatcactggccaaccacgaatacttggtatgtgataaataataatgctcttcta

SEQ ID NO: 43548 - DNA, 430 bp, Gossypium hirsutum
  Clone ID: LIB3272-022-P1-K1-B8
gaagactatagatgtagattctggtaaaattgatatatgttgggacttgtctaatgctagatttggttccgggccagaaccagttgaagggttttacctggctgttgcatttgaccaggaaatggtgctgcatcttggagatttgaagaaggaagcatctaagaagattaacattagcagtactcctcttagttccgatgctgttttcattgcaaaaagagagcatatttttgggaagaagttttatggtgccaaggctcagttttgtgacaagggacctattcacgatgttgtaatcgagtgcgaccccttcgatcttaaggatccatgccttgttatccgcattgatagtaaaacagtgatgcaagtgaagcggctcaagtggaagttccgcggcaaccataccattttggtggatggacttccggtg

SEQ ID NO: 43549 - DNA, 416 bp, Gossypium hirsutum
  Clone ID: LIB3272-022-P1-K1-C8
aaacgaattgaagaagattactttcttctctttggatctttccactaaccttcttcaaatctatttaagcgctcatttggagctccctgaatggtttgttcattggcttcaaaattgttggccctcttaacttctttacctgactgaaaaaagttagctctcttgccttcttgggtaagacaatggtatgttggtcattgcatggaatgaagtcataatttgtattggttgccccatggaagaccacacttttgctgttggtcaggagttccctgatgtcaaggccttccgtaatgctattaaggaagctgccattgcacagcactttgagctgcgtattataaagagtgaccttatccgttactttgccaagtgcgccacagaaggatgtccatggcgtattcgtgcagttaagc

SEQ ID NO: 43550 - DNA, 247 bp, Gossypium hirsutum
  Clone ID: LIB3272-022-P1-K1-D12
ttcaagggagggaagctgatgtaccagctgtgggtgaagcgaatcacgctttggacaagtagacagctttactgtcagagctcagaactacaaacttcataatagaaatgcaaaatggtgagagtagattaaatgtatctgaacattgtaagagacatattaccacgggttcttatgtactacttaacgggcgacaacgaagtacttaccgtgcctaccctttattactatagcagctacacccaac

SEQ ID NO: 43551 - DNA, 383 bp, Gossypium hirsutum
  Clone ID: LIB3272-022-P1-K1-E10
cacgatacttaagtggtaaacctccaagacactcaggaggaaaacctacacatgctgaggggtttcttgctgataaagcacccatgaagccactccatggcgacaaaccatttaaggttaatgaaaagggagcactttatgaacctaaatctcttcatagacacttattgagtgtggaagctgacggcacacataatacctccacaacactgatgaggtgaaccctcacgacattgaaggggttaacctgcacatgtttaaggattccctggtgacataccatccaaaggtaagggcaaggaggcacctcatgaacccaaacctgctgacacacacctattgagtgcttgatgttgaagcacacataaacctccacaacaatc

SEQ ID NO: 43552 - DNA, 399 bp, Gossypium hirsutum
  Clone ID: LIB3272-022-P1-K1-E3
ctgctaaaaagttgctatgggtgaggcgaaggctcacatcaacattgatgtgattggccatgtcacctctgaaaagtcaacatcagctggtcacttgatctacacgcttggaggtcttgacaagcgtgtgaccgagagggtcgagatggaagctgttaatataaacaaaaggtcatcaatgtatgcctgagcgctcgataagtggacggctgaacgtaagcgtcggatcactattgatattgtcttggggagggtggagacaaccaaatcctactgcactggccttgatgctgctggacatcagcgctagactaacactatgattactggtgcttctcaagctagactgtgctgtccttatgattgacttcacaactggaaggtttgaagctggtattt

SEQ ID NO: 43553 - DNA, 416 bp, Gossypium hirsutum
  Clone ID: LIB3272-022-P1-K1-E4
gaaaagagaaaaatatttctggagaagctttctgcttcaagagaagcttctgcaggaacattgctcggattctggcaataaaggaaaccaggacaatgacagaagaacctgttaatgtcaatgaattcagagaattagcaaggcaagcccttccaaaaatgtactatgatttctacactggaggagcagaggatcagtacaccttaaaagagaatgaggaagcttttagaagaatcattattcagcctagaattcttagaaatgtgaggagcattgatttatcaactacagtgttgggttataacatctcaatgccagttatgattgcccctacttctttgcaaaagctcgcaaaccctgaaggagagatcgcaactgccagagctgcatctgcgtgtaacacgataatggtttta

SEQ ID NO: 43554 - DNA, 283 bp, Gossypium hirsutum
  Clone ID: LIB3272-022-P1-K1-E6
cgcaaaagcctttatttcgacgcgctgttgaagtcctccaataactacgcgcgccatttcggagtactagaagaacccatcaaagaacttgtgcttaaatggaaaaaaggccagccactcttgccacgaatagcctccgttatcgcacgtgccaacggcgtttagcacgtgctgactgtcaactcagaaaccgacaatagcaccggtctaaacacgattgctcagactgagtacctcgcgtttacgctagtagacaggatctccgctacgagggcttgacttg

SEQ ID NO: 43555 - DNA, 236 bp, Gossypium hirsutum
  Clone ID: LIB3272-022-P1-K1-E9
gtcgcagtcggttgaggagttctctacacctcacttgccgaatcacctagccgctaagacctataggtacttaacatcgcgacctatccccgtccgccgtggcaaggaccactcctttgtgactaattcgtcgacacggtcgtctgataactcttatctgtgagcacgaacagagcaaccgagatgccaaagcttctttgtaagagcacataggtacaagtcatctctccatggct

SEQ ID NO: 43556 - DNA, 125 bp, Gossypium hirsutum
  Clone ID: LIB3272-022-P1-K1-F12
tttgaatcggaggcggtgcacgtaccatgtttatgtacccaaagacggttacggccgggagaatcaccctgtagacattgagaggcgacacagtttgactgcggcaacgcatatattcaaagata

SEQ ID NO: 43557 - DNA, 248 bp, Gossypium hirsutum
  Clone ID: LIB3272-022-P1-K1-F9
ggagtctgacagcagtaccagtcaatgggctagaaaacccataaagcacaaggtagctgtttgaagagaccgctcaacactgcctccacaaacgacctttatttttttaaccggactagcgtgagagcacccctgagtggacctagaaggctgggaactttgcctgagcagcgcgaatccagtaaaaactctactcaacgtcctggaccgcgctggaatgctacacatgaacataacttgcttctaga

SEQ ID NO: 43558 - DNA, 431 bp, Gossypium hirsutum
  Clone ID: LIB3272-022-P1-K1-G12
agcattttcaatggcatcaaaaaggcattgagagaagaattgaaaggacgaaaggaaaggtcatttttagttgtggttgtgaaggggctattggtgggcatggaagggctggccatgctcgggcagctaatcggtcagcttcaagatcttttgcaacttcacggctctcctccgccgcctcctcctccgtctcattttcgccttcttcatccgcatcttcaccccggcgactaccaccgcaggtggtgtttgcacaatatagatgatactcctgcagacgattactacagtcttgtaatggctgctgggaaatctggaagttgtaagatgttggaacctttcgagcctccaggtcctccaccaagcaagaaatcacgaaagggacggaaccaagagaaattacatggaagtactgctatacctgaggccga

SEQ ID NO: 43559 - DNA, 231 bp, Gossypium hirsutum
  unsure (1)..(231): unsure at all n locations
  Clone ID: LIB3272-022-P1-K1-G3
gtggcaaggtgtacattttttatatccatatttgagcaccaaaaaaattgtaggaaagagctgccaaagtatccattgaggcttatcttgataatatgtttatagacgatacttacaatagctcagtatatacacaatgaattcagatagactacaaatccatctaaagattcatgtgctttgaaagatgcgngtctttgccattgataatggtgctctatacaccataca

SEQ ID NO: 43560 - DNA, 378 bp, Gossypium hirsutum
  Clone ID: LIB3272-022-P1-K1-G8
gtttgtgctcatgtttaagatctatagactgtaattaactctttcccccttttctgggtgtttttctatgtaatcctttgcctgttttctctgaaaacatggctgcggatagctttcttatgcccccatgccgaaagattcggatttgcaaagcgaaaagagagccgaatctgaaccatagtgattcttcctcaggtgtagaacctcaggatgcagattactcttatgttcctcagctctgtgatgagttagagaatttgatattggctcgatttcctcgatcggaattttggaaactttacttactaaacaagcatttcttacagattttaaagagtggtgagttatttaagattaggaggcaaattgggtttaaag

SEQ ID NO: 43561 - DNA, 372 bp, Gossypium hirsutum
  Clone ID: LIB3272-022-P1-K1-H3
aacaagtcaaatgtcaaaaaaggcatctttgataacgcctctttcatgaccagaaaaaagaaccatactgttaaatcttaagaaggtgcaaaagttacagcgcttgatatataaacgagggcgctggcgagggcaaacactgatgtattcttttcttaccgatgcaaaagatgcgctgcttacgtctggatgagaaagatctgccaagtgtgtcaacaaagacaacgcctccaagcacatcaacgaagtggagtggatgcattcaggcttatacgagtcaacatctgattgtgcctgaaatgttctgaagcccagaacagagtatgacgtgtagcacatgtatttggaaaacgaggtttaacttagaaacat

SEQ ID NO: 43562 - DNA, 265 bp, Gossypium hirsutum
  Clone ID: LIB3272-023-P1-K1-A2
cccaaacatgtataaagactgcttgcttttgtttctcgaaggagtggagggatttatcgtcagttcttctttcgttaagcaacattatgattatgagcttacacaggggaaatctgtaggaggtaataatcgaccccaccaccagccattatgttaacaccgaccgccaatacacaatgcacctggctgcaaaggacaggtgccagcatatgggggaagaccttataacaaaaacttattgtgctaatatgttcagggcacacat

SEQ ID NO: 43563 - DNA, 300 bp, Gossypium hirsutum
  Clone ID: LIB3272-023-P1-K1-A4
cctattttaaaatttcaaacccagacttggtctttctatgtctctctctctacaagcagtgaattcctccattggaggagcttaacatacttagattattcctgatcttcgctctgtctgtaaaataaacacatatataccccaacaccaacgccatgggaagatttgaagagggagaattatattcaatcgtatgtcctaagcctatactaacctttagataatctaccaacacctgttattagactgagatggatgatttaaaagctgctgcagagcttcttgatataatcctctccg

SEQ ID NO: 43564 - DNA, 235 bp, Gossypium hirsutum
  Clone ID: LIB3272-023-P1-K1-A7
gaccctggggagcttgactatactccgactttgacacatgacttcctaggtgaaagataaattgaccctctgtgaccgaaactgaaatcccactactcctaacgttatttgacttattcacgagaatcctaagcggtgcactggctctctttatctaccctacgctgattctcggctgagcgatccgctcagatgacatctgtagatgttgagcctagatggggcgtcccatctg

SEQ ID NO: 43565 - DNA, 347 bp, Gossypium hirsutum
  Clone ID: LIB3272-023-P1-K1-B1
aaaacactgaaatggcatacgactatcattattacgaatacaaggctgatgcacaggcgtactaaacctatcctgagaaggcccctactattcgaaagaaccgatatatgaagattaaaggccagccctacacggatgctgaagattccacactagaagacagtgaacctcggacatgctcaaaggcactggattggaatacatatcttaactgacgagaagatggaagatgtggttcacatcataccagaactgtgatgggcctgataggcaagatgctgactacacaagtgcttgacattgatgaagatggacctatacgcttgctgactgatatcggtgatact

SEQ ID NO: 43566 - DNA, 321 bp, Gossypium hirsutum
  Clone ID: LIB3272-023-P1-K1-B4
ctaagactgtgccttgtaacacgcacactactaggtatcgagccagctgtcgatcttagatgctacatgtttttccgaagcactgcgagcgtattgcatctaatgttaatacgtagggggggggcagggaccatttctgtcgagaaaacggctgatacctggaacatcatattctatcaaagaactggatgcacagactgcatgggctattaaccctctcactatatgatcatgattcgacgtggcatgctgctttatcacagcaagttgagtcgttgatcctaagacccttgctgctgtggactacaagacatgtgggaa

SEQ ID NO: 43567 - DNA, 434 bp, Gossypium hirsutum
  Clone ID: LIB3272-023-P1-K1-B6
ggaagatcattgcgccagagttcttcatggacaaggttaagggcatggtggggctgatggtggaatcgacagtgccattgctaaaaaagtgggaagccatgattgatgcaggtggtggtttggcagctgaaattaatgtggatgaggatttgaggagtgtttcagctgatgttattgcaagggcatgttttgggagctcttatgttaaaggcaaacagattttctccaagcttaggaccattcagaccaccattaccaaacaaggctttctttttggcctcaatggttcaagattctttcccaacaagaaagtcagcaatttagaaagagaggtggaattgttgatttgggagaccgtgaaacgacgacagcaagaatgcgtagacaaatcttcaggtcaaaaggatttaatgcagcttatattagaaagtgct

SEQ ID NO: 43568 - DNA, 409 bp, Gossypium hirsutum
  Clone ID: LIB3272-023-P1-K1-B7
ggatcaccccccggttatgtcgggtatgaagaggggggtatgctcacagaagctattagaagacgaccattcacgttgttattgcttgatgaaatagagaaggcccatccagatatattcaacatccttctacaattgtttgaagatggccacctcacagattcacagggtcgaagagtatctttcaagaatgcattggtggtgatgacttcaaatgtgggttcttctgctattgcaaaaggtagacgtgcttccatcggcttcttgctcaatgacgatgaatctgcttcatatactggaatgaaagctttggtaatggaagaactgaagacatatttccgtccagagttactcaacaggattgatgaagtagttgtatttcggtctctaaaaaaatctcagatgcttg

SEQ ID NO: 43569 - DNA, 424 bp, Gossypium hirsutum
  Clone ID: LIB3272-023-P1-K1-B9
tataagttaagtaagctaatcaaggcggaggaggcgagagctaagctcgttaaacgagcaatttcgggggaggaagacgaggatttgagctgggatattgatgaggacgatgaaggagtagagggtggaaatgttgatagtgagaaaaaggagcatgatttgcgtgaagatagtgaggaatgttcgaaaaaggatgaggataaagtgagttcgtgtaaggatagtgatgtttccataatttcgacccaacattcaatggctgaggaggaagggtgggatgagattgaggagattcggagtagtaacgacaataaaggggacaatgttgttgggagcactagtaggattgatctatgtaagcggctgagtgttgcagaagaagaaaaagatttgacttgtgatatcgatgacgaggaagaagatc

SEQ ID NO: 43570 - DNA, 447 bp, Gossypium hirsutum
  Clone ID: LIB3272-023-P1-K1-C1
ctccctacggctgaccaaaaggacacccatccaccgtccgccgcactaccaccgtacccggtggcctacgatgcgcaaagatgggtttttagccctatttcaaggcgcgtttgaaggccaaaacgccttcgacccttgaaatcgaaagggtaagggctcgtgcccccttttgggttcgatcgcgacaacgacgaagagccctctgacgaggcggtcacgaggcagtttcagtgtagtgtgacgcgtggagaagatggcgtgcggcgtgctacgaagcggctcacgtggtggccctgctggtgaggagcggcggctgaagcctagtggctagggttgctgttgttttctttgtaatgggctagggttggaattgggcttaagtagtttgggttttaattgggttttaaaatttgggcttggttgggtttggatttgggttttttttgg

SEQ ID NO: 43571 - DNA, 439 bp, Gossypium hirsutum
  Clone ID: LIB3272-023-P1-K1-C11
aaaagaaatcacagcgtcgtattgtcggtcattttctccgatggaatcccaaagctccgacgaagaggatcagttcttcgatgcatttgacgacttccccttttacgattgccttacctttgaccaatcagatccttccacgtctcacttaccgtctactctccgccggcgagccttatctcgccggggaatctcctccaaggaatccggaggagagtcccttccagaaacttccactctcgaagaccactccaggaccagttctagagagccaaggtacaatcttttccgcgatttgaagccaagcgacagcactttggtggtaaccgagtcgcctcgagatggagttaacccgatccgcgtctcagaagagaacgccggcgttgaatccactgtcaccaccgcagaaaatgatgaatcacttgaccaagcccgttac

SEQ ID NO: 43572 - DNA, 329 bp, Gossypium hirsutum
  Clone ID: LIB3272-023-P1-K1-C7
ctataaacggtgttattgatgtattacgtgatgttgccacatggcaagccaaaggaaatgcggcggatacaatattcagcttatgatgggtacacgcctacaggaaagggctggggaggaagacacgtgtgataaaaggatgggtagattagtgaaaagactggcccaccaattctaaaaggagcgcacacgagactattttgaattgggcgggagataggcagacacgggagaggctagtgtaaggaggaagtatagagacagtgatccgagtcattaacatgctaccagaaaatgccatgtctatacttgatgcagaacctaagaga

SEQ ID NO: 43573 - DNA, 389 bp, Gossypium hirsutum
  Clone ID: LIB3272-023-P1-K1-D1
cttttcctctgaattactcgcgctcatgggaagagtctggaaggtaaaaaccgaagaaacaaagcgctctctctttttgtgaattcaatcaaatcgaagatgttgtgagtggcaacgaggcgggtcacttgttggtcggctgcgtggaggtcgcaccacgccacctccgatatcgactctcgtactttcatcgacggctccgattcttctgatcgtctcagatccaattgctcctcctgctgattttccttctcttacgcttctcaatgccgtcttaccaccagacgtttttcttctgagtcactcaccccaaaaagtgaccacagtgtgattcgtggtgttccagcaactgtggctggtattcaaaaccccaaagctaaaatagatta

SEQ ID NO: 43574 - DNA, 438 bp, Gossypium hirsutum
  Clone ID: LIB3272-023-P1-K1-D11
attcttctcctcaggcataacccgcattttctccttccaagaggccaacccgccggaaggtatgagaacagcgctcgcaggcttcgaaacatggtttctttttgccaccgggttcccttcaaaccccgatttcaacgaagccaaagggaatccgcggctcaatctcaaggcaagtcccctttttcttttctttttcatgaatgtaaaattataaaagcaaaaaaaaacggaggaaataacaaatagaatcgaggaacaaagatcaccttctcaagaagtgactctctgattttcaagcaaactgtattgcgtatgtattgcttgtttgtattctctctcaacgtaaccttttacaaagactcaaactctggctttatagcccgaaggaaagaggaaaaatttacgaaaaaacaaaaaatacaatgtttttcttttttg

SEQ ID NO: 43575 - DNA, 220 bp, Gossypium hirsutum
  Clone ID: LIB3272-023-P1-K1-D6
ctatcttccccccccacaatctaaactacataccctaaaaaaccgtctcagccagggttgtgataaaaaatttttctaagatcacccaaaaaaaaacccttcattatagtctaaccttgagctaccctaacaattaccactctttacaatgctatctttcgccttctcttattccttcctctactaatatcttactctcctccttcaactttaacccttt

SEQ ID NO: 43576 - DNA, 413 bp, Gossypium hirsutum
  Clone ID: LIB3272-023-P1-K1-D9
cttatattcatcacttgtttaaggggtgtcggaccatcgaccgtttgctgtgcttcagatcgttgaaatcgaggagaaaatgcaaatattcatattgtgtaatcagggcgaagggactttggctagctgagaaatacagtggtaaagatggtgaacatgacactgattgccactgtgactgatggttttctatattgcggagggactagatgatggttgtgatctggctgatgctgaaatgtacaaacatcatgttaaggctgtatttaacaatctctacaaaggccataatgaggcttgaaggatgtgtatagaaaccggcccatatatcttccactatatgatggaaagacgtgtttgttacttgacaatgtgcgatcgatattattcgataaaacatggcttttaatata

SEQ ID NO: 43577 - DNA, 433 bp, Gossypium hirsutum
  Clone ID: LIB3272-023-P1-K1-E1
ctgattttccttttctctctctctctctttatgtctgtgtttatctctatctctagttgtcttagccgttggaaactgaggtaagaaagtggagaaagaaagttcaaaaaaaaaggtgtatttcatatgggttggttcccttgtggtggaaaaccaaacaaaaaaggaaagaaaaagctgcccaatcataataatacaaccaccatcaattcatctgatgatcagatcccatctacttcagaaaagctgaaggtgaattctgtgccggatgctaagaaggaggctaacaaggatggagggtcggatcacattgcagcacacacatttactttccgtgaattggcagctgcaacgaagaatttccgggcagattaccttctgggtgaaagaggttttggccgagtgtataaagggcgattggagagcactaatc

SEQ ID NO: 43578 - DNA, 432 bp, Gossypium hirsutum
  Clone ID: LIB3272-023-P1-K1-F5
gaaaaaaaaaggcccttttttttttctctcttgtttttaagttcggatgttcattttctatagacaaaacctttattttttttttataagagtatataaatatagtcttgacggaaggcttcgacacaatcatccacttagtaccatcatcaagcaataaagcagggtgacatgacggtgcaatagtcaataaccaaattgtctataaatctatcattgattggataacctttcattcttgcactcaaatagtggaaacttttctgggttcttctggttttgtgctcttaatcagcagttgcagtactttattgctctttggagattgtatagtctttagtcatggccctttgtgcatcttcatttcctgccattatcaactggggtgcagcttcagatcctcaaaaatccactccttttgcttcccatttt

SEQ ID NO: 43579 - DNA, 439 bp, Gossypium hirsutum
  Clone ID: LIB3272-023-P1-K1-F8
gtactttcaagggccgacagaggcaccactggacgcggagagcgcttgtacggggatatctgaaaaaggagctttcccaacatatcacgggaaaggttttgatgggcaaaacgacggaagccagctataacgcagttggagttaacggtcgtaagtatttgctcccagcgatgtggaatcctcagacctcggcatgcaaaactcttttatgaaacaaacaaaactgacaataggaacgaaggacatcctaatgttattacgtatctatatcatgaactccatccgatattgatacggacaaacacagtatgtaaaaatattgtaataaatttgtacgtgatgcatcattgtaattaaattttgtaaaatctatgtgccatttttaattataaaagggggccactcaagggccatacctaataaatatttgggcttaaaa

SEQ ID NO: 43580 - DNA, 393 bp, Gossypium hirsutum
  Clone ID: LIB3272-023-P1-K1-G1
aaaaaccataaccaagcaaaacaaaatcgaagggaagtgtgtactgctttcaaactatgggttctttttctgatccatcctcattttctttctctcggtttctcagcttttcttttaaggatcacatcatcacattccggctgcttacatcaacttcacggcaaaccatttactgttaaaaggcaaaaaactttggatctataagaagggaacaaacaagttgtgttttgatagtgggttttggattatagaggcaatgaggcatttttcctccatgttcaatgggttggcgaggtcgttttcgatgcgaagagggaagaattcgagcaatggtgatggaagagaagctgctgagacaatggcaaaagatgcaaagaaacatgacatgatttt

SEQ ID NO: 43581 - DNA, 298 bp, Gossypium hirsutum
  Clone ID: LIB3272-024-P1-K1-A6
tatacattcatttgtttggaaaaacttccatttctttgattgtttttaagcgcaggaacatcgaaaggcatcaggaaaaggcaaatctagatgtcgatggtatcttgaaggagctccccaatgctgggcgtatccctaaaaccaagatcgttggtactttaggtgcggctacactgtccgcacatacaatagagcacctgctgagggcatgcatgaacgctgctcgcttgaattactctcatggcagccatgactatcatcaatagaccttggatgactcataggcctgctatgcaca

SEQ ID NO: 43582 - DNA, 415 bp, Gossypium hirsutum
  Clone ID: LIB3272-024-P1-K1-B12
ctaccaagaacaccgtgttctaattaattctcctcttcattttgattctaaggttagtgatgaaaatgagggctggttatagcattttccttctcattctttctcttactgtttgtaatgctggtaagttgagtaatagcttttacaaaaatacttgcccacaagttgagaagatcgtgagagagattatccagattcatactcgaaacaatccatctttgggtgctcaacttattaggatgcagttccatgattgctttgttaggggatgcgatgcatcagtgttgttggatacagttaacaattccaaggctgagaaagaagcaatgccgaatcaatctttaggtggtttcgacgtgatcgacgatatcaaggcaacaatcgaaagggtttgccctaaagtcgtttcttgtgc

SEQ ID NO: 43583 - DNA, 404 bp, Gossypium hirsutum
  Clone ID: LIB3272-024-P1-K1-B9
aatcaaaaatcctaattgatggcagatttaaagcaaaggggtatatatagattgcaaccaaaataagcatttttttcctactttcatttctctttttctttctttcttcctgtctggtctggatcttctcttttgtttaatttgtttagagtgagcgtatcctattatgaaagtgaagctcattattttagtcccattcatggtgttggtttccatggttgtagctcaacaacatgttgatcaaatgcagcatcaacacgattccaactccatcacattagagttaatacataggcatgctcctcagttcaccaacaaccaccctataactcagcaccaacgcctggtcgaccttctctaccatgacattatccgccacggtatcatgtcccaccgaagacgag

SEQ ID NO: 43584 - DNA, 196 bp, Gossypium hirsutum
  Clone ID: LIB3272-024-P1-K1-C3
gtgtggttgtgcaaaagctaatacaaaaaaggcacccaggggtacatgtttgtcggccacgtatgttgcacacctaagcgtcatggaggacgccatggtatacctacaatcaggcaaacgcctagatgccggcgtgttgattgctcggagcataaaccggaccgacactagcttggccctatccaccgctattgtc

SEQ ID NO: 43585 - DNA, 275 bp, Gossypium hirsutum
  Clone ID: LIB3272-024-P1-K1-D1
tatatccagaaacctcattttcataggagtgcttataaactaccattaaaacgcgggacatggtagtgagtgcttgcttataggaatattgcttttaatcaattttcttactatttgcaaaggtgtcaaggcgagtaatagcttttacaaatatgcttgcccacaattttataagttcgtgagatagattttccagattcatactcaaaacactctatattttggtgctcatcttattatgatgcacttacttgatttctttgttaggggatgct

SEQ ID NO: 43586 - DNA, 389 bp, Gossypium hirsutum
  Clone ID: LIB3272-024-P1-K1-D5
gcggggttgtgtaaaagctgcgacaaagaaggcaaatggaggtacttggttctaggccaagcatgttgccacctaggcttaatggaggacgccatggttctcctccaaacaggcaaacgcctcgcttccgccgcgttccgccgtgagagcatttgttggtccgacgatagcttctccctccccaccgctattgccctttcagacatctcctctgctgccacaacaccttcttccacgcccccacgcaatcctacatctttctccgaatccgaaaacatttcccagcttctatcccacatcaagctcctcatccgccgtagaactgctgccattgcggccttagatgctggcctacactccgaagccatccgccatttctccaaaatagt

SEQ ID NO: 43587 - DNA, 286 bp, Gossypium hirsutum
  Clone ID: LIB3272-024-P1-K1-E1
gaaaataaaggtcctcctagtaaatattaccaggtagcaccatggcttagttcccggggttcttcctttggcctgtctgtttgtttttttctaatctcaactagttcgattagtccccacttttttttctttttttttactttgtttttaggttttgtttggttgatacttgattcttcatcttcctcatctttattgtgtctagatctcgaaggaaagtcatggattttggtttaatgaggaaggaataagttccttttcatactctcatatcttctttcttatc

SEQ ID NO: 43588 - DNA, 156 bp, Gossypium hirsutum
  Clone ID: LIB3272-024-P1-K1-E3
gtaaaagaggggtaatatggagggagaggtggaatcacatgcgcattagttcactgtcgttctactggatcctcgattagcttagcttgttctatttcttgctaatcatcatcatcatataccttgtttttcgtcacggatgacgataagcatgaa

SEQ ID NO: 43589 - DNA, 327 bp, Gossypium hirsutum
  Clone ID: LIB3272-024-P1-K1-E6
ctgactttcaccaccaccgtcactagcggggccgtcacataatgtcgtcaacggaggctatcatcctacaactgcatgaaagatctgccgctaaatccggttactggaagctgaaatctgggatcttctgctctatctacatagaccgccgtctgagcgattcttaccgttgactactccaccaaatctcacactctctactttcctctctctgtgcgaaaacacactgtaacctcatatgcggtggcccatacactgtcctccctatagccacgctgcatctgtctcgacacgtccatgctcatgctcatgctccgcaaagaagtg

SEQ ID NO: 43590 - DNA, 378 bp, Gossypium hirsutum
  Clone ID: LIB3272-024-P1-K1-F1
ataggacgaaaatactgacatccggcatatacagacttacccaatatttgtgtgcgatgagatcctcagactctctcagcgagccatagtcggcgttcactgctaaatcagggctagaatcatgaagcgggtaacttcatggatgatcagagcaggaaaaaacgttggggtttctttgaaatggaagaatagctaaaatcagggtgggagagatccttattatcttggctagaagcttcatacattcaccatagccctgagtttgcactgacgtcaaaagagttcgacgactcaacataggctactgccaacagcgactgggtctaattcaaagagcaggatctatgtaccatgcttcacctctggttacagaaaatc

SEQ ID NO: 43591 - DNA, 315 bp, Gossypium hirsutum
  Clone ID: LIB3272-024-P1-K1-H1
gactatcgggcttgcttctatttgttgtccatattttcctttgtggagaacccaaggaactccttgagggtttagcagttaacaagagaataacatatgttggcgaccgccattgtacatggcgccgtagggcagttttctcttaaagaagcctacatcacaaatgatgtcgaccgcctaagttcatctctgtaccaaaaaccgcgacttaaaaatggatggtgtcgtctttacgcgtcgcaatgtctgaatatacatcattaaccttgacacgacctgcgagagactatgcctcgcagatagtgttattgctgc

SEQ ID NO: 43592 - DNA, 212 bp, Gossypium hirsutum
  Clone ID: LIB3272-024-P1-K1-H12
gcgtgagggacgaagagagagacaaactgataagacaactagaatggaaaaaaccaccgaaacgacgccgtcctactcattgcaagatcaggctacgacagagctcggcgccggcgggaaactaaggaggcaacggccacgtcgaccacctaccacaccctacgcccgtcctcagcagaaccaatccttacgcggtcgcttactctccaaac

SEQ ID NO: 43593 - DNA, 131 bp, Gossypium hirsutum
  Clone ID: LIB3272-026-P1-K1-A4
gtcggagggtgtgttaataaacgccttcgattgaacctaaaagtccctatagcttcgctatgcgagagaccctgttttgttaccaggatatcatatccgggggcgagcttttttctgactcattaccctac

SEQ ID NO: 43594 - DNA, 154 bp, Gossypium hirsutum
  Clone ID: LIB3272-026-P1-K1-A5
ggggaaagctgccacaatggcagcggccacattgaccacgccggcagggtcagcggttatactaaataacgtggggttaaagaaatcgccggctaaagacacatttgttggcggtgaagaaggcgaacatctattaaaatcgcccatatcgttg

SEQ ID NO: 43595 - DNA, 241 bp, Gossypium hirsutum
  Clone ID: LIB3272-026-P1-K1-B11
gcaatttattgcccccaaccccttttacatcaactcctaaccctaccttaccaatcaggcggggcatcttgcccttccttggtattcataattttcctacaaaactttctacattgctgtctattctaagggctaataccttatcagcgatcttaattgcctgctgcaccatcaacgcaggtacactcatgtcagttgcttgagaaactaggctcgtcctggacaagaaatctatcgccat

SEQ ID NO: 43596 - DNA, 318 bp, Gossypium hirsutum
  Clone ID: LIB3272-026-P1-K1-B2
aagtggatcaacaacgagcagctttcatgccttgtctgcgtttcatcagctaaccccgtacggtgaactagcatcagcctaccactgtgtacatgaatgcaagctgggctctaagaatctaagacctgagctgcaaacaattgaattggtaacccctcaaagctgactactgtccatttcgtggttgcggatgacaatgcggataaaaaggacgtggatttagaaacaatggactctccaatatggtatgctgcgagatcttcagtttcatagagatatcaatgggctcttgaactacgaccgcatgtgcttatgggg

SEQ ID NO: 43597 - DNA, 114 bp, Gossypium hirsutum
  Clone ID: LIB3272-026-P1-K1-C11
aaaagtctttggttctttcgctcaacttaatactgggtattgaactttgtgcaaggggggttggggttctttatggctttgttgcgatttcatgaatgctatgtggaattggac

SEQ ID NO: 43598 - DNA, 382 bp, Gossypium hirsutum
  Clone ID: LIB3272-026-P1-K1-D1
cgacgagcaagatcaagcagacctggaagcagaagaagagaacagcaaaaacagagcgaagggaggtgtagctggcaagaaggctcgaagaccagtggcacctaaaaacccgaagaaggtaaacaagaaagatgacccacaagtacccgaagcctcagaaatttcgtctacgacagcaatggaagcagaaaatgttcctgctgttgttaaacccaaaggccgggccggtgcaaagaagaagacaaagaaggatgatagtgatgatgatgatgacaacgactttgatattcctgatctaagggagcgacttgccaagcataacatcgattcctctcctgataattccgctgatatggaaactgaattgtttcaagaacctgct

SEQ ID NO: 43599 - DNA, 134 bp, Gossypium hirsutum
  Clone ID: LIB3272-026-P1-K1-D11
ttgtcatttcaagtccttgggtttcgtggttcaaggcggctagtttaccagcactgggttctctactgcttactccattgattttatacaagtcttatcctccccaaaccaaaagacacacccgattgcccctt

SEQ ID NO: 43600 - DNA, 206 bp, Gossypium hirsutum
  Clone ID: LIB3272-026-P1-K1-D7
tttcatacttaatcaactttatttctcattgatcccgcctttttctttctgtttccatctttgggttttcaagttatttcctttgttaatcatggagattatcttggaactttttctgacagcttttattgctcttgttttttctttcttgatagccaagattgtctctcttgctaccggtggtgatgctggtgggggttgtagtg

SEQ ID NO: 43601 - DNA, 302 bp, Gossypium hirsutum
  Clone ID: LIB3272-026-P1-K1-E10
ctgctgaaactgaagtaaaagtcgaaactgaagcacccgcacccgttgaagtcaagggagaagagaaggccgacccaccggttgaagcacccgcacccgttgaagtcagggaagaagagaaggcccatccacctattgaagcacccgcacccgagaccgtggtgtaaacagaagtggtcgaaaaggtttcaagctgccgtgacgacagtgccaagaccggtgagggaattgaggaattctttgtagcagtggccacttcttcaaccgcctaaaaaccaaaagtagaggcccttttttttttt

SEQ ID NO: 43602 - DNA, 407 bp, Gossypium hirsutum
  Clone ID: LIB3272-026-P1-K1-E11
tttgtcacgagttcgagaggttcagtacttatctgcctgatatcaaggttgctgtcgtggtatggaggtgtcaacatcaaagttcacaaagatctactgaaaaatgaatgcccccacattgttgttgggacacctggaaggatattggctcttactagagacaaggatctttctttgaagaatgtgaggcatttcattcttgatgaatgtgacaaaatgcttgaatcacttgacatgaggagagatgtgcaggagattttcaagatgacccctcatgataaacaagttatgatgttttctgcaacgctcagcaaagaaattcgcccggtttgcaagaaatttatgcatgatccaatggaaatttatgttgatgatgaggccaagttgacccttcatggtcttgtaca

SEQ ID NO: 43603 - DNA, 387 bp, Gossypium hirsutum
  Clone ID: LIB3272-026-P1-K1-E9
gcagcttctccaccttgcatgggacaaggagaatgaacagtgtcccatggaaggtggagaagctgcttgtctccatatcagtaaacctaattgtgatcgggtaagcgtacaaggtatctatgaatatatggaggaagagacattccttttattaacatcattgatgcgcttaaagggatgaaaagaataaagagatgaactggatgatgtagaggaagatacacactggaaggatgggtgatttcaggtatcagtgatgcatgtcgaaccagtggagcttgtacctaattggaggacatgacaaaaacaatttttcatacagttacagtgtgattgaaggcggacctttatgggacatgcttgagaaaataaactatgaaaaccagt

SEQ ID NO: 43604 - DNA, 298 bp, Gossypium hirsutum
  Clone ID: LIB3272-026-P1-K1-F2
tcagcctctttgactaagcaagcaaagcaaatatcaatgcttaaagatccctcatacgttgaggaacacctgatctaaaccaacttctttttgggcaatgttttgtcactttttatttttatttgttatgataatgatataagttgagaatttaagattgttttttctttatgttttggattttctttttgaatgcactgcaaatttcatgcatcttcaaattttaatggtattttgattttagggtttaaaaaaaaaaaaaaaaaaaaaaaaaaaaaaaaaaaaaaaaaaaaatagg

SEQ ID NO: 43605 - DNA, 359 bp, Gossypium hirsutum
  Clone ID: LIB3272-026-P1-K1-G6
gctgtgtgtctgatagggtttgtaccctttttcagccgccgccgttgtatcaggccgatccacgaccttattcacccccttttccgatcgctactgagatgggatgaaccgcgacaaagcccgtatgaatccgcaggggaacgtggagcaaacggcgcgcatgggatggtcgattccgagacgtgcggcgcctgtgaactgatggaggcggagttgaacagacatgcgtcttctgagtgcattcgaggctagagttctgcttttcttttttgtttctgaagtattgagcttgtgcaggcctgtatttgcgggactgctaactttatttggactcgggtcaatagggccctattacatta

SEQ ID NO: 43606 - DNA, 412 bp, Gossypium hirsutum
  Clone ID: LIB3272-026-P1-K1-H5
caggttctctcattagctctttgaatttctactctctttttttttttttttaaagtttgtatggatacccttttccaagatttacctggttccatgtatgggttcaaatttgatcacggctcagtgccaatgccagtgtatgcaaatcacaaccttgataatgggtctaaagagagtcccattgattcatcttcatcatcaccatcatcaggcgtgagttcagatagtcctttccctaatgaaatgcttaaatacataaaccagatgttaatggaggaagaccttgaagaaaagacctgcatgttacaggtgctctaatctacacaagctgctgaaagatccttctatgaagtcctctgccacaattatccgattccggctggtctaaatcattattacccagatgatgatt

SEQ ID NO: 43607 - DNA, 410 bp, Gossypium hirsutum
  Clone ID: LIB3272-027-P1-K1-A8
cactgagtctcgatgaaattgccgactctgtggttagtgatttcttaaagatgctggaaattgaacacggtccatttagcttgaattctgacaatgctgttgagtctcctagagaacgtctgttgagagaatttgagaatgaagccttagattccggtgacttcatcttaaattttgaagctgggggagaagaggaggaagttggatccaccactcctggtgcttgtcacggggataattatgatgattttgctttctcttcatttattctgcccaggcaggagcaggaggaaagtcggtcactggcaaacagaaagtcaatcaaaatgcttgaatacttggagactgtagccttgatgtgtgagtggggcttagatggaaggcatttcaaagttcttcgtgtgttcaga

SEQ ID NO: 43608 - DNA, 132 bp, Gossypium hirsutum
  Clone ID: LIB3272-027-P1-K1-B1
actgatctaatttgagcatcttcatatacagctgatccctatatgaagctaatggggggggttccttctactttttgtgagtacaagctctatttcgttgacctaacacaagcttttgacatcttaagacaa

SEQ ID NO: 43609 - DNA, 226 bp, Gossypium hirsutum
  Clone ID: LIB3272-027-P1-K1-B10
gtactaagttaggtagctaaattcttaaaaaatgcacagcttattaacgtgaagtctaattttatatgctttgaagaactcatctattcgttcatcgtagggcatccctatataacacaagtgctcaaataggtgttcgcgatggaccgctaggcatcaaaccaccactatggccaaggatgattttcttgtacatacagagaaacatttgttgtgcgcgacccta

SEQ ID NO: 43610 - DNA, 380 bp, Gossypium hirsutum
  Clone ID: LIB3272-027-P1-K1-B3
atcatgagtgctgtcacttatgactattaaaatccctaaccagtcacgcctaccaggcttctcaaggccattactagacacactccgaaagtctgccccacggactcacctaatgcagtaaaaaagccttgaacgctgaagctactcactagctctggaagtatgacagaaactatctatgctgaaggcctctcattccaacttatgaaacaccagatgcgctgacatgagacaaaggattttcaatacagtatcgatttaatcgcacatgctccgtggatggatatgcttaaaaaaatgaactatgaaaacagggtggcggctcctgcatgtggagggcgtatacacttgagctcaatgaaatacaacactatatgcga

SEQ ID NO: 43611 - DNA, 439 bp, Gossypium hirsutum
  Clone ID: LIB3272-027-P1-K1-B4
cagatttgcaggttgttttctgggaattttaggggaaacccaatgtcgaaacaaacatacagggtgtgcttttgcttcaggaggaggtttagggttgcagtgtcagaggcaccagaggagatcaagcgggtgtttgagcagtactctgagaatgggatgatgtccattgatgcactccacaggttcttagttgaattccagaaagaagataaggctaccagagaagatgctcagaaaattgttgatagtgttaagcattttcatagaaagggtctaaatcttgaaggcttttttaagtatctctttgctgatatcaatcctcctctggcttctcttggggtccaccatgatatgaatgctcctttgtcacattatttcatacataccggtcacaattcctatcttactgggaatcaactcagtagtgactgcagcgatg

SEQ ID NO: 43612 - DNA, 358 bp, Gossypium hirsutum
  Clone ID: LIB3272-027-P1-K1-C2
gtataccaaatctgaagcactctgaattatcgaagctgcacctcacatgggatctagtgcatggttagtgacctcggttcgagtgtggagatcaggaaaatcatggatgccaaagttctcttcttttttgctttgctttccttttaaggtgtctggtcttttgcacactgtgtactataccaaagccttgctatgaacttctacaaggatccttgtccttaggctgactacattttcaatggggcaagttaagctactttccaagcgacacacaaacactggtgattattggctgagaaacatttcccatgactgggctgtccagacatgtgatgcttcactggtgctggactgcaca

SEQ ID NO: 43613 - DNA, 434 bp, Gossypium hirsutum
  Clone ID: LIB3272-027-P1-K1-D4
cacacctcctttccctcttggtaagctgttgcaattaataagaaacccccaacgtagataaaacagaccgtaaatggcagcagcagcagattctgaatgcaaacgcagcctggatagaaggccctcgtcttcgtcatttcgtctacgctgctccagtctaaactcactccgtctgcgacgcgtatttgatatctttgacaagaaccgcgatggcctcatcactgtccaagagatccatcaggcccttactcgtctaggccttgaaaccgatgtttcagatctagattcaaccatcaggtcgttcataaagtcgggtaacatcggcctcacgtacgacgggtttgttgctttgcatgagtcattggaccaaaggttgttcgggttggagatggaggaggttgcagaagaggatgaatcagaatcagatttgacgg

SEQ ID NO: 43614 - DNA, 383 bp, Gossypium hirsutum
  Clone ID: LIB3272-027-P1-K1-E3
ggcactgaagcattgtctggataactcctataccgatcatagaccttggcactttcttcggctaggatggagtccctggctgctgtcatacagttcacgggtgccttttggtcatgcgcctttttgggatgtgttctccatacagcccacccaaacctgtcttacggcccagctcagggatgaacactgccatctaacgtaccagctacgggtcatgtacctggctagccttctaaaataaaagaccactgcggcctcgattactctaggccatctggtactgattctaagaagctttctcgagacgttaatgttcgtgactccgcaccagctcatattgatggtgttggacacttgcaacaatgaggctctattcccatgct

SEQ ID NO: 43615 - DNA, 177 bp, Gossypium hirsutum
  Clone ID: LIB3272-027-P1-K1-F12
atttatagccctaatatgcgcaagactttagctctataagtctcaaacatgtatgggccaagatttagatacaaacgatcgccaaagattttgtgagttgagtgctagagtttgtcgacaacctgttcatattgtcacccccaaaattaacgatctttccataacaattgggtacat

SEQ ID NO: 43616 - DNA, 452 bp, Gossypium hirsutum
  Clone ID: LIB3272-027-P1-K1-G5
cttgagtgggatcattaaagaaaagaaaaaaaaaatcgaagatgccgccttctttgggcggtgattaaaaggagagaggcttgagtgggatcattaaagaaaagaaaaaaaaaaatcgaagatgccgccttctttgggcggtgattaaaaggagagaggcttgagtgggatcattaaagaaaagaaaaaaaaaatcgaagatgccgccttctttgggcggtgattaaaaggagagaggcttgagtgggatcattaaagaaaagaaaaaaaaaatcgaagatgccgccttctttgggcggtgattaaaaggagagaggcttgagtgggatcattaaagaaaagaaaaaaaaaatcgaagatgccgccttctttgggcggtgattaaaaggagagaggcttgagtgggatcattaaagaaaagaaaaaaaaattcggaaatgccgccttttttt

SEQ ID NO: 43617 - DNA, 154 bp, Gossypium hirsutum
  Clone ID: LIB3272-027-P1-K1-H4
ccaagatgcccttttcatctacgagcatctcaccatgtcatgcgctgactttcccgggtgttgctgcttgattacttttagtgccaaagcttgatgttcctccaactgtaactttttggcttgtcaaccactgtcaattggtcccctttgttgt

SEQ ID NO: 43618 - DNA, 242 bp, Gossypium hirsutum
  Clone ID: LIB3272-027-P1-K1-H7
agcctacccacaagagcccaccctcgttttttaaacagccagtctcttgcggagggatacactgtttctaggtgttagtgctgatttgttggactcggggcgcgttgttgtttgtaccgggaggaccaaatgctgttcacttattttgggcgtggctgatctcgatgctgcaggatgcctctgcactgctattaaagcttatgtgatgggggttaacctatacgtgcctgtttaattgtctt

SEQ ID NO: 43619 - DNA, 394 bp, Gossypium hirsutum
  Clone ID: LIB3272-028-P1-K1-A2
caggtgccgtaccgattcggcgtgtccggctcggcgtacccgaccgatcaactctaacccacactccattcatgtacgtcactaatacccaaaaggtcagaaaaaaaactgggattcgtctctcattttttatcggagacatgtgtgctattattttactctgaatatgagtatttaagcgtatctttggcatttcctttatttgttacaattcgcaataccttcttccattactggctgctgcttcaaccactaagcttggaagatgggaggcgacaatggcatcagtcttgaggagatcaaaaacgagtccgctggtctggaacggattcctattgacgaagttttcgagcagctgaaatgtacaagggagggctcgtcaaccgaggaaggc

SEQ ID NO: 43620 - DNA, 409 bp, Gossypium hirsutum
  Clone ID: LIB3272-028-P1-K1-A5
gcggaaacatccctaacgtaatctgctttgaatccgacccgggtttggttaacaaattaggaggctcttatgtccacagtgaaatgaaaggaagtatctttgacaaagtggtgggaatttctcaactgaagaaaacagatgaaacaaaggaagttgtgcaaaccgtatcggaggcatgggaccggtgtaattctgacgatataaggttctgtttgttggttattatcaatgcttatattcagccagtcccgaccttgaagaacttgagatcaaagggcttttcaaccctgaactgtatggtgaagaattgtggacctcagatattggattgtcttatggatccgaattgtaggaaagcacttcaatgcttgaacaaatgcagccctgtagatcaggtgtgtaattatcg

SEQ ID NO: 43621 - DNA, 329 bp, Gossypium hirsutum
  Clone ID: LIB3272-028-P1-K1-A8
aataatgataaaaaaatggcttttaccatttttcttcatggccttagatggaaatctccaggtttttttttaatatccagttcaaattgtggggattggctatcactcttatgtagtagaaggaaattggagcctttctaatacttaaaataatacatatcccttgcatcggcttagattgaaaatctccaatttttcctttgattgttagctgtatttatttctcaacaaaactagggcttcggtttcaaatagtggtgattgtgcgatcaagcgacgcagtagaggaagctcgggcctttatgaaagaaatatacccagacctggct

SEQ ID NO: 43622 - DNA, 359 bp, Gossypium hirsutum
  Clone ID: LIB3272-028-P1-K1-B1
gggaaatgaacataacttaccgagattccgctctttgctctcagccatcttcctcaggtcgtgtctcgagggtgcaataaacctttttcttttcttttctaccaagagctattacattgaactgcaaggatggctgaggaggctcaaaacgtcatattgaatctgaatgacttgagccaagcacttgctcgctagctttaaatgaccttattagcgaagcctattggcggaatatggcacacaggaggcgtggttgatggcactgaatactatcaaggcggatgaatccaacattcttctgctgggacgacaccatatgggacaccaattactgtgattgattgatgagtcacccatgt

SEQ ID NO: 43623 - DNA, 408 bp, Gossypium hirsutum
  Clone ID: LIB3272-028-P1-K1-B10
gggagagccaataagcaatgtctgtaatatcttcatcgaacctgacgatctccctcaacacaactatctctctgtcatggcgctcttctcttccttctcgagccatctttccccgccccaaaaaaacccaaaaccctcgtagtcctagccaccgctttgggcgcaaaacccaccgtcctcgtggctgaaaagatcggtgacgccggtatccaactgctcaaaactttcgccaacgtcgactgctcttacaacttaagtcccgaagagctttgtaccaagatttcactttgtgatgctctgatagtgaggagtggaaccaaggtgacccgagaagtgtttgaatcggctatgggtaggctaaaggttgtgggcagagctggtgttgggattgataatgtggatatatcg

SEQ ID NO: 43624 - DNA, 410 bp, Gossypium hirsutum
  Clone ID: LIB3272-028-P1-K1-B7
gcgtttccagataacctctactttactctcagtgtaagtcttgtttctttttcggattgtagtttttgggtatcgtttttttcaaatattctcttaacatgtacaagtcttggtgcaattttacttcaagtcctgcttgacataaaacttcaagattttgaatattttcccatttaaccaaagttcaagttaatttactccatctcatgaaaatgggaatttcttttcctgcagtaaatgagtaggttgttagagtttccattcctttagggttttacgttttccttgtttggtttccgagaaaatttttgttgaaaaagacgaattaaaaatggaagaatttaatcgagtaaacgggaacagtatcccgaagggaaatttcgtgtatgcatctccagttgtagcaactg

SEQ ID NO: 43625 - DNA, 384 bp, Gossypium hirsutum
  Clone ID: LIB3272-028-P1-K1-C1
gtgagaatggagagcaccacaaatggcggttgcaaaagtggaccggggaatcaaggagctgttattgacaatgacttaggcactaacgcttaactttaccaccagaaagagatgtttagcgatcgagtccatgtggactcttataacaacgctgggttatagaacaagcctacttttcaaggaagggctagatgggatgtatgaacaggatgtgatattattgcaatcaggactgcccagtgctggcgcaaggaaggtctatgacggtgaaccaactaagatgacatatcctgcaacggctatagctgaggcataacaatctggatgacatagtatgaattatttgaagactctatggaagaagcttgcaccaaaactggatgc

SEQ ID NO: 43626 - DNA, 389 bp, Gossypium hirsutum
  Clone ID: LIB3272-028-P1-K1-C2
cttgcattgagtctctcagatataactgaaaggaaaaaaaaaaacaaccggtcttggtgttcaacactgatgcatacattgctcttattctcacatagaacttgatgcgctgcacttagggtagctttaccaacgagcgttgcccgccaccaggaaagagcgacatgcgtactctcaagagcccactttgggaacctaaacagtctgccgcttgcccggaatgtacactgacactaggtgtttgtgctggatagtggggctcaatgcgcgtagttgttggaccgctcaggaccaaatgctgtatatttattcggggtttggctgatctcgacgctgctgtgtgcctttgcactgctataaaagctaatgagtagggggttcacctaaac

SEQ ID NO: 43627 - DNA, 365 bp, Gossypium hirsutum
  Clone ID: LIB3272-028-P1-K1-C6
gacaaatatcataatggctttaatagagtttgataatttcaagtactatttgcaacaaatttagagcgaatttgaagatattaaacctcaaatatttataatccaaatccaattaatttctcaatctaccttccatgagcagttttgattttcatacagcggagaacatacattgaggaggcttgcttgattcagtgcttcaccagcattctattgatcattgagaagagatgggatcaaatattcaaactgctttggcgatagaaagaaattatccaacgttggatggcaagtcattcaatctttcaaatgaacagaagagtcctttgtttactgaggatttcgaatactaacggaatgatatt

SEQ ID NO: 43628 - DNA, 316 bp, Gossypium hirsutum
  Clone ID: LIB3272-028-P1-K1-C8
atcggatttttcttagacgtgaaaaaaacggggctgcataccaccaagctagtcagacggctatttgccaaaaaggagatgcgtatactgatgggcgggcttgaagctgctggtaaaaccaccattcattacatgctgaagatgggagagattgtcacataccatacacaccatcggtttcaatgttaggaccgtggtaaacaagaacattagaatgactggaagggatggtggtggccaggacaggaggccgccatagaggagacactctcatactaacatgcagggacttatttttgtggttgatagcgcagat

SEQ ID NO: 43629 - DNA, 371 bp, Gossypium hirsutum
  unsure (1)..(371): unsure at all n locations
  Clone ID: LIB3272-028-P1-K1-F2
tttagagtaaacctttttataaagcgattggccaggcggaaggaactagccctggggggggatttttcagtccggtgaatttgttatctcgaatttcgatcgaacccaatcccgtataccattgcaaatctgacgttgatgttaggaagatacatcctcatgtaggggaagcgaccgactagggacgaagctgtttagggttctaagagcacctgtactgcnatgcgtgaagagcatccaacccctatgaatgcatccgcgttaagttttatgtcaaacgagttaaaccttgtggacctgcttgatgcgatacacgcttttaagagagatgcatggtttacatctacacgtgctgctaatgagattgtgca

SEQ ID NO: 43630 - DNA, 407 bp, Gossypium hirsutum
  Clone ID: LIB3272-028-P1-K1-G1
gcaaaaggcaacagcatattaacatgttgctttttgcagtttggtccgtagtcagcccgccctcctcgcgataaacgatatgatgctacttctcaaactctctcattaaaaccaataattcacactatctgttttactctttgatcgaatgatggagagcagtgaagaagatgatgacttcccttccattgagagcatcactccccagtccaagattgattctgttcaccaatcccatactgaaaaggggatcagaaaactttgctgtgagcttttggatttgaaagatgctgtggaaaacttatgtgggaataggcgcacaacatacttggctttcttgagaatgtctgaagaagttgttgaaatggagcacgagttggttgagctacgaaagcatatctcttctc

SEQ ID NO: 43631 - DNA, 388 bp, Gossypium hirsutum
  Clone ID: LIB3272-028-P1-K1-G8
gctttatcaaactcaaatcttagtctgaacaacatggtcaaaacacccatcagatactatctggttgatgcatgcaccgactcaaccttcaggggaaacccagcagcggtttgtttgttggaggaagaaagagataggaaatggatgcaagcagtggctgctgagtttaatatctcccagacttgttacttgactcggatccccaattgcacctctacaaacaccaggtttcgatttatatggtttacccctgtcaccgagggtaagctatgtcgtcatgcaaccttagcatctgctcatactctctttacaaatggttgggtgaatgtaaacattatcgaatttgatacattatgtggaatcctaactgctacaaaggttgcagatg

SEQ ID NO: 43632 - DNA, 324 bp, Gossypium hirsutum
  Clone ID: LIB3272-028-P1-K1-H7
gcacgactgtggtaatagaactcgaaattccttaaagagtgtgtaacagctcagctgtctaatgagctacacaccgaaatgagcggcgctgaagcgcgcgacctatacccagccgaccggcaagggccaggctatcgatagtaagacgcgcggagttcgagctagacctgcacacaagccacgcagggtgactgccttgcagatctcaagcgttgatagcgatattgatatgagatccttggatgccgaatcggggtatggttgcaaggcaacagtactcgcgcatgggtttgttgatcctaaaagacggaacaagccgctgcg

SEQ ID NO: 43633 - DNA, 424 bp, Gossypium hirsutum
  Clone ID: LIB3272-029-P1-K1-A1
gtttataacaggtagaaccacagagagactaaagttcttcagacttcgtgtggagcagcgaatattagcaaacttcttagtgttgactgacatcatcacatcaccaactcctaggttggtcttggagcacctcaacagatgagatttcaatagggttgacactactttgacaaacgacaacattcttttctacatatatacactgttgacggcgttcgattattgagattcacacggcatgatgcacaaagctgttgagcctcacaatggcagggtagatcaagagctgatcgcactgcctttgagagacaggagacttgatgaattttaccagtcctgcaaagagtataagaggccacttgcttctaggtactacaaagggcctgagcttctggtagattgacaagactatgactattccttg

SEQ ID NO: 43634 - DNA, 112 bp, Gossypium hirsutum
  Clone ID: LIB3272-029-P1-K1-A10
gtctaatctaacgtcatcaacaaatgaaatattttccacgtacttgttggcggtggctgtctaagggggtggctatgaatgtttacgacaaactcaccgcatgctgactttg

SEQ ID NO: 43635 - DNA, 296 bp, Gossypium hirsutum
  Clone ID: LIB3272-029-P1-K1-A11
atcaaatctgtcgtgctaggaaaataaaacaacaaacgccttctttgaggcggacgtagtataagttttagggaatcaggtattggaaaaatgtcaaatatgctgtagagtaggccaaaaacacaggtttaaatgaaacgcctgacagagagctctcttcttcttatgaatcgcacagcctccatcgaaatatttgttaaagcaattataaaacgtgtgttgcaagcagcaggtgttcttttcaagagacacaatgtctacttcttctgctgtttacagctctgacgtatcattaa

SEQ ID NO: 43636 - DNA, 425 bp, Gossypium hirsutum
  Clone ID: LIB3272-029-P1-K1-A2
acaggctggttaagaccatcgtcgacgatgaggattacaccatccgcaccgtggagcaagctaaagatgctctttgcgctttgagagaacttaacttcaataaaagatcgacggtgcccaccaccactacaacctcgttcctgaagttacacgaagcgctgttctgtcctgaggagtttaaatgtcctctttctaaagagcttatgagagatcctgtcattgtagcttctggccagacatacgacagactctttatacagaaatggctgaatgcggggaataggacttgccctcacaccgaacaggttctttcacacacgattctaactccgaatcatctaatcagggatatgatattgcagtggtgcaagagtcagggaatagaattgccgaaccctgttatggatgggaaagaggagggggtc

SEQ ID NO: 43637 - DNA, 426 bp, Gossypium hirsutum
  Clone ID: LIB3272-029-P1-K1-A3
caaaaactgaaaccctcaaacgcacgcaatcataaagctggaaatcaagttcactgctgttaagggtcttccatttttctgtggtttaaggaaagtttggttggttgcagggatctggtaaaagtttcctgtttaatcgatctgttggggaggtgtggaaattagaaaaggaaaggggaaaataaaaaggagaaagggatatggtgggatgaggggaaaatggctagagaaagtcgacccaaggctttgggttccgggcagtgctcgtataaaaggataacactgattgtttgcttcgataacataggtattgctctctttgatcttcgctctctttattcttcgctctacatttattcaaataaagatcatgttgtaaagtatacaccagatcagattaggaaaatgggagaatcagataagatt

SEQ ID NO: 43638 - DNA, 237 bp, Gossypium hirsutum
  Clone ID: LIB3272-029-P1-K1-A9
gttggagtaaactatagcaaaaatcatcattcacattgcgcactggtggtcaggatcacccttagacagctgctttgccatggtacgatgagatcacactatcgctagaacaaggtgttgggtcactcaccccaaaagcaggaactgcagatctagattctgcttcctgcttgaagttacactgatgtatactactggtagtgtgagggctacactcacttgttccatcgcatactt

SEQ ID NO: 43639 - DNA, 338 bp, Gossypium hirsutum
  Clone ID: LIB3272-029-P1-K1-B12
tttcagttcagctgctccgtattatttattcaactactatggctacgggggggtctgttttataggggttttgtattttctcgagtgttagtggtaagattctcagtgaggaagaaaaggctgctgataatatttacattcataaaactgatcgagagaaattggataaactttctcgcatgggacccaagccagagtagaaaccggatgctggttcaggtggtgcttcgaccgatggtagcactacctatacattggttacattctctgagaaagtatcaaccgataagttcctaaactacggggttcttgctgttgttgcaaccccttggtgctgc

SEQ ID NO: 43640 - DNA, 381 bp, Gossypium hirsutum
  Clone ID: LIB3272-029-P1-K1-B8
gtcatcaacgtgtgcggaagattatgtatgtttttgaacaaaagagaggtgagctttcacctgagggagagaccatgtcagcttatcataaatttatttagaaggacaagcttctttatgactcattaaattacatggtaattgataatgctatcctcactgtatgtcaaaggcaagtgagctgtgcaaggtgcgtattgatgttcaccatgaacgcccatgcttcagctcataaaagcttagtttggtggatgtgatgacatactcacatgccttgtatgtaggagcttgaacaacatatttatgctgtataaacaacctggtctttacaaaaagcgcattgaggcgttgatggagaatgcagcatataactcactaccg

SEQ ID NO: 43641 - DNA, 428 bp, Gossypium hirsutum
  Clone ID: LIB3272-029-P1-K1-C1
cgaaaatatttcttttcttgttttgagagagagagacagccggcgggaaggcgtcgagatcgatttaagctagtcagttgaagctgccaggcattggaacacgatgtctacggttgaagcaccactatatccaatagctgtcctgatagatgagctaaaaaatgacgatattcaacttcgtttaaactcgatccgtaggctttcgacaattgcacgtgctctcggggaagagcgaaccaggtcggaattaattccatttctcagtgaaaacaatgatgatgacgatgaggtgcttcttgcaatggctgaggagctgggagtgtttattccctatgtcggcggtgttgagcatgcccatgttttgctgacgcctttggaaaccctttgcactgttgaggaaacctgtgtaagggacaaagctgttgagt

SEQ ID NO: 43642 - DNA, 385 bp, Gossypium hirsutum
  Clone ID: LIB3272-029-P1-K1-C10
aaatatcataagaggattctgtatctgtgatctgggcccctctaaggagaaaagttgcaattgaaggctgttcatcctctgtattagggaaagctattcagccaattctttcagcatctagagtttctatcaatgctgcaaaagagattctattacttgagcctataggaattgcccatattcgtaactcttctcatgtcattctcccaagatgttctactgatttaccaaatacaaggcatgcttgttatagcactcatttacagactatcatgcaaaaatcatgcttggctctttcttctggagggggggatctggtcgctgttattagccctcttatgggagaatcaattagtgatggcactatagcaacattcttgaaaaa

SEQ ID NO: 43643 - DNA, 386 bp, Gossypium hirsutum
  Clone ID: LIB3272-029-P1-K1-C11
aaataacataaagtattcaatatcttttatctttgcccctctaatgagaaagagttgctatttaaggctgtgcatcctctgtttcatgattaacttttctatcaattctttcatcgtctaaagtttttattaatgtcttcaaaagattttttattactttatcctaaaataatttccctaattcttaactcttcttatcttaatatactaatttgtcctatctaaataccatattcataacatactttcattatcacttatttaaatacttaatatacataaaaatttcatgcaatattcttctttaccctattatatggttcatttatttattcctcactaagtaaattcaatcattgttttcacttttaatcattttattaaaa

SEQ ID NO: 43644 - DNA, 144 bp, Gossypium hirsutum
  Clone ID: LIB3272-029-P1-K1-C5
cctcgatactttttgtacaccgtgagaatcgtagaccgagaatccgtctttgtagggtttgatcaggcggtgctttttcccctcctggtctattttgtacccaatttggctggtgtggcaattctttcttactactgcacagtt

SEQ ID NO: 43645 - DNA, 427 bp, Gossypium hirsutum
  Clone ID: LIB3272-029-P1-K1-D1
gctagcaaaatagaaatcaatcgaatttccagctttgggaaatttttaaagaaagtcggtacttcaagccactgattcagaaaacggcacaccggatctccgccattcgccgttgttttgaagcgtttctcaaccatgaatcttctcggccatgtcgattccctcaaaagccaaacgtggatcaaattcgcggcctttatttttatttccgacgcttccttttacttaggcaaacactggtccgacggttcccgccaactcatcttcttgtgccgacaatgcccttctggaacgacgtcgtcttcaccttccatcgctctttctcctaatctcaataaagaattcaatgtctccgctctcattgacactccggaaccttctcgttcagctaaaagcgaaagaacgtgggcgtcggggtctttgaaag

SEQ ID NO: 43646 - DNA, 408 bp, Gossypium hirsutum
  Clone ID: LIB3272-029-P1-K1-D11
gttcgtcggactgaaacaagaaagccaataagaaaaccccttggtgctgccggagatactcgcggtggtcggaataatggtcaccatgaaatctcaaagcaaagaaatgctactaacaatgagggagcgtcaaatccatctactgatgcactggaagagacttctcatgtaaagcatgaatcccaaggtgatattcccttttcaggtccattacaagttgcttcatcgagtggctttgcatgggcaagaagacgaaaagatgatgcatccggaagatcacttagtaggtctatctcaagagggcacatttgcagttctttagaaccttctgctccattacatacacgaaatgataatgatttgaaacggcatgaaaatgaagatgttataaatggaggtcgaactgat

SEQ ID NO: 43647 - DNA, 393 bp, Gossypium hirsutum
  Clone ID: LIB3272-029-P1-K1-D2
gtcagcaatttgtttagaagatcatgttgcctcttgtacacaagggatttgatgatctaccttaggagctgaacatttcagcttctcataaatctactaacgcgcctaaacagccttgagacaccctccacgacttggtatctcatcacgctgacgacacttgctgcatgggcaaaggcaaccgtgctcggtgcggcttatgtccgccatgaacgtgctgcttcagttcatcaaagcttgtttggtgggtttgatgacatacactgccttgtcttagggagcttgaacaatccatctatgctgtataggcagcctggtctttccaaagcgtgcaatgaggcgatgattgtgattgaagtcaatagcacactaagggatctgggtgcataccct

SEQ ID NO: 43648 - DNA, 295 bp, Gossypium hirsutum
  Clone ID: LIB3272-029-P1-K1-D5
gctggagcccatatcaagttttatcgggtcaagccaatgattataggcatcaggggcacaacgccctcgagctatgctcaaactttaaatcaggaagacggcacatgatcctagattggatttgacaattaccaactaggtctacgatcagattctgtgtgtagttcatatgaaaagataagatggcctcagatcttggtaaactgttcattggtgggatatcttgggacactgatgaggaacgtgtcaaggaatatttcaggacatatggcgaagtggtggaagcactgttcat

SEQ ID NO: 43649 - DNA, 258 bp, Gossypium hirsutum
  Clone ID: LIB3272-029-P1-K1-E1
gatgaagaaaattatgggttccaaaggcatttatatctttgctgagccttgagggtcagctgtgttggcattcgcacaggatggggtagatcaagggcttgttatgaacttgtacacagatttttgatcttaaggtaaagtcattataaaggaccaagacaagctactattcacgcgacacaaaaacactgattcttttggggtgtgaaacaaatttaattactgtgctgtccagtcatgagttgcttcactgttact

SEQ ID NO: 43650 - DNA, 420 bp, Gossypium hirsutum
  Clone ID: LIB3272-029-P1-K1-E10
cggacgcgtgggcggacgcgtggggtcagaaatcataactgaaagaactggatacgactttacaaagataaccaagcactaaacatcgtataagggggagtaaggtaagattttcgtcttattttttggtttttctacacaatggcttcgatgtttggacctggaagctcaacagcaaacatatatgtaccagaagagtggtcggaggctgctaattccatagcctatgattcagtaacttccccacctcctttttcttttatctgcggcagccaaaaactctgggaaaaccactttgtcccgtcacctacttaacattcttctccaaaggtatggaaaagtagcttatttggacacagatgttgggcagtctgagttcacggttgcaggtttagtgtcccttacaattgttgacaaaat

SEQ ID NO: 43651 - DNA, 369 bp, Gossypium hirsutum
  Clone ID: LIB3272-029-P1-K1-F1
attttagattaagcaaccgtgcatcctcatttctatctctgacgagccttgtggttctattgaaatggatagctatggctacagcatctctgctacgatcattccgacgaacagacatcgttgcatatactatctatgactatagatgccttactaacaatggccaaacctccgtaggaattaattgaacaagcttttgttgagctgtcaagaaaaaacctgccggctatgatgtcattggtattgattagggcacaaccaactgctgtgttactgacatggagggaaagaatccaaaagttattgacaactgtgaaggtgcatggacaacaccttctgatgttgatttcaaccaaaaaggagagcttc

SEQ ID NO: 43652 - DNA, 371 bp, Gossypium hirsutum
  Clone ID: LIB3272-029-P1-K1-F2
gctaaagtctgcttttgcctgtcagagcttagatcgatcatgggtcactcgaacgtctggaattctcaccctaagacctacaggcctgactctcgcgcctgtcgcgtgggtggaaacccccatgccattataaggaagaatggtatcatgtagttgcagacagtgcttgactagcaaggccaaggaaattggattcattaagtcccgttgaagaatttatatggtgtgaagtcagaaaggaatttcgacaagtatgaactattattgtaaggttttggaattcaaagaaaaacttctaagaaaatgttactgcagaatttattatgggacattgaagtgtcttacaaagagtacatagatgtttttcaatg

SEQ ID NO: 43653 - DNA, 142 bp, Gossypium hirsutum
  Clone ID: LIB3272-029-P1-K1-F7
gaagaatgatcatgattgatatgcaaacagaacttttttcgatattgaataagatccagttgatgcagaaccctcattctatatttacaaaaagactgtcttggatccagttatatggtgcgtacaaagacattagttttaa

SEQ ID NO: 43654 - DNA, 337 bp, Gossypium hirsutum
  Clone ID: LIB3272-029-P1-K1-G1
gtttgtaacttttagtgcttacagagcattgttaaccaagaaaagaggaagatattggcttaaccatggcggacaaggtatacactattatgaccaggaagttcaagaccaacactctatctttcagtaaacaactcatcattgatgaattgcatgctgagaggcccaatgtgcctaacgcgcagatcaaggagacgcttgatcgaatgtatgtagcgatagacacagattcgctctttgtgtgcaagttcaggacatacactgtaggtggcaaagctagcggatctgttacgatctattccgcttgggcaagcgctataatatatacagctaaata

SEQ ID NO: 43655 - DNA, 417 bp, Gossypium hirsutum
  Clone ID: LIB3272-030-P1-K1-A2
ccacgcgtccggtagcttctcgttctttcctctcttcttcttctgttccattcacttttcctttgtaatttttttttcctttcgctcatttttgtattctatttccccttatctgtttccgcaatcatcataaaatttgaactttctagaatttaacaatcagatttctcatctctggtgaacgaagcaaacaccttctttaaggaattattaattgttgtctctgatggctccgccgccggtggagcaaaacggagatgcaacgacgggtacggcggaatcacaaaggtctatacctacaccgttcttgactaaaacgtatcaattggttgatgatcacacgattgacgacgtgatttcgtggaacgacgacggatctacttttatcgtttggaatcccacggggtttgctcgtga

SEQ ID NO: 43656 - DNA, 407 bp, Gossypium hirsutum
  unsure (1)..(407): unsure at all n locations
  Clone ID: LIB3272-030-P1-K1-A6
aaaccataccagacctctccaaagcctgagttcttcggagaaaatatgtaccatttttctttaaaaacaccatcaccaaactcagaatggtaacacaactcctttaacattccaaaacccttctatgatcgttgacaatgataggctctacttccgatgatacctcttccatccagtagattaggtcagatagattgtgtcctcgtcctactaaggcatgtgttgcttcatatgtattttgagggggcatcaccttccacaaccagatctagaaagcccatttcttccccgaaaataataacttcaagacaagccttcgcttctgctgtaatcggatccccagttcttcctagtggtgccactaagcttgtatcggngattaagagacgtcggaggcatcgatcaca

SEQ ID NO: 43657 - DNA, 196 bp, Gossypium hirsutum
  Clone ID: LIB3272-030-P1-K1-A8
gaagaactaattaacgattcggcagacgtttgccaccctcatcatcatcgtgctatgcatttccgccgatgcatcaagctttgaaatccgcaacgagttccagttcactttctgtgcggtaacctgttctggatgcggccgtcttctagacattgggcacactcggaccactgttttgcctgctcgctctgcatac

SEQ ID NO: 43658 - DNA, 296 bp, Gossypium hirsutum
  Clone ID: LIB3272-030-P1-K1-B12
ccgatcatggcggtccaattgactgtgttagctgacggggtttttattgggtgctcagctaaccatgcggtgactgacggtacgtcgtacccggaactctttcaatacttcagctgaaactcgccggaaagtctgtcataacaatgaccagagcgtggaaaaaatttcccggcggtcggatctttcacgggaatcggttctgatttcaactgcagctttgcgtgtaccgacaggagtacccttagcttctttatacgaaaacgagccatctcgtgagagaattggcaggtttagca

SEQ ID NO: 43659 - DNA, 365 bp, Gossypium hirsutum
  Clone ID: LIB3272-030-P1-K1-B5
atttattcgacgccatatcttccgtcaacccaaaggcttctttaaactccggtgagaaccatacgcggacgtccggttcacgtggttgctgaaccagctgcgaggtatgggacgaggcctgctatgaagcggatttgtgcctgtcccggcaacgcgagaacgaggagtggattaaagggttgaggcggctgatacttgagagccctgggcttgctttcgatgaatgcgaatccagttggctggtctgagctgaggtggatcgcatggataatgaatatagataccctgatggacaaaacggctattcgggctgggattggaaccggaaggccgacctttgtagccatccaagctgacaaggatgc

SEQ ID NO: 43660 - DNA, 300 bp, Gossypium hirsutum
  Clone ID: LIB3272-030-P1-K1-B7
tcggtaaaccctattttgttacgctatcttttgcagctgtagatgcagaccaaggcgcggacatatacaggtgaatactatctaccgtagaggatgacaaggaaaggctcatgaaaatggctggtgcagtccgcactgctgggaagggttgcatgcgaaggaagaagacggcttttctcacgacaagcacctccggcgacaaacgattgcagagcgctcctaaatgaataggagtgacagctattcactgcaatgcgacgaagttaagcgatgtcctgatgatagtaggtatccagacct

SEQ ID NO: 43661 - DNA, 399 bp, Gossypium hirsutum
  Clone ID: LIB3272-030-P1-K1-D1
ctagtctgttctctcccttattttcttgttcagttaatagtaccttttgttgttgttgtttttttagctaaactagttattctcagttcaagttcagctttgaatttcagcacagaaccagaaaaaaaaaaaacacccaaggctggttttttattttttattttatgatttacagtcaattattttgctatttagtttgtttctagatttgggtttttgttttttggacaattgtactgaatagtaggtgaatatagtggaaaatcttgttgatttattttttcttttgagaagtttgattatatatagcttataattatcattttgggttacttttatccgagttatttgtgtatttttggttgactcagtggacgaaattgaaagagtggaaaaagt

SEQ ID NO: 43662 - DNA, 392 bp, Gossypium hirsutum
  unsure (1)..(392): unsure at all n locations
  Clone ID: LIB3272-030-P1-K1-D10
acaaaaacgccttcttcaaactagttccatgtgccagcgccagcttagcaagatacttgatgattcagaccttagcagcatcattgatggttacttggatcttgaaatgattgaattcaccttgaatgatgtactgattgcttctatcagtcaagtgatgatgaagagcactgggaaaggcatccgaatactgaatgagacagcagaagaagtcatggaggagaccttgtatggagatggcgttagacttcaacaagtcttagctgatttcttgttggtatcagttaattntgcaccaaagggaaaccaacttagtgttggagctagcttaaccaaggatcaactaggacggtccgttcatcttgcacgtttgaaccttaagataacacatg

SEQ ID NO: 43663 - DNA, 363 bp, Gossypium hirsutum
  Clone ID: LIB3272-030-P1-K1-D12
cccgaccttcctctctgcttatcttcttcttttatgccttgtctgctctttgaaggaggggtatgccttgggacgaagagcaactgttgcagagagtcaccaccttgagcacagccataccatccaagtcagctctcttctaccctcctctatttgcagccttgcaaccaaagtattagacaaaaagtcatctttacaagttgtccacaagcatggtccatgctctcaactctatcatcacgataaagcaaatatccccactcacgccgagatcctccttcaagatgtaacccgggtcaagtccatccactcaaaacttgccaagagcctaagctctaccaaagtcgaccagactgatgcagc

SEQ ID NO: 43664 - DNA, 416 bp, Gossypium hirsutum
  Clone ID: LIB3272-030-P1-K1-E5
tttgcattgaatcaaaatcgaaactctcaacaaagaagaaaacaacacaaaaaaaaccaaaaaccaaaaaccagaacatatcatcatcttattcaccttcattatgcctgcaataatgattcttggttgcctcacacccgcatgcccctttcaatatccactctcctcccccccccctcccactctttctctctcaatatcctacctataaaaccccatttccctccccacttctctctctcacctgtagtaatcttcttcaacaccatcaaatcccaccatttaaaccaaaaaccaacatctttttctttctacattttctcttgttttttatccctgttttcaagttcctgtctctggttttttgttgttgtttggcaatggcggtttcagggtttgaaggttttgagaagcgg

SEQ ID NO: 43665 - DNA, 375 bp, Gossypium hirsutum
  Clone ID: LIB3272-030-P1-K1-F1
gagatctttatcagcatcgatactgttggtatattttgtgcattatctgactgtattggagctgcgattcatataagcatcctataagcaaatgttggttagggggtgggggtactgaagcggttgagtatttgtgtatggatttttagcatgcaggaatatgcaggctccataaggggtgaagaggtggttttactgggtgtttgtaattgggacatggggtaaggtatctgattcaagcatttgcattcgttatttttgacaaatttctcttattttcattgttttgtgagttagggatagggttttggtctgtggattcccacagtttttctgtacaagggctttaattggtttttcttataaaaatttggg

SEQ ID NO: 43666 - DNA, 406 bp, Gossypium hirsutum
  Clone ID: LIB3272-030-P1-K1-F11
attcttttatcctttgaagcctttgtcttctaaaatggcaatatcagcctgcaataacctattttcaactctaacttttcttcctaacaaagtctccattttcaccaaaactcctcagttcatcaccgctttgaatggttccaaaacgagattatactcttccaaagtaagcatgagcctaagagccggcattgttggtcttcctaacgtcggcaaatcaactctcttcaatgctgttgttgaaaacgggaaagctcaagctgcgaattttccgttttgtactatagagccaaacgttgggattgttgcagttccggatcctcggcttcatgttctttctgaactcagcaagtctcaaagagcttgccctgcttctattgagtttgttgacattgctggactcgtt

SEQ ID NO: 43667 - DNA, 227 bp, Gossypium hirsutum
  Clone ID: LIB3272-030-P1-K1-F5
atagactgtatgcctgtactttaccaaacaccacagatgctgctgagagctggtcgcgtaccatatgggtcttccaacctatgcctatatgcgctcaactctgtcttgtatcacttgctgacgatggcctgctggccaatggtgattcagagacaccaacatacgccgactctccaagcgaggccatatacgatctacccaatgagatccccagctactagcacgaa

SEQ ID NO: 43668 - DNA, 172 bp, Gossypium hirsutum
  Clone ID: LIB3272-030-P1-K1-H5
agagcctaaagctgaagaaaggaggtaaatgggaagaggttcatagcccaaatgttcattaaccaccttttttccgttcaccctttcaaaccccttccgttaaaaattcattgttttcttttagaaaatttaggggtccctttttgcccccttattttccggctcaaggaaa

SEQ ID NO: 43669 - DNA, 349 bp, Gossypium hirsutum
  Clone ID: LIB3272-031-P1-K1-A1
taaaaagttgggaggtatctttccccttaattttttagggaaacaaacaaagggatggatgattacacgtgatgcagggcggattgaaaaacccagtgtgctctaacacatacgtatgaacgggattctatcttggatgcgggctgaacctagaccctgtgtataggaggaacatcaatgtgcctgatggcgctgctatagataggattggggacctaaccaattgctattaagatgccaggggcaggcgtcattgccaaacccgtgattgtgggggacatcgttaactgcactggtgtgggggtccttcaaacacgctcaatgaatatgcactttaacaatgtgccaa

SEQ ID NO: 43670 - DNA, 382 bp, Gossypium hirsutum
  Clone ID: LIB3272-031-P1-K1-A12
aaagcttgagccttcgatcttgaagaagtattattagcatgtgcaattgcgtgcctttgatcccctttccctcctccatcgtcaaaattagaaacccattgctcaaaaatccacaagtttcagatacccatttcccaattatcacgaataatggccgattacatttccttggatgctgtatgagagctaccccatcttcaagttcaagcgtagagggagatggatatgggcagttggagtttgacgatgatgaattggagctcaaacgacgtcgtaccgatgctaccttggagaaaattagtgacaaggagttgaaggggaagatgggcaacaagaatggggataaattggttagcaggaagcaactgatgaagagatcaaa

SEQ ID NO: 43671 - DNA, 403 bp, Gossypium hirsutum
  Clone ID: LIB3272-031-P1-K1-A5
cattagttgaaactggagatcttcttgaccaaattcccaccttcctccttcacccactccccaaatctttatacctccaatacccatttctctatatccctttcaaaagtctctattttttctgtaatctgattgaaattgggtttcatgacttgatacacaccaaacatcgtgcgcccatatgagtaccatcgccttctgatccaaccaacggttttaaagccttgaagagatgttaattaggagaccccaagatggacaatgcgttttcaggctctttcacttgctttcgaagcgaataaaggtccccctaccaccacgcaatccaaattacagaatggttttcatccctccgcggtgtcaaccctgacaaggtcttcgacgatgtggtgttcatcaaaga

SEQ ID NO: 43672 - DNA, 303 bp, Gossypium hirsutum
  Clone ID: LIB3272-031-P1-K1-A9
gtatttcggttgcacctactgcaccatctttttgaccccctgcaaaggagtggttgcatggtccattgactttgtccccagtccataagcacccatctgcatggaaacatttcaaaaactttgatccttggacctgctattcaattcatcaacctgtttacaggcaacaagttactgccggttgtccttctcaatattccactcccagctgggtttccccttcaccatcgcctactgccacgtcaaaccactttcataatatggccattcttcaacctgcaatttcttcgattggttcttccc

SEQ ID NO: 43673 - DNA, 415 bp, Gossypium hirsutum
  unsure (1)..(415): unsure at all n locations
  Clone ID: LIB3272-031-P1-K1-B2
gaccgganattcccgggtacgacgccatcgcgtcccgattcttcacatgcgttaataacatcaatagtgacttaagggatatatgtagaccgacggcgtgagcataggtcggcaggatctggttgttctcatgcgaagagacttatccaggatcccatccatccggcacccgttgtattgacttaggatagaacctcactcaaattggtgcgctcttatatggtgcgtgcgatcagctagatgttcaatttgaccaccctgtctttgtcttagtatagctcacggttgtgtgacctgtagatcggtggtataatagtccataactcgacaccggtataagaatacctgttgacgccggattagtggtcggccgttggtataccttggtcattgcttcgggccttttagggtggca

SEQ ID NO: 43674 - DNA, 428 bp, Gossypium hirsutum
  Clone ID: LIB3272-031-P1-K1-B8
cgacgccatcgcgtctcgtgaagaagcgagaaaacaacagaataatgcactaatcggttataaggtgacgcggcttctcttaggaataggtgtcaagattcaagaaatcatcagctaaaaagactaaccaatcactctcactcactcgttcactcgtgatattcgcacttgtagagaatcttaccaatatgtgtcgctttacatgggtcgttgttcgtgtgaaatcatatatctcccattctatcgcttctgatgtctcaggtgtatgactgggatgcgggtataaaaatccaaaccggcccagggaaagaatactgccgacccttattgtggttgcagcggtatacttggtatcggttggcctttttgtggcatgatctctatccctggttactgcactgttggtatttttagaggacacatcatcc

SEQ ID NO: 43675 - DNA, 426 bp, Gossypium hirsutum
  Clone ID: LIB3272-031-P1-K1-C2
ctaatttccagccgctaacaaatatggagaagcctcctctgagagattataccgccgcgaacgccgtcagtgcacctccgctacttaacacacttacgccttcccgccgtacaagcttaaaccgtgcctttgccgcagtttacacgtgtgccatcgtagccttgttctaccgccatacacaaacactcttcagctccaaaaccctagtttctttctacgtaacccttacgttgttcgtctccgacctcatccttgccttcatctgggctaacgggcaagctttccgtatgcgtgcggtttaccgtaaagaattccccgaaaacctcgaaaaggtggtgaaaacaagtgatttaccggggctggacgtgttcatatgtacggcagacccgtacaaggagcctccaataagtgtggtgaacacggcgt

SEQ ID NO: 43676 - DNA, 358 bp, Gossypium hirsutum
  Clone ID: LIB3272-031-P1-K1-C9
cttgggataaggcctgagtaccttaatatggaacagggtgcaaacataaatggtgggaagaatccctagaagcatcttagtcaggaacaagcgtcacagattgctcgaaaggttatatcacggttactaactggtgttgggtttgaaggtgccacataagctccagtggaagtcttctctcagtttcttagctgtcatatgtctaaacttggtcagaatctaaaagttcttactgataattacagaaaacaattgacagcatttgtactaatcatgtatgtgcttcaaacatctgcatatatcatctttggggctctatcttaacttttgaaggatttttccaggatcttattgctta

SEQ ID NO: 43677 - DNA, 404 bp, Gossypium hirsutum
  Clone ID: LIB3272-031-P1-K1-D4
ctccgacagaacatacaaagcgagctttggagggcattcgcatggaaaccacggacgagctactcgctgtgcaaggtcgcaactagctatgccttgccacagaattaccagccgaaatactgtgtataccacattgtatattggcctgacatcctgtacaaccgcctcaggacgtacaacggccgcatcggccgttacatcctcgctcagatggaggactaaagcacccagtgccacggccacattacctctgtggacgtgctgcggactcaccgcaagcttgctcactccactatgctgatgaacgcgggacaagcctccatggagcagatcattggagcagagtatgtgttgctgaatgtgtggaagacgcacaggacaagcgttgaatctggatacccaga

SEQ ID NO: 43678 - DNA, 332 bp, Gossypium hirsutum
  Clone ID: LIB3272-031-P1-K1-E1
gtaacggatagtaagcattcggcggtggagtccgtgatggagaagatcagcgaggggatccacggccatgattcatcgccttcttcgcattccgattcagatcatgagaaaccagcttcccctagctccgtgagggctaagattgatcggctgtttggtagggagagacctcttcatcacgttctcggtggcggaaagcctgctgatgtgctcttgtggaggaacatgaagacatcgagctgctgttcttggtggagcaactgcagtctgcgtcctttgtgagttgatcgaataccacctacttactctgctctgtcacatttcgatactct

SEQ ID NO: 43679 - DNA, 364 bp, Gossypium hirsutum
  Clone ID: LIB3272-031-P1-K1-E9
aacaactcaatctgaaatttttatgttcaaaataccaaagctttcgatggcgtttctggtcatcaatctcaacatccatctattaaagtatcagtggacgtaacccccaacttcaattaacagtggtggactccgtcgacggaaaaaaaaatgttggtcaacaatggaagagcgggtgaactagaatgaactggtgaagctgccatggaaggaagggttcaatggtgccgtattgggaaaaagcaaaagagctggtgaagccgccaagggttttaatatcattatgcatttaaaaaattcggaataataaaaataattactggttttgtacttggctaacttgagagttcattggtattattta

SEQ ID NO: 43680 - DNA, 322 bp, Gossypium hirsutum
  Clone ID: LIB3272-031-P1-K1-F7
cttcacttcagttgttagcagaagaaaaagaatggcgacaaccgtggatggcggaaaccagtacgatagagccgaagaagtaaaaagattcgatgactcaaaaattggagtaaaagggctagtcgattctggtctcaccactatccctcgcatcttccttcacccacccgaaactttatccgacctcaaacccaaacccaaacccaagtcgggtgccatacccaccatcgacctctcggggccccattcgacggtcgtggagcaagtatcttctggatcttaatcctttgggttcttttaaaatggcaaccatggaattccc

SEQ ID NO: 43681 - DNA, 318 bp, Gossypium hirsutum
  Clone ID: LIB3272-031-P1-K1-F8
ttttagttcaaccactcctaataaccgctcggatttttctcacacgtgttgtatattccacttcttttgacccaaacaattaaacagatacgatgcctcaaaaattaggcgtcaaatggctcgtcgactttggtcccaccactaaaaccaccatcttgcttgacgtaaacgtagcattatccaacatcaatacccatccgaaacccatatcccccggcattctcaacatcaatctctctgacccctattcgacggtggacgagcaagtagctactaactctcaatcctttgagttctttcacattatattccacggaa

SEQ ID NO: 43682 - DNA, 346 bp, Gossypium hirsutum
  Clone ID: LIB3272-031-P1-K1-G3
gaaagcttgtatcagggaagaatctgtgggcaagcttaagggcattttggggtgcgttgaggaagattttttgtccactgacttcgttagggacagcaagtcgagcatatttgatgccaaggctggtattgctctaaacaagaacctttttaaacttggtttcgggtacgacaacaaataggggtacaagttttgtgtgattgatttgatcgttcacatggcattcaccaaaacatgttgaagttttttttttaaggccagcgaataaatgaggtttttgggtgaaaagaatattatgtgtttagaaaaacttccctttctttggaaaaaaaaacacaaagatttt

SEQ ID NO: 43683 - DNA, 101 bp, Gossypium hirsutum
  Clone ID: LIB3272-031-P1-K1-G4
acgaaaccaaatatggcggagaaagcaaccgggccggtcaatgcttccgccgggaggaagaccgctgttgccgtaacacacttcaagagaggccgcggttt

SEQ ID NO: 43684 - DNA, 390 bp, Gossypium hirsutum
  Clone ID: LIB3272-031-P1-K1-G6
catgatttgaacttggagcacagtgcaaacttggaacaaaatgcgaacttggagcacattgcaaacttggagcacatggcaaacttggagcacaatgcaaacttggagcatattgcaaacttacagcagattgcaaacttggagcacaatgcaaacttagagcacattgctaacttggagcacaatgctaacttagagcacagtgtggactcggagcagaacttaaacttggagaagaactggaagagaacttggaggagcagaaattgcagcaggaatcacaacatcaaccaaaacaagaccatgtaaacgaggcagtggttggaggtggtgaaaagaagtggcctggatggactggagagagtgtgttccggatgttatgtcctgcac

SEQ ID NO: 43685 - DNA, 356 bp, Gossypium hirsutum
  Clone ID: LIB3272-031-P1-K1-G8
aatagcctggatccacagctatctgatctgacgcacattcccgaacgagtcaggagtctaacttattttaaactacacccgacccaaccagacaatctccttatccaacttatactgtgggtaacaatataaaaacgcttacttctcttatttgaaactcaccctcaatgcaaaaagacttacatctcaaaactcgggactactacgaacatgctgctatgctcatcagtgcacgttgaacgattatgatgattttcacaaggactttgcacaagttgaacagtattatacgcttgcttctaaaaccttttgattatggcaccaagagaaccaggtcataaaccgtattgtctcta

SEQ ID NO: 43686 - DNA, 244 bp, Gossypium hirsutum
  Clone ID: LIB3272-031-P1-K1-G9
gaaaataaatataaggaaagcagagaggggtaaattggagggagaggtggaatcacatgcgcattagttcactgtcgctctcctgggtcctcgtttagcttagctagttctatttcttgttaatcatcatcatcatatacctttttttttcgccatggctgacgataaggaaatctcagcccctgttgttgatactggtcacatcatctccaccacgattggaggcaaaaatggagagcctaaa

SEQ ID NO: 43687 - DNA, 246 bp, Gossypium hirsutum
  Clone ID: LIB3272-031-P1-K1-H1
gattttcctgaaaaccctaaccggcaagaccataactctcaaggtcgatagcaggtttaccattaacaacctcaatgccaagatccaagacacagaaggaattccaccggactatcaacgtgtcatggtgaccagaaaacagcttgaagatggccatacctaggcttactacaacatccagaagagaatcaacactctatcttgtgaaagaagcgagagggggaaccatcgatccttctttgatgg

SEQ ID NO: 43688 - DNA, 327 bp, Gossypium hirsutum
  Clone ID: LIB3272-031-P1-K1-H6
acgacgcgtgcataagggcactcttaatattgtagatttggatgattatgcggtagatgatgaacattacgaggagaagatgaaaaaagagagtttggctttcttcttcttggccacttatggagacggtgagccaacagataatgcactctgtttctataaatggttcactgagggaaaagagaggggagtatggcttcagaacatgaagtatgggatctttggccttggtatcaaacaggatgaacatttcaacagggtggcataggtcgtcgatgaactccttacactacagtgagcaaaaggcataattcctttgagttcaag

SEQ ID NO: 43689 - DNA, 272 bp, Gossypium hirsutum
  Clone ID: LIB3272-031-P1-K1-H8
gccaaagcaacatacccactctgttcaacagcaaaaaccgcaacagtgcgaggtacctcctgttgtatcgtgcaaccttctatccaaaaccaactcacgactgcaatggtaactgcccgacacttcacatgtatctattaagaacattctctataccttcggagctagaaatgctcctaccaatcacaaaacattaaagacgaggtcatatcattaagcattggctgaacctaatagtgaggatgagccctttttaagcacgatccacgacc

SEQ ID NO: 43690 - DNA, 242 bp, Gossypium hirsutum
  Clone ID: LIB3272-032-P1-K1-A10
gaacatctttcctttttttctctctatattttctcatctccttcaacagcgcggggggtctaaactcttataggcaatttcaaaaaagctccaaaacgatggccaatgctgcatcgggaatggctgtgcatgatgattgcaagttgaagttcttggaacttagttatcttttatcattaacggtctgtccacccaagaaacggctcaaccggaagtaggctacagcggtcaaaatagcaccg

SEQ ID NO: 43691 - DNA, 231 bp, Gossypium hirsutum
  Clone ID: LIB3272-032-P1-K1-A2
aagataccgaaaaacatttgggggagagacagagagagaggaaggaaagacgtgcaccgacagccttaaatcagctagaatatccacattatcaaagatgcagtcaatgttaaccaactctacttttttcaactcataacaacataaacaacagggggctgttcttatggtcgacaacaacaacaactttttcatggcctcccaaaccagtggatgggttccatccaatac

SEQ ID NO: 43692 - DNA, 399 bp, Gossypium hirsutum
  Clone ID: LIB3272-032-P1-K1-B1
tttcagaaaatcaactaaccaaatcatgtgcccccaagatagtgcgcattctatcaaaccataattcaaaatatctacgctgcgcccaccgtttggttttctgatttcgcagagaaaatacttgtttggcttggaggaaactaagaaggaacagagaacgcaagcctattcacgatttcagctcagaagacatgttttttgaagtggcattgccaagggatgtgaagatacatgctaccaacttggataaaccagtttctcggaggttcatactggcatgcgtactcgacaacctatttaaggagaaagccagcgaggatcatggttactttgtagccgtaactctggtgaaaagcatatgtcaaggcaatgtaatggatgagtcggggaatacggttt

SEQ ID NO: 43693 - DNA, 395 bp, Gossypium hirsutum
  Clone ID: LIB3272-032-P1-K1-B3
cgcccgcggtccgcggtccggggttccggccacgcctcacgcgtgccccatctccctcatcctattcacaaactttaaaatgtttggacagctcggttgtttctcttacatacaaaaagcgccattagaagatgggtacaacacaggttcaagttatcagacatgtcgcacacagtctgatcttacaatcttatttacatgaacaaatgcactctccacgataaactacaccgcctcccgtcatcatcaaaacaggaacaaccggattttaatcccagaaaatcctatcattgtactggagagctcgatccaattcatgtctccccagctcaaccactgagatatttcacccagaaaccatatcccagattgaattgtcgggcaccgccgccaaa

SEQ ID NO: 43694 - DNA, 306 bp, Gossypium hirsutum
  Clone ID: LIB3272-032-P1-K1-B5
tcgatctaacataaatattctttaaaaatcatgttggctattttatcacaaggggtttggtaattcaccagaggagctgttatatccatcttttcataaatctactaagaagcccaaacagtcttaagaaaccctaaatgttttcctatctcatcaccctcacaacactttctacatgaactttagcaacaccaataattattcttatattcgtcatgaacatccacctttatttcatcagaaaaaaggatggacttgatatacaacatatattctcattttttttctggctcttccaacaaattt

SEQ ID NO: 43695 - DNA, 395 bp, Gossypium hirsutum
  Clone ID: LIB3272-032-P1-K1-B6
gcgatctggcagagactactcttctaatcacaatcttcgacggagtaaatgagcgaattttagagagagaaagttaataatcttctcctttgctgcttaaaagttcacagctttcccttcttgaggctcaagttaaggtctttgcaatgcaaactttgctgttggctatggcagaatgcatgtgctgatattgcagtagctgtgataatcatggcatattgccttggttttttttcctggaaaattttatctaaatggagagaaatctaggaaaaggcttaatggatcaacagaagaaccatgaacaaattcgatacaataatatggaagctggaaatgagactcttgagtctgcaaaccaaagatttttccatgatccatctagtaatattaat

SEQ ID NO: 43696 - DNA, 362 bp, Gossypium hirsutum
  Clone ID: LIB3272-032-P1-K1-B7
gtctaagatatcactgcaaggtaaaaacaaaaagaaccagacatggcttcaaacactgctgcattggctgctctcattattacctcgaacttggtgcgcttcactgcgggttgctctacctacgtgccgtgcgcaccacctccgaagggccacaagcctacccacgagagcccaccctgggcgcctaatcagacagccacttggcccaatgatacactgtacctaggggattgtgctggttcccagcgctcggtgctcgttgttgctggaccggcgaggaccaaatgctgctcactcatttcacgtatgactgatctcgagggtgctgactgccttagcactgctatgatagctaatgcgtt

SEQ ID NO: 43697 - DNA, 259 bp, Gossypium hirsutum
  Clone ID: LIB3272-032-P1-K1-B8
accgttccttattttttcgtcgccccctctttatttattttctattttttattaattttttatatcattttaccttatggtgtggggttattacaacctttcttattttacaaccaatctatcattttcttaatgctaagatcaccatttattttcttaattttgggttatttatttctattttttgctttgtgtaatcgtcgatttcatcaactcttttagctcttccgtcaaacccaatatttccgttggcgttttt

SEQ ID NO: 43698 - DNA, 233 bp, Gossypium hirsutum
  Clone ID: LIB3272-032-P1-K1-B9
gaggctgctggcgcacctaaaggcttgctgcggcgctccttaaggctagggttcttcctttttctttgggccagggttgttttggggtttggtttaatgatttggggtttaggttagctctgggcctgtatttgttggactgttttttaattttgtttggacctgggtcaattgggccctattacagctttatttaatcttgttcttaaatcacaataaataatattgatttt

SEQ ID NO: 43699 - DNA, 388 bp, Gossypium hirsutum
  Clone ID: LIB3272-032-P1-K1-C12
gattgttcatggagaatgtttagctgatgatacttttggcacgagccaacagcaattcaagcggctacttttgttctctggaaatgattatttgggcttgagttcacatccagcagttcgaagagctgcagcagaggcagctcgagattacggaatgggccctaggggctctccgttaatctgcggatacacttaccaccatagattactggagtcaagcttggcaagcttaaagaagaaggaggactgtcttctttgtcctacagggttttcagccaatatggcattgatggtagcacttggaaaccttgcatccctccttgcagcaggcaacgtgcctgtgaaggatgaaaagattgccattttctctgatgaactaaaccatgca

SEQ ID NO: 43700 - DNA, 190 bp, Gossypium hirsutum
  Clone ID: LIB3272-032-P1-K1-C8
ccaagattgaagttatagactcactcttctccaaactttttattctcatactagggtgaggtctaagtctaccatgatcctccaccacctctattatttaactacttagtactgttactcattaaatcatatttatatcttcatgtaatatcacacgtttattttccactctttctatttttatacataa

SEQ ID NO: 43701 - DNA, 384 bp, Gossypium hirsutum
  Clone ID: LIB3272-032-P1-K1-D4
atcatttcagagaactgaacgctcccccctctttcccgatccttccgaactgcggaaagccactgatcttcaccacttggttttcctcagattggcggcagagttacttctaagatgtctaaagctcaagatccattctacatcgtcaaagaagagattcaagaatctattgataagttgcaatcaagttttcatcaatgggaaagaattctccccgacactggagaacaagtacatctcacgaaagagctacttgctaattgtgagagcatcgaatggcaggtagatgagttgaacaaaacaatagatgtggcagcaagagatccttcttggtatggcattgataatagagaacttgaaaagccgagaagatggaccatcact

SEQ ID NO: 43702 - DNA, 401 bp, Gossypium hirsutum
  Clone ID: LIB3272-032-P1-K1-E11
aagggcagttatctcatgcgttgctgtcctactgagtcaaacgaaaaataatcgtgataggaaaatgcctcctaaagccaaatagacgccagcctagatgacacctgcggtggagaagaaagccgtatctgataaagcccgggctgagaagaagcctactgctgtgaaaaagcttcccagggaaggcggggcgtctgtcgaagacaagaagttgatgagagccttgacgagcgtccagacctacaagatctacatattcatggtcctggagcaagttcaccctgacatcgcgatctctagcaaagctatgggtgtcatgaacagatcaatcaatgatatcttcgagaagcttgctcaagaagcctctaggctggcgaggtacatcaagaaacccaccatca

SEQ ID NO: 43703 - DNA, 399 bp, Gossypium hirsutum
  Clone ID: LIB3272-032-P1-K1-E12
cgcaaaattacaaaattacagaaaattttagggataaaaccgagtgaaagaacgaagcaagaaaagtggtatcgggtgggagcaggatggggaggcgacagcaaccagaaactgtgggtgtcttagataggatcaataatttgcctgactctattctttctcacattttgtccttccttcccaataaagaagcagttcgaacttctgttctttcaaccaggtggaagtatctctttgcttcctctatatctatccttgattttgaacattgcttaaaaaatttgtgtgaggaagatgttaacaacttcatgaattttgatgatacattactttttaatcccagagagcgggtccatttagaatccttctgggtgaatgactattttgtggatgatgagg

SEQ ID NO: 43704 - DNA, 401 bp, Gossypium hirsutum
  Clone ID: LIB3272-032-P1-K1-E6
gtcggatgcaaccccaacatcagcatcagcaccagcaacaaccccctgctaaggatgactgccaaggatcgggccagtaaagctttaaactttgagagcaagatgaaaatgagtaggattcctgagacaggatggctttgttttttcttgtaatggttcagtattgtataatggggaaaaccaaaaaaaaaataacaagtgtgagagaaatggatacttttcctctcagaaatctatggggactagattgagtggcttctttctttctgcactgcttcacccaagtttccattacagaggttgtttttcttgattcatgccttctgttgaacttgcatcctccgaattcttcagagaagtactaattcttttgtgctaagctattttactgtggagtgtgc

SEQ ID NO: 43705 - DNA, 399 bp, Gossypium hirsutum
  Clone ID: LIB3272-032-P1-K1-G10
tttttaacgactctctctctctctctctcttcctctattacttctaatataattttatgttcataatttaggaaccataattatccatccaaaatttcattcatttcccacttcaaataaccttccttttctatgtttggctgatcccaacgcctctttggaagcttcattcatttcatctttctccagagcaccttgctgtggtatattttctgggtttcttgttagatttcatgtatttatgagttgggattttctctctgattatagcttttaaagtttcattttttatttcttagttgaaaattgcttttttttttcagaaaataacctttagaaaggattcattgcagttaaaccagaaacatatatttttcttttcagtggttagaaatgaac

SEQ ID NO: 43706 - DNA, 255 bp, Gossypium hirsutum
  Clone ID: LIB3272-032-P1-K1-G3
tcggatcgttcccgcgtccgctcaaggattgggatcagcgttcgtcctccaaaacccagaaaaaagaaggtttcggggtcgcggtcaaatcttgacaagtactcattcaaattcatattaagggagcttgggatgctctgtggtgaatacggtcagcgctttgaagtaggagccaaaagagaggacaaaaagcccagtcatgcaggcagaggtgccttataggatgaatgtgcagttgtccaacccatgaaggtt

SEQ ID NO: 43707 - DNA, 367 bp, Gossypium hirsutum
  Clone ID: LIB3272-032-P1-K1-G7
gttgtgcaattcacactcaacaccaggtcaacgtgtcatttggaagcaaaaaccctcttcagaacgtgaaaaacctaataaaatcatttgggattccttcaaaatcatgttctcctcatgtatctctgcaacagggaaattgggtcaagctcatatgtggtgctagcttcgaggatgtagttgatatcaggaatctctcccttgtttacactctagctggagttgattgcattgattgtgctgctgatccatctgtaatcaacgctgtaaatgagggaattgaaacagctagggagattgtatctattagaagaccttgggtgatgataagtgttaatgatgatgaggatcttcattttcgtaaagc

SEQ ID NO: 43708 - DNA, 271 bp, Gossypium hirsutum
  Clone ID: LIB3272-032-P1-K1-G9
gaggttgaggactgcttgtgagagagcaaagaggacactaggatctaatggtcaaactaccagcttatattgtaacatattaccatacaatggaatttaaaacgggattctctgggacgaggatggaaaagctgaacatcaatgtgctattgatgttgacattggcgccaatgcttcagccgaagattcctatgatggttaagaggatggtgaccaatctgtgaagggtgggggcattgattacacttccaagagtgaagaggaaccccct

SEQ ID NO: 43709 - DNA, 280 bp, Gossypium hirsutum
  Clone ID: LIB3272-032-P1-K1-H10
atccactcacgccccaagctaatcctcgcaacaggtggcgaatgatcgctggttgcacgaattaagatgctcacaattggccggcttgggcaaaacctttactgaatgatcagtccactgaacctaaaaccatcaccgtgaccttgacaggaaagattgcttcatctaccgcctggattggagctatggctctctccaaagtttgggcgcagacgatgaccatgttcatctcgatgttcagttatatagatccccgtaccctcatgtgattggtggatgt

SEQ ID NO: 43710 - DNA, 331 bp, Gossypium hirsutum
  unsure (1)..(331): unsure at all n locations
  Clone ID: LIB3272-032-P1-K1-H3
caattccgaattccccgtcgacccactcttncnaataaaaaaataaatcatctattaccttttttaaatataatcacataccaagtttggtgttaaatatttaatttttctccccccatcctttaaacccaaattataataaatcaaagccttctttaatcaaaagactcattaacttcttttgtaacccctaatcaccacttatcttcaatcatttataaacaagcattgattcaaagtcctaaaatgcaattacatgttttcgctgtcttacaagacatactgtctgcttatactctgatatctaactcaatgctttcttttcaccact

SEQ ID NO: 43711 - DNA, 386 bp, Gossypium hirsutum
  unsure (1)..(386): unsure at all n locations
  Clone ID: LIB3272-032-P1-K1-H4
agtcggtttccgtaactcacacaatctctgcaacgaatcaaaagaatccttttagaattacaccaataattcattcaagaagattgtttcacttgcaagctgctgctcgttttcgctttgggttcatctcttcctacaagaaatctgattttcaagattttcagggttttgcaaaaccttcacggctttttccgtccacggaaccgaaaacctttaccggagccttgaacgaaaatatctttccatcaaccggcttggatggagctcggactttgttcaaagttaggttgcaaacgagtaacatgtacggctcgagtttgagtaatataaatgccggaatactctngtgtttgattgatgagaaaggagactcaatattaaagaga

SEQ ID NO: 43712 - DNA, 355 bp, Gossypium hirsutum
  Clone ID: LIB3272-033-P1-K1-C12
gtggttttggtttttcaattgaagttgagaaatccttgcctgatcttgttttcggtgatgaaaggagagtttttcaagtgatacttcatatggtcgggagcctattggatggcaatagtggaggtggaactgttgtactccgggtgttctccgagaatggtagtcaggaatggaatgatcaaagacgggcagcctggaagcacagctccttggatggagatgtacatatcaggttcgaaattaggatcgagaatagcaattctcagccagagagcagtggctcaatgtcggagttacaggtcagtggcagaaaatataacagcaatagcgccgaggaacgcttgagcttcaacat

SEQ ID NO: 43713 - DNA, 388 bp, Gossypium hirsutum
  Clone ID: LIB3272-033-P1-K1-C7
cccacgcgtccgttttttttttttttgttcttcactttctctctgaaatattcattttccttcaactttctcgctttccaaacaagggggaaaaatgcgaagagacgatttgtgcattacgattccgaatttttttcgatgtccgatatcgttggacgtcatgaaatcaccagtaagcttgtgcactggcgtaacatatgacagaaccagcatccagcggtggctagatagcggcaacaacacttgtccggccacgatgcaggttcttcaaagcaaagaattcgttcccaaccgcaatttacaacgactcattcagatctggtccgactcagtcgctcgccgtcaacacgacgccgaattggcggcaaactcagttgtccttccttct

SEQ ID NO: 43714 - DNA, 365 bp, Gossypium hirsutum
  Clone ID: LIB3272-033-P1-K1-D12
gacctcccctaccccaaaaaaaagtctacctattttattgctctgactaattccaggcaatttttttgcatcctttccttaattgattcttgggtatattatttgtaccccttttttttaaaaaaaagcgggaataaagaaaaaaaaaggctacttatttatttgctgacgtttgtttccggtttaattaaaaaacatatcttaccttccaagctccatgattgcaaagaacagtgccgagatacaacaacattcacagaaaaataagtgattgtcggattaaaggtaaatcgtaaacgtcatcggtttggtgtttgttgttatgcctggcgcatcacggcagggcgtggaacatgtaggcttgc

SEQ ID NO: 43715 - DNA, 319 bp, Gossypium hirsutum
  Clone ID: LIB3272-033-P1-K1-D9
gcatgccattgattgatattctgtccattttgctcttcttgttcctctctctctctctctctctctctctctctatttgtctttcccgcgtcgttcaacagtgtactgaaaaaggtgaaagagctaacaaaaagaaaattccattctcgatttaaagcattttgctttttttcttcttttcagtcaacacacttaattgcctccccacctctccttttttgtttgcttttaattggcgtgtgttaaaaaagttgattgaagaaattctcttgtagactcatagctttgctgtcgttgtcattgggaataattggcaaat

SEQ ID NO: 43716 - DNA, 373 bp, Gossypium hirsutum
  Clone ID: LIB3272-033-P1-K1-E11
aagaaagaaaaccccaagggttgggaaccgtgggtgatcttacagtgaatatggagttagaacaaaaacatgggtgtcccagtcacctactgcgagcttttttttgcaagactgtttgtccacacgctttctcttcttgctgaccttcacgaattgatttccactctcttactgtatttgggtctgcccggttatctcgaacctgacatggcttgcagcgaatgcgcccgtgaaacccaccacgcttacgcctgctccgtatctggtctggtcatccgggaactactacccggcgtcaagtgcttcgacctcgctgacccgaccgagagctgcgccgtgtgcttgtacgacttaaaagggcctgatgagatca

SEQ ID NO: 43717 - DNA, 373 bp, Gossypium hirsutum
  Clone ID: LIB3272-033-P1-K1-E8
cttaaaaaaacataagggtcatccccaaatttcttagagagggacttagggctttgctaagttccgtcggccacccttcgtactagcgaaggtaaccaccattggtggtggccggaatgttgcccgaagcccgatataaccctcatttctttcatataaaatagatttagggccttcaaaatccctaaaccaattgacttccgacctttgacttcttccgttgcaaccttaaccgaacacctaaggatccgttggcttttagaccagagaagcgatagccgaagaatatcaacaccaaaaaaaggtctgctaggagttaacgggggcaggtttccgttttggtccaaggagcgagtggtgcgctcgaagcacg

SEQ ID NO: 43718 - DNA, 333 bp, Gossypium hirsutum
  Clone ID: LIB3272-033-P1-K1-F1
cgtccgatcggcagcaaactatttgttggaaaatggtggagattttgaggactgaaggtggaatcttaaactcgggttgcttcataatggagatcgaaccacatggatctgattgaatataatttggcatgtatgaatgggcactatcagggattaagcattgataaactaatgtgttagatcaaaattgaaactacatatataggcttatcaaatattcattttatttcgtcaaaacatgttctgcagagtaacctattgttgaacctgatgatgatcatacagggttcttggagggatcaacataattatctgaatgaacgtcagggagcg

SEQ ID NO: 43719 - DNA, 372 bp, Gossypium hirsutum
  Clone ID: LIB3272-033-P1-K1-G8
ctatttttggttttacgtgatcttgttaatggtataaagaagaacaagtttacagcctctgaaagcagtgagatcatttccttcctacaacaggcttttgttcggctagaagcatggttccagtggttcaatactacccagttagggaaggatgttggtagctattactggcatgggagagacaatttgacaattcgtgaactaaacccaaagacactttcctctggactggatgattatcctcgtgcatcacacccaactgaagatgagcgtcacttggatcttagatgttggatgcttcttgcagcagattgcatgaattccgttgcagaattgatttggaaggaaaacaaacctggaaaggactatgct

SEQ ID NO: 43720 - DNA, 372 bp, Gossypium hirsutum
  Clone ID: LIB3272-033-P1-K1-H7
tttctttctctttcctttttctctcctctctctctctctcattttctttctttctctgtgtttgatgctaccacaaaaaggttctttgtttttcttcaaacatttttgggtcgttgatcttctttgttccctcttcaacacagattaattagttcccttttgttgttgttggtctttctctctacaatcgattcccagttttaaaattgcatctaattctcttgttatctcaagaaacccttttaattgaattgttaaaacaaagcgaaaagatcgacccagttctggtttttgatcgtcggtttagtttatttgagttcaatttgcagctatggcgaatccttggtgggttaatcaagtgagtttacaagg

SEQ ID NO: 43721 - DNA, 383 bp, Gossypium hirsutum
  Clone ID: LIB3272-033-P1-K1-H8
gaagatgaaaaataaacgcggtacagacgctgccattatatatagctagagtgctacttggaacggatgggaatggagcgacccaacagactcgggactcctgggaagaatggttcattgaggtcacagaaatcgactgatagaaggagctggcgttgccatgatcaaactcgcaatctgacgaggtatgactcattctgatgcccccgacatgttcagacccaaaactaacgaaattctagtgggaaaggcattgactcattcgacacgagaggaggctcagctgtctacaaactttgacggtgacagcatgtgttcatgcggttcggccataaatcgacctatgaaacagacgttcttcactagaggcttgccgaaaacgg

SEQ ID NO: 43722 - DNA, 161 bp, Gossypium hirsutum
  Clone ID: LIB3272-034-P1-K1-A2
gcggtagccgacggctgcgtatatctcttcatctatctgaacgaaggagactttagctcttagctttgagagagaccatgtatgtttaccaggatctgatctccggtgacgagctgcgatttgactcatttccgtacaaggatatcgagaatgggatgctg

SEQ ID NO: 43723 - DNA, 403 bp, Gossypium hirsutum
  Clone ID: LIB3272-034-P1-K1-A5
ttttcaaccaagtccaagagaaaacgaggaaagatttaagtcattattcgtataaacatactacaaaatcaagctttgttcgtgtattattcgtggtcatttttgttatgctgtgcttatagaataatctgggattttgtacttcaacaaaagaagcaggttctcatggctaatagtgcggcagcctgtgccgaaagggcaactcatgatatgctgattggtccagattgggctataaacattgagctatgtgatattataaacacggatccacggcaggctaaggatgctttgaaagtcctcaagaagcaactgggcaataaaaacccaaaagtacagctactagctcttaatgtattggattctctcagtaaaaattgcggggagcatgtttttcagcaga

SEQ ID NO: 43724 - DNA, 293 bp, Gossypium hirsutum
  Clone ID: LIB3272-034-P1-K1-A7
ttatctctctaaacgcgaaaaatctttagcttttcgcttcgagagagaccatatttggttaccaggaactcatttccgtggcgaactttttttttacttatttccctaccaagaaattcaaaattggattctttgggaaagtgaaggaaaatgggttgtgcaaagagctgtccatgtttacattggtgccaatccttcaacccaaagtgcttattaggattaaagtgtttataaccaaactgtgaaagttgttgacattgttgacactttcaagctttaggagcaaccccctt

SEQ ID NO: 43725 - DNA, 390 bp, Gossypium hirsutum
  Clone ID: LIB3272-034-P1-K1-C3
agaaaattcatcgatcaatatttctcccccaattcccaaagaatttgattatcgccattcattgctcaccttcggtgggtaaacttccccaaatccttgcgccgccgccggctgccatccaaatctcatcatcaattttcgatcgatcggtagagcaattagggtttccaagaaacgggaatggacgacagctgtgcggtttgtgctgacaatttggaatgggtttcctatggcgcctgtggtcatcgggacgtctgctccacgtgcgtctctcgtctccggttcatctgcaacgatcgacgctgctgcatctgtaaaactgaatccaacgtcatcttcgtcactaaggctttaggggattatacgaggatgataaatgacttctctgta

SEQ ID NO: 43726 - DNA, 391 bp, Gossypium hirsutum
  Clone ID: LIB3272-034-P1-K1-E10
atcaaattcaaaaactaatgtaggttttttttttcttttttgaagttttttagccaagtgaagtgaagagattcttttatcctttgcttcgaagaacttcaaaagagatccccgtttggtctctttcagctgcttttttgtgtttttcacttcagtaacagttggagactcttcgactttgcctcaacccgggggggggggggatcttcaatatggagcagtatgaaattctagagcagattgggaaaggatcttttggctctgccctgcttgtgagacataaacatgaaaagaagaagtatgtcctaaaaaagattcgccttgctcggcagactgatagggctcgtagatctgcccatcaagagatggagcttatttctaaggtgaagaa

SEQ ID NO: 43727 - DNA, 394 bp, Gossypium hirsutum
  Clone ID: LIB3272-034-P1-K1-E5
cttccatccatcaacagtagtctgaattcacttactctctagaaacatgcttcccttcatgagaattccaagtgttaactttcttcaaaatcacctcccagttcttcttcaacaatccggctccttatttcccttaagtgctccgtccacctccgctcctcatccaccacggcctcagcccaggaggaaccctattcatcagataaatagtttctccctttttgagtccttcagtcgctataaagtgagcaactttgttagaatccctgtagataaaacgaaaaacacagtatctgaaacttaaactccgatgctttgagtctttgataagtgctgcgatttcagatctgtcctttttctcttcttgcaatttgcgaatcaccatccaagagtc

SEQ ID NO: 43728 - DNA, 345 bp, Gossypium hirsutum
  Clone ID: LIB3272-034-P1-K1-F11
atacattcgtgccttggatctaagttcgagcttgctcacggaattaccagactctgttggggagttgaaactattacgctacttggaattttttaggcagaaataaaaaggttccaactaatattaagctccggattgcaaacactaactttaggtgcctttgcttttgaatgccaaggccttgtaaaaggtaaccgattatttgactaatgacatgtttggtcagtgtagggctgcaccaagatgggaacttaccaggctacagaattgcatcatttgagtactcacagacaccggacgtggattggaaactgaagacatggcggatcttaaggaaagctgata

SEQ ID NO: 43729 - DNA, 136 bp, Gossypium hirsutum
  unsure (1)..(136): unsure at all n locations
  Clone ID: LIB3272-034-P1-K1-G12
ctcacgcaatgttatttctgcccactgttctgaatgtcgagttganaaanggtggcacatctggtttaaagataacgcaggtcttctaagatgagctcaacgagaacagaattttcttttggaacaaaaggtcaaa

SEQ ID NO: 43730 - DNA, 393 bp, Gossypium hirsutum
  Clone ID: LIB3272-034-P1-K1-G3
gaaaatgattcttgagaatacaatgacagcgttttttttttattttatatatattaatctttcggttcctttcacatgtaatgacacaagggaatctttatagttatcttctcatgctatagttgccccataaaaaaaggcttagcctcgttcatgtcataaaaatccttcacttggatctaaaaaaaggcttagcctcgttcatgtcataaaaatccttcacttggatctatatatatgtttctttaattcttttctcttgaaagtggtcatggaagatgatgcatacgaagaggagcctttgaatctcagcttgacaattatggcggatcccagtggggaaaagattaacagaaagaggaagagaagggttccacttccatcatcatatga

SEQ ID NO: 43731 - DNA, 393 bp, Gossypium hirsutum
  Clone ID: LIB3272-034-P1-K1-H10
gaaggcacttattcttagttggaggggcggtatcgctttcgttcacagaaaagtggtcccctccttccttcactgttgcagaaccactctattaatccccgatcaacttaaaacgcttggtttctgttatccaattccttcaactcagtgactcacctatataataataactgcgtcccttcttgaggctctgttcgttgatgtggtagcgagaaaaatggatcgggcaacagtcggaccggctatggatatgccgatcatgcacgacagtgaccgttacgatttcgttagagatattgggtcgggtaattttggagtagcccggcttatgagagataaggttaccaaggagcttgttgctgtcaagtatatcgagagaggcgataagataga

SEQ ID NO: 43732 - DNA, 390 bp, Gossypium hirsutum
  Clone ID: LIB3272-034-P1-K1-H3
gggcagccctttcccatgaaaactctcccctctttcatttttcttgtttgttcttgaaatttctcaaaaactcaatacccaaactttgagattttgctaaaatcacttgagaaactacctcttaagcttatttccactttcgatctctttattttcagcaagggtttggttgtttgttaagagagaaagttgaagctagagagagaaatatccattaagaacatgttgaaaggattcacatcctgttgattcgaattcgtagcgagagaaggtaatgctgctgcgcatgcgatggcatttgaaggtatgaaacactcagaagattctttttgggttgaggatgcttcgcttaaggttttggaactagccaatctggatcgtcgttttcat

SEQ ID NO: 43733 - DNA, 190 bp, Gossypium hirsutum
  Clone ID: LIB3272-035-P1-K1-A4
ggaaatgggcaaaccatacgttttggtaatcccttatccaacacatggccattagcataagggtggagaatcaagcgcaaggaagaatatggctgtgacctttgcatacagatgctacaaggtggtccattcactgatgggtcctcttggcaacatctgctatgatttattacgtttggttgctagaaac

SEQ ID NO: 43734 - DNA, 433 bp, Gossypium hirsutum
  Clone ID: LIB3272-035-P1-K1-A9
aaaaaagattcgatgggtgcgtctttatccaacttaacggaaggaagcaatgggacggcgatgggaccgggattaggggacataccggagagctgtgtggcctgcgttttcacttacttgacgcctccggagatttgcaacctggcgaggttgaatcgagcgtttagaggggctgcgtcttcggattctgtttgggaaatgaaattacccagtaattatcaagatctgctggatttagtgccacccgaaaggtaccagaatttgtccaaaaaagatatttttgcccttctctctcgcccggtaccttttgatgatggaaataaggaagtatggctggacagagtgaccgggagggtatgcatggcaatatctgccaaagggatggcaataactggaattgatgatcggagatattggaattgtgtttctacag

SEQ ID NO: 43735 - DNA, 337 bp, Gossypium hirsutum
  Clone ID: LIB3272-035-P1-K1-B10
cagtcgtggaaaccccaccgttgaagttgatgtttctctctctgatggcaccgtcgcaagagcggctgttcctagtggtgcttccactggtatatatgaagctctggaattgagggatggaggatctgactatcttggaaagggcgtgcttaaggctgtggagaatgttaacacaattattggacccgctttggttggcaaggacccaacagagcaggccaaaattgataatttcatggtacaacagcttgatggaaaagttaatgaatggggttggtgcaaacaaaagctggaagcaaatgctatattggctgtttaacttgctgtctgtaaagca

SEQ ID NO: 43736 - DNA, 364 bp, Gossypium hirsutum
  Clone ID: LIB3272-035-P1-K1-B11
aaattattaatgctcattcgttggtaagggacctgaagggtaacctcgggttcttgcctttttcttcttgggttatggtcaaggtggtattttatgccggctacttgaatttgtgggctcctgactttacctttcagcatatgcaataatgcttgaacaggataaacttcccaatggtttggctctcctttaatgtatctctctggggtcattgctatctgggatggcagtttcagaaattccatgggggacaaaactttttgtagaagaagagccttcctgggtttcttataagggagattgcgcaattggattatatcactcccgtgcacacacaacacagtagagtggggacattcgttaa

SEQ ID NO: 43737 - DNA, 206 bp, Gossypium hirsutum
  unsure (1)..(206): unsure at all n locations
  Clone ID: LIB3272-035-P1-K1-B5
gtcaaaggttatgtcaaaagtcatgagtccacaaatcacggaaatggcgagcaagttccccaatgggcactattgattttgggggcattttccntattaccccacccctttgtatttgctttaaacccaccctggactaactaccttatcaaaacacctgtttaatcaaagggatcatgatccgatttggcctttatattaccccc

SEQ ID NO: 43738 - DNA, 158 bp, Gossypium hirsutum
  Clone ID: LIB3272-035-P1-K1-B8
tgtggattttgttttgactttaacgttaatggattatgatatattttagcccctagctgcttaattggagatgcatgtttagaaccacagtggagcttgtgatgtggggggattaacaaggtagcggccttgttttgatgtgaaagctctggggaaac

SEQ ID NO: 43739 - DNA, 436 bp, Gossypium hirsutum
  unsure (1)..(436): unsure at all n locations
  Clone ID: LIB3272-035-P1-K1-C1
aaaaaatcagaaaaacactccctttttccccatttataaatctctgttagggtttggaaacccctccccttttgcgccttcagcccgtcgatcgataggaagaaagtctctcctctcctccttttgggtctgatttcagcaatagagagagtctccagcgacacaatcacaaggattccgggttcgtcttgcaggtgtcagacgagtggaggccggcgatggcgtgcggggaaggctctgcgcgaagtgaccagtggttggcctagtgtgcggctgctggaggcttgagggctagggtttgctgctgaaaaattttaagcaagtgggctattaaggtttaggttattgagtttattttgggttttaaattntgggctggtgtgggttttgtaaatggacatttattttggactattttatttttatttgggtttta

SEQ ID NO: 43740 - DNA, 385 bp, Gossypium hirsutum
  Clone ID: LIB3272-035-P1-K1-C11
gtttctccattaaagaagtttagaaaaagatgccaaggccaggtcctaaaccttacgggtgtgttaaaagaactgggcttacctaaccacttcaactcataagaggttccatggttcaacaaattttaaggctagcttttcaaacccatagctcagctactaaaaagaacagggattggcaagataaaatacttattgccattgttaaggccaaggagtcattcaattccacagccatgcttgacaagctcaaggctaaccctgagccttttttcaccattgatattgcctcgtgggaatcggataccaccaaatactactgccctgaaacaggggagcttttgcccccttttttttaaaatacacttaatctggggcgctcccc

SEQ ID NO: 43741 - DNA, 336 bp, Gossypium hirsutum
  Clone ID: LIB3272-035-P1-K1-D2
aagctcttctcccatcggccgctcagagaagacagagaggtctctacaaccaccggaatgggtcgtgtcattcgagctcaactaagggtgccggtcggtcttaaggcccataccaaccaccggagggtcccgccgttccgcagcctcacttcgtgacggaacggttacctaaaggtgtcgcaccgacgtattcacgaccctggccgggcgctccttagcccgctcgttttcccacccttcgttcaagaaacaaggaattgttcgtcgccccagggtgtgtcccggtcagtcgtgtattgtggtagaaagctacccttatgttgaaatgtgtttcct

SEQ ID NO: 43742 - DNA, 463 bp, Gossypium hirsutum
  unsure (1)..(463): unsure at all n locations
  Clone ID: LIB3272-035-P1-K1-D3
gcgacgcgcacgcgnntccgcgccgtcacaataatgggtcgtcaaccgganngtctctcanntcctccaactgnnncatgaaatctctgcgcgtgtgagaattcggtgaactttcatagcctcgaaatnnctgggatccttnnctcccnnctatctacccatagaccctnnccgtctcatcnnngtctcttaccccnnttccctcncnntccaccaananntctcccactttcccttcctcttcctcttcttccctttccccaaacacccactttannacctcatatgcccggtgtnncccttacccactgccnnnctccctnagtagccanncctccatctcttcttcgacccacctccanntccccatgccctcatgcccgccgcaannagaagtgaaagggactacccggaaccctgccaagnnntccatcgaaggggtgtttacccgaaaagggggtca

SEQ ID NO: 43743 - DNA, 401 bp, Gossypium hirsutum
  Clone ID: LIB3272-035-P1-K1-D8
gactgtgttgatcgaagttctattctggttaggagagcttatcagctcaactgtcggttgaactagccttaaatatggatcgcgcttaaccgctcgacctatactccgggttgtcatgcaagggccagcccccgataagcatgagggcgcgaaattcggatgacaacccgattggcgagcacagtctgcgccacagccggtgctcatattaggggaagctggggaacaataaaaccattctcaattggcctcataggggggaggaacattgtgacaggacgtgcccatgatggagcctcaattaacacacctgtttcatttgtaccagacttggttagctggacgtgggataacgacttgatctactgagtcggaccccttatcggtggtggtctcggtga

SEQ ID NO: 43744 - DNA, 284 bp, Gossypium hirsutum
  Clone ID: LIB3272-035-P1-K1-E7
cggacgcgtgggtttttttttttttttttttttggggtcaacatgaatgagtgtcggcatacgaaattattgtaaaaaaaaacccataaaaagtcgaggaaggggtggccccagataaaaccatcctctctataattttctggaaccaaaaaatacatttgtttatgccttttttcatgcgccacgcgctcaactttgaaatctccagggcttacttcattttggaaaacacacccgggggctctgatttttaaagcgccaggggggaatacactttcgctgac

SEQ ID NO: 43745 - DNA, 421 bp, Gossypium hirsutum
  Clone ID: LIB3272-035-P1-K1-E9
gaatatttgccggttactcttcatcacgtctatataagatggtcaagggccccgagggggagaaaattaccttggaaacctgctttattgttcccggtattttattccgcattttttttggacctgatgcccctatttggggaggaccatttttccgtggctgttccgttcggacacaaggttggccctggttggcttatggttcggtatatcagttcccttagtctttgtcggcagtcacttaggttaaaaaacgccacccattgaacaccctgtgaagaccaataaaatcccgaggcagatcttgaaacaggcatggtatatgaagcccgttttctccatactcatgggaggcattcttccattgggagctgtttatattgagctattctacatctaaacatcaatatggctaacccag

SEQ ID NO: 43746 - DNA, 119 bp, Gossypium hirsutum
  Clone ID: LIB3272-035-P1-K1-G6
tatatcttccacaacacagaggcagctaagtgagttgtgccaaaaataattcgtggggcagaaccggaccccaagggaagaaaaaaagggccctcttttacaatcaactgtcttaagcc

SEQ ID NO: 43747 - DNA, 175 bp, Gossypium hirsutum
  Clone ID: LIB3272-035-P1-K1-H1
gtgagtaccaagttttcttcctttctttccccctgcaaaataaacaaaatgatcttagtaattaaaaaaccacgctctaagatatcaaggcataattatggtattgcatgccggtcaaacacacaaagtgcctttcatgcacttattgttgccgaatataaaacggagcatgtct

SEQ ID NO: 43748 - DNA, 415 bp, Gossypium hirsutum
  Clone ID: LIB3272-035-P1-K1-H6
cgaaaggagagaaaactaattggattatgcatgagtatcgattagccgacgtggaccggtcggttcgcaagaagaacagcctaaggttggacgattgggtgctgtgccggatttacaataagaaaggttgcatcgaaaaacaacctccgcgaggaagcgttacgaaaaaagctagcgtgacggagattgaggagagtaagccggataatgggacactaggcgtggaggcgtgtgaatttccgccggcagcgacggcggtgggtaacgattacgtatatttcgactcgtcggagtcggtcccgagggttcacacggactcgagctgttcggaacatgcggtgtctcgggaattcatgactgaagttcaaagcgttcccaaatggaaggaagaattgggaatggccaacaataatgc

SEQ ID NO: 43749 - DNA, 331 bp, Gossypium hirsutum
  Clone ID: LIB3272-035-P1-K1-H9
aacgggtcttaagggtcctaactaattaactcggttcccttttccctttagcatagggtggggaattaaaccccagggaaaattttggtgtaacctttgcattcagatgctccaaggtgggccggtcattgattggtggtcttggaaacaacctcttttatttaccaaacgcacatagtgtgagatcacatgtcgcatttttttgtctcaaccacaaaggtcttttattcatgagaactgttcttaaagtagtggacaactccggggcgaaaaaagtgatgtgcatacacactctaaaggggaagaaaggggcacgattttgagacaccat

SEQ ID NO: 43750 - DNA, 303 bp, Gossypium hirsutum
  Clone ID: LIB3272-036-P1-K1-A10
accgatttaacctcgatccgggtttcatgactaccgtgcacgctatcactgcaccacaaaagaccgtcggtggaccatcactgaaggactggggagatggtagagccaattccttcaacattattcctagcctcacctgccctatcaactctgccggaaagtgtattgctgtcctgaacgccaaacttactggaacgtcattgcaagttcctacccccgatgtatcagacgtcgctctcaccgtcagacttgcgaaatctccatctcatgatgagatcacagctgctctcatggaagagtctg

SEQ ID NO: 43751 - DNA, 332 bp, Gossypium hirsutum
  Clone ID: LIB3272-036-P1-K1-A2
attggactggtagtaagcctgttaagctgttgtctctccatcatcgcgttgataaagtcgggaactttgaaaccactcccaccatgcgcaactgggacgagactgtcgtctccctgggtcaggaaagacgtttccttttaactcagttacagaccgatcaaaaacattcttggtcttggttattttaccacaatcggttacaaaagggctgtaaaaaagatgcctttcactctaaatgttgttaactctgtggaggtgcacgaaagtgccatgtcaattttggacctacctgatgtgttctgggaatgcagtcttgaatggcttccacctgc

SEQ ID NO: 43752 - DNA, 244 bp, Gossypium hirsutum
  unsure (1)..(244): unsure at all n locations
  Clone ID: LIB3272-036-P1-K1-A9
caacgcccnaaccagcaccgagctccgccgccagcagcgactagccgcaccagggagggggggacaaccagcgcggccgggcatccacgaagactacgaaacaaatggaaggccacagaacttcctaaaggctgtgaggacgtggaggggcggagcgcacggacatagggatttcattgcgcgagccggggatatgctgtatacggggaggctgatggtgaccactgtctgccgggggaaacag

SEQ ID NO: 43753 - DNA, 399 bp, Gossypium hirsutum
  Clone ID: LIB3272-036-P1-K1-B1
ccaagccctcccaagcgccgttctcctccgtcagttgtgactagccgattcaggtcccgaaggacaacaatctcggcttctcaacttcgatttcaacgaagcagatggaatcccacagtacttccgaaaggttgtgaggacgtggaggggcggagcgcacggacgtggggcgaacaatgcgcgagtcggggtcatgcgtggtacgtggaggctgctggtgaccactgctgcggcgtgaaacagatggaaaccctagggtttccgaatttgggcctattgttgttgggccattattttgggctgttttatgtaattgggcatttgggccagatttttctttttggatttactatttgtaaatggatatttaatatttttgttttattttttggtttttgt

SEQ ID NO: 43754 - DNA, 191 bp, Gossypium hirsutum
  Clone ID: LIB3272-036-P1-K1-B10
gtcgtgtaaagctgccgaagcaaggctaaccctgactttcaaccaaaatagtgaaggccccctctttctgcgacgaacgattctttcatccgtgtataccaggaaactgaacttttccttttatatataaactgctttaaaacttctatttttttactatcaaatatcaaatcctttaaccttaaaagtta

SEQ ID NO: 43755 - DNA, 327 bp, Gossypium hirsutum
  Clone ID: LIB3272-036-P1-K1-B6
ctttccttacagaatgatttacgacgtcaattctccactcttccgctcattcctcagccagaagggcggctcctccgacaaaaggaaaatggaggagcagaagccaaaggaacagagacccaaagcaagtgagaacaaacctgttatgacagagtaactgatgcttttttttagtctgctttaagatgggacaggttggttgttgttttagaatggaaattactgtggatgtttctaatttctatattataacagtttttcttgtttgatttggaatgaacatgttcttatctggcattcaagcttctattttcctgatgttatttt

SEQ ID NO: 43756 - DNA, 247 bp, Gossypium hirsutum
  Clone ID: LIB3272-036-P1-K1-C12
agagaactcaccagctgtaacacactaacactcctaaaagcttttttaatgggaggctggtttactaccaggaccattattacacgcttctggtgttattctggatcctttccaggtctggtgttgtttacagtgatggtgatgcgcaaaatctttgatatatctcacaaaatcactttccagatgcccacttttaactcccagaagggactcgggcactttatttgggttgtgtccagaatttaaa

SEQ ID NO: 43757 - DNA, 244 bp, Gossypium hirsutum
  Clone ID: LIB3272-036-P1-K1-C2
cttaatcattctactttcaacaccaaatctatattatcggatggagccaaaacgggccggccataacacagttctaccagtcacttcttcctctacagaaaacctataggtcactgcttatcctgtagaaatatatagcatttccacttgcgacgaaggagaggcagaccccaaacccgcgcgtaattcattcgctcataagatcccaccatcctgatagccccgaacctatacgcctcgccta

SEQ ID NO: 43758 - DNA, 190 bp, Gossypium hirsutum
  Clone ID: LIB3272-036-P1-K1-C3
gtgatactcatccatatcagatttttattccgtgatttgctttatggttctttttatgaccaccttatgcggcgcgcttacaactccttatgtgtgctcctacactgcgtgggcagaacactcttttggtggttgtccggtgctagatcctattgcaaggtagaacataactgcgtatgatgaccgtgct

SEQ ID NO: 43759 - DNA, 342 bp, Gossypium hirsutum
  Clone ID: LIB3272-036-P1-K1-D12
gaagagagtaaaggggaaaaaaagcgtcgtcgtttttgcttcttcttctacttcgctctctctccttctccgaagttcctctttcgttctttcatttattcagattagttgaagggcacataatacgcgttgacaagtgttttttgctgcactcactacctcgattcttgtttccagtattggaaaagatggccgacggggaggatattcaacccctcgtctgggataatggaaccggaatggggaaggctggttttgctggtgatgatgctccaagggcaggttttcccaatattggtggtcgtccccggcacaccggtgttatgggtgggatgggtcaaa

SEQ ID NO: 43760 - DNA, 366 bp, Gossypium hirsutum
  Clone ID: LIB3272-036-P1-K1-D6
gcgctccgctttcttcgcataacccggtgctcaagcccccgctccgcgaccttgggggcagatctcgctggtagtcgcctatacccaactcactactagcaaggccgaataggggaatggtcacactcatacggcacttgcacatgtcttgctccatcctaacctacaacaggtggacctacaacagcgcctccactgcgagctttctaagggactcttctataaattactgatccggacctctgcgggttacatccaccttagctaacatctacacctgtcacgtgaactcggccagagctatctgttctttcaacggcctgacatcatgtataccgctcaatcctatgttggttcatcaactac

SEQ ID NO: 43761 - DNA, 411 bp, Gossypium hirsutum
  Clone ID: LIB3272-036-P1-K1-D8
gttaagaacttgaaaatgtatgaaaaatacccatctccgattaaatgtgaaccgactactgtgtcaatgcccatcaaggaaggtgagccaattgtcttcacctatgaagttactttcgaggagagcgatatcaagtggccatctcgttgggatgcttatttgaagatggagggagctaaagtccattggttctcaatcttgaattctcttatggtgatcactttcctcgccggtatagtccttgtgatcttcttaaggactgtcaggcgggatctgactcggtatgaggagcttgataaggaggcgcaagcaatggtgaacgaggagctgtctgggtggaagctagttgttggggatgttttccgtgccccatccaatcctgcccttttgtgtattatggttggggatggg

SEQ ID NO: 43762 - DNA, 411 bp, Gossypium hirsutum
  Clone ID: LIB3272-036-P1-K1-D9
attgtttcctcgatgctacccaattttacgcttcaatgcgtacccaaggctgctggcccgacaatttcactttccctttcgttctcaaggcctgttccaggcttttggatttccatttaggaataagaatccatgccctcgttataaaactaggattcgatcgtgatgtctttatcaagacaagtttgctgtatttgtattccaaatgtggatatttggattatgcacgtaaggtgtttgacgatattcctgataaaaatgttatttcttggacagcaatgattagtgggtacatagatgttgaacggtatagagaagcggttgatttgtttcgtaagctaatagatatgggtttgaggcctgatagtttcagtgttgttagagttctggcagcttgtgctcacttaaggg

SEQ ID NO: 43763 - DNA, 411 bp, Gossypium hirsutum
  Clone ID: LIB3272-036-P1-K1-E3
aaaacaatctgttttattaattaaacaaattgaaataaaggtgaataaaatatactggagtgaagaccagatacagatctggatcgtgccctaagtaaagcccataaaagagtagcacttcaattcttcaaatcttttttttttttgcttcagaagccataatacattgcagtcttatcactgttatataaccatgtcaaggaggcctgtaaatcctgctcggcgctttgctgatggcggaagcatcccttttgttggctcagtacagtctaagacacgttcatcaccattcttatctattgggcttttggttgtgggtgcaattcttctgattggctatttgcattatggttcagggcaatccaccagtgtaaaagaggcactaaagtaagttgaaggtggttcttcatg

SEQ ID NO: 43764 - DNA, 401 bp, Gossypium hirsutum
  Clone ID: LIB3272-036-P1-K1-G8
cgccatacaggcttgtaaatgctgaaggttgtttctgggggataatccactcggccggcgaagttttgtccttaggtctcgtcgtcacactcttttggaaatggaatccaatccaccatagtactattaagtcaaccatttccatagcctactaaaagataaacaccgctcttcatttctccactctcaaacaactagtagcatctatggcttccatggcttctctttcagcttcttaccctaaatatacgtccaattttcccactagatacacgcacctgttgtatgatttatgtcttgttccacgaaatcttcctcttgtgaaaaaattgtctttctcggatttgacaatcgttagaaagtctaatcaaactgaatcaatgatcgattctactgataaa

SEQ ID NO: 43765 - DNA, 311 bp, Gossypium hirsutum
  Clone ID: LIB3272-036-P1-K1-H1
cttccgtttttttttttttttttcccccaactttttgaaattatcccattaagtcttaatctttcaattgggaataatatatcttggaatgattccttcattccaataaaaagcccaattctttgtttttgatgtcaacagaagctgccacaacaaatttccaaagttcaaatttccagccggtggcgcagccgccggatttccggccggaggtgactgtcagtccccataacgggctccgcttttggcagtcatgattgcgggctccatagccggcttgcgtgagcatatggctatgttcccggttgaca

SEQ ID NO: 43766 - DNA, 322 bp, Gossypium hirsutum
  Clone ID: LIB3272-036-P1-K1-H11
tagagggcgtcaggacaaagaaggttgcactcctctccattgggcagctattaggagtaatctagatgcttgcacagtcttagtacaggctggcaagaaggaggacttgatggtcactgataatggtggcctcacacctgaacagcttgcttctgataaaaatcacagagaagttgctatcttccttggtaatgctagaaggttgtatgaaaaaggatgtggtcggaacaacagttttggacaactttctaaattaagacttgcaccaattctttggtgcactagcttgctactatatggtgacatatattcaatctgtgtt

SEQ ID NO: 43767 - DNA, 200 bp, Gossypium hirsutum
  Clone ID: LIB3272-037-P1-K1-A1
ctagaaacataattaacaatccgaaactcgttcccggaggtggtgctacacaattaaccgtgtctgccacattgaagcagaagagtgcatctgttgaaggcatacaaaagaggccgtatgaagccgctgctcttgcttttgaagccataccacgtacttgggcacaaaattgtgcgtgtaatgtgattcgagctatgact

SEQ ID NO: 43768 - DNA, 394 bp, Gossypium hirsutum
  Clone ID: LIB3272-037-P1-K1-A4
gcaaatcgtaacttaatgcctaaatgacacaaggttgactaataaaataaatcgcgagagaatatgtggtcatatgaggatctcaccacaggcgatgagctgctttagggctctttcccatacaaagaaatcgatattggaatggcacaggggaagtgacagggaaagtgctgctggtcaaggcagctgacaatgtacaatatcgaggctaacccttgtgcagaaggtggtgaacatgaacaacgtgttgtccctcttgccaataagggtccacacatacacggcactctgagacttcaggacctacacgatgcatacacggatctgaccatgcccagactgaataggatcatcacgacctctccacccagatctgatcctgttatgcatgcac

SEQ ID NO: 43769 - DNA, 276 bp, Gossypium hirsutum
  Clone ID: LIB3272-037-P1-K1-B11
caaaaaagaaacaaaatacgtttaatttcccaattcccatgctaatttcacactgggaatagcgttaaaaaagagagagagagaaattgcatcaatttcctttttatattggaaaaatagccttaacttggatatggcgacagttggaagacattcctcaatctatagagatctggttgtagttcatatggtatccacatccatgcattggccctgacctatacctgtgttctctagagacaagtgttcccagctcaagttctaaagctccttatc

SEQ ID NO: 43770 - DNA, 287 bp, Gossypium hirsutum
  Clone ID: LIB3272-037-P1-K1-B8
ctcttatactttttttctcttcttgcttatcattttcttcaccaaacattttggtacgaaagtttcaaccattttgatgccataattcattcattttcctggaaaatataaaaaccaagctacattatcaaactgggtcttccttcttttttagaattaaaccagttcctgatctgggttttcacattgagctaacatactttttttttttttttcaaaatggaaaaccaggtttttcttggtgctcaaggaccgccattagactttgggcagtcattatcatcacc

SEQ ID NO: 43771 - DNA, 374 bp, Gossypium hirsutum
  unsure (1)..(374): unsure at all n locations
  Clone ID: LIB3272-037-P1-K1-C4
gggtggagggtctatcatccatatcgtggaccacctgaatcttgaggcattgaggggggcagaggtgctgcgggcgctttatgaatcgtctaaaggaattgcacagaaaatgacantnncgggactacgttacatcaggcagattgcccaggagacaagtggtgaggtgggttacagtctcggcaggcagccggctggactcagaacttttagccaaagattaagcagaggcttcaatgatgcaataaatggattcaatgattatggatggtctataatgaattgtgatggaacggaggatgtgataattgcagttaattcaatcaatagctttagtagcacattaaatcctgccaatgctctctcgttccttg

SEQ ID NO: 43772 - DNA, 360 bp, Gossypium hirsutum
  Clone ID: LIB3272-037-P1-K1-E12
gttcttcaggcatcatactttctcatccattacctattcgcaagccaaaccgggcatgtaggagcattatactctgctttccttgctatgcacttggcggccggagtacctggtgtattagcagtgttggctctcggttacaataccaacctttttggttccataacacattatagcagcggtcaggcggccgtctactatggagccggatatatggagctaccagacgtattcaaaatgggttttgtaatggccattgttaatgccattgtatggggaggtgttggaactttatggtggaaatttttaggcatctactgatttcccagttttaaacttccccccccccaccctatcaag

SEQ ID NO: 43773 - DNA, 412 bp, Gossypium hirsutum
  Clone ID: LIB3272-037-P1-K1-E2
gaattccacagatcaaatccttacgtgacaggttggataattgggtaggcaaagtacaaaccgcttggttatcaatcgaagctgaaacacctgatcttgttgcagcatgaattttttctcccctcaagttcctttctgcccattgtaacaatttcgttattggaaaaaaaaaagaaaaaaaagagaagttaatggtgagcaatgaggatagagacaagtgtaagtgatgtggggatattagttgatagttgatcctggaattattctattcttgtggaaggagtgtcccctcctttatactttctttttcacgtttggtcatttgttggatatttacagtggcatatatgccttaggatacttgttaaacttgagaatagctagcttccttctcttttttaactttgtattg

SEQ ID NO: 43774 - DNA, 343 bp, Gossypium hirsutum
  Clone ID: LIB3272-037-P1-K1-E7
ctcctgagtacggtttcatccaccatcttttttccttcattcaacctgtgtctgcggcccataatataatgctacaacatgttttcgacttgctagaactgcgagttttcacatagtatggcccaaaggtaaaaaataaattggtgggtgacacatcgaggcttggcattggtggtggtcaaatagatgggaaggcggtgcagacattacaaaagagctttgttcaggttcagaatatattggaccaaaagcggctgctcatcaacgaggttaaccagaaccatgagtccacgatccctgacaactcgagaaggaatgttggcctgattaatgagctcaacaa

SEQ ID NO: 43775 - DNA, 371 bp, Gossypium hirsutum
  Clone ID: LIB3272-037-P1-K1-F2
tttatgtttacagcttactctctctttttatctgtttttatttaagagattattacggagattttttttataaaaaaaccagtttactgctcttatacagttatacttatgaagttgagcagcaaaagagaaaaatggaaaaaggagggataattggtgtggagaaaagaatgagaaaaggttaaaagctttgttggacttttttttcttttcatttatttgatttggatttgtgatatgaataatggatttctcggttctttttaaaaaagatctgattttagctgttgggatgcgcttctgagtgtttaaaagacaggggcatggccggaagtaatgaagtcaacctcaatgagtgcatgatggtggct

SEQ ID NO: 43776 - DNA, 398 bp, Gossypium hirsutum
  Clone ID: LIB3272-037-P1-K1-F7
ctttatatctctgcttaaccctttctcccccaccttcgaatcaaccaaacttgccatttggctatcttcaagtgctctctcataataaactaaagaaccaaaaaaaaaatggttaaagttgcaggtgttttggtttgtcttttgattgtgggcatggatgttggagcagggatacttggcatccaagctgaagctgcacaaaacaaggttaagcacctgcggctgtggatatttgagtgcagagacccgagccatgatgctttcaagctagcgttgggtgcagcaacgttgctgacactatcccacgtacttgctaacctgcttggtgggtgcatgtgtgtttgttctcaagaagagtttcagagctcttccactaacaggcaactctctgtcgcatg

SEQ ID NO: 43777 - DNA, 411 bp, Gossypium hirsutum
  Clone ID: LIB3272-037-P1-K1-G1
aaaagctgtatgttccttccccattgctatttccttttattaactattaaaaccaaaattttttttgtcaaaaacgttttaaccttttattttttttaaaaagccctaaaagctttatgaaattctctcttctccctcattctcccctttgccttccagccgaaaaggccaccaatggctcacccaaccgccgccgtgactccggtgctgtgagatcgtggaggaggagcgaacatgggcgtgcaacacgtgagttggtgcgctgatggaggacaacatggttcgtgggtgcaaacatgggcacggaggccgtgggacttgcgacggctgaaattagcctagggtttcccttgtcttctgattgcttaggttttgggccataagtattgggctgctgtaattgggtcttta

SEQ ID NO: 43778 - DNA, 418 bp, Gossypium hirsutum
  Clone ID: LIB3272-037-P1-K1-G11
atatcctctgacctcacggagcttggaaggacaccagtagcagtcgtttctgctggtgtaaaatctatattagatattccgaggacactggaatatttggaaactcagggagtttgtgttgctgcttacaagaccaatgagtttccagctttttttactgaaacaagtggctgcaaggtgccttgtcggttaggtagcccaaaagaatgtgcacagttaattgatgcaaacaggaagcttaatctcggaaatggagtactgattgcggttcccatcgcaaaagaatactcagcttctggaagcttaatagagtctgcaatacaacaagctcttacagaagccagggaaaagaacataacagggaatgctgagactccattcttgctcgctagggttaatgaaataactggaggagcat

SEQ ID NO: 43779 - DNA, 348 bp, Gossypium hirsutum
  Clone ID: LIB3272-037-P1-K1-H1
cactcatctaaagtgtgatgcagcctcgccgaccgtgttcattctaaatgcgaaagccagtacaatccatagatgtaagaacaacatttatatgcttgtagcaccgactcatatgtttccattcccggttaaagccatgattgtccctatgagctttacagcccaaaatctggtttgccgggatactacaccgatcatcgacgaactctctctcgatctcacctaagatctgccgatgatcgaaaatttataaatatcccgacaacaacaaagatgaagagagaagacacagtgaaactcatcagcgctgaaggaatggaatgcgtcatcgacatagaagctgatatg

SEQ ID NO: 43780 - DNA, 206 bp, Gossypium hirsutum
  Clone ID: LIB3272-037-P1-K1-H11
ggggcgcatggctaccgttagtagtttcgctggtccagacacaggcactggaaggagaccaaatcccacagcttatattgtgatgacctcgagatactcgaggattcgtgttctcatcaaaagttgcggcacagaggatgacaggttgcggtgccgatgaagtgggctcacaacactacgttgggggagcgggttaaatgtgcggt

SEQ ID NO: 43781 - DNA, 341 bp, Gossypium hirsutum
  Clone ID: LIB3272-037-P1-K1-H12
cctctctcaacctggctagcaattttcttgcttctcatcttccatggaaacctttcttgatttaaccttattgtttcatactttaacatgttataatagcaacaaaagctttctctcgagatgctggtctttcccagagcatgaaaatgacagctccaaggcaccagattgcgagagaactctttgttttgatcgttcaagcaatggagtttcgagtttatcggcgaagaaagaagatggtgtgagaattcataggaaagacgtgcaaaaattgatgggaaatctggggattttttgcgaccaagaaaagtagcaaccgaatgaatcattcggttttaatg

SEQ ID NO: 43782 - DNA, 224 bp, Gossypium hirsutum
  unsure (1)..(224): unsure at all n locations
  Clone ID: LIB3272-037-P1-K1-H2
gagagctctaccggcatgggcagatgacctgcagggtgctatgctaaggtgaaagacatagcttacccaaacagacgttgttgtcgctgagtttctcatcccatgttttggaaatatgatgcgggcatgaaacagtacggcgtcgtttattagcatgtcagagatcaacttggctcgntgctggaaggaactttgagtctacgttgaagctctgtgaatgctga

SEQ ID NO: 43783 - DNA, 398 bp, Gossypium hirsutum
  Clone ID: LIB3272-037-P1-K1-H9
caacaaaggaaaaaaaacattcatggctactaaaaaacatgatgatcatgagaattatccaactgttttggttaccaagacagttaccgtacacccaaaacccttgttgcatcatccacaacagattctccatctttccaatttggacaggcagtgtccgatgttaatgtacgtcgttttcttttacaaaccttgttttgcttaccagaacttgtctctgggctccatcttcaacagcttgaaatctgggttggaagagacactttctatatggtatccagctgcaggtaggttgagcttgaaccaagctgatggtaagcttaatctttggtgcaataatggtggtgcagttctagctgaggcagtcaccactgcgaagatcattcaacttggggatc

SEQ ID NO: 43784 - DNA, 417 bp, Gossypium hirsutum
  Clone ID: LIB3272-038-P1-K1-A5
tttaaaatttttgggccaataaatttggaaggcaggattggttaaggcctttagggtggtggtgaggttcaaggcaagggcttccattaatcttcaccaacttcaatagtggaccgggaggagttgacaaaaggggcattttataggggtggaataacccagtttattggcacccttttatttttatacaataatgtgttgacagggatcggatacaaaaattaaggtgacccttataagggcagggaccaatgccggggggttggcattcttggcatttgttgggcttttggggggaagaactttattcttggttaccggaccggttggattttttgggggcacaataacccaacaagggccttttggctttttttggcttggaagggggtcttaagtcgaagcataatttatatt

SEQ ID NO: 43785 - DNA, 330 bp, Gossypium hirsutum
  Clone ID: LIB3272-038-P1-K1-B2
gttcttccttggaggtaaaaagaaaaaagggtttcttttgttcgtttttttttctgtagaggatgccagacaaaggagggagctttgttccagttcatcaatggcgtgttggtttggtaacagcataggttctggttggtatggtggtggtttggagcatatatggctgctcctttaattctacattactgtcgtgacagtgatcacatgcttacatcacgttgacccttataagggcagttactaatgttgtggccctcgcattttctgcaattcttggctaatgggggggtgatttttattcttgattactcgcccttgtggtttttt

SEQ ID NO: 43786 - DNA, 192 bp, Gossypium hirsutum
  Clone ID: LIB3272-038-P1-K1-B8
tttttggcaatcaattttgtaagcaagtattgctaaagaccttgaggttggtggggggttccaaaccaaggactaccattatccttcaaccacttcaatggttggacgggagggagtggccaaagtggtaatttattagggttgaaatacccgatttaatggccaccctttaattttaatccataattgggt

SEQ ID NO: 43787 - DNA, 346 bp, Gossypium hirsutum
  Clone ID: LIB3272-038-P1-K1-C1
gaagattaattaagagtcatcagctcctgcacggtagacgttcttttgcctaggccttggatccaccgtaaatctgggcgccttcctagcatcttaattctttaccaatgcgccgagttcttggcttaactaatatgtaaatctgaggtctatgtggtgatttcttttacggggttattacccatgtcatttggtgcttccgagcacccttttacatatggacaactgttttgaattgggggcttctatatatatgtgagcatgaaactgggtgcttcattctctgtaatattagtaaccaacttacatgtgcctaaatgacggttctttcttacattgtaccaca

SEQ ID NO: 43788 - DNA, 426 bp, Gossypium hirsutum
  Clone ID: LIB3272-038-P1-K1-C6
tttatttgcatgaactcttaatccactcggtctcaaatccccaaaccccaaaaggatagttgaaaaaagaaaaaagaaaacctttgttttgtcttcaaatattgaaactttccttcactttcccactgaaaatctttcattttttcccaggaaaaatgaggtgggaaaaggttcagttatacccaaaagaagaaggaggtgtgggagaagcatgtgcggggccagggaaaagatggggacatacatgtaacgccattaaaggaggcagatttctctatgtttttggtggttatggcaaagataattgccaaaccaatcaagttcatgtctttgacactgctagtctgacatggagcctactagcaacaaaaggcacaccgtcaattccaagggatagtcatagttgtactactggtggtgacaacc

SEQ ID NO: 43789 - DNA, 416 bp, Gossypium hirsutum
  Clone ID: LIB3272-038-P1-K1-D12
gatcgcgggtactactcagtcgagaccgtttcacttctagtggccctcaaagtccgatatagagatagaataacaattcttagaggaaatcatgagagccggcaaataacacaagtgtatggtttttatgatgaatgcttgagaaaatatggaaatgccaacgtgtggaagtattttactgacctgtttgattatttaccactcacagctcttattgagagtcagatcttttgtttgcatggaggactttccccatctttggacacgttagacaatattcgagcattggaccgtatacaggaggttcctcatgaaggaccaatgtgtgatctcttgtggtctgatcctgatgaccgctgtggatgggggatctctcctcgtggagctggctatacatttggacaagatattgcgac

SEQ ID NO: 43790 - DNA, 421 bp, Gossypium hirsutum
  Clone ID: LIB3272-038-P1-K1-D7
gttttatccttccatgcaaggttcccatggaatcccgcaaatcccacccttctattgtttgtttcagtgaaatcttggtggaaccaaaccacaaggggaaacatcagattctaagaaactccaagtttcaacctctgggcagtggtcttagattccaaattactgacagacatagttacatggtcttctgcaacagtaatgttgaacaaggacctgtaatcccttctagccctgctcctgctcctggatcctggtttgtcttttatatatgtatttgaaaggaaaatatatcttttaattttgctcttcaatgaggtttgtcacagtcatttttaaattttcaggaaaccttggaattctgggatttcttgatgagtataatcctacccttttggaggggaaacttgccggcatttattta

SEQ ID NO: 43791 - DNA, 417 bp, Gossypium hirsutum
  Clone ID: LIB3272-038-P1-K1-E1
caacaaacaagattcaaaatgtgttacagcgggcaactgttgacagcaactcacaaattgggaccatatttcatattctccagacaaaggaatctcctcctacctatttccacaccaacaaatttacttctgctttccaagaaatcgtggatgcatatgggattgcgaagtatcaagaagcaaatcctggtgtattcacaatcatcacattccctttcctttttgctgttatgtttggtgactggggccatggtatatgcctgtttttggcaacatcatatttcataatcaaagaaaaaaagttttctagtcagaaacttggagacatcactgagatgatttttggtggtcgctatgttattatgatgatggcattattctcaatctacacaggattgatatacaatgaaatttttt

SEQ ID NO: 43792 - DNA, 261 bp, Gossypium hirsutum
  Clone ID: LIB3272-038-P1-K1-E10
gttgtcatggtggacaagtaaacataggatcgctggaatggcttgtcaagctgcgggagggatattctgttttgccgcgataccatattaatgaagccactctgtgctggaaaaaacctgatgttgtaggagaggatggtaaagatctcattctacatattacgggcactaattatgattgtaatagagagatcatcaaccctattgcctttggagatccgatataagaaggtttggagggcgtgcgatgtctaggacccc

SEQ ID NO: 43793 - DNA, 422 bp, Gossypium hirsutum
  Clone ID: LIB3272-038-P1-K1-E11
gaaaaaacaaacgcttccactcggctgaaccaaaatctctcattcgaaccccttttctcttctcgacggatcgtgttatgtaatggccaatcaaggccctattcaaccagaggttcgcgagtttcgctcactagccttagaatcgtcacctaacttcgattgtgacgaatcaagtgaggattcgaatgagccaactctctggtgagtcattttctcttttctgatttttgtttttatatgcagtaacaaagatttgtgaaataggagcagaatcgaaaagaaagaaataatctaaaatcaccttagtttttcctcgctttttccttctattttcatattccccccatacaaattacatttggtctttatttatagccgaataaagagaaaaacagaaaatcaaagaaatttcctagatcttt

SEQ ID NO: 43794 - DNA, 311 bp, Gossypium hirsutum
  Clone ID: LIB3272-038-P1-K1-E6
ataatactctgaactttgggtttagaggggatgaggaaactcttgatggcttggctggcatggttcttatttgataggttatccaaggtacggtggatcgtttggaggtggaggatagagatgcagacacgcgagaggggaacacagaactggtagtgttggactaggctgatagtggacagattctgggtcgaccaccgggagtggaccatgggggtgaaagttacgcgacactcatgaacgattcattagatgaaagctggggtccttaaaggggtgggcttttatttgattctgaatgttataatggg

SEQ ID NO: 43795 - DNA, 285 bp, Gossypium hirsutum
  Clone ID: LIB3272-038-P1-K1-E8
aaagcacaccaagctaggcgccatgcaaatgctatatcatctttttttttctgggggacacagcctttctaaaacatccccagctatatcaattacacaccactgttcacggtagagagaacgaataactaggcgtacctctccgtgagttggcactcatgataagctattcagtggcgaacacatattctggtcagctctaaatgtaaaaggacaaggaattttacttggatcaccaactttactgtaagcacttgaagacacagccctgtggcaattgggagg

SEQ ID NO: 43796 - DNA, 254 bp, Gossypium hirsutum
  Clone ID: LIB3272-038-P1-K1-F2
gggaagccctttactaacctgactgcataaacacaaccatgtccaaccattcaggttttctagtccccagactttttatctacatttgaaatacctatgttggatccgactcttccgatcaccggtacagggaccgagacgctgtacctttttacgccaaaggcgttggccggtgtggcaacacgaatgtgacctatgggtaagagggtcaaatcctcacccgcttttattgaggacgtgaataaaacataaga

SEQ ID NO: 43797 - DNA, 426 bp, Gossypium hirsutum
  Clone ID: LIB3272-038-P1-K1-F6
atcaacaatgggtgaaatatggcttctccatgtgcactttaccagattttaataagtacccgattgctttttacactccccttagcttagctttctttgtgatcttttcattttttctcaaaaaacgatgtcgcttttcttcgaaaggaacggtgatggtaattcaatcagacggtcagggtttatccacgatatgcagtgtattcaagattcgccggagctaaaaaacgatgatcagagagagtcggtgctggcggaagatagggaagaagaggatgatttggagtattgtagttcgtcgtcgatcggagggaacagtgatgtttctggcgaatcatcatcggacggtgaagattcaagggagactgaagttcaaggcaagcttaaaggacccttggataccatggatgctctacaagaggtttt

SEQ ID NO: 43798 - DNA, 369 bp, Gossypium hirsutum
  unsure (1)..(369): unsure at all n locations
  Clone ID: LIB3272-038-P1-K1-G10
ggggaggaaaatgccaatgggttgcccctttctttccctccgcttctccctctttgtctccctttctttcgcaacttcatcttctcccttctcatttttcaagctccaatccccatcatcttcaatccccaaagctacgccatccgatttgctctctctcttggccaccccttctcactcttcctcagttaacccttcagtcgccgatgaactcaagtcctgtttcaagttcctcgtcccctttaatccaagcaatacccgaagctcctctgatttcaaatccccttcttctagacggtcccttttgaaaagcccaagagatgaacaaaatgagcttatttggtggcctnctgaaccggttcttgagct

SEQ ID NO: 43799 - DNA, 274 bp, Gossypium hirsutum
  unsure (1)..(274): unsure at all n locations
  Clone ID: LIB3272-038-P1-K1-G5
gtttcattttattgctatttctatcatttatttgcttctatagaggttcttcaaaggccgtgatgattgatccggttcgtacgaggaaaaattttttgatctcatccagacatcgaacggcggcgaaggcgggcgatcaacatacagataaagcttcgatttcctncaccaaccaccactaccacgacaaccacaaaaagaagagcaggttttcttcttaatcgcccgccattcaagtgagggcttttaacttcttcataaagcaccaaggctt

SEQ ID NO: 43800 - DNA, 325 bp, Gossypium hirsutum
  Clone ID: LIB3272-038-P1-K1-G8
gcattgttcattggtgttctaacaatggaccctaggatttcattctctaatgattgtgcggatgtggggtccaggtttgaaaccactttttccggggagcctccgttttcgccgccggagttcgaatcttcggtaaaaactacgctatgataccggcggacgagatcttcttcaagggggtggtgttgcctttgaaaggggataattaacatggaagggaggtgtctttaccagataccctgcttggggatgaccgggataatggcggcgggttcttcccgccgaaggggttcgggggggggaaaaagagggttgggttcaaaaa

SEQ ID NO: 43801 - DNA, 416 bp, Gossypium hirsutum
  Clone ID: LIB3272-038-P1-K1-H9
ggcaagttagatgttcttacaagtcttcaaaaccttgtttcacttacttctcaggtgagttgccgaattcatctttttttccgaaaactcccattatgtgaccttgaatcaaacaaaggcctatatatctccaatggtgttgtatcttcttctgatcttgaacattcgaggcatgttggaccagcagtgaagctagtgatgtcgatcctcataagtgccagtgtgatcctagtactactagctatctacgcgttaatccgtgctcgatttttcaacaatggccttatggaagattatacttgggaagtgactctgtatcagaaactcgacttctcgatcgatgacatagtccacaacttgacatcatccaaccgtgaccgcactgggagcttcagggttgtatacagaggaacgat

SEQ ID NO: 43802 - DNA, 202 bp, Gossypium hirsutum
  Clone ID: LIB3272-039-P1-K1-A1
gccattaaagcttagaagaaccaaatccttaaacaaaagttcaaaattccaatttcttggaagaatataatcttcttttctggcgttgcttgaacttctctttcagttttagcaccttaagtaaacgagcctgggggcccaaaaaagctaaggatctatttaattagatttgtttttgtttctcggaagtgccaaggaaagg

SEQ ID NO: 43803 - DNA, 400 bp, Gossypium hirsutum
  unsure (1)..(400): unsure at all n locations
  Clone ID: LIB3272-039-P1-K1-A4
ctcttatccaactccacccaaagctaaaaagggtcgtctctgaaacatccatggccgacaattgctcattgccacagttcgtaatggagttaagagtcttgccaattaagaaccttaaaaaacaaggttcttgtggtctctttactcgacatttaagacaccatatatctctcactaagttcaatggtgtgaacaatctttgtgaaggtaatgttgagaaatctacatttggtgaaagctttgtggtaccaatagaatccaacttcttcgctaataactcttacatttctcttcaactacacaccaaaaggctccttggtcgtaaggatttactgggttggtgtcagattccggctgctgatattgnggaaccgccagtagggtcagtccggtacttgag

SEQ ID NO: 43804 - DNA, 277 bp, Gossypium hirsutum
  Clone ID: LIB3272-039-P1-K1-B10
aaagaaaagactcttccttttttcctttctttcctgtccaagttttttgagttgtaggccaagatgaatgctaccatgtttaaggttttgatgatgttgggttttttgggcaccgattggatgggtcaaggaccaacaggaccaggcccaatattccctcccatgtttacaccttcggcaggtggttcttcaaccccgaccccaaacccaagcccaaccccaacctcaatcttaaccccaaccccattcccattcccattctctactccaaacccat

SEQ ID NO: 43805 - DNA, 226 bp, Gossypium hirsutum
  Clone ID: LIB3272-039-P1-K1-B8
ctcatgtatgtatacagactcaggtaaatggctgaacttctgcctccgatctgtgatgggaaaagccggagcgagttctgaaggtaaatggtagccttagctgcgggacatttagagagaatgtgcattgtttcgacctgtatttagctaacaggtattgtgtttttaggagctcaagattcgaggtcttcatagcgttgtagctttgcaactgctcgcattggtt

SEQ ID NO: 43806 - DNA, 260 bp, Gossypium hirsutum
  Clone ID: LIB3272-039-P1-K1-C11
gtttttggaggtttaaccggggccgcccctgaccttaagttaattattttgcggcggaaaggaattaggatttaatttttaggccccgtaagaaggtaatgggggggaattaataacctccaatcccgaggtttatattataaatagaaccaggtttgttcataggaggcaaaccattgcagcctctcaaagatccaatcttttaatatttaaacaaacaagagggcttagatttttctccactagctcaaatgggcact

SEQ ID NO: 43807 - DNA, 317 bp, Gossypium hirsutum
  Clone ID: LIB3272-039-P1-K1-D10
cttcaatcatgctccggctagcggggatctgatctggaactactgatgtcatggcggacaccgacggagcatacggaaccattaagcaacctgctgagatgggtgatgcagctaacaacgggatagatattgctaccaggcatttcgggcctagcaaggatcagatacctatactttcatacactggcttttatgagctagctggggttggagctgtagagatcaccagcgggccttgagttgcattgcattctgggagagaagacaagacttaccaaccacctgagggatgtatttccaatgctactgaaggaaca

SEQ ID NO: 43808 - DNA, 319 bp, Gossypium hirsutum
  Clone ID: LIB3272-039-P1-K1-D3
ctttatcttgggaaaccaggcttaaaatcatcaacggagctgctcgaggtctagctggtgtacacttttctgagaaggtcatttgtagagatttcaaggcctctaatttattgctcgatgggcactacaatgcaaaaatatcagattctggcttggctaaattggggccttctggtggagactcgcatgtaactaccagggttatgggaacatatggttatgctgcacctgaatacattgcaacaggacattcattcctcaactacgcctaggcatagacaacaatctagtagtcagcgtccacagtttcattcaaggc

SEQ ID NO: 43809 - DNA, 423 bp, Gossypium hirsutum
  Clone ID: LIB3272-039-P1-K1-E12
cggattccccaccatcgtcaatgtcagccagtgtagcagtagttgcattagcacttgtactagtttcaattcttccagtattctaacctctttgagtagatgtgggtcacttttagggatttcctattaccttcgatctatctcctttttctttttatgttatagttcccggtctccttatgctgtaacaagtgttggagcgaaggaattttccaagttcttctctatctgactaccaagcagttgattatgcaagaggtgcttagcttatacttaaagtaagtactatattgatctttcttctttctagcagtctcaatgaagtagtcccttattaggctctcagtgtaaacctagtctcatgctttgagatgaagctttccgacgagtcaggttgaaagaaagccatatgagtcaagggct

SEQ ID NO: 43810 - DNA, 282 bp, Gossypium hirsutum
  Clone ID: LIB3272-039-P1-K1-F3
gacaaaaggtttttcaatatcggattagatgctgttcttacgagctatgtctctatgcttgatgacttccttgtcgatatgattctgtgcatgagagaccggaccgaaaatgaccagcttgcgttagtgagagaagacatatctgtcaggcattcggtggaaagcaagggagaccctggaaacctgggtgtacgattcttgagagacataattcgcacctccatgatctcgcgcaacgatgcatgatcgggaacactcactcggtttttttacatgcttcac

SEQ ID NO: 43811 - DNA, 444 bp, Gossypium hirsutum
  unsure (1)..(444): unsure at all n locations
  Clone ID: LIB3272-039-P1-K1-F4
ttcgtttttaggggttcaggttctctcaccaacacaccatcatctctgcatcatctatcttaaaaggcttttaaggtttgggttattttagatggtcggtcatggagccaaagttcactgaattctctgattacataaacggctttagtgttgaagatttagatgatacatttcagctcaattctggtcagtactcaaatggcacaatcggattcgagttcaatgacccttctccagatcttaacgttttgaacatgaatgttgctgttgcaccttctgaaccagaccctgttacttttgttcaaccgctcactgtaagtacagatgggagctcgatttctacgtccacagnggtggagtccgggaaggggagtcttttgtcacccgtcggatgacaatgattcaacggatccagttctcaagtacataactcagatgcttatg

SEQ ID NO: 43812 - DNA, 309 bp, Gossypium hirsutum
  Clone ID: LIB3272-039-P1-K1-F7
ctctggaacctgaactggctccacagaaaggattattgattgagaaaacatggggagggacaagcataagcctggccataaggcactgttttcacatctagctcatggtggctatgcacactctcctggaccatattcaccgggtgtagcgtaccctcaagaaggctattcaccagctggctacccttctcaaggaggatgccccactcacggctctccaccatttggcatatccgggggcatccgagtcaggtcacaattacatgggagcgctacttgcatgtggtgcaccagctgccgaactttcta

SEQ ID NO: 43813 - DNA, 438 bp, Gossypium hirsutum
  unsure (1)..(438): unsure at all n locations
  Clone ID: LIB3272-039-P1-K1-G11
cacaattttgcttatttctattttcaccttcttcttcactctttttaatttcttttcatctccaaggtctatcactaattttcaagcatccagtcaaggtaattttctttcatttgcttcattcatgactatacaatgattgttttttattatcagctactgttatagcagctagctttgtaagatagtcaaggtaataagatctgaagcaatggtttcctctagtgattatcaacagttttagatttcaagactggatgatcagcagacataatctactatagttagaaattaattccaaaagagctacccggaagcaatataatgttgaaataccaaaatgttgaacattntacctcttaatattctgttgcacacttgaatgtaaaaaaatcttttcttattttcactcttctaattttaaaaaaaattaccact

SEQ ID NO: 43814 - DNA, 383 bp, Gossypium hirsutum
  Clone ID: LIB3272-039-P1-K1-G8
aattactcttataattcgtacccggattccggcgattcttcgccgcgatctcgggggatcgactttgaaaatgctccgccgtgggaggatcaagcgcaacaaccgcagagttataaggctaagtttatgtgcagttacggtggcaagatccatcctcggcctcatgataatcagctatcttacatcggtggagagactaagatactggccattcatcaaaccaaggtgctgatgaggatgaaggtgttgattgcccctctctggggcgggggcgacggtgatttatctttcaagtaccagctccctggtgaggacctcgacgcacttatttcggtaactaacgatgatgatctcgaacacatgatgaaaactggatgcggaaa

SEQ ID NO: 43815 - DNA, 200 bp, Gossypium hirsutum
  Clone ID: LIB3272-039-P1-K1-H9
atggaaataccattactttaaccgtattttaactaattccgggaatcggaggcggggcacggccctttttttggacaccaaaggccggttttgggccggccgatccgggggagagacattgagggggggggggttggtttggcgcgacatatgtgtaaagagatagcacgggtgctcagaggtgcgctaagcgagcacag

SEQ ID NO: 43816 - DNA, 351 bp, Gossypium hirsutum
  Clone ID: LIB3272-040-P1-K1-B11
taagcatttaattcttttacatatatttgttacttttctctattgggaacgggggaaggataggcaacaattggggaaattcaagtcttgtacagctgtggtttgtttgttcttagttttttttttcttcttcttgtgaattgggtgttttgggggatcggtaaggaaaattctaacatgcccatttcatgattgtggtttgattttctggttatataggaaaatttaggcctgggggtgtttaaagttgtttttgttgctggggttttttttttttgcgctggttaatggttcttttggattatgcagggttgagaaaattcttggtggggggaaattattttttttttt

SEQ ID NO: 43817 - DNA, 386 bp, Gossypium hirsutum
  Clone ID: LIB3272-040-P1-K1-C3
ctttcatcattgaccttgttgtctttcatgggaacttgactttcaaaccggggtgcggtctttgtcgtggggtgaaccttaactttatacatcctctgtttatcctactgtgcgagctacaattacctcatcaccaggggaaccaaactatgattgctttgtggacaaccgtcaataacatctaccgctctgaaaattcaccctgttcccatctctcttctcgtcatacctcttccctctgtaccggaactttccttactagtattcctcaaatgtaccacaccggtaggggttttaattcgtcggcgtaaaaccgcttcaacgtcaaagacccatggtcacacattggtcgtctccaatttcatcctttcaattcatctggattg

SEQ ID NO: 43818 - DNA, 391 bp, Gossypium hirsutum
  Clone ID: LIB3272-040-P1-K1-D1
gcagaggacattacctttgtttcttctaaaattaaaaacacaaaagtgagaaaaatggagggagatatggaaatgaaaccatccaagttcaagagaatttgtgtcttctgtgggagcagccctggaaggaagagcagttataaagaagctactattgagcttggcagggaactggtttcgaaaaacattgatctggtctatggaggaggtagtattggattaatgggtttgatttctcaagcagttttcgatggtggccgccatgtcattggagtgattcccaagacacttatgccaagagagataactggagaaacagtgggggaagttaaggcagtagcagacatgcaccaaagaaaagcagagatggctagacaatctgatgccttca

SEQ ID NO: 43819 - DNA, 340 bp, Gossypium hirsutum
  Clone ID: LIB3272-040-P1-K1-D11
ggaaatttcactggattttaaagaggagccaagggaagagaaatggtgcagggcgatgaaaatggaaacaccactatggtggtggtttgatactcctcagaatggatcaaagcgctctccatggctccaatccactatttatgaactgtaccataggacgaaagcgatgctgaaactgatagaggaagatgcagattcctttgcgcaacgtgcagaaatgtactacaaaaagcggcccgaactgatttgtctggttgaagatctctaccgagcccaccgttcacttgccggagcgggacgatcaagttaaaacagaccctggaactctcctactaacaac

SEQ ID NO: 43820 - DNA, 169 bp, Gossypium hirsutum
  Clone ID: LIB3272-040-P1-K1-D7
ccggttccggattcccggggggggccacgccctccgcagaggacattacccttggtttttctaaaatttaaaacaccaaatttaggaaaaggggaggatggatataaattaaacccttccaagtccagggtattttgtgcttttgcaggagccaacccagtagggaagg

SEQ ID NO: 43821 - DNA, 154 bp, Gossypium hirsutum
  Clone ID: LIB3272-040-P1-K1-E11
cttccacaggcccatttttcatgtcatccaaatcgcacttcatcggggagggggagagttaaagagaaagcttattttccactctgctaaagtatacacgaacatggtggattttatgctggagatctctggcgagcttacaaacattggtaat

SEQ ID NO: 43822 - DNA, 197 bp, Gossypium hirsutum
  Clone ID: LIB3272-040-P1-K1-E3
cttttggccaatcaattttctaagcaaatataactaacgacatttaggtgggtggggaattccaagccaaggactaccataatccttcaccaactccattaattaacggtgaggacttgtcaaaattctcattctatagggcttcaataatcgtctttattgccaccctcattatttttatacatcactgtttttac

SEQ ID NO: 43823 - DNA, 393 bp, Gossypium hirsutum
  Clone ID: LIB3272-040-P1-K1-E4
caccgcctctcttttcctctcagttccctgtcccaggtttcttttctccagatccgggccctgccccttttgctctaactccgatgctaccacaaacgaggaggatgatttttattttgacgttgacgatgatgggattgtttcttcagatgatgagacacaaccattgtctgaagacggtgtctttattgagataaaaaagcttggagggaattctcgtagaattcggtccaaaatcgggattgaagccaacctcgatactgtttggaacatcttgaccaactatgagaagttggctgatgttattccgggtcttgctgtcagcgaagttgtcgaaaagaaacacaaatttgctcgactttatcagaatggacagcaaaacttgccattggg

SEQ ID NO: 43824 - DNA, 379 bp, Gossypium hirsutum
  Clone ID: LIB3272-040-P1-K1-E6
atggaattcaatctgatgggcaaatgccaattgacaagaccgtcggagggggtggtgatgcttataacaccttcttcaatgaaactgcagctggtaagcacgtgcatcgtgctgtctttgcagatcttgaacctactgggattgataaagtgaggactagtgcctaccgcctatttttacacccagatcaactgatcaggagcagggacagacagctacaacaaccttgatcagggccactacactatcggcagagagatcgttcacttgatcttggaccgtttcaggaagcttgctgataactgtaccggccttaaaggttttcttgttttgaacgctcatagcggaggcactgcatcttggctttgctccctccttt

SEQ ID NO: 43825 - DNA, 199 bp, Gossypium hirsutum
  Clone ID: LIB3272-040-P1-K1-E9
cgctacttccgtcctaattttcaggaaaaaatcgccgccttgaggggaaggtcaacccactgtctgcgatcgtataaactcgtaacccaatcttttaaatatggatcgacccagattcgtaatccactccgtagaagtctatcatttggccaaacattcaggcaggacggttctcaaactcctttcttttttgggaaaa

SEQ ID NO: 43826 - DNA, 300 bp, Gossypium hirsutum
  Clone ID: LIB3272-040-P1-K1-F12
agctgatgattaattatacaaataataagaagaggcactctaatgggagggggtatgagaaggaaagatattaccatcttggcaattcaaaatctaaactcccagatgctggtgctttttttttttcctgcactggatgtgaaagaatgagccatttacttttggtgtaacaactgttgcatttctggatatttgcagacttaggtatctttccttctttaaaggatctttctaaaagaaaaaacaacttgtgtcatagcatttatcaccagaaatcaccttaaggagaaaattctaaac

SEQ ID NO: 43827 - DNA, 201 bp, Gossypium hirsutum
  unsure (1)..(201): unsure at all n locations
  Clone ID: LIB3272-040-P1-K1-F9
ggaagttagtttctcgctgtccagaagtcttttctttctacatcggggcgggtgtaaagaaagaggtttancttctttcagaatttgctatttccaatgaccaccttcctcgtgttatcaaaaagtatccagaggttcttgtttatgatttgtacaaaactctacttcctcaccacaatcattttatagagatgaggcttt

SEQ ID NO: 43828 - DNA, 230 bp, Gossypium hirsutum
  unsure (1)..(230): unsure at all n locations
  Clone ID: LIB3272-040-P1-K1-H6
atccaattatttttaattcaatttcattccccaaccaaattcaaaccatggggacagacccatatgggggttttaagaanatccacatctttgtgaaaacccttaccggtgagaccataacactcgaggttggaagcgtcgacaccattagtattttaaaggtcaagattcatgacaggggagggatcccacccgaccagtagcatttcatttttgctggcaaacagttc

SEQ ID NO: 43829 - DNA, 246 bp, Gossypium hirsutum
  Clone ID: LIB3272-040-P1-K1-H8
tagccttttcttattcacctattcaaaagaaccaaatatgcaatggagaagggtgtgcagatcagggttaaaggtaaatcaactatcgtatggagcatgggttagtttcaggaaccagctcgatgttaaagaagcaaagtaactgggtcggttgtgtaaagacaactggattaactttttcgacatcgccgaggttaatgccaatggtcgagccgaggagatcatgggtcatgcctattaaggaac

SEQ ID NO: 43830 - DNA, 413 bp, Gossypium hirsutum
  Clone ID: LIB3272-041-P1-K1-A10
aaaaaagagaaaaaaaaaagaaaattgagagccttctccactttttagctttaggggtaagcaaaaaatcctgcaaaagaaggggaagattcctatttctttctccttttttggggtgcataatgacagggttttggtttcactagttttggctgcctcgctttccaatcataggcgggtttctttatttctttctttctttcactttagtttcgatgcttttccttttctatttatcaaagtagtaaatttgggtaagtttttctttttccagaaagcattttggtgaaattaaagttacaggctttgattcatgaatctttcttggcaaagcatgggtgtggtctgagatatttgagggctagtttggcctaatgcgcttatgtttaatgggcctttttttctgccttttc

SEQ ID NO: 43831 - DNA, 433 bp, Gossypium hirsutum
  Clone ID: LIB3272-041-P1-K1-A11
ccgggatgccggggcgcgccacacgtacgcttgcaatctttagagagatcgaccacaatttatgacttgaatggttcacaggggatcgggcttattctggggcgggggggaaaacgcttataatatcaaagccggacttgtaactcccaaagacaccagcagggatccaattttcattaaaatcaagggaacgctggagataccctcaaggagcccgagccaggacagcacccaacttggagtacgtgttgccagtcgacggaacaaattcttcaggtgacagacgagcctgaggctggaagacgcagataatatcacttcctccaaaagcaaaggggggggatccatcacccttctgaagattgtgaccttcctcggcaggaatcttaactgaagaaacctggggcattccaaagggcaggacaaaaacctt

SEQ ID NO: 43832 - DNA, 382 bp, Gossypium hirsutum
  Clone ID: LIB3272-041-P1-K1-A2
cgcatacagaatttaaaattttcaaaaaggaatttctaaaaggtgatcttctttagttgtaattattctcttatttttatttatttttccagcaattatctttatcattttgcatgtaaaaacaaaaagaaagtcaaatcttaccttgcgaatcggctttggcctttgttcacttcgttgagattgaaattgaaaggagaatccaaaagcattatccatcaagcctcgagatggcgccaatgagatccctaatatctctaaaatactgagataaggacgagggtcagaggctgttgaatgtgttggttttcaaccttgtttttttttttctctttgagcaaatgatttgagatttgagatattttttttaaaaataaaataa

SEQ ID NO: 43833 - DNA, 235 bp, Gossypium hirsutum
  unsure (1)..(235): unsure at all n locations
  Clone ID: LIB3272-041-P1-K1-A3
cagtaccgnnccgaaatcccggatggacggcacgagccacgcgttcggtaatcgctaatcaggtgtgcgattaccgttcaaggttcttgatgtgagggcttggaatagcaatagtgaccggtgggatgtaaatattgtagaccgttaaaactatccttctcctaagataacacctacaaggttgctattttgtggaggattaaccttttgggccctgggctttgatgaacccaaa

SEQ ID NO: 43834 - DNA, 427 bp, Gossypium hirsutum
  Clone ID: LIB3272-041-P1-K1-A6
caggttactatttttagtagtactagaacagtgtttcgtacacgtttctctgcttcttcaacccttctccatgttactttcttactattggcgttggctttgctctgtctttgaacatccttttctctctctctctgtgaatattcaaagcatcaaaggaataagtgtaaagggtatttgtttacctacatggatgagtatggtggtaaaagaggtgccggtgggcttggaaagggatcaggtctggctttggacgatcatgttaataacagagaacgaaacgctcggttttgcaatcgaaatggatgtggtgccaggctaaactccatgaatgatactcctaacggctgctcaagaaatggagagggaataattgggagttcatctaaagtcaaccctactgttagtaacaatagaaaatactcta

SEQ ID NO: 43835 - DNA, 395 bp, Gossypium hirsutum
  Clone ID: LIB3272-041-P1-K1-A7
cgcatacagaatttaaaattttcaaaactaggtttactaagggagactatctttaaatgggattaggctcttaatgggcgttgagtgttgcaaacagttatccttattaaaaggtgtagaaaaacaaacagaacgtcaaattttaccttgcgaatcggctttagccttagttcacttggttgactttgaaactggaaggaggattcaatggctttattcatccagccttaatatggctccaaatagactcctaatatccataaaatacttgcataagggcaaaggtcataggctagagaatgtggtggtttttaaccctgtttttttttttttttttcaccaaaatgatttaagattttggaacttttttttttaaaataaaaaaaatttgggta

SEQ ID NO: 43836 - DNA, 218 bp, Gossypium hirsutum
  Clone ID: LIB3272-041-P1-K1-A9
tcggttattatgagtacctaatcaaagggtggtttcagttccgggttactcaggatggtaacttaacttattttcatgacatggttgaggaaccaatggggggagttaaacccatgcttgttcaaaaatcaatcccaagggaattggttttgtggggggaattcccgtttggccccaagggttccttagatccaaaaagggacacccgggatgttttt

SEQ ID NO: 43837 - DNA, 283 bp, Gossypium hirsutum
  Clone ID: LIB3272-041-P1-K1-B10
tcattctcttcttctttataactaaattcctattctcaatgatgatattcataatacaggggtcgtgttatattcatacaaggaaaacattaattataatcaatataaaattaagcttaacaagcagttgccttacttattctacaacattgttgacatattcaaaatcaaccctcaatatcattcacataatgattgttccaacataaaactatactcacatatataattttaattttttgttcttaaatcctatattcatcataccatctttttacctatt

SEQ ID NO: 43838 - DNA, 169 bp, Gossypium hirsutum
  Clone ID: LIB3272-041-P1-K1-B12
tttaaaataatatttacaacaatatttggggcgtggaacctttggaggagggatctataaaccaacttaccgcttacacctttcctgtccatacccttaggcatacctttatttatacctccttttttaacacaaactctactcccctttttaaagatcattcaatttg

SEQ ID NO: 43839 - DNA, 411 bp, Gossypium hirsutum
  Clone ID: LIB3272-041-P1-K1-B4
gattcaattgggttgttttagttcgaactaaagccagccgatgaatttaagacagaaaaagggtgacgtttgagggtttaacaaaattgggtgactgggaatggatactagcatggcatctgggaatccgtctttcgatgacttgcagaacaagggtgaggctattgatcatccacaaaatgaagacactatggattgtgagtctctaaatatttcttctcaagctgctgtaaaacctaatgggactgtgtctagcagtgttcgagagcttttggaatgccccgtttgttgtaattcgatgtacccaccaattcttcagtgtttaaatggtcacacattgtgttctggttgcaagccaaaggttgacaaccggtgccctacgtgcaggcatgaactcgggaatattaggtg

SEQ ID NO: 43840 - DNA, 166 bp, Gossypium hirsutum
  Clone ID: LIB3272-041-P1-K1-B7
tcgggcccacccctccggtttggttgaaaccaaaggggattccccgggggttccaggggtcttctagggtttaaaactctttttgggtggctgttaaaagatggtggttgccctcatcttttttttttcttggaaacaaacacttgttgttgccgctgttattcac

SEQ ID NO: 43841 - DNA, 299 bp, Gossypium hirsutum
  Clone ID: LIB3272-041-P1-K1-B8
actgctttcagttcttggctgatgactagatctccatcagggctatctctcgctcgagggtatattctatacgggctttacatgagcacaccaaatgaatatcgagctcaactggcaacaggcgccttttgttgtttgctctgatctgcacattacgaaccgtgggagattgaggtatatttcacaaaagattctctttcggcattggacttgtcctgtttttcacgagtcaggttatatgagaagaatatacgatgagataatgctgctatactcgaagaagcgggctcaaaaattaa

SEQ ID NO: 43842 - DNA, 254 bp, Gossypium hirsutum
  Clone ID: LIB3272-041-P1-K1-C11
ggttaatctgaagcggggtgcgttattggggggggggtactcatatcactcatatccaacccaatcttgtacaaatgtgcaagcaagctcaatctggcttttgctcatcaacaccgagctggaattcaaaacattaactcccgccctgaactcctctcatttgcaggtggatcgccctgcttgtcgtttgtgggcaaagtgtctgggttgttacaccattacccagtatatagccgagcgcttatcgaacggtg

SEQ ID NO: 43843 - DNA, 215 bp, Gossypium hirsutum
  Clone ID: LIB3272-041-P1-K1-C12
cttttattttttttcaatcaaatcactgtgtatcttttctatctctttctgtgggtacctgtgatattttgagctgtgatttttctaatccataaaattacaacaaaaggaatgctttttatacattcatacagaaaatgaatatacacccaaagtatctacatatctgctctatctgaattttaacttctgtcatctttcaacttacttgggtg

SEQ ID NO: 43844 - DNA, 117 bp, Gossypium hirsutum
  Clone ID: LIB3272-041-P1-K1-C3
attctatcgaatccttcgattctttctcgaagcttggatgctcagattaagccaactgtagagtttttatcccaatttttgaaacctgataaaatcccggtggctattaaaccatca

SEQ ID NO: 43845 - DNA, 179 bp, Gossypium hirsutum
  Clone ID: LIB3272-041-P1-K1-C8
acgctatgctttctgttccttttcgtttgtagatacgtaattttaacacctggagaagtgtatcccgattatgaaaaattcctaaactccccgcctgtataagccaatcatctccatggcactgcctttgaacctaagttaatttgttcaaccaatttttttcccattcattgaccaac

SEQ ID NO: 43846 - DNA, 343 bp, Gossypium hirsutum
  Clone ID: LIB3272-041-P1-K1-C9
tcgatgtcattcaaaaggacattaagaatcttcttattcttcaagagatataccgggagatgggcctttcttagaggggcaattgagtttaggtaaaatggtttttcaaaaagagatcctgggattgcagccctataccataaagttcttttttcttaggaaatcttgtttttttgagagcgggtgagaaccaacttttgaaaaacttaaaacccttttcttcaaaatggttggcacaaaggactttttggaggggatccctaacttaaacgaagacttcgggtacttgtttattccttacccctcttaatgttttgcaaggcttcacacttaaaacttttcc

SEQ ID NO: 43847 - DNA, 189 bp, Gossypium hirsutum
  Clone ID: LIB3272-041-P1-K1-D1
ctaggaagacttcttttttagggtttttggccaaaaattttagggttcacttaccatgggttattgtttgatattttccatttttcgtgggcacatttggtctttattctataaaaacgtacttttgatggggatggggaggtactcgctcgataggtttctttcccattgtgtcttggggcgaaaaat

SEQ ID NO: 43848 - DNA, 323 bp, Gossypium hirsutum
  Clone ID: LIB3272-041-P1-K1-D2
cttttatttgcttatttctttgaaagggtcaaaccttttttatgtttttggtcccaatttcgaagacctaattttggggggttttgattgtgtagtgggaggaaagaaaagttttcacaaaatggggtcttatagaatgctctccacaaagattgtggagactcaaatgcccatcatgggtcacatacaccaattgatccgcggggcgcaaaatgctgtgtcactcgctcacggagtgggttactgggaaccacccccacacgcgtttgatatggttaaagcactcgtagaggagtcttcagatagatgttatggggctcatg

SEQ ID NO: 43849 - DNA, 354 bp, Gossypium hirsutum
  Clone ID: LIB3272-041-P1-K1-F1
ctttgcgtttgcaccgtcttttgattcttcgtttctcatgttttttgttttgttgcattaattattctcctttttcttaatttattttcatcgattgatttttatatttatttcttacattttatttcttgaggggggtttcttgtgagcttatacaagaactaacaatgcaagcaactgaagctgttagcaatggagtttcaaatggttcttctcaggcaaattctcctgttccggaacccttagataacaagcctccaaggcccgaaacaagtgggcggcactctgatctttcacttcaaataccacctaaaccaataggatttggtcgtcatagtggaaagggtttacttc

SEQ ID NO: 43850 - DNA, 345 bp, Gossypium hirsutum
  Clone ID: LIB3272-041-P1-K1-F10
acgaaaaatagcatccatcgatagcgttacatcttattctccatactcctatcaggtattgggtgttcatacggatttcagttctcattgttctcatcgctatcctccaatacttcatatccaacctcatgcgctcctttcaagttccttatcctaagatctacaaaaaaagtcaacttaactttattactctgatttctcaaggtgctgcaaattttatccctcccaaatcttttagatctccgatgttttatatcatcaatcactaaattatattatctgttttcctcaatggccatactcaaaatgctcaaacacaaaatttctcttaccctaacatggctt

SEQ ID NO: 43851 - DNA, 431 bp, Gossypium hirsutum
  Clone ID: LIB3272-041-P1-K1-F12
cactcacccaacttgctgggatctaactagccggaaccactccataacttaagggatgggaaaccgttggttcagggggtgtaaggcaatatacctttcaactcctaaagctcgctcatacacacattacattcacttgtctagctcttaacatatatctattcaataacctgggggcttattaatttctttactacaaaacttctaattgggtggctttcaacatcccttctattcaaatatacaatgtaatcatccactgtgcacacaacattcctttttctaccttataagctaacctggcttcaaaacgtaatttattacttaccaactcctggtttcggcacttagattagttatgtctacaaaaagaaatcatcccaaggaggcatcccataccattgttacctcacctaaaaaagataaccttt

SEQ ID NO: 43852 - DNA, 329 bp, Gossypium hirsutum
  Clone ID: LIB3272-041-P1-K1-F3
agcagctatcaaagctttgggatccttccgcagcacccccaccaactaaaaaaatcagcccaagtgctttggcttccctttactttttttttattttccccaattggtcggttggggggatggaaaggttattattaatggtgaatggtggtgaccctttcctttttaacaattttcctctattaaaaaatattaaacccttggtggtaggctttggcttctctcatgtatcactgttttttaacatggggggcagggtaaatctctttaagaatttagataatggattccttagggtcgtttcttaaaaaaaaaaaaatttattataa

SEQ ID NO: 43853 - DNA, 401 bp, Gossypium hirsutum
  Clone ID: LIB3272-041-P1-K1-G11
aggaaatttggtatcaaaagctaggagttggggagtttcatggcggggcggaccaataatcttcattcactgagcaagatccatgcaggcttaattatggtggggtgagggattcgtctgatgacagcatcaatcaaagggggatatatagtagctgtcttaacactgatgcgagcaatggttgcagcaccttgattgatccttttgtttccagtgccattctagatgacttcttctcattggaagatgctgatttttcaaaaccctccacattgggtggttgggaactttagctcttgtcaggatggtcagtctcagattacctgtgttagccttgcagattctcaggctttttctcgtctagacttgcctgacaccttcggtggtaaaaggcgatcttt

SEQ ID NO: 43854 - DNA, 303 bp, Gossypium hirsutum
  Clone ID: LIB3272-041-P1-K1-H7
tatcacaccgtgaaacgtagccggtcggaaaacccagacaggcaaaagatgagcggaggggagctggagtggtgtgtgtcggttccaaaggttgaacttcatgctcacctcaatggttcagttaggaactctactctctttgaacttgcaagagttttgggtgataagggtgtcattgttttctcagatgtggagaatgttataatgaaagacgaccgttcgctacacgaagtatttaagcctgtttaccttatccacattctcactactgatcacttcactgttacaaggagtactaaagag

SEQ ID NO: 43855 - DNA, 412 bp, Gossypium hirsutum
  Clone ID: LIB3272-042-P1-K1-A10
ttttatagcagcatatctattattaatttttttataaaaccaaaaaatcaaataagaatgcgtaggataattgcgtgggtggttcctttttatataatttttatatcacaaattttttattaaaaaattttttaaattaatctactttagatgtaacttattttttgtttaaataaagcttctcgcaatgttaagaacataatataatgtttaatgcttacaaaattgtcaaatataatattttttctatggaggttaatttaaggcagctcattgcggatttttaatttttattgagaagtcttcctttactagttctacgttttcttatgaattaacatctttttgttcatcgatcttcttattttgatctaacccgactattaaaaaacttaaatttttaattgccatt

SEQ ID NO: 43856 - DNA, 352 bp, Gossypium hirsutum
  Clone ID: LIB3272-042-P1-K1-A2
tattttttgataatccggagttcaatcatctaaaagacggcctaaaatcctttaatcaggtctgagcttatgggtcggtgggcctatttcatcaaactaagattgatgtctgatcttgacactcaaagtgctactggcttagagccctgtggtgaagcagatgctgtggactcaggcgcgggtgcacaggagtatgtgcatattcttattcagcaaaggcatgggcgtaaaagcctgacaactgtccagggggtgaagaaagaattcagttataacaagattcttaaagacctgaagaaggcgtattgctggaatgcggccgtggtccatgaccctgaattaggacaggtga

SEQ ID NO: 43857 - DNA, 344 bp, Gossypium hirsutum
  Clone ID: LIB3272-042-P1-K1-A8
attatgtatctcttttcaaccatttgagaatttttaaggcatttaatgaactaggccgactttctagcttgtatggggagcatctggcgttgaaacacaaagacttagttataatttaccaagacttgtttaaacacatgtgaaattcttcactgctatatttccttcaatactgggggggataatagtacactttacaaacagctgttaatattacatgctgggaatataactaaaccgataggcatggtgataagagattctagatagccacttgtattacctgggaatggaacatcatgcggttgtatagtacaatagtggacacgcatcacagccatatt

SEQ ID NO: 43858 - DNA, 420 bp, Gossypium hirsutum
  Clone ID: LIB3272-042-P1-K1-B3
ggatgctagagagatattttgcagattctataatatttgtactctcatctgtattactcactcactctctttgttttgtcgccattaacaaagcagcaacaatgagtccatcttcttcgttaaccgccgcttcttcatcatcgtctctttggattctcaaaccttctcctgcttttaaatcctccagattccaatcaattcctccttcccttcctccgtcatctccgccgtgtttccgtctcctccgccgtgctgcatcccttccgcacgcttctgctactgattttgacttcgccttacatgatgctctcgaatcctctggaatcaacacctctcacgctagagaggcgaggaagggttttatttcgcaaattaatgaattatccgatgtcgagagagaaacaagtattagcataaata

SEQ ID NO: 43859 - DNA, 192 bp, Gossypium hirsutum
  Clone ID: LIB3272-042-P1-K1-C1
aatttttagagcagtacgtgtctggaggatgttctctgtatttgggcatgacagggtgcgggggggtcagatggaggccgtgaaaagaagcacacactaaagcgtgatgttcaatcccgcacttcatgctttacggatgtgaaaggccaaggctgttgtaacataacgacagaatgtaatcattctcaaaca

SEQ ID NO: 43860 - DNA, 387 bp, Gossypium hirsutum
  unsure (1)..(387): unsure at all n locations
  Clone ID: LIB3272-042-P1-K1-C12
ccggaacggaagggccgacccaccccacccgtacgatcaattttactcttatcttccatactttatttgtcttatcatctatnctctgggctgccgattatgctatgcgtggcaaaactaaactccccagatccttgatatagacatttgccatacacgaaaccaaatggtaaccatttattgagaagtaattcgcgctcatcatactatatattcatctttgcgacaccaatgaaacttgaatctacaacctgagcgaattatttgatactaccctctatccacatctcgaacattcgtttctagtgcatagatcatcattaatgtaccgcggacaatgatacagcatcaatttgtgggccgtgttagttaaaatcctcgacccaa

SEQ ID NO: 43861 - DNA, 387 bp, Gossypium hirsutum
  Clone ID: LIB3272-042-P1-K1-C8
attgaataataaatttccattatggcgttttgcaccgctctctggtcagaagcatacatggtttttaacagtggccgcagacaccacccataacgactgctaggttattgaggcgagtcctgtatgcagaggatgcggatgttgtatgttctgaagcgaatgcacgcgtacaaagactgtgcgagcgacactacttgcgaggagatagaaaatgcaaaattggatggacataacaagagggtttatgatattatttggatcggatgtgaaatgggctgattgcaactaaggatatttggaggacaggtaggattaattaccgattttgaatgagaaagaaccatttacttgtgccatctacttgatcaaacatgggtgaaaatccaa

SEQ ID NO: 43862 - DNA, 417 bp, Gossypium hirsutum
  Clone ID: LIB3272-042-P1-K1-D10
cggacacgtgggtgcattttatctttccttgctcttccccaacaaagcttacggtggactactactactagtgctactcaacaatggtgatgaatttatcttggagtttactatcatttactcctgtgatgatcacattcctcttcctctcaaccttcttaacattctcccatggagtttctgtttctctctctcccacacccctcgcacaacagctcacttcagggaaagtaaatggaagtgaggcaaagagtggggtggaactttcatgggggatcacaaggaggtctgtggtagaggtgccgatccgtcaacctctgccgccattggaggacactacttcatcccttgctttggctgctgaaaagacttacagaaaagatcctcttaatgggttcaagagatacacaagaggat

SEQ ID NO: 43863 - DNA, 422 bp, Gossypium hirsutum
  unsure (1)..(422): unsure at all n locations
  Clone ID: LIB3272-042-P1-K1-D5
ttctcactgccatgttttgccaaggaagtgtccattgtctctctcttgcttatgtgcgagacaatgttccggaagggcgacgagcttcancttttgggattctgtctggtattgggtcttgtgcatttgtctgcggaactctgtctactcgctttctctcgactgcctccactttccaggtttcgacagcaatggcgatgctttcagcggtttacatgagggttttcctcccggattcgatcataaatgataacctttcaaccccaattatctccgaaggaaaatctgatggtgttgctaatcaaaacgaggaaccggacaagaaaatgcaggtgttcaaaaccatgccttccatggaggatatgcttgccttgttgaagagcagcttgacattttcacaagcggcaattgtttcatttgtc

SEQ ID NO: 43864 - DNA, 404 bp, Gossypium hirsutum
  Clone ID: LIB3272-042-P1-K1-D8
gtcgatccatttcttggtttaactgaatttttctgaaaaccttcttctcatgggggagcgtctttaccaatatgggaaatacacatgtttttccaacttgacacaagttgatgacccacatgaggaggcaacggcgggccaatactgcatacaaaaaatccaaccttggaaatgaatggaagaagccatttgctggtttttcccataccaaaagcattgtacttgagaagataggttttgaaactattcaaccccactctgctattaagaagtgtgctacagtctaaatgattcaagaatgggaataagatttcctcatttcttccaaaatatggttgcttaaactacattgaagagaattttgaggtatttatatcctcatttagaccaaaggttcatacttt

SEQ ID NO: 43865 - DNA, 424 bp, Gossypium hirsutum
  Clone ID: LIB3272-042-P1-K1-D9
ataaaaccctcactttcttctcctactaattcatccattgatatggatatgggcggggagtcactatttccggtgtgattatcatctaatgaatatatctctctttctaagaagccatctaaggtgaaccagattgtcaacttcatacatcacaccatgtgtgatcgacataaaatggggccacaactggattgtattgtcgcttgctcacttttattgatcattcattaggctacttgtcaacatgcttgcgtatgttaaaagataaacatccaacctgcacataaagaacggatgagaagaacagcttctaatacataccatatatgtatgtggtatcaggggactctatcattcatcttaaattctatgtcacaagcctataaaaaactgactatctgatcttatttcatcaaacttaacg

SEQ ID NO: 43866 - DNA, 395 bp, Gossypium hirsutum
  Clone ID: LIB3272-042-P1-K1-E1
gttctttttcaaaaaaattttaacacacaaaaattggttctaacaatcaaacacaattgtagagggatattaatatcagcctgaacacattttcaaggatcatccttttttgtttcaaattttttctgctaagggaaaatgtccttctatcaggttggctcgaccattacattaccaccatttacaaaaacaacatcatataccttctcacaaaatattacactattgaccaaacatttactttatgaatactactcaccacccgaattgtacttacaaacacatgactcaagaatgaccatcattaattttgagacataaattctgggtataacagtggcagatcttctggggaaatctactgtgatacctattgtaatgggcatacaaaagtg

SEQ ID NO: 43867 - DNA, 336 bp, Gossypium hirsutum
  Clone ID: LIB3272-042-P1-K1-E12
ctttgatgcaaatctttttcacattaactttacctccaatgaactctttcaggagcagttatcgtactgtaactatgtataaattaccataactccagttcataaacattatactcaacatcaattaaaaattaagcatggtatggcactcaagactccaacttacgatctcaccgccattaaaaactatggtatctttgacgttcttgataatccacctcatggggagtctatctctagcataaaaatcgttttaattaatacaataataactattataaaaataattagggttactaataatactggtaagtcatgcactttattcaataatgc

SEQ ID NO: 43868 - DNA, 348 bp, Gossypium hirsutum
  Clone ID: LIB3272-042-P1-K1-E9
attagttttttctcttctaccatttgagaattcttaatgaattctatttgttaggcggactttgcagataggcaagatatcaactggtgttagtgccctaggacgtaactctaatttaccgaacctcgctaaaactgttgtgctctctgttgatctattacactttcaacattggacgggattatgatgcatttatattgcgctattaaattactatagaagggctgttcctgagctcctatagactagcgtcatgagcacttcaatgaccgacacgtgtgtttctttttgatggaactgtttatcaaaaaacagcttcttacaagacatgcgtagaacacaagaagg

SEQ ID NO: 43869 - DNA, 294 bp, Gossypium hirsutum
  Clone ID: LIB3272-042-P1-K1-F12
gaagaataggctttctggtgagatacataacctgttctcaaattccgtgtcttggaagattgaagacttgaatttgagtaataacattttctatggaagcttgcctcaatctttgggcaatttgacttatttgatgtacttggatcttcatggaaataaatttactggtgccattccttcagaaattggtaacttgatgcaactagagtattttgatgtatctggaaacagattatccggacagattccagaggaagtgtgcagtttgttcagtctgttctacttgaatctagc

SEQ ID NO: 43870 - DNA, 427 bp, Gossypium hirsutum
  Clone ID: LIB3272-042-P1-K1-F3
cagatggcgaagaggctaggtgaagtggggttagaagatttgtacagagcaggcgggggaacgcataagcataaaggaagccacccacatgtaccaagccatagcagcaagcaaagcctctgaccctgacccaagacgggtgtggaaagaggtggtgagtaggaaagtcttaaagccatggcacccgcatcacctgcatgaggtggtctactattctgtctatgccaactgggatgtcttcatcaatggccctcctctttactggtttccttccctagatgagtccaaaattacaaacctgggacgaataatggagattcatggcccaaagcttttagggactttatacaaagaccctattgaaagttttagcctctttcagaaattatctggtcagcatcctgagacttactggtctatctgtctt

SEQ ID NO: 43871 - DNA, 304 bp, Gossypium hirsutum
  Clone ID: LIB3272-042-P1-K1-G12
gttaattctccctgggaaactaaaattttatttttcctccaccacggtaactcgggggaccacactatatgttgtgaggagcaaataccccacaacccaattaacctgaccaaatcctcattactctttgcctgacgcttccgaaaccggaggaacctttatccccaaatctcctcagtaactttacacccaaccgcctagaaaccttccttgttgcaccgaactactgaaattgatcttctcatccccctaactgttacctgacatgatggtgtccttgcatgacttttgcacgaatttctga

SEQ ID NO: 43872 - DNA, 428 bp, Gossypium hirsutum
  Clone ID: LIB3272-042-P1-K1-G2
ataggtcttaaaacatgcctttccgtctgccacttgacgatgtgtacaagattgggggtgtgggaactgtgtcagacggccgtgttgaaacccctgtaatgaagcctggtatggttagaacctttggcccgtagggtatgaccactggagttaaagtctatgagatgcaccatgaagctcttacagaagctctcacaagggataatggtggaatgaatggataaaactttgttgtgaaggatcttaagcgtgtttttagagccatccaacttacgggatgaccttgctaaggggcgctggcaacttcacttttcagtgtattagtcaggaaccacactcgacaaattgaaaatggatattctctattcctcgactgtcacacgagatacattgctaagaagaatgatgagcttttgaccaaaattgac

SEQ ID NO: 43873 - DNA, 398 bp, Gossypium hirsutum
  Clone ID: LIB3272-042-P1-K1-G4
cttcacccggctcgttaccggactcaaccgtgtaaagatgggtcgggttgtcgtcggcgggggtgttactttgctcatgctgctgaccagctccgtctcgtaagctctactaaaacttacgactgatcaacaagtgggaaaacgctgacgttttggattgcatctgtatctggctcacacactgttagtgcagtgaccagcggataacaatcatactccagtaccgctgatgggtcaggatttaagaaagttccattgatcaatctccgatgcaacgccccaggagaagctatggcccctgcaatgttaactaaaccgtttacgccaagaaccgcggtaaacaggacggctatgatgagtctgtcagtgcgtgcggatctgtcctgcgctttccaggc

SEQ ID NO: 43874 - DNA, 350 bp, Gossypium hirsutum
  Clone ID: LIB3272-042-P1-K1-H2
gaatgaattcaaactgtttcacacagtagtcattttgaaggattcaagagaagcaagaggggggctactaaagggcggaaggggaggagttctgatatgccctacaaaacaagaaacaggagaaactgcctcggaatacgaaagctacatttgacaaaagaaaaaaggtacgttggaggatgttattgcccataagcaagcaattgcattccaacgcttctgtggaggaggtggacgaaccgaacaggctaagaagcgacattctaaaggacaaggccagtggcccgagaaattggaaaatttatgcacgaagtgatcaagaatgccgagagcaatgctgaggtaaaagg

SEQ ID NO: 43875 - DNA, 181 bp, Gossypium hirsutum
  Clone ID: LIB3272-042-P1-K1-H5
ctccctattaactctctcttcatctgcctttgatctgctctatatccctttttcgaggggatttagtggggtagggagaaaaagagtctctgtatataaagcgttagagacacatatattctgtaatcagtttatcttcattccctgaatgggtgtgaacacccccccaattttttttatt

SEQ ID NO: 43876 - DNA, 330 bp, Gossypium hirsutum
  Clone ID: LIB3272-043-P1-K1-A1
ccacgcgtacgtttttctttagagaaaatttattgaaaatatggttgtatgaattggagaggtccaaacccttttgtaaggtggctacctcctacatttttgaatcgacaaactcctgattgcttattaaattcccatgaggagacagaatattattaacgtcacaacactcgtgacgagattaatactaagactgtacttaaggttgttgaaaaccataatcttgccactacaaacaaccgactggttagccaaatatgccacactaggacccgcgcagcatacggaggagtcaaatgttgtggttgagagatttagaggtgataacat

SEQ ID NO: 43877 - DNA, 230 bp, Gossypium hirsutum
  Clone ID: LIB3272-043-P1-K1-A3
gagaaacggaaactgtcgtatctcttcgagacctaacacccactttaccggacctgacatcaaagtcgttcccaacactatggctccatataagagactagtcgctttattttcacaacgataaggtggctgtgccttgaaagctggtgtcgagaacttaatacggttcaagggccgggaatcttcataagatggcattaagacgcaggaaccttacaccacttgatact

SEQ ID NO: 43878 - DNA, 411 bp, Gossypium hirsutum
  Clone ID: LIB3272-043-P1-K1-A7
tttttctttagagaaaatttattgaaaatatggttgtatgaattggagagtccaaacccttttttaagttggctacctcctccatttttgaatcgacaaactcctgtttgcttcttaattttccatgatttgagagattttgatttacttttcaacacttttgaggagattaaataggaaattgcactaaatatggttaaaaaccataatcttaacactacaattaaaagacagaagagccaaaaaagaaaaacaagggtccgcgcagcaaacggaggcgccaaatttcgagggtgggttctttagaggaaagaacaatcaataaacagttggtgtggcgtctcgacgttgtgggggaattctctcttcttcttaaaattttccttgaattctctagtttaaaaggggaaa

SEQ ID NO: 43879 - DNA, 398 bp, Gossypium hirsutum
  Clone ID: LIB3272-043-P1-K1-B11
ctcaactcaactctgttcatcaaatcaaaaaccctaccttttcttttagttactaggaaagggtgatcagtttttttttttttctcacattggcttttgcccaatgcctaaatatcaatggtggagtccctttacctctccctctgcaacggtgcaaccttaatctataactagtagttaagcgtgtcattagttagtgttatcttggtgtgttgaactcgcaggcatggcggccttatcaaccagaggcctcgtttctcgtctccaccagcagttcctttccctatcaaggccatccgcagcagccccgacatccctcccttttcattccttaactagaagattattcagctctgatgccttgatggatggctcccagatcctccataaaccacccg

SEQ ID NO: 43880 - DNA, 200 bp, Gossypium hirsutum
  Clone ID: LIB3272-043-P1-K1-B3
acgcgcaagattgtatgtatcaccaaaatcaaagggttcccagacgataacacagaacggcgcatcccttctgtggcatcctaatatagacactgttgagcggctaatttgctgggaacaacaggccactaaacttggagcgatctctacgagggaccaaggtggtaggctcaggacagagagcgaaagcgggggaaccc

SEQ ID NO: 43881 - DNA, 196 bp, Gossypium hirsutum
  Clone ID: LIB3272-043-P1-K1-B4
cccagtcactagtggaagggttttgttttgtgtttcttgaacaatgcagagagaggggatattagaatggaggcgttcaacctatgctttataaacaacaaggcaattatagaggagaacatatttctggactatctcaagagctttaggttcttcccgcgaatcggggagtcatcttactaggcaaaaatacagt

SEQ ID NO: 43882 - DNA, 257 bp, Gossypium hirsutum
  Clone ID: LIB3272-043-P1-K1-C2
acgcggaagcgagggggaaagaaccaaacatctggcttattaactcaagagtggggcggggagacagagacagatcattatactactacccaaagcaagatacgctctgaaactggaagacagcagactatatgagggtgctacaagttttggcaggttccatgattctcaccgaacagctttcttgtacgcaccgtctctttgtctttggttagatgaggtctgatgcttcttcgcttaaaaaatcccacatattt

SEQ ID NO: 43883 - DNA, 379 bp, Gossypium hirsutum
  Clone ID: LIB3272-043-P1-K1-C4
aaaacaaccccttagaagacaacattaactactgtaatcccacttctttggaacctcaaagcaaaatctttgttttagttaatggctcaattcaccccacaaggacgtttgaagctgctctttcatggtgatggggtggaaccaaaggacccttttcattacaagcttgtcagcaatgtttttggtggttctggtgggctaaaatcacttcaaactcataagggcatgctcagattccttggttctactactagaagaagccacttttcttcttctttgaagaaaggcagcaaatttaatgccacggcaagcctgaatgtgagtgatgaaggactttatgatgaagaggattatgatagtgagtttgggactgatgagt

SEQ ID NO: 43884 - DNA, 372 bp, Gossypium hirsutum
  Clone ID: LIB3272-043-P1-K1-C5
gggacacttaacattattttggggcaaaaacacagaggatattttcccaggatggtcaggtggaagcttctgttcttatttctttgggttaatttgggtgtttcttctttcattcatggtggaacgactttcccacacaaagtttatcaagcaagggaccaatcatgtcgttgcagggcttttgcagacacttatgtatgcaaccagggtggctttggcttacttagtgatgttggctgtcatgtcgtttaacgttggtgttcttttagcttcggttggtgggtatgctgttgggttcttggtttatgggagtccggcttttaggaaggcagactttattcaatacgaggaatcttctgacattccaccttt

SEQ ID NO: 43885 - DNA, 224 bp, Gossypium hirsutum
  Clone ID: LIB3272-043-P1-K1-C8
gagaattttacttctttgatccaatgttagtacttatatccaaagagaggaatggggtagcgccgcctatgtaccattgaagatggcgaacatatgtctaaagatgggcgctttgaaagtgttgcttcacttgcattcagggagtaaggtgtgctccctttcgatgaatgcgaacaacgtgccgtgggaataccaatttatgctttacaggggatacacgagtt

SEQ ID NO: 43886 - DNA, 373 bp, Gossypium hirsutum
  Clone ID: LIB3272-043-P1-K1-D12
atgcatttcaagagcaggggagactatctggaaagaaagcttatttcttggcttgcccacattatctatcacttcttaacaaaggataaaacgaagtcattacattacctaaactcgtgggtgaggcttctaattaaccacctacagatagatatgttatcaactcaccagcagatcagaagctgattagatagactcaatcaaacagacgtaagtggactgttgcacatatcttccactagagagaagagaccgcctagttgatagattggaagcccaaatatttatttaaagctggactcaaagaaagaccgctttggaacaaatgaaaatagatcgactgaagatatacgagtatgggcagccttatttt

SEQ ID NO: 43887 - DNA, 253 bp, Gossypium hirsutum
  Clone ID: LIB3272-043-P1-K1-D6
ctaagatattactgcaaggaaaaaaaaaaaaaaccagacatgttttacaacactgcggcatccgctgatcttgttattacctttaacttgctgtacttaactttggaaagctatacctacgtgccttggccaccaccaccaacagaggcacaaggcctctctacaagagcccaccctcggtacctaaacagtcagccactttttccaaagatacactgaatatagaagcctttgcagaattgaagagctaaat

SEQ ID NO: 43888 - DNA, 257 bp, Gossypium hirsutum
  Clone ID: LIB3272-043-P1-K1-D7
caaaatccaaactctactatccttaatattatggtcagacaagatgggagatgagggatcggggatggctatgcttgtgctgatgatgcacaatcaatgatcagggatatgacaagcctattaatagggctacaatgaacaccatactggcctgacaacgtctagtttgagaacagacgaccaatttaatgtcatatgctagaagaggaccgctgaggatggagatgcctacaacggtgctctacagaaagataggc

SEQ ID NO: 43889 - DNA, 352 bp, Gossypium hirsutum
  Clone ID: LIB3272-043-P1-K1-E1
ataaaaaagaataaatacttctgcttggatgggtagagcgcacaccttcctctaatgatgcacctatggacggcactcaccgtcctctccgatctgactaaagtggcaggtcatgtgactgtgaggctcctcacatttgtataaatatagcgcccaaggcttatgatgtgccagcggagacatggaacccttgaccggcaaaacggttgaaggtcggttttttctgagagggcgttcgccttctgaaccaagggcgctttgtgtatcgagcatttagactttcaggatgccatacatgaagtgtgacgccatgtgacggcggagatgagcttattagtgcctgcaagcctgc

SEQ ID NO: 43890 - DNA, 239 bp, Gossypium hirsutum
  unsure (1)..(239): unsure at all n locations
  Clone ID: LIB3272-043-P1-K1-E5
cgaaaanagccccaaagcccaaccccnncccccanngaaannngaanaaaggaaaggggagggggcnggcnnncgcgaaacagaaaagacggcggcncgccaagaaagagacgcgaancccnanggggggccnngaagccgccggcaagacnaccancnngnanaagcccaagcacggggagaagggcacaaccaancccaccaaaggcgnnaacggggagaccggagaananaagaac

SEQ ID NO: 43891 - DNA, 400 bp, Gossypium hirsutum
  Clone ID: LIB3272-043-P1-K1-F12
ggcagcaaacagcaccattgttggtgttatcaacttcatcaccttgcttgtctcgattccagtcatcggagcaggaatctggcttgcaaacgaaccggacaacgcttgcgtgaagatactgcaatggcctcttataatactaggcacctcaatcgcggtcgtggcactgttaggcttcgtaggagggtgttggcgcatcacttggctcctcatcttttacctttttgcaatgttcatcctgatactagtgtttgcttgtttggttgttttaatctatgtgatcaccaaccagggttcaggtcacccagcaccaggccgcatatacttggaacatgaccttgatgatttttccggctggcttcgtcgaaaagtaacgaatccttacaagtgggatcggatt

SEQ ID NO: 43892 - DNA, 120 bp, Gossypium hirsutum
  Clone ID: LIB3272-043-P1-K1-F3
acgttacttgtacttgtgttagtcagagcctaatagacgaatgatgactctgctggggaacgagcagcgagagctactataggtagtcattgtaaaatacatgaaccgaaacgcggatga

SEQ ID NO: 43893 - DNA, 149 bp, Gossypium hirsutum
  Clone ID: LIB3272-043-P1-K1-F4
aaaatcgctaaagcgagatggctttgcagttatgggaaactgtgaaggagggggggacggcgtatacgggtctatttccggccactttttttacggtgccagctctgttatgggctggttactatttattaaaggggggattttggtta

SEQ ID NO: 43894 - DNA, 167 bp, Gossypium hirsutum
  Clone ID: LIB3272-043-P1-K1-F5
gggcggcggcacgcgcccgctaacatattacgtggggggaaaataactccaaccagacatggcttccaggctggggcatccggtgcggtgcttcttacctttaactatgtaggcttcacttcgggtagctctacctacgggccttgcccacacagcgcctacgagcc

SEQ ID NO: 43895 - DNA, 367 bp, Gossypium hirsutum
  Clone ID: LIB3272-043-P1-K1-G10
gtggagagtttgtgccctggtgttggttcttgcgctgatattgttgcaggtgctgctcgcgattctgttgctgctcttggagggcctagctggatagttcttttgggtagaagagatccaaccactgcaagcttgagtgctggtaattccaacatccctgctccaactttggatcttagtggtctgatcactgctttttcaaacaaaggtttcactgctaaagaaatgggagccctctcaggatctcacaccattggacaagccaggtgtaccactttccggacaagaatttacaatgaaaccaacatcggctccaccctttgcgacatcgataagagcgaactggccaagccatggtggagacaac

SEQ ID NO: 43896 - DNA, 296 bp, Gossypium hirsutum
  Clone ID: LIB3272-043-P1-K1-G2
ctttcataaaatctaccgtaggtagcaacttataggatggcgagagtcaggggctcgcaagatacacttacgagcatgtacaatgcccctaagaggggcaaacgacaggtgatgatcaggcctacctcctaagcgatcattaagcttatattgttcatgcagaggcatggttctatcgcgagagtatagtattggcctgagcacagatcactgagacatgcgggtgaatcaaccgcggggctgctcaactatggcactaacactccttacatagatgtctgagacaaagagatcga

SEQ ID NO: 43897 - DNA, 215 bp, Gossypium hirsutum
  Clone ID: LIB3272-043-P1-K1-H11
tcgggttgacatttgttcgagttatttggctataaaacccgtaaagcgcaagggagcttattggggggaattctttcgcggtacctcctcccaccaactttatttttttgagagggttcagtgggaaaatttctttttggacccccaaaagagggaaatttttctttgcggggcgaaacccaagggaaatcttggggggggccccaaagatattt

SEQ ID NO: 43898 - DNA, 312 bp, Gossypium hirsutum
  Clone ID: LIB3272-043-P1-K1-H2
tcgaattcgcgaagtatatggttatttctatagtgactatccttgtaaaggtgggagaggatcacacagatgttttgcatatactaaatgccatttatcataaaaatcattgagtatgcagactacctttctagaagatgttactgtctttgtgaaaatagttgattgagtgttgttatatatatcacactttgtggggattattccttagtcttttctattgtttttttaatatatacaacgttttaattgatttatttcttagagcttggaataatattttcgattggttttttaattttttaaatagtt

SEQ ID NO: 43899 - DNA, 117 bp, Gossypium hirsutum
  Clone ID: LIB3272-043-P1-K1-H5
acgcgtacgcgtggatctaattacaaagcttttagatgcaaattctctattaagaccctggccgcaaagagaagatgttaggctgtgagcaaataacgacagggaaaggcagtctat

SEQ ID NO: 43900 - DNA, 387 bp, Gossypium hirsutum
  Clone ID: LIB3272-044-P1-K1-A3
cttccttcgcaaacaatattggcttactcttgttctttgttccactcctggggggcctacaagtggaacttgggggtgctgcaccatcggaaccaccccaagttcaaccgccccgcgcctatcgtcatctcatgctcctcctcctgcacattcgatccttcttcaaccactagttcctccaataacatctccccttcaccccaaaagaaccgtcgccttgccgatgagaatatccgtgacgaggctcgacgccaccggtccaccgccaagaacaccctcttcgccaaatatgttccggtcaacgccggtcccgactgcaccgagttctactccctcgacgagatcgtttaccggagtcgttccggtggattactcgacgtttaacac

SEQ ID NO: 43901 - DNA, 329 bp, Gossypium hirsutum
  Clone ID: LIB3272-044-P1-K1-B10
cgcaaatatcacttaaccatgagcactgtcgcctaagtcatcttcttcaaaggggttttaacatccgaggatggggagcccttttaaatacagaaagagtgctcctacccaccctagacagatgactctcctattaagaactctccctacaccatgggacacctatgaccatctatggcctctaagaccaataccctcttattctggtaactccaacatcaatctcgatgcattgagtagagtcattgccaaaccggacattgttaagacagcttaaaagcaaaggctgatgttacctccaaacaccctggctgtatatacacttaacc

SEQ ID NO: 43902 - DNA, 347 bp, Gossypium hirsutum
  Clone ID: LIB3272-044-P1-K1-B12
gttgacctgagcgggaaagggaatcataaagggcatagtcactttaacagagggtttgatagtggggctgatacgctaaagtacaaatgatgcatgtggggctacaaactattctttagaagaacaactttagaaaggtctgtctacattaaggatgattgcctaatcatgaactggactggtggagcagtcacaactctgcttgagggaccaaaactgttttctattactgtcccgccatcagacatgggccaaaatcttacagctttgttataatccggaggtgggtgggatactgggtcaacgccgtcatgagacattcaacgcacataagttggatccttggt

SEQ ID NO: 43903 - DNA, 389 bp, Gossypium hirsutum
  Clone ID: LIB3272-044-P1-K1-B2
accctctcctatatattcaacctctacccctgccctacgcgtttttgtctaggatgagctctaactgaaacttacattcatccacttagccgtcatgccttcctcactgaagctccatccacctctcgccgccactattggcacctgcaaccagaaacaaaatcaacccatcacaaccagtaccgcgctgactaggtttttccctcttccttgcgggatctcgttgcctgacacggtggcgacgtaccatgtccacaccctgggacctaaccagtgtggttcagcagttgttcaagccatcgaagcccctatcgaaaccgtttggtcagaggttcgtcgttttgataaccctcaagcttacaagcaagttctcaagagctggcacatca

SEQ ID NO: 43904 - DNA, 253 bp, Gossypium hirsutum
  Clone ID: LIB3272-044-P1-K1-B3
atcaaagactagatgaataatcctttgggtatagcgtccacagaaaaatggggtggtcacagaggaggaggggcctaattaactcggacgggaaaccattctaaattgatcaatcggggacgcaggaacatgctacaaggaagccttatagcatggacgaatgctctaataacagggtaccggtgtctaatggatcgagctagatcttacatagggtgagcgtatgctggatgaaacgcggaaaggctactaa

SEQ ID NO: 43905 - DNA, 366 bp, Gossypium hirsutum
  Clone ID: LIB3272-044-P1-K1-B5
aaaaatttataataatgtaaatatattcctttcacctaaatttattaagcggaaaaaaaaaaaacaggcatagatgtgttatgttagtctggtcgattccaagtctaagttttggtcgatttcaagtctaagttttgaattaaaatattttcaactcaaattcttttgaatattttggaaaacaaaaagaactttgaaacataaacaaatcattcaatgttgtactaatctaatccagcattttccacgtttaagcatagatattcctatatttaatgcttgtaatcctaaaattgtatattgaaagtgggagtcaactttttcttttagctttttggtatttccaatcccacgctactctaaaac

SEQ ID NO: 43906 - DNA, 391 bp, Gossypium hirsutum
  Clone ID: LIB3272-044-P1-K1-B6
agcacttttccatctttggtaccttttttcaaccttcattctcacctttgggggctcctttggttggtgctgtgaaaacaaccacactacacacactttttttttttatatccattcccaaaattcattccttttcggaaccataatcaaggtttccggaagttaacaacaccttttaattggttctctttggccccaccccaaaaaggaggaggcgggaggttccagaaatgggctcaactacaatttccactgagatattcctcctgttttgtctcttattctctccaggtcgaggtgtttcaaagaaggtcgatatatctagtgaacaaaaggacataacaactccaataacaacgatgccaacaataattccaaccacgactcctac

SEQ ID NO: 43907 - DNA, 393 bp, Gossypium hirsutum
  Clone ID: LIB3272-044-P1-K1-B7
gattagtattactcaatgacgaccctaactccaaataacccagactccgtgtatgcttttactgttaaggatgctgagggaaacgatgtggatctcaatatttaccaaggaaaagtgatgttgattgttaatgttgcttccaaatgtggaatgacaaattccaactacacagaactgaaccaattatacgagaagtataaagatcaaggcttggagattcttgcttttccgtgcaatcaatttggagaggaggaaccaggatcaaatgttgagatttctgaatttgtttgcacctgctttagatcggaattccctatctttgataagattgaagtaaatggtgataatgcctcttcactgtacaagtacttaaaggtggtgaaatggggaatt

SEQ ID NO: 43908 - DNA, 220 bp, Gossypium hirsutum
  Clone ID: LIB3272-044-P1-K1-C9
ctcatatcttacctggatggccccaacgctaggccgtatgcagacatgtgaggcctagagggatcaaataaaaaccaaaagaaaagtgtggtcctctgcaaatctaaaggcgaagaatgggattatcttgagcaccatattggaggacatgacgacattaatctgccatacagctatagtttgatcgaaggttggcccttgagtgacacgctctggaaaa

SEQ ID NO: 43909 - DNA, 334 bp, Gossypium hirsutum
  Clone ID: LIB3272-044-P1-K1-D10
agctttttcgcaatcctctgttgtcaatggtactgggttgagtcattatgaaggaggaaaatttcagttgctggtcaataacaatctggcaaggatgctagcattaccctcaacaaggttgcttctattgtttggagaatcattaccctcatctaggctacctaatgtgtctaggaaagtttggggccagaccagtgtacggtttgtgagtcaagttaatcctgataatggacctctcactctttccagccttggtttcaaaagtggctttgagaaaacaaacaagatcaaagcggataaaattgaaaggcttgatgttcctagtgaagcacct

SEQ ID NO: 43910 - DNA, 285 bp, Gossypium hirsutum
  Clone ID: LIB3272-044-P1-K1-D3
ttataagtctccatctaacctgattgattacgcactagatctctattaaagcggcgcataccaatataataactaatctaatcccacaaaaaattgcataatcaaactccactgaaatactataataccaaattctattaaatctttttaaatcccaaaaccatttaaccaaataattaactcaagactcatagaaattctttaatcaataatcattctaataaaggcgatgatccttataagttctaaaaattggctcaagcttatgaggtgctgagtgaccca

SEQ ID NO: 43911 - DNA, 370 bp, Gossypium hirsutum
  Clone ID: LIB3272-044-P1-K1-D8
gagagtcgtttgtctgatgctgagacagtagctaaatcatttcctcagtggtctgtttctttatctgtgatatgtccgaagcagctttcaaagctaaaagcaatctacagtgctggaaagagaaacccccgagcatcagatccacctgttgacaatgttagaaaccctcagtttcttgttctgatttcagaaaattttatggagggctgtgctgctttaagtcgctctggagttccaagtttagcacccaatcagagtcctgtgaaaatggacatggcttctgtcaatgcggttgcagggacacctccgacttctgttccatcagtgaatggatctattatgagccggcaacctgtttctgctgtaaatg

SEQ ID NO: 43912 - DNA, 359 bp, Gossypium hirsutum
  Clone ID: LIB3272-044-P1-K1-E10
acccttccgaaattaattaattacaaaatggttattagccgagaccaagatcgattctggattacaacttttgtcattccaaataaagggactataatcaaaacacccaaagagtttatatataaccaacatactctgcttttcaagaactcatatatcatagagttcttcctttttgccttttccgacccagcaaggcacatatacaacagggagaggctccatgtctctgctgtcctctcaccatcagattccaattaaaattatgctcatatagacaacaaaaaagagggctttggttttaaattaatattacaaataataaattggggcctatactctagatctacgctctcgaa

SEQ ID NO: 43913 - DNA, 308 bp, Gossypium hirsutum
  Clone ID: LIB3272-044-P1-K1-E12
ctaagtttatgcttacatattcttcgaaaccgtatccaacgaaactggggggtgtcacaggctgataacataaatgccggcctcactcacataaacctggtcaggtcgactgcaatccacaccttggatctcatcatcaacctttccgatttctataatcagaactaggagccgatgaaatccaccgttaccacggggatgcatgccgctaccactgccgctggtcccgcctacaggaaactcaaggttctacctgatcatcatatcgaatctcttgttaccagatttagtgaggggtccacacaaat

SEQ ID NO: 43914 - DNA, 178 bp, Gossypium hirsutum
  Clone ID: LIB3272-044-P1-K1-E6
ggagacgattatgaacataatagtagcagtgatgaaggaaggaaagaggtgggtgtttaccctttaagttgttactattttggatctaaagaagccatcgttttcatggttgtaacggtttcagctcggatttctaggacgaactttaagtattctgctaatcgaaagaggacgccgt

SEQ ID NO: 43915 - DNA, 288 bp, Gossypium hirsutum
  Clone ID: LIB3272-044-P1-K1-E7
aaaagccctaattcgacagctctctcaggctctgattttgaccgataacgatgtcgaggagaaaggtctgggatcccaaggtggagaatactaccctcgggccagctgtccaagatggcgagcatgttttagggggggctcacattttggcttcatctaatgacacatttattcatgtgacagattcgtctggaagggaaacactggttcgcattcccggttgcttgatcgtgaaagctgaatgggatgagtgttccccttatgctgacatgctcgcatgacaagatg

SEQ ID NO: 43916 - DNA, 320 bp, Gossypium hirsutum
  Clone ID: LIB3272-044-P1-K1-E8
tcgccgccgcctgaatatctgtctcgatatctctgaaccaacaagcgtggagccttaccctgcgagagagaccatgtaggcataccagaacctcatctgccgtgacgagcttctgtttgactcattcccctacagggcaatcgagaatgggaccgctagaacaagttgaggcaatgcggacatgtgcaaggagctattgatgtagacattggtgccaatccttcagtcaacgatgccgctgaggctgaaggtgtcgatgaccaatctgagaacgttgtcgacattgctgacacttacaggcttcaggagcaaccctcttt

SEQ ID NO: 43917 - DNA, 234 bp, Gossypium hirsutum
  Clone ID: LIB3272-044-P1-K1-F10
aatgagctcactttttccttttccctctttcgagaccctacttttgggaagtgggtagtcttggatctaactaccaacaaattctttataaaatttcaacctcttttagagatctcactagactacctcctcaagctcataccaatttttgtatccgtatactcccataatcaaggccttttatcctcttcccgacccatcccccgtatttctaaccttctatccaacctatcc

SEQ ID NO: 43918 - DNA, 220 bp, Gossypium hirsutum
  Clone ID: LIB3272-044-P1-K1-F3
attcggggggcgaccacgcctgctctcaatttccccttcttcagagccgcattactcctttaaaaagcaacactgaatctctatattctgacacaaaattcctccaagaaaggacaacaggaagaaaaaaaagagagagagaaaaatacatcctttttaccctacgactccatatataagcaagttaaaataaatatttgttcgctcttgtccttacttt

SEQ ID NO: 43919 - DNA, 412 bp, Gossypium hirsutum
  Clone ID: LIB3272-044-P1-K1-G10
tgctttgttttgttttgctttgctttagcttgagaagatgcaaatggaagaaagaagagggaacatcaaagcagagaatgagatgaccatcaacatgaaggaagaacaaagcacacttgactggagagggaggccctccaaccctaacaaacatggtggcttccaagctgcttcatttgttcttgggcttcaggcatttgagataatggcaatagcagcagtggggaacaacctgattacatatgttataaatgagatgcatttctccctctccaactcggcaaacatagtgacaaactttgtgggaacaatcttccttttgccccttcttggtggttacctctctgactctttttttgggagtttctggaccatgctaatctttggctttgtggagctttctggattgata

SEQ ID NO: 43920 - DNA, 267 bp, Gossypium hirsutum
  Clone ID: LIB3272-044-P1-K1-G11
agctttgttttgttttgctttgctttaacttgaaaaaattccaatggaaggaaaaaaaaggaacctcaaaacatttaattcaatttcccatcaacttaaagaaaaaccaagcccaactttcttgaaaaggaagcccttcaaccctaacaaacattggggcttccaaacctgttcatttgtttttgggcctcaagcatttgatattattgcaatttccacaattgttgaacaacctgattacatatgttaaaaattaaatgcattttt

SEQ ID NO: 43921 - DNA, 298 bp, Gossypium hirsutum
  unsure (1)..(298): unsure at all n locations
  Clone ID: LIB3272-044-P1-K1-G3
gggggggccaacccgcccccaagcagcaggccaaaaaccaaaagcaaagaagcaaaggcccacacncnggcagggaaaaaacaaaagcgaaaacccaaaaacccaaagagcagaacggagggaacgaaaacccagcaaagcgcagcccgacccagagagaagggaagagaagcagcccccgggccgacgaagaagcgacgaaaacaacaaacgcgacgcaaaagacacgcgcaagcgcggcaacggagaccgccaaggcgcagccggcaaagggaacaggaccgcacaggaaacagca

SEQ ID NO: 43922 - DNA, 321 bp, Gossypium hirsutum
  Clone ID: LIB3272-044-P1-K1-G6
ttcacatctagaactactgctatggcgatggaaacgtctgttgctgggaaggcatcactggaaggttgctgataggatcttatgctccaccaccacaccagcatcatcgtcgtcgtcgccggcgtcacctagggtggcaagtccttgaactatcccctctgtcgagcgggctctacacattgccaagctgtattatctatgtttcttctggcgaacctcaatgcaccgctggttcagcggctttgattatgcatatttctttcctgtaccatctctctaatatgcgtatcagtcgccgctgttcgtcatattgccgcataa

SEQ ID NO: 43923 - DNA, 304 bp, Gossypium hirsutum
  Clone ID: LIB3272-044-P1-K1-H5
cctgagtaaaaaatctcaccttcctcacccaaatctccttctaattcaagagcgcggccatggccgttgctacctcttcttttacccgcaattctgcttccggtggttgcagctatagttgtttaccagcttgactcgttcgacgccgcccctatgcccctccacgagttgagtgtccccttcgagccgcccttgttgcataacgaccatatgctacaaggggcggagtttgtgggtgccggccagctttcgggaccggaagagtttgcgtatgattccagatctcaagtaatctacacgggca

SEQ ID NO: 43924 - DNA, 347 bp, Gossypium hirsutum
  Clone ID: LIB3272-044-P1-K1-H6
aagcaggtagccttccttttaccttatttcttctcgcttacaaaacagccatgggtgggaaaaagatgagctccgagcctgcgaccagacccgcttctgcaagcgagctcgatttcgcaaacccggcgcctgcactctaatcgcccacgatgtctccatctccgatggtgatctcactgccaagctcattcctaaagctccacacgaccaagaccaagatcagatcaagccgttgactctctctgtttcagtctaccaggatgggatcatgcggctcaagatcgacgaagatccctcgttgcacccacccaagaaacggttccaagtcgccgatgtggttatttccg

SEQ ID NO: 43925 - DNA, 225 bp, Gossypium hirsutum
  Clone ID: LIB3272-045-P1-K1-A7
gaagaagataaagagccagaattctaaccaataagaaataactcttgctcggtcgggcgcttgatactccaaatggatctctcacggaaaagaaaacactacgcacgcaggtccgatcgaatcagccaagaaatatggccaatatatggatcgatctgtaggacgaggagcgtataatgtattagcgcattacaagctgggaaaaacgcttggaattcggtcctt

SEQ ID NO: 43926 - DNA, 443 bp, Gossypium hirsutum
  Clone ID: LIB3272-045-P1-K1-B5
gtgattcgaatttcagtgttttgatatggaacaaaaagccttcaaacgtccctttgttgactgggtttacatctttttcctgagtcacctggtgttttgtcaactcgattatagattctatgacagtacttgtcccagtctcacagggattgttagatatggtgtttggtcagccattgctaacgatactcggatggcggcctctcttgttcgacttcacttccatgattgttttgttaacggatgtgatgcttcaatcttacttgatgatattgactcaacatttgtgggggaaaaaacagcaagtgttaatcaaaactcagtaagaggctatgaggttattgacaaaattaaggctaatgttgagaaagcttgcccatcaactgtgtcttgcactgatatattaactcttgcagcaagagaagctgctaatattgcagggg

SEQ ID NO: 43927 - DNA, 293 bp, Gossypium hirsutum
  Clone ID: LIB3272-045-P1-K1-C12
tttcaatcatcgccaccacctatggttgtggaattatcccagaaatacaggcaactatagctcccccagtgaaggggaagatgttcaaaggtttatgtgtgtgctttggtgtgatagttagcacatatttcagtgtggcaatctctgggtattgggcatttggcaatcaatctcaaccatcaattctttcaaattttatggatgaaaacaggccattgctgccctcttggtttttattgctcaccaacatctttactcttatgcaactggctacaatcactgtgatttacttg

SEQ ID NO: 43928 - DNA, 339 bp, Gossypium hirsutum
  Clone ID: LIB3272-045-P1-K1-C2
ctttgctcttaatcttaatatcttggatttatcctctccgctgcttgttggacgggattcgggatcgccccagtcaggttagttggcagtggccacgccgatgacaaaggggaggtggacgttacaatcttggcgtggaagagagtgggtccaattgtaactgacaggacaggacagaacagaacagaacagtacaggagatggcgttaagaataagcatttcatttctaaggattgaacagaacaggccaattgttttctttctaaggattgcctctactcagctaccctatttttgagttaattcgcatgtatgcatgaatgtcaatgttatcccaa

SEQ ID NO: 43929 - DNA, 379 bp, Gossypium hirsutum
  Clone ID: LIB3272-045-P1-K1-C3
cttatctctccaccggcgagctacctaattgagctacaccgctatgcatccatctaagccaggcaatctcttttttatggtaacggtcatgatccgtctctgcttcgccgatctgccttgttttcgggaggcaccggcatgccgaaacggcagagagtggccacaaacaacctggtcctccctcgacaaagagatccacaatgccttcattatgcatatcggtatgacattagacactgcttacctccggggctccggcgctggagtctattgcggtctacaccacgccacgtgtgcggaaaacatcgagtaccattttggccccacgccccgacacggagctaaactaacgcgcgccgatacctccatttttccttac

SEQ ID NO: 43930 - DNA, 419 bp, Gossypium hirsutum
  Clone ID: LIB3272-045-P1-K1-D2
aaacagaaggggaaagttctaaaattcaaaaaagtgaatgaagatggataaggaatagtcatgggctgtgtgccccaactcatcctacaccctttggctcaagactattacacactctatcgtattaaataataatggtacttgcaatccataaaggccattcacacaaaatataagagagactcaccctttctttttgccctgaccttctctctgcattctttcttctattgctgctcctttgaaatcatgagttcttgtgtcatcattactatgaaaagcctcactttctctctcactttgtttttgttctctttttacaattttagatacaaacacgtttttcccatctatataacacttggtttttttctcctacttgattataacaaataattttttatcaatttttttaaaca

SEQ ID NO: 43931 - DNA, 386 bp, Gossypium hirsutum
  Clone ID: LIB3272-045-P1-K1-D5
actttctggactgatctgtttgtcttctgcaaaacccagagtttttttttttcatttgttttcagaaattgtccaccatggctggtggagggtttggtaatgaaggagggaatttgaagagagctcatctctatgaatacaagattaccaattattttatatttgcttgccttgttgctgctacagggggatctctttttggatatgatcttggtgtttctggtggagtgacttccatggatgatttcttgaaggaattcttcccaaaaatatatagaaggaaacaagcacatcttcatgaaactgactactgcaaatatgacaaccagctcctcacactctttacgtcttcgctctacttcgcaggccttgtttctacatttgga

SEQ ID NO: 43932 - DNA, 169 bp, Gossypium hirsutum
  Clone ID: LIB3272-045-P1-K1-D8
tacataagctttttattattcagaacaaataaaaaaagcactttcaaaatgttgaggctatcatcgcatcatcatatatatcttacgtcacagaaaatcccatcaccgacccttcatattataacactactctaccacctaaagggaatatatcactacaacactacac

SEQ ID NO: 43933 - DNA, 383 bp, Gossypium hirsutum
  Clone ID: LIB3272-045-P1-K1-E4
aattcatcgagaaggagccgattattaccgaggccacacctatgcattactgcatgcggggcatgaagctcacgctgtaacttgcttccaccggggacaggactacaccaagaaatgagtcacttggtatgctagcattgaccacccacggggggcgaacacgctccctagaggttaaccgcaatgggaacaaatactactatagcgatagtgggaagagaaaacataacttgtgcgtggcatatatccgaatctttctagaaaaaacatagaacgtatctttgtgaagcacaaatcctgttagaacatcactagctgtttatagcgaaaacatattgtgaacgacacactaatttttgggtgggtcaataataaataaataa

SEQ ID NO: 43934 - DNA, 376 bp, Gossypium hirsutum
  Clone ID: LIB3272-045-P1-K1-E7
ggaacttgtgctggtgtttggacttggattacttggagggacagagtgatcatgggggggtcaactgcaatgtgtgatgggaatggtcttggtgggacttgcaatggtggttgttgaaagtgccgttacatctatatacatctgttatgcagaagacccttccttgattcgaagatgggatcctcagttctttaaccaaatgtcggagatgctgcaccagcgtctgcaacataggagtgcacgagccagggaagtattgactcagaaccagcttgacagccacatgcaagatacattccatctttgaaaacttacctatatcaagtgtaattcatactctaaaattactattccaaatatagaagagtttgttaat

SEQ ID NO: 43935 - DNA, 331 bp, Gossypium hirsutum
  Clone ID: LIB3272-045-P1-K1-E9
ctatttgcgagtatgttttggctcccttattttccttgaatttttaaccaattttggggtggtttttgtgatggattaaatcaactcgttaatatcaaatccgtaataattggttttgtacatccttttctggaaacttttggcattcattatgtatctctcctcatccagtgcgcttttatgatgtgcaagcagctgtgagaaatcacattttcattttgatttttttaaaatctactgcttttatttttttgttgttgttgttcagtgaattgtgtttggtagtagttattatttcttcaaaagaatacaaatagtattatattattac

SEQ ID NO: 43936 - DNA, 340 bp, Gossypium hirsutum
  Clone ID: LIB3272-045-P1-K1-F11
gcacgcgaacgatttacgtcgctaacactcaacggctaacaaatccaattgaggtcggtacggactggctacacgatcttatatataatgcatgccatggatgtggactcgagctgcatcgaaagactaacaaatgctccgaggactgacacaaagtgcgattgtatataacatagacttatggttgcgctttaccgggatctgcataggacagggagaggatgcaatgctgtgtatatgaagcacctctacatgtgccgagttaacaaggctgctttgcctctattcatacggacgggataaacacacggcattgaggacaaaagggcagttattggta

SEQ ID NO: 43937 - DNA, 379 bp, Gossypium hirsutum
  Clone ID: LIB3272-045-P1-K1-F4
acaaacttcaaatcattattgtcgcaccaaaaaacaaatctgcatatacaccgggagagggtagcgaaaatggcaagcgagggacctgcaccaaaacatttctggcgtggtatgccagaggaagactattaccggtgagcaaggaatacgcaacatcaaatgttacttctacactcacaacggagcgctcttcacccagagctacttacccttggataaaaaagtgaaggcctacgactacacgacccacgggtatgggtccgacactggctggctcttccagaccatctgcgtcaacttttacaattggggccacgctcgtttcgcccatgatcttatcggccatggtagatacgagggactaccctgctatttaagt

SEQ ID NO: 43938 - DNA, 469 bp, Gossypium hirsutum
  Clone ID: LIB3272-046-P1-K1-A11
cggtccgacctacccggttcgatccactccagtcgctctctgcgccatcttttctttttctttcttcttcatttaaagagaaggttgaggaaccctagctgattttttttttccaaaataaaattgaaggttgaggctttagctttccattgagaccatgacgacatcgtttgggagtgcaacgagtaccgtgatacccaacgatcccaagattagaatgcaaagctttacggggttgaaatctttgcattctatagctttggcgaggaatcatcgcgtgtttccacttcccttctccactccttctgttattagagctgtctctacgccagtgaaacccgaaaccagtacaacagagccaaagcgaagtaaagttgaaatattcaaagaacaaagcaatttcattagataccctcttaatgaggagatattgactgatacacccaatataaacgaggctgcgacacaa

SEQ ID NO: 43939 - DNA, 453 bp, Gossypium hirsutum
  Clone ID: LIB3272-046-P1-K1-A12
ctgcgcgtgcttatgccatccctctctcactaaaaacactacactgggctcaaacccctacgggtgaccattctttgcggcaccaccgtacatcccttatataactatccaacactgtctgcattggagcccatacggaccgaatcgtatcacccgagcggcgaggattttgtgcacatcgacaaccctaaccctaatgtcgtggacgcattgagcgatagcatcgtgaacgttgaaaaggaggaggaggaagaagaacaagaagaagcagcatcagcatcataagagatccgagacgaggattattactacagaaacgatggcgatgtttttaggagcgaaagatcttattcctcggagagaaggaatgttgaactcccggaggagattgcgaggagcgttattgttctctcgagccaatcctcttctgagggcggaaatttcgatgtttac

SEQ ID NO: 43940 - DNA, 317 bp, Gossypium hirsutum
  Clone ID: LIB3272-046-P1-K1-A2
gtttccttaaacccaaaatttcccccttcattggaatcttggtggtactgttagtctagaattacataaacaggctctgtggttcatgatcttcaatattaccagcaccaatgtcatccttcttgcaccaacgacccatccagaatccattctcgaacgcctatccagtctccccacgttcttcatcaacctcgcaaagacccatttcgatctttagtccaacaggcctaattatcctcctctccctaatggtaatcctcggagtgttcgtgccttggtctggcatggcccgagccaccttttctaactctaaaaag

SEQ ID NO: 43941 - DNA, 162 bp, Gossypium hirsutum
  Clone ID: LIB3272-046-P1-K1-A9
gtcggcagcactcctctcaattttctgtagttattacacctacatcctacaaccataagaaacttggacttaactggctaaagacttggaaaaataaattctggaatcttggctttcctataccagaattgaccccacatgtgcttaattttgcatttgggc

SEQ ID NO: 43942 - DNA, 373 bp, Gossypium hirsutum
  Clone ID: LIB3272-046-P1-K1-B1
ggcaccttaacttattacaatatccaaaaacaatccaccctccaccgggtacttactgtgtgagggggcatgcaaatcttaatcaaaactctcactttaaatacaactacctttgaagtccaaagttcctattccattttcaatctcaaaaccaatattcactacaaaaaaatttcttccaccataccaacaaaaatttattttttctccaaaacaactttcattattcataactcttccccactataatatacaaaaagagtctacatctccatttttgtctccttcttccgattttattctaatctttttaaaaactcttaccaaaaaaccatcatttttaaagttaaaagatccaatcctttacattttt

SEQ ID NO: 43943 - DNA, 154 bp, Gossypium hirsutum
  Clone ID: LIB3272-046-P1-K1-B10
ggatccgtaacctagggaaaaggattggctcttagggctgggcacggggatcccagaggggaacacttctggtgacggcgcactgatcgagctgctcccgcagcgagagcggttctacgtgtgccggccgggggacagactgggaacggctccc

SEQ ID NO: 43944 - DNA, 218 bp, Gossypium hirsutum
  Clone ID: LIB3272-046-P1-K1-B2
acacctgcaataccggtccgggactcccgtgccggccgatgcattcaaaaaacttaaaaaacaaacgttcatctcggttttgccctaaatcagggttctattctgcgccggcgccggatcaactttataggactccaaccccatacaaatggtatccaatggcctcagccgcttcgaatccttccttcttcctctcatcagtcacactcaccatgctc

SEQ ID NO: 43945 - DNA, 418 bp, Gossypium hirsutum
  Clone ID: LIB3272-046-P1-K1-B6
aaggattctacccgccgctcggtgcgaattactctccacaaaggcgcgggcaacttggccggcgcgggcgctgcacctacaacacatacccttgggagccagaagctcctactaaaaaatgcaatctgactactgtcgcatacttcacttctaaccccgattctgacttaaatgcggtcaatcataatccaccacacggtagcttcactccactagcttttaaaccaaatgcgattaccaattatgcgaatcaacggttcctttcgaactaggctgaattacatattacgacaccgccatcaataggggtaaactaacttgctttatgacgatctaaccactaactacgttccctattggtggataaacaaacacacacttgaacaaatttgcttcacatttattgggggaaccaaca

SEQ ID NO: 43946 - DNA, 241 bp, Gossypium hirsutum
  unsure (1)..(241): unsure at all n locations
  Clone ID: LIB3272-046-P1-K1-C1
aacgaaaagagtttgcaagttccaggttccttttctgctttagtatgaagtcgatgcatagtcatattaggttgtttatgtgcttgcttgttagtccctttattggaataaaactagtcatgtaattgaatatgcattcttctggttatatggtggaatttggatttggagagttatatcactggttctttcgggttnaacctaataaggctacatttataggaaatgttgatttaaaacc

SEQ ID NO: 43947 - DNA, 475 bp, Gossypium hirsutum
  Clone ID: LIB3272-046-P1-K1-C10
cgggccggaattcccggggcgcgcgacgcgtgcgcggggatatcactgcgagggaaaaaaaaaaaaaccagacatgggttccaacactatgggagccgctactctggggcttaccttgaacgtgggtggtcttcactttggttagctctacctacgtgccttggccaccaccaccaaagaggcacaaggctaccgacaagagcccaccctcgggacctaaacaggcaggcacttgccccaaagatacactgaaactagggggttgggctgatttggtgggctcggtgcgcgttggtgttggaccggccaggaccaaatgcgggtgactcatttcgggtttggctgatctcgatggtggtggttggctttgcactgcgtattaaaggtaatggggtgggggggaacctaaacgggcctgggtcattggctttgctcctcaattcctgggaaaagcgaatggctgctgggtacaaat

SEQ ID NO: 43948 - DNA, 352 bp, Gossypium hirsutum
  Clone ID: LIB3272-046-P1-K1-C6
ctcaaagccaatggcttcctctctcaacagcacccactctatacggggcttcatttattgatcttggtgctcttcctccccccccactaaactatcactcccttccacttacctatctttctcttcttctatcaaatccctcgctatctctcctctttctcaccacaaaatgtgatcggctgtcacaatatccattaccggatggtttacctatctacccagtccaaaatgctctgcttcagatcctgatcaccagaagagtgctatatacaatatcaaggatcttttcaaatacaaattctgccatcctattctgattcaactaaggtgacacgatactggtacctacaac

SEQ ID NO: 43949 - DNA, 164 bp, Gossypium hirsutum
  Clone ID: LIB3272-046-P1-K1-C8
tgtgaatcagagaaaaccctacctttgtttgtttatctaatgtgtttgaattggaacgggcaaacaaagggaggggttgttaatgatcacagttatattaccaaaaattatacatctttgaacatttgctaatgtaaagcgggtaaaaaggactgtagtatgaa

SEQ ID NO: 43950 - DNA, 180 bp, Gossypium hirsutum
  Clone ID: LIB3272-046-P1-K1-D10
gctggactcacttttctcttcacccttacttttctcctcttcaccttatctcaagcccgcttcatcacatgggaatcccaacatgatgtcacccccaaaaaatacgatacccattttccctaaatccacccccaattccccattctttttcccaacgagaaaccccacttttaacccccc

SEQ ID NO: 43951 - DNA, 375 bp, Gossypium hirsutum
  Clone ID: LIB3272-046-P1-K1-D2
tggaaatccaaaaatctcctcctgaaattcactcaatcttagtcttcccctacccttcggttctctttctcattccctctgcttctccctccttcgccttcggaacccttcattttccagaagcttgaaataccatttctctcttttggtatttcaaatcccccccccaaacaaaaaaccctaattttctctacaatcctaaaccaagtctctttctttcttttccggataaataatcagaatcgatgtgaattggagcggttggaattttccttctacagaattactcctcatctggtgcttcagattataataaactggatttaatggaggctaacgtttgtgacattaatcacttaaatgccgatgttcttt

SEQ ID NO: 43952 - DNA, 300 bp, Gossypium hirsutum
  Clone ID: LIB3272-046-P1-K1-D3
cgtgcggtgcacaatcatagtgtaaaatagccatgtattttatcttcttgtcaccctacattgttgtgctacttctcgtgggtactccaaactgggctactaactataataccgtgtatttgacaagcattaaaaataccattgatgactcttggtattacaaacccccttcatggacaaaaaaccccaatactgtataaaaattgaaccaattacatgtatttatttctcgaaaaataatcagaacagatgtgtaattataacgctgtcttttttcttactcaggagtactcctcatct

SEQ ID NO: 43953 - DNA, 442 bp, Gossypium hirsutum
  Clone ID: LIB3272-046-P1-K1-E1
ccgagagtagcgaatccctccaccgtcgctgtaaattgaaaagccaacctctacccttcctcttttgtcacggacaagaaatctaagtctggctgttcaatccctcaccacaccattattatatcccctctggaaatcttttgttttcttagaccatatagatcgcaaaggagttaagaaatgggggctgggcgagaagtagcaatatcacttgatggagtgagggacaagaacgtgatgcagctgaagaagctcaacacagctctcttccctgttcgttacaacgataagtactacgccgatgctctcgcttctggcgaattcaccaagcttgcatattacagtgacatctgtgtcggatcaattgcttgccggctggaaaagaaggaaggtggggccatccgtgtgtacatcatgactttgggtgttttagcaccatatc

SEQ ID NO: 43954 - DNA, 346 bp, Gossypium hirsutum
  unsure (1)..(346): unsure at all n locations
  Clone ID: LIB3272-046-P1-K1-E3
ataccgggtcggggcacccctcccgacccactcgtacccaaaagattcttactagcatatctttgctatttatcatcaattttgtgctgatnaaatagctcgaacagtttcttatattatcactantattaataataattactacgacttggttgagctttcttaatactttcagcattgtcctggtaaacctataaccaacatctctattactcatagacgtgtcacaacagcttttcaacaagctgataacccaagatttttgtctacattgttacaaacaaattgtggatataataatgccaactaacttggagcattttatttatacactctttttaattaa

SEQ ID NO: 43955 - DNA, 366 bp, Gossypium hirsutum
  Clone ID: LIB3272-046-P1-K1-E9
acaactttagagataaatatgcacttatgaacgtacttaacgtttaccatcaatttagggtgggctacttggggcaccacgagcttaaagttccatcggcacatacttcatactatgcaaaatgggtggtggaatgtataactcattccagagatgggacctcaatatttctaacgccggcaccactcatgttacagtcccaccacccttgacaatatccacattaaagcgatacttgacggcaacgaatatatacatcttgaaacatcaacaatatggaccccaagctggatggtacacattaatggatgctactcatcaaaatggcgtacaatgtttgggactcatggtcttaaatcatataac

SEQ ID NO: 43956 - DNA, 437 bp, Gossypium hirsutum
  Clone ID: LIB3272-046-P1-K1-F12
atcccttctccttcttctctgtaaactgtgaagtccaaccggtaggggcaagatagcagcgcggtctacccttatgcgcatttaacctccacttccatggccctcacttccactctccctctatactgtcatcccaagaggcttgtccttcaagcgttggcttcggaccacggccggtgtcttggtcatgattccgcttggtttattactaggagacgttactccagggccaagagattggtggtagcggcagcgtacggtgcggagggaggcgcgaggcggcgtgtttacagacaggcgcaggcgaagcagcctctcagtagtgctccgaagcagattgcaacctttgtggcgcccgctggcgtttttatcgcccgtacttttgctgacagtgttatggaaattgggggagaaactccttatgccgaagccatcta

SEQ ID NO: 43957 - DNA, 447 bp, Gossypium hirsutum
  Clone ID: LIB3272-046-P1-K1-F2
cacgattcccctacaacgacgcccttctctaacgtacgccctgctcgttcttaaccaagggctccccagattcactcctcttctctggaaccacgctcagcttcacctctgtgctgacggtggcgccaatcgcttgtatgacgaaatgcctctgttcttccctcaggaagatgcctctgatgttcgacgcagatacaagccggatgtaattaaaggagatatggattcgatacgaagagaagttcttgagttttatgccagccttggaactgaaattgttgataaatctcatgatcaagataccactgatctacataaatgtgtaacatacattcgggactctgcttcgggtttggataagtctaatctttgcattcttgttgttggagctcttggtggacgatttgatcatgagatggggaacctaaatgtcatatgccggttctc

SEQ ID NO: 43958 - DNA, 306 bp, Gossypium hirsutum
  Clone ID: LIB3272-046-P1-K1-F9
tcgctcttacaagcctactttctcttctgagtctttcgtcgcttttgcaggcgatgattctcggggctactatgatatgcactgataactcaaagtggatacgaaacagcgattattctccggctcgatatcaagcccaagctgatgctggtaggcttatctgtggtgctaaaacccaatctaatccggagtatacgggggggattttgactatggcgggcaaaagagtacgtgtttggctacttctactatcgatcttggaaaaatattggtttgcattcacggtcttgaaatgtggggggagat

SEQ ID NO: 43959 - DNA, 335 bp, Gossypium hirsutum
  Clone ID: LIB3272-046-P1-K1-G1
ctgctctcccactgtttctctcttcacccttggccatacatctccaaagaagtggattattttaaccagagaggaaacaagaaacaatttggagccatttagttaaaaaaatgaaggggaatttctagaaccccaaaatgaaggtgaaaaccccaatataatatgtttcaaggcttaccaccctttttctcatcattttaactcagtcatgattccgatgacaccccactcccaaacgccgacccgtggagtgggcggggaggagcacggactagcatgaatcagcgcaactagggccgcctctggtcaaaacagccagccacatgcgcactctg

SEQ ID NO: 43960 - DNA, 328 bp, Gossypium hirsutum
  Clone ID: LIB3272-046-P1-K1-G12
gacccacgccttccctttctagcttcagaaaggaagagtctcttcttgtttacaaaaaagggaaacccctagggacgaggaatgaatgaaaaagataacacaagtatcacactcataaccaatgcacatgaacttagttatcttgaggcttttgtattcactcctttcttctcccctttgaatctgtttcttctttaacaaaataaactgaattcttatcttatagcctagtgacagactaatacaaaaaaaatacacccattagcatattttgaaggacaatacaccttatcgggcttgctttagatttttgctactatgaagtact

SEQ ID NO: 43961 - DNA, 375 bp, Gossypium hirsutum
  Clone ID: LIB3272-046-P1-K1-G5
gtgggatattatatcttttttcatttttcccacacttttttgaaaacccattatctaaggatccactatggggtgtgctgtgaacttccaaatatctccttctcctccactcggtgggtgtaactcctggtagggggtgaccgccacgagacgcacgtgaaacctaaaagatccgagttaatggttggaaggtttaagaaatgtgtgggctgataaccaattgccatatgaaataccatatgggggcatagcgtactagtcatattaccatccacccaatttggtgcggtcggtggggtaaatcacaaaagaaactgattcgagagggcattaactaaatctgcaacattgattccaaacacacttcggtaggtg

SEQ ID NO: 43962 - DNA, 252 bp, Gossypium hirsutum
  Clone ID: LIB3272-046-P1-K1-H6
ttacgatccgtcctcacccttacatcccaaccctcccttacactcctatacagtgcaggatttgttcaactgcgctcaacaccttttcgcctgtttacttctttgccaaaatcaagatcttccctttcttttaccagcggaaccacttttcgcctcactatgctatgatctccgaaacaaacctaccggtcgaactctacctccaatacaccaccgtgcaatacacactccaacttgatccgaacaaccctt

SEQ ID NO: 43963 - DNA, 400 bp, Gossypium hirsutum
  Clone ID: LIB3272-046-P1-K1-H9
aggaaattcattcttatctcacgctctcaattatgtcctgcacatttcttttggccatgggcttaactcacattgatctttaccacagttcacttggaacttgttcattacccttcctctttgccttcatcaacaagagattactctactaataatcacacacaaattggtgaaagaagcagcattttctttggttttttttttttaatggtcagtaaggaatccatgttgcagagatctggactggctagacattctttgagaaaccttcatggcggcctcctccattgaaaagaaaaactccaactaccactgcttttcttgtcttaaccggttttctcatggctgcttttggtacatattcctcatggagtgacacttctgggggttttttcgagca

SEQ ID NO: 43964 - DNA, 338 bp, Gossypium hirsutum
  Clone ID: LIB3272-047-P1-K1-B2
ctgacgcgtgggtttcagtcgtcttctcttttagtcctctcgatcccaaagcaagctctggatcgcgaatctgtcccagaagacacatatttttgtgcaaacccttactgataaaaccagtccccttgaggtggaatgcttcgatactatagattacgtggaggcctgaatgcatgacacagaaagcattcctgcagaccaacagaagcttatttttcggcggaaaacagctcgaggatggtcgaactgttgccgactacaacatccacactgtgcccacccttcaactagtgctttggcttaggcgtgggatgcaaatgtttgtgcatacccttacg

SEQ ID NO: 43965 - DNA, 280 bp, Gossypium hirsutum
  Clone ID: LIB3272-047-P1-K1-C1
gtttgtgcacaagcatcttaaactcaaacatccagagcttgtgatggagctaacggataaaatgcgtgcagagctttatttccagaactacatgaatgatccaggtgcacctggtgctgacacctgttatgcaacaatctggacctgatgacaagcctatgagacgtaaaatgttggaaaaccgtttgaaagatgagcgtagctcacgtagcgaacgttgtaatcgagctaatggaagtgatagatatgataggcatgggaaccctcaatgaagtgattt

SEQ ID NO: 43966 - DNA, 356 bp, Gossypium hirsutum
  Clone ID: LIB3272-047-P1-K1-C2
cgacgaaggattatgctgtggagttggtagattctttcaagtgtgaactggagctattttatggcaaaaacccattggcgtcaaaagacttgtctcgcgtagtgaattctaatcactttgcccgcttgctaaagcttttagatgaggacacggtttcaagtcagattgtctatggcggtgaaagagataactcgaacttgcagattgctgccactgtcttgcttgatgccccacaagattcactgatcatgaacgaacagatatttggtacattgcttccaattatcacgattgacatagtggaagacagctctgatctgataactgctggaacaaaaccactagcagcatgtatg

SEQ ID NO: 43967 - DNA, 349 bp, Gossypium hirsutum
  Clone ID: LIB3272-047-P1-K1-C4
gatggtgtaaaattgggcgtcttttctaatagggtgggggaaacatttgttcgaatttggagaggggggtcaggcttacacaaaaaggtggatatggtatttcttggggactccattactcagtgctctccgggtttgaaaggtgatgtttgtgatatctacccttcagctattcaagcagcactttctcgtctactcaacgcttgagcttcccctggacctaatgcacaagaaaatcgtcgacaatgcttgaaggttttgagactgaagctggaaagaagaatccttccagaatctgttgttcggcaccatatacgagaacttgattcccttagtgtttcatcttctg

SEQ ID NO: 43968 - DNA, 375 bp, Gossypium hirsutum
  Clone ID: LIB3272-047-P1-K1-D5
gtcttttctacactaaaatagatgctcgccactgttgcgtctttggctacttgtcttgcagttgaatctgttgttcctttgtgttattcatggcacacactcttggtcttactcaaccagcaaacatagaactccccaagatctcttttgctgcaaaagagatcgatgtggcagaatggaaaggggacttacttgcagttggggtcactgaaaaagacatgaccaaagatgaaaactccaagttccaaaacccaattttgaaaaaattagatggcctgttgggtagtctcttagctgaggcctcttttgaggaggatttcactgggaaagctggccagtccttggttcatagacttccaggccttggctccaaaa

SEQ ID NO: 43969 - DNA, 379 bp, Gossypium hirsutum
  Clone ID: LIB3272-047-P1-K1-E10
catgtctcaatattaacagaaaaaactgggtgtttacacttatgagtgcgagatagctacatgaatcccaccagctaaaatgtacaaggctcgtatccttgacggtgacactgtgattcagcagattcttgcttaggcttacaagagtgatgagtacattgaacgcaatggtgaggccgctagcatcaatatggtcactgtcggagaaggtagccacttcaaatacgtgaagctgactgttgtagcagtacacaaagacaaatttgcgtatatttacagtgtgatcgaacgtgatgcattgatggataagctagcgatgatctattacgagacgaagttagacacctctccggatgggggatcagtatgcaagactact

SEQ ID NO: 43970 - DNA, 377 bp, Gossypium hirsutum
  Clone ID: LIB3272-047-P1-K1-E11
ttcgatctttgcaacctccggaacctattgtaactgctgagaaagtgttcgatgaaatgcctgtgacagttatgactgaggaagacgaagaaataattagatccgttgtttgtggaatgactccttcatattctttggaatctaaattagatgattgcaagagagcagctgcgatcaggcgtgaggctttgcagagaataacagggaagtcattatcaggattgcccttggatggttttgattatgagtcgatattgggacagtgttgtgagatgccgggtggttacgtgcagattcccgtgggcattgctgggcctttgctgcttaatggaagagaatactcggttcccatggcaaccaccgaatgatgcttggta

SEQ ID NO: 43971 - DNA, 390 bp, Gossypium hirsutum
  Clone ID: LIB3272-047-P1-K1-E7
tttgttttcaattttccatgtctttcttctctgttaaacaaccttagaaactcatttccttaattaccaaacataaaaaaaaaaccttatttttaaacagcaaaagaaaatggtgtctcctgagttttctctttcgcagttttctccaatggcgaaacctcgaaaccggtcgttttggtgtctgtccgatagtttcctttactgcggcggtgtctttttagctatcttattagtatgttcattttggtcgtttttcacaccgaccctcaacttcagctccgccattaccgacccgtcgtctgcggtcagctgtaaggaaagtgggttcggagttaacttaaaatccgacccgaaagacctgaccttctacgacgacccagagttgagtta

SEQ ID NO: 43972 - DNA, 364 bp, Gossypium hirsutum
  Clone ID: LIB3272-047-P1-K1-G2
gacgcccggaaggggccgggatttattgggggggccccacgcgtcgggttccgacccatacactggggcttttttctgttttcaccgattcaaaaggaatttaaaaggaaataaggttgggccaaataggaattttaataccgttctggaaactcttgccaagaaaaaagcagacgcaatggcccgacagcggttagacagaggcgatctatggaagaacaaggctcgcgttttgcaactccagctcatgcagcgctttacgttgtaaggcgatcgccaccgaccttcagtccttgctgatcgttacttggccaagtcggttcagcgccagtttattcaccacttgcgccatatttttcttttc

SEQ ID NO: 43973 - DNA, 383 bp, Gossypium hirsutum
  Clone ID: LIB3272-047-P1-K1-H10
gcggttcacagagacatcaagcctgcaaatttgctcgtaaatcttaaaggggagcccaaaataacagattttggcataagtgctggcctagataattcaatggcaatgtgtgctacctttgtcggaactgttacatacatgtcacccgagcgaattcgaaatgagagttattcttatcctgctgatatatggagccttggtcttgctctctttgagtgcggaactggagaatttccatatatggctaatgaaggacctgttaatctcatgttgcagatcttggatgatccttccccatcaccgccaaaacacaaattttcaccagagttctgttcatttatcgatgcttgcctgcagaaggatgcagatgccagaccaacagc

SEQ ID NO: 43974 - DNA, 282 bp, Gossypium hirsutum
  Clone ID: LIB3272-047-P1-K1-H11
acccgtgcggagtaaaggcccatccccttagccacaattcctctttctctggctggggggtccgaatctacggatttgcgggtggagcaggccagagctcatctctgtgcttcaaagctcgctcctttattcctttcaaaccctttcctttttataacttgattacattttctcagatctgttcttgttctctatctctctctctctccaggctcctgtacaggtagaatgctcttcttccttagcgatgtgatctttgtcgctcagtcgacatggcttcaa

SEQ ID NO: 43975 - DNA, 356 bp, Gossypium hirsutum
  unsure (1)..(356): unsure at all n locations
  Clone ID: LIB3272-047-P1-K1-H7
tgcttgttcccttggttagctggagggttcttgatgagtgtggtttggagttacatcatagctcaagaattggttggcttattgatttcacttggccacatacttggaatcactcagtcaatccttggtttcacagtccttgcttggggcaactcacttggagacattgtcaccaacttgacaatggcattgaatggtggtccagaaggggttcaagtggctatatcaggctgctatgctggtcctatcttcaacactctctttggtttaggcatgtcattggttggctcagcctggcatgggtacccttcacctgttcagatccctaaagacccgtatctncttgaaacactggg

SEQ ID NO: 43976 - DNA, 345 bp, Gossypium hirsutum
  Clone ID: LIB3272-047-P1-K1-H8
gaagaagaagaaaaaggaaacaaaagatggcaattgagattcctagagtgaaacttggaactcaaggattagatgtttcgaagctcagattggtatacgctagtctgacacggcactacagatcgaatacgaaccgagaaagcgtggcctatcaatcctctagaccttcggaaatgggagactgacatgtgtacaaacgtcctctatggacccaaaactaacgaaattctcgtccgaaaggcattgcatcatttttcactcctgaaaaggcagttttctacaaaattcggagttgaaaacaccaagtgtcggattgtccacccaccaatggcgcacgtgagctgg

SEQ ID NO: 43977 - DNA, 397 bp, Gossypium hirsutum
  Clone ID: LIB3272-048-P1-K1-A11
attccaaaattccttcctgccgactgccccgatttcattcccaaatcttgcttctctaaccgcgcagaaaatctggtaccagcaacagctctattctgattctccagaactttcattttgtttcctcgcttctctcgccgagaagacctcctttccaccagcatccatggcccgaattttgggccttttcctttgatgattgatgtatattttttcccgttcaagcactccgccgaaaaaggtccctctacggccgtcgactcctcacgaggattatttgccgggttcaccaaatccgcagatttttgggtcgccataaccgcgatgacccgggattcggcaattgaatccatgttaataccacactcgggtaacgttgcattggattgaaatgctt

SEQ ID NO: 43978 - DNA, 331 bp, Gossypium hirsutum
  Clone ID: LIB3272-048-P1-K1-A4
catacctaaaattactttctgacgactgctccgatttcatttccaaatctggctgggctaaccgcgcagaaagtggggttccaggaacagccctattctgattttccagaaccgttattttgatatctcgattctatggccgtgaagaccttcttcttaccaacatgcatggcccgaattttgggcgctctttctttgaggatagatgcatatttatataccgttcaagcgacttcgacgaaaaaggaacctttacgggcggggactcctcacttggattattcgccgcgttcaccaaatccgcagattttgggaacgccataacacgaat

SEQ ID NO: 43979 - DNA, 337 bp, Gossypium hirsutum
  Clone ID: LIB3272-048-P1-K1-A8
acgctcgctgcacgtctgactccgatcatagccgtatgtactctgccatatgggcctttacacacgagtggactggaccaaaaagggccacactctccctggcgtaataccgtctctctatgcacatcttactaacaaggtttctgggcggtcttacctaaatcctcctcacggaacaaattttctaggggctaaaacggcctcatcggggctgtacagacgagtggcaagtggtcaatattggcataccaattggttggggtaatgaaatgtattgcactgggggtgcacgtgaatccgacttggtaaaatactccgaaagggagacttctattga

SEQ ID NO: 43980 - DNA, 126 bp, Gossypium hirsutum
  Clone ID: LIB3272-048-P1-K1-B1
ctatatgctatttgacacgatattcctatcatctaataagctatataactcagattcaatttggggactatggcactgcggaagccatccgtctttggtaccggacgccctggaacagaggacaaa

SEQ ID NO: 43981 - DNA, 339 bp, Gossypium hirsutum
  Clone ID: LIB3272-048-P1-K1-B3
gtggagagccttctacagcgagcgcattcttagttccaggtctctacacggggatcggtacgacagccagagaccttcttttcaagggatgataagaccgtccacacctacactctcaccacctgctgtccaactggagttgctattacatctgccggaacgaaaaaaggcgaactctttttggctgatgttaacacccagctgaagaataagaatgtcacaactgatattaaagtggatacctacttcaatctgtataccaccataaccgttgatcaacctgcacccgggctgaaagcaatatttagcttaagagtccctgatcagacgtttggcaag

SEQ ID NO: 43982 - DNA, 292 bp, Gossypium hirsutum
  Clone ID: LIB3272-048-P1-K1-B4
gggcgacccacgcgaccggcaggcagccaaggcaaggaacaaggtgcacgagacaaggaacaaaccagaggcagagctgatgaggcagcgcaaggaaataaaagcgcaaccaccccaaccacgagagccaaggacaccgggggggcccccaagaagcgcaccaagagaaaaggggagaggcaaagcaaagcacaaggagcgacggggaaacaccaaaaacagaaggcggccgagagggaagcttataagaacaagaagcccacagccgcgggagccccggcccaagaagacc

SEQ ID NO: 43983 - DNA, 268 bp, Gossypium hirsutum
  Clone ID: LIB3272-048-P1-K1-B5
atttaatcccctcccaacaatcttagggtctgtaattctcctataacatgcatagggtttgtggaaaagtgaggggggtcatcaatcttaacctctttacctatttattgtactcttttttttgtctaaaccccactaaacccccaagcaactttcaatatggtgttgttgggctaggcttagtatcagctatgactgattcaactcatacacaccaatttatgtgattagcttccattcacaacatccactcctatacctattttat

SEQ ID NO: 43984 - DNA, 408 bp, Gossypium hirsutum
  Clone ID: LIB3272-048-P1-K1-B6
atagagtcatttgcaaggagcagtgtgacgatgggaagagggctcaaaggcagtgaactgttgcctttcacggtacagttcctgagaggaagatggtttgcactttttgcatcctttctaatcatggctggagctggtgccacatatctatttggaacctactccaaagagatcaaagctgcactggattatgatcagacaacgctcaatctcttgggcttctcaaaggatcttggtgctaacgttggggttttttccggtcttattgctgaggtaactcccacttggtttgttcttctagttggtgctgcattaaacttcggagggtatttcatgatatggttagctgtgactggtagaatagccaagccaaaggtttggcaaatgtgcatttacatctgcatagga

SEQ ID NO: 43985 - DNA, 207 bp, Gossypium hirsutum
  Clone ID: LIB3272-048-P1-K1-B8
gttgcttcggaagcatggacttcatagttactatgctggttttaggtttgggcattttccgcagcaaagcgtttgtcctttgcggtcctaagccagaggactcggaccttttgtcattccaatatatggaaatgttcccattgacttacccaacatgactgattgtaccaaactgactttaacatcgcatgcaaagaccgagctagg

SEQ ID NO: 43986 - DNA, 389 bp, Gossypium hirsutum
  Clone ID: LIB3272-048-P1-K1-C10
caaatgggcatccttggcaatgacccttcagttcaagacctgttggtgatggtgttattggtattgacctgggtacaaccaactcatgtgtatcagttatggagggaaagaattccagggtaattgagaatgctgaaggagctagaaccacaccatctgtggttgccttcaaccagcagggggagctaattgttggaacaccagccaaacggcaggctgtgaccaacccaacaaacacattttttggaacaaaacgtctgattgggagacggtttgatgatgctcagacacagaaagaaatgaagatggtaccttataagatagttagagcttccaatggggatgcttggcttgaagccaatggaaaaacttattccccgagccagatt

SEQ ID NO: 43987 - DNA, 241 bp, Gossypium hirsutum
  Clone ID: LIB3272-048-P1-K1-C7
tcgaaaaagagaaaataggaggagttttatggttggggatgaagagtaccactgacatcatatatgttatttacatcaaattttcccattaccttcatatcttctgttgggtcctcttctctttttaattgcgtttgctttttttgtttgtggtttaagggaaaaaaatacttcctttttgtgtttccacttggttttggggtgaaatgcgcccacattaccttccgattttaaaccttgg

SEQ ID NO: 43988 - DNA, 232 bp, Gossypium hirsutum
  Clone ID: LIB3272-048-P1-K1-C8
gctttagaatccatcccttcttctttgtttgattatagcaatttcctatatcaatgggcttttgctattgcatctgctggtattaccagtggctccattgcagaaagaacccaattcgttgcttatcttatttactcgtctttcttgactggattagtttacccccttgtttcacatttatttttggcggctgatggttgggctagtgcttttagaacacatgattttcttt

SEQ ID NO: 43989 - DNA, 322 bp, Gossypium hirsutum
  Clone ID: LIB3272-048-P1-K1-D2
attatcgattcttcttgattcatcttttcttttaatctttcttctttaaagactcggtataagcagcacgaacagtatcaccacgacatgttaatatgtttaatctctgtgctatcttagacgaatactaatgggagatgctttcctttggattgctctagacgttttctgatatcaccgagagttctcgtttaaactggggaagctgcaggagtatttttagggtctgcaagcatcgcagcaaaagaggctcctaaccatggctaccgaggaccaaattgaaagtgcaggatttcctactgatcttaaatgcggtgtgcgc

SEQ ID NO: 43990 - DNA, 287 bp, Gossypium hirsutum
  Clone ID: LIB3272-048-P1-K1-E12
ctcctccgaatttgttaaatccttaataacattccactcactacgggcaaccttttttcactagcatggggaaaacacgttggatgggagctgggcgctagctgaggacccatcctatgcggcagatgaggctctgataaggcatacataaagtctgaccttggaaatgaatggaagaagccattttccgggtcttgccatgctacaatgtattgttcaacagaagattggtatcggggatcagcaatcagactttgacatgcgaaagtgcgctatagttcaggttt

SEQ ID NO: 43991 - DNA, 407 bp, Gossypium hirsutum
  Clone ID: LIB3272-048-P1-K1-F6
tgcaagtgttagggtcagcaacgagctcggatcggaacatcccaagtcggcggcattcacggttgctgtcgtgactttggtctccctcataattgctgtagtggaagctgtcattgtatttgctctgcgagatgttataagctatgcatttacggaaggtgagacggtggcaaaagcagtctcggacctatgcccattcttggctgtcactcttatccttaatgggattcaacctgtcttgtctggggtggctgttggatgtggatggcaagcatttgtagcctatgtaaacgtgggatgctattacgtagttgggattcccttgggctgtgttctcggattcaagtacgacctcggtgcaaagggaatatggtccgggatgataggaggaacaatgatgcaaaccc

SEQ ID NO: 43992 - DNA, 409 bp, Gossypium hirsutum
  Clone ID: LIB3272-048-P1-K1-G1
gggagtgggagccgaatagtgtttccttgtagagccttctcactggcattcctagtcccttctttcacttcctcaactcaactcagcctcaaatctttcctcgcccacacctctcttccccccactgccttctcttttctccgaatggcttcctcatcatcttcttccctcaccaacggtaacgatatcaatccttccaatgacgctgctgccccttctcccccctccgcttcctctgccatcgattttctcactctctgtcatcgcctcaagacgacgaaacgagcggggtgggtgcggagagatgtacagaatccggaatcaatagctgatcatatgtatcgaatgggattaatggctttaattgcttctgatattcctggaattgatcaagacaagtgtgttaaaa

SEQ ID NO: 43993 - DNA, 393 bp, Gossypium hirsutum
  Clone ID: LIB3272-048-P1-K1-G8
gtttctctctctttctctctccagaaagggcaaaacaaccctgaagaaccgggtacacccccaatagctccatggacgaggatgcgttgaacatgcgtaattggggctactatgaaccgtcttttaaaggacatcttggtcttcatctaatggctgagcgggacaaaaagcctttcattcctgggcgtgaccccaacaatctcatggttactaccaatgcttttcacccaagggactgcattgtctctgaggcacctcctatccgcatgcaatatgttagggatacttggattagccagagagagaagcttttcaacatgttgcctcctgtcactgccccgaattacgacattctttcagaaacttcggctactcattccatgccaatttggc

SEQ ID NO: 43994 - DNA, 285 bp, Gossypium hirsutum
  Clone ID: LIB3272-049-P1-K1-B1
cgaagacacatcgttcgagactctcctgatgttcctgatactcatcaactgcgtggatggatttacatcgttatcagaagtggaaacccaaagtgtatggggacacctaatacgagtggctagcaccaaaaccaacgtgtgggctttgcacgggggggggtgatactagaatgttgtttcactccaacgtaccagctgcaaagcactaatgatgctgaacgacaattgttggacaattctttttcccaaccaaccttgcctctctgtcttactcaagaccgattg

SEQ ID NO: 43995 - DNA, 388 bp, Gossypium hirsutum
  unsure (1)..(388): unsure at all n locations
  Clone ID: LIB3272-049-P1-K1-B2
tcgcactgtccattttttccaattattgttccttttttttattgtttttaattaagatggctgcaggcaaagtggtatggccagcgatttcttgctcttcttccggtctcgacggtggccagtcagtacctcttcccaaggccggcttcgtgaagttaccgttaccggcgccgttgacttctttggggttgagtagtggcaacaatgcgaggttgagctcggtgcaggcgactgaggaatccaccgtagtgattacggatgatcgcgttgctgttatttcaggtgaaaatctccgccagatggctacgaacattgtatggcacaaaagttcagttggtaaacttcatcgacaggagtngcttcagcaaaagggtngtgtcatatgggt

SEQ ID NO: 43996 - DNA, 197 bp, Gossypium hirsutum
  Clone ID: LIB3272-049-P1-K1-B7
ccggaaattactggccggcccaacccttccgtgcactatatatttttaagaataattgatggatttttttattgtttataaatgagatggctgcaaacactgatctaggtcagaacctttattttatagttccggtcattatggttggcagtaagaaaaccttccctaggaaaacttcatgaagttactttaaccgg

SEQ ID NO: 43997 - DNA, 329 bp, Gossypium hirsutum
  Clone ID: LIB3272-049-P1-K1-B8
ccttatctcaacctgagacaaaatcggttaactgacccttctgatccgagatcggtattggctgctaaaatcctctgaattttcatcaatggcgactaaaggtcaaggcataacttgcaaagtagcccgaggcttatgaaccgggcaggccactgaccattgtggatgatcaggtggctgcgacacaagccggggtggttcgactcaagactgtcttgactgatgtgtgacacgactgatgcctacactcgaagagcaaaggatcctgtgggcctattgccgagcgatgcttggacatagaagctgctgcaattgtagaaagtgcaaat

SEQ ID NO: 43998 - DNA, 373 bp, Gossypium hirsutum
  Clone ID: LIB3272-049-P1-K1-C3
gtgagatttatggttttatgtttacagtttactctctctttatatctgtttttatttaagagattattacggagattttttttctaaaaaaaccagtttactgctcttatacagttatacttatgaagttgagcagcaaaagagaaaaatggaaaaaggagggataattggagtggagaaaagaatgagaaaaggttaaaagctttgttggacttttttttcttttcatttatttgatttcgatttgagatatgaattatggattgctgagttttttttcaaaaagatctgtttttagctgatgggttttggccttgagtggttaaaagaaaggggaatggccggcagtcatgaagtcaacctcaatgagtgc

SEQ ID NO: 43999 - DNA, 387 bp, Gossypium hirsutum
  Clone ID: LIB3272-049-P1-K1-C9
gccttttcttctttcttctctgtccttccattttcaaaaacatgactgtcttgttctttttctattcttcatcttatagctttgtgggtaccccttaaaaggaatatcaattttgacttcatttcctagttttttttcctctagttattcagctttcttgggtaccctttactctcattctagttttttttttcgtaaattttcctgttattattccgtttggtggaggtagttggtaattcggttgaacttgcactgtggagaagaaaaaataaagtaaaacttggggggtgttcatggaaattgatctgaaccatgcagtaaacgaggtggagaagactgtactttgcaatgggagctgtgaaaaagctagtgcttgcgtttact

SEQ ID NO: 44000 - DNA, 381 bp, Gossypium hirsutum
  Clone ID: LIB3272-049-P1-K1-D1
aaatggttgaaactggtgaactaccttatgaggagataaaatctagaggtttgggtaaaaagagagtgtagggtattgcgattggaagagaaaaaatggggatgggtctcgggcacgttatatggacacagtgagtagctcctcctgcagcatagattacaacatgatgctgctgttattacggcgaataatattgctgctaggtcttgattcattataagcatgactcttatcgatgctggacgaaaaccaacttttcctacgtgggtgttgaacatacatgccggtaatgagattgtgttgagggtttcatttgtgtatgcaaggttgataaacttgtgttgctcaaagaggattgattggtcggagttggaggcacat

SEQ ID NO: 44001 - DNA, 387 bp, Gossypium hirsutum
  Clone ID: LIB3272-049-P1-K1-D12
gagaaactagtgcaaaaagattttactctattgcgctagatgtttaagtgcataaagtaaactcatgctcgggtaatcgactcttaggtctatgtcgaacatatggtagtcaaaaacactataacatctcatataagaagcgcgtggctaggttaatgagaaccacaccgtctctgttaactatgaatataaaccacagtcttcttaacctgtctaatataatcaatctggatagtatacccggccatactggaatcgatctcgtctttagtacgcgtcttgcgaggaagaggactgacgagagctctaagtcgatattgagaccccactagtacaacgtcatgttacttattcacgcacttaacatgcgaggcacactcaccattt

SEQ ID NO: 44002 - DNA, 392 bp, Gossypium hirsutum
  Clone ID: LIB3272-049-P1-K1-F1
atttctttctcctaaaattctattttattttttactctttttgttttatgttactctaatctaatgccatggagagtagtaaccggagacttacgcttttcgagcagatgtcagcggtcgacaacggccgcaccactctggccgctgctttcactctcgatgcccttttgggaaacactaaaccgcctcaacaaccgtcgtctcacaaccgtacgcttctggagattatattagacgatgggtccaacaaagacaagaagagttggaaggcgtttcgggacaagatccggctcaagcgaccgggctctgccttgaccttctcggttcatgttccggtttccgatgtcaatgttcagactgatagatctgagtcaccgaggagcggtccgttt

SEQ ID NO: 44003 - DNA, 355 bp, Gossypium hirsutum
  Clone ID: LIB3272-049-P1-K1-F3
accccttccgtcatacaaaaaactgtccccagggagtgaaaaggaacacaaaatcttctactcaaggaaagagcgaaagatcttacctagcgaaactatcagcacgaaaactaaaaagaacagtgacgagcaagcacaacgcacagcggagttcatttagtgcatgcactacctaaggctatgcacaaccagaatctccgaatgaagcttatacacaaggaacatattctccacaaggatataaaacaggatatgctccttacggacatcgtggagaatacgcccttcaatataccgctaagactactgctgaacaaccgaaaaacactgtgtgctgagaaaggagtacagatgc

SEQ ID NO: 44004 - DNA, 277 bp, Gossypium hirsutum
  Clone ID: LIB3272-049-P1-K1-F4
aagatagggaaacgaacgtgttatgctagagaccatctgacacgttccatgggatgataactccaacatatcttttgacactaggatctgttcctctgacccaacaagaccgaatcctagggttcatgcttttaaaaaacccaatctcctagaccttcggctcccgctaaagctgcacttcctagcctcagtttgtatgcccttatgacaacgatatttgaacgcgttgaagtgttggatgaaatggaacatgtctgtctccaactcaaaagcgaca

SEQ ID NO: 44005 - DNA, 351 bp, Gossypium hirsutum
  Clone ID: LIB3272-049-P1-K1-G10
gccgacccagtcgttcgggaagaccgaaaaaaaaaaaatgacgggcccaaaactctttgactgtggggtttgcaaaccagtacttgcgggcgaattaagatcttaaaagtgcctcaggtttttaattaaaggccctgattaccctataatggaaatctacaaatcaaaggtgaataaagtagatggacgaacgacacgctgacgtaaagtccaaacctgagcctaagattcaagattcaaaacacggttctttttccaggctagcaatgtacaatatacgctggtgctgttgccaaggaatacattaacattcgtattcagctgcgagacgaaatgaaaagcctgaccact

SEQ ID NO: 44006 - DNA, 230 bp, Gossypium hirsutum
  Clone ID: LIB3272-049-P1-K1-H1
ggcatttttgaaggggtcttaacaaaaacaatcggggtaccaatgatttgcaactacttatatattgggacctgtataaatttttagtggggacaagactgagagtgcatgttgattgaaatcaaagaaagggatgggacaaaagagaaggcgctgagaaaagtgtactgaacgtgacaaatgaatgaaacggatgagtatgatccaagacgcatgtctgataagaggag

SEQ ID NO: 44007 - DNA, 270 bp, Gossypium hirsutum
  unsure (1)..(270): unsure at all n locations
  Clone ID: LIB3272-049-P1-K1-H11
acccacgcgtncgctcttttgaattgtccctcacgcgagcagcttctatctacgaccaccgggcgtttccttttgagatggtgtggcctttaaataaaatatgggggcaattgtccataccgaacctgttttttctaaaccctttggggtttttggggggcccaaagcctttttccaagatgtgcttgggcaggttttttttaaggctttccaccggctttcctttcctttatccaccgtcaacgccgggtccagttctcgcagggcatt

SEQ ID NO: 44008 - DNA, 383 bp, Gossypium hirsutum
  Clone ID: LIB3272-049-P1-K1-H9
aaagaccccatccactctatgcttaactcgtcaacggtggccaataacctcgtgtactagctatgtacgtagactccgactctatatatgtgtctttcacagagggtgagggagtgagaaaacaaggagcatgcatcaaatggagcaacaaccattcaactacgcctgacagggaccaggcaccgtgttattaggccactctacggtatgcaccgtaccctgtaccggcttagaggggcagtgtctagagaaactttcctatggaaacaacatgtggactgacaactgacaagggcataccccaaactatgtcgcagatcacgacaccacttattgcggaggagctatcgaatccaaaggcagacaggctcatatggcattac

SEQ ID NO: 44009 - DNA, 389 bp, Gossypium hirsutum
  Clone ID: LIB3272-050-P1-K1-A4
aattcattctcttcttgagtgtcatttctgaaactggaatctgtatcttgttttaacttccttgagaatgcccatatcttattttcaggtttttcatatgactttatttaaacacaaccctttaaagtaacctaacaccttatcaatgtgctcttatttttattctagattcaaaataacagcagaccaccatggatgattataattgcaagagacgtgggcagatttcagcatctggagactgggatcatgcaactgaattgcccataactcagtactctgaatctgctcgagaagctggttggattggtttaagctcttcatcagcacaaccgataccttatcttactgacgatgggaaaaccaaacatcctcagaatcatgttcct

SEQ ID NO: 44010 - DNA, 390 bp, Gossypium hirsutum
  Clone ID: LIB3272-050-P1-K1-A6
gacctatttgacctgatgacgagaaagtgatactagtgcaaaatagccacggcggggctatcatgtccttagccatgcaatgattacacatgtatggattgctctcttattaattaaaaggtatcatgccacatcatgattattctatggcaactggtgtacctgcatgcttcagaataagtttgacaacgccattcatgatttaacagccatggtgtggagatggattccaagattcaccaactgattcgttatgatgaacaaaacacatcttagtactgggacaataactcgaaccacgagaggatatatgcagaggtctactcgtgggcgagacaatgactggaccgatggaacgatcgcccatggaatcgataatattaaaagaaa

SEQ ID NO: 44011 - DNA, 275 bp, Gossypium hirsutum
  Clone ID: LIB3272-050-P1-K1-A8
ctgcggttatgattatcattatgcggcggaactgacacgtaaaaactgtcgtctaattactgccagcgaaccggactaagcacaacctgtgaatacattgtcgcttgtacatccaatcgctcttgtagaatggtactaagcgacggccctgacagagatccaatatcaagggctgcggtggggggaaataggcttggatagtccgtaccatgtccatccaagatgcgctaagtgctgagtcctttgcaggtgcatgcagccttagtcgttcgagt

SEQ ID NO: 44012 - DNA, 389 bp, Gossypium hirsutum
  Clone ID: LIB3272-050-P1-K1-B1
cggacgcgtgggctttgtcgtttggtttactaattaaacaaaaaaaaagggaaatggccgccgacgccgctgccactgcatcgtcttcggtgacagaggaggagctgaccttgacagtaaaatggagcgggaaagagtacacggttcgagtttgtggagatgactcagtagccgagttgaaacgaaggatctgtgaaatgacgaacgttttaccccaaaggcaaaagcttctttatcctaagatcggaaataagctctcggatgactcccttttgctctctcagatcccccttaagtcttctcttaagatgaccatgattggaactgttgaagatgatataatcgtcgatccagtcgaggcaccggagattatcgatgattttgaactt

SEQ ID NO: 44013 - DNA, 373 bp, Gossypium hirsutum
  Clone ID: LIB3272-050-P1-K1-B10
gcttcctaaaatctacatttcttatctttctttttgctatggcaggtactggagtgggcgatgcattatggggaacacgcactagctgaaacccacaaatgccctttttccgacaagggtggcctatcccaacagctccccggtgggatgatgatgggtgttacactgcgtgaacaagatcacattggtgaaaaacctggagcctgacccgagatggcttttcaacgcgtgcaagccgacataccatcgctacgttgcgattcgcggaagaatgacccacaactgatcagagagatcttgcaggctgacaccattgcactcatggccaaggctcgtattaaccattgcgctgaggcccacatgcttgaagcca

SEQ ID NO: 44014 - DNA, 351 bp, Gossypium hirsutum
  Clone ID: LIB3272-050-P1-K1-B11
gtttcattctgactgtttaggcaaaggatacaatatggcataatggactgatactggcttggctacattgctttcaatgattgctactgatgaaactagaattcctgttgttgattctgacggtgcttgtcaaagtgcccatgccactttctatggcggcagcgatgcttttggcacaatggatgtagcttgtggatatagaaacttatacagccaacgctatagtctcaacacagctgctttgagtactgctcttttcaacaatgggttcagctcggggccctgttttgaaatcaaatgtgtaaaccaaccacaatgctgtcattctgctagtgcttcattttcattaca

SEQ ID NO: 44015 - DNA, 219 bp, Gossypium hirsutum
  Clone ID: LIB3272-050-P1-K1-D12
agtaaacttcctcctcgccaagcaagacttgttgtttacaataaaaggtccaatgagaccagtatattggtaggtgaattattaaaaagttattgctgcaactggggggggccacaacaggggcaaagtattttggtttaaagtggttccggttgtgcaacctccaatggatgctttggaatttgctgaatgggaggctgtggttaaaaactttcttct

SEQ ID NO: 44016 - DNA, 387 bp, Gossypium hirsutum
  Clone ID: LIB3272-050-P1-K1-D6
aggaagtccaaaatcagccatccttatccgcgctaaatttctttacctttctcttttccattagtctccaaaagaaaattgatcatcacctctcttaaaatgacctcttctctttacatgttccttctcatctccctaatcttaacatcactcaccaacggagatgctggtttaatccaaaccacttgcaaaaccaccaagtctgctgacctttgtgtctccatccttcactccgatcctaccagtctgaattcagacacaaagggcctggccctgatcttgatccgagttgcaacggctaatgccacggcaacatcgaccttcttatcatcccaattgcttactaccacaaatgacactaccctaaagacagttctaaaagaatgc

SEQ ID NO: 44017 - DNA, 335 bp, Gossypium hirsutum
  Clone ID: LIB3272-050-P1-K1-D8
ggcatttataggattatcaagcgctatgcatatgccgacctttatggttcatggagagcaaaccggaacaggaaagggtcaagaaaaactgggtataagtgaaagaattatgaaaccaaagtgcgaagctaggctacaatgcctaatccgggattaaatgctggctataaagatagacgacatggatgatgaaacaatgattacttattcatgggcagtgaagatggatatatggtgggtacacagcatcatagactctctgacataccgagctaaacatagatgaggggtctgccaaagcataacgagccggagcatggtgatggatttaatgc

SEQ ID NO: 44018 - DNA, 390 bp, Gossypium hirsutum
  Clone ID: LIB3272-050-P1-K1-E3
cagtcctgttccatgacctaaacacagactcaataaatgtataaacgaaactaatgggatggattgtggggcttattgcttaagggacatactgaagtgtatcacgcattcgctttcttaagtgcaaatataagctggagattgaaactgttagaggaagtggtaccgtctcatgtgcattcatattcagaccattgattaagaaagctgcatatttagcatttctagagaaagatgatgggtgggattcactagacatcataggcaaatgtgggtgggacgtagttttcatggctatattgccaggtactgattggaaattgaaaggtatcaagaagattattcagccgtcagaagatgcaactgattcgtctgatgatgatggcatgc

SEQ ID NO: 44019 - DNA, 345 bp, Gossypium hirsutum
  Clone ID: LIB3272-050-P1-K1-F1
acaaaaaacatgttttggttcaatacaatcctcatttttctaatgaactcataacgcttgagttatagcaaaacgccggtgtgtaggataaaaacgctgtttacatggtacaccccatggaaagggtatcactggtgctgatgaatgcaccggctccataaggaagcgtatctaatgcattaatgtaccagacattgaataaaacaggcgggctctacacgtgctacgattgactgtttcaggagctctccaacacgttagcgaagctattatctgcgaggacaccgtggataaaaaaaccgtttcgaacaagcactttgcagatgttgtgaacgaaggtgccgt

SEQ ID NO: 44020 - DNA, 385 bp, Gossypium hirsutum
  Clone ID: LIB3272-050-P1-K1-F8
gattcttccgagattcatcagagtttgatttctgaggggcaaaggtttgatcaagaaatggaggttcatgatacgagggactcactggaggaagacaaccttaatcttttacaagccatggccagtgtgtacttatggattttgttctttgccatggcatgtggcatggggtcggggcttgccacggtgaataaccttggccaaataggagaatctcttggttactccaactttgagaacaacactttggtttccttgtggagcatctggaattttctaggccggttcggggctggatatgtatcggatcatttcctgtatgttaaaggatgggcaaggccattgttcatggtgctaaccctgtcaagcatgagtgttggtcatg

SEQ ID NO: 44021 - DNA, 386 bp, Gossypium hirsutum
  Clone ID: LIB3272-050-P1-K1-G12
ggagggtcaacaatggctttgtatcttgtacgagcaatcaaattaacaaacacaataagaacaaccaccctactacttagaagctcaaatacccaaacccgcaacatctctcactttctcgtttctcataaccaattaactccccgttcccaaaacctcactcctttctgttcatttgattttcttagagattctcgccgtggtttcgccaaaggaaaaaaatcaaaggatgattctggtgggagtacaatggaacttgctcctgatattgggccttctgttaaagcaagtgctgcatcacagatggatgcagcaatagttgccttatcgcgggagctagccaaattgagaacaggaagggcatctgcaggaatgcttgatcatat

SEQ ID NO: 44022 - DNA, 391 bp, Gossypium hirsutum
  Clone ID: LIB3272-050-P1-K1-G2
ccaaagtagcagtgatcatgacaaggctaaacagctgctgcaacgtgtccgaggcaccactgatgtcgaagcagaactcgaggatctcatcaaagcaaggtcaatctcaaaaaccatcaagcacccattcaagaaaatcatacaaagaaagtataggcctcaactagtaatggcaatagccataccatttttccaacaagtgacaggcatcaatgtcattgcattttatgccacacttctattcagaacaattggaataggtgaaagtgcttccctactctcctctgtggcaaccggtgttatcggagccggatcaacattcatatcaatgcttatcgtcgataaattcgggcgacgagccttattcatggttggaggaatccaaatgctt

SEQ ID NO: 44023 - DNA, 384 bp, Gossypium hirsutum
  Clone ID: LIB3272-050-P1-K1-G8
gaaaaacccggactctcttccgttttgaataccacccgaacattcactttgcaaatattcagacggtagtaaagtgtaaagtgcatgaacgatcactgcgacgtgtagaatctatgatcatgagtcgtatgggaaggtgaataatgcgaactatgtaccaacttgcccttccaaaacgcaactgattaccattgataacattactacaaatcgaacggtttgaaaccattaaggcgactatgtaaaagaagggagcgcgatgtaccgggtcgctcttaaatttcaaccaccgtctactgtagaaggggagcctgcactgccgttccgtattagttcaataagaacagtgcgcgcgcctatgaacgatatgaatactaagagcga

SEQ ID NO: 44024 - DNA, 413 bp, Gossypium hirsutum
  Clone ID: LIB3272-051-P1-K1-A2
ttagtgatggggtaactcatatatgtaatttactacttcgatgctctcaagggtgctattgattgatctaccatcaaataaattcttggttatcgtttgatcttgttcatccatcttcatcacagattaaatttgattccccagttatggtgtaaagttaacactgttgaagcagctatttataaaccctaatttttttttcttgttgaatttagctctttgatcttaaaaccttcgacccggttcttgtttttgtgtgttggatttagcttgaaacgctggcgaacccttggtgggctaatcaggtgagcctaccgggtatggacccggcaggcaattcaccagctttaaacaaacgtgaccttgaaatttctatgaacgatgctaacaaaagtagaagcaacggaagaggg

SEQ ID NO: 44025 - DNA, 246 bp, Gossypium hirsutum
  Clone ID: LIB3272-051-P1-K1-A7
aaacttatctaggtagatgactactataataggccggcggatgctatggtgacatgcattgaagcttggaatgaactgaacccatcgggcgcatattcgcaggccgatttctaatggcgcttccacgtcaaaacacattattgggtcaaacgcttatcttgcgggctggggggagaaccatgaatgtgtgttactacacatctcatagggttgagtcatatatactgagcttagctgtacaatagg

SEQ ID NO: 44026 - DNA, 301 bp, Gossypium hirsutum
  Clone ID: LIB3272-051-P1-K1-A8
gcttcctctcccattcacgcgatttctcaatccctcgttttctcgttccgattcctattgatattttttattgaatctgggatataactctacccatgaaaccatataacattcaagattcctaatggcacatgcaaattcaatacacatttttgagggaaacaccattcttgcagacatgagggaaaaccattaatatctgttactacatatatcataaggtttaatcatatatactgagcatagatcaacaataggaaatcaatggatcgatgtcttgtatcagactttaagagttaga

SEQ ID NO: 44027 - DNA, 413 bp, Gossypium hirsutum
  Clone ID: LIB3272-051-P1-K1-C6
caaacgagcccagttacatatacacgtatttatcagatctaaaaaatcaaattgaattcaagaaaaattgaactcgtatatatttttgtcaatcctaatttaacgtcggtgtaagaaagggattggattctgcaatttgcagcgacttagcaaaaaaggaaaaaagaaaaaaaaaggatgcgatggtgaggctaacagggaagcagcagcatacaccgggaacgataagatttctgttgatatgcattggtatcggtcttttattgatcggtctcattgccgatattttctgggcttcatcttctcgtttcaagctttcatctctttcgatttctcattcatctgattttcccgctacatttccgttaatgttcactgagcctcttaattcgtcggcaaaccaaaaacccaag

SEQ ID NO: 44028 - DNA, 310 bp, Gossypium hirsutum
  Clone ID: LIB3272-051-P1-K1-C8
atcgggcgaaattgaaataccactacttttaacgttatattacttatgccgcgaatgggacgtggggcacggtccttatttttggacccaaggccaggttgggacgaccaatccacgtgaaatacattgcaatgtggggagagaaggatttacgacacatactatgaaaagactacccaggtgttcataagatagctaaaggagaacatgtgactgatgatggaacgcatggataacagttggcatggtttttatgaacatgaccaatacgatccgtataatgttaacaaaatactgcttgaaaccatgt

SEQ ID NO: 44029 - DNA, 409 bp, Gossypium hirsutum
  Clone ID: LIB3272-051-P1-K1-C9
gttcgtgattgaaaacacaccaatatgtaatccccataccctatccctccaccaactttgtccaatagcatagcaatagaacgagataaagttagtaagtatatagacttccaactgtgaccgaagaaactccaatggcttctcttcaatggctgctgcaactgagctccagtcccttcttgctctttgcatcaatcctccttctccttaaacttcttttcaaccaaaactccaccaaaacaaaacccaatcttccaccatgccctcccaagttacccatcatcggcaacctccaccagctaggtaccatgcctcatctgtcactccgtcgcctgtccaacaagttcggcccaataatttacttacagctgggtcagatccccaccgtggtggtttcatcagctaaatt

SEQ ID NO: 44030 - DNA, 400 bp, Gossypium hirsutum
  Clone ID: LIB3272-051-P1-K1-D11
gcaaaaatgagggattccccatcatgttttggtgaaaatggggttcaagtagctgattcatcatcatcaaacacaagtaaaaatggacaaaacatagttctttgtgtttatcaatgtcaaatcttaggtagatcgtgtttaataactgtgacttggaacaagagtttaatgggacaaggcttaagtgttggtattgatgattctacaaatcaatgtctttgtaaagttgatataaagccatggttattctctaaaagaaaagggtctaagtctttagaagcatatttttgtaaattagacatattttgggacctttcgacggcgaaattcagttccggaccggaaccatcgcaagggttttatgtttgtgttgttgctaataaacaaatggtattgcttc

SEQ ID NO: 44031 - DNA, 102 bp, Gossypium hirsutum
  Clone ID: LIB3272-051-P1-K1-D4
gttgcaatatcatactcgatagcagtgttaattttctcatcccatgatcagtaccgatactaggcatttgaggcatcacgtatcaaaacatttcatcttcct

SEQ ID NO: 44032 - DNA, 303 bp, Gossypium hirsutum
  Clone ID: LIB3272-051-P1-K1-E3
gtctgctcgaaaccttcttcattctcatccgctctccattgaactggagctaaacggcgtctgtttagagagactgtcatgaatggcgaacgagccagatctggtactgggggctggagctgtaagacacatagggtatgctattggacccaggacagctaggggagtcatgtagcgtgctgaccagtcggggtttctcaacatgctagggataggatctgctgctgaagcttgaggatggagtaaaatggagtggagggatgcatgcatggccgcacctaaagaatgtgcttataagcaagt

SEQ ID NO: 44033 - DNA, 343 bp, Gossypium hirsutum
  Clone ID: LIB3272-051-P1-K1-E5
atttcattcatatgcctttcttttctcttcgcggaagttcatgctgaggattccacaaagacagcgtactaactcccaactcatgtgactaaattctagttttgtttaggcggttatggcttggtttactgctttcttcacccgtgttaagttgtgtatgttattactataatttgtcgaccagacaaaatgactgttgtttcaagttttgtagtctgaccaagattttttaagaatggcaatataagaagagaaaaacaatgatttctatactgacttgcggttgcatgaagaatgcactcaaacagagctcatgactgcttatataaacttgacctgagat

SEQ ID NO: 44034 - DNA, 397 bp, Gossypium hirsutum
  Clone ID: LIB3272-051-P1-K1-F2
agtaaatcaagccgtgcacgtacctacatggctgatggttaaccagcggatatccattgtggcactggtgctatatctggatactttagtgaggaccatgatacagatggtgatcttaccgtttaacatatggaatacattgaagcaacaaacgagtgcagcttaacattcttgattgccaagtttgatggtatactacgacttggatttaaagagatttcatttagaaatgctcgacctgtatcgtacaacatgacaaatcaaggtcttgctaatgaaccaagtctttgattctaacttacaccgcattctaatgataatgtacgcctataagtgagaattcggggtatggatacaaaacatcacaggggggaacacacttatgttcctgtgacac

SEQ ID NO: 44035 - DNA, 410 bp, Gossypium hirsutum
  Clone ID: LIB3272-051-P1-K1-F9
ggagacgccatgattgcaaaaagtttgaaagacagatcagcagccatggatcctggaatctggagcaagctaccgcaggaacttctcgagcacatactctcctttttgcctctcaaaaccttgttgaatttgaggtcaacttgtaagcatttcaagtctctcgtattctctccatctttcatttccaagtattcttctgcttctcttttctcttcattctttttgctttctcatccccagtgctacagtaatttccctctctacgatactatctgtggggcttggcgcaaaatagcacttcccttgtcttttttaccgccttccgccgctcagtttaaccttctttcatcgtgtaatggacttttctgcttctctctccccaattcctcctctttccttgtttgcaacct

SEQ ID NO: 44036 - DNA, 441 bp, Gossypium hirsutum
  Clone ID: LIB3272-051-P1-K1-G5
gcccacgcccgtccggagcatagtcatacactttttacaggggtgcagcaaagacagtacagagcggcggtatagaaattggacgtcatgcatctcatacgaggcgataacaaatagtgtcgtagagagcacgcaggtgggttgcatatagccttacatcagcggtggaggggtagagccatctgctgctttcagtatgcaggtgaggcgatgacacgagagttcatgacgaacaagatcgatgtagcaaggaagctgtatatacattgcattacctgcgcgtaacaaacctattaccatttcatgggtccaaagaaggtggaatatgtacctgaatagcccaaaacttgaacccgcactatccaaaagtttcaactaagagctatggccagagcttctcaaagtactgacacaacagaagtggcttaacatcatgaaaac

SEQ ID NO: 44037 - DNA, 389 bp, Gossypium hirsutum
  Clone ID: LIB3272-051-P1-K1-G6
ctcatctccacttatttcttgttttccgccgccaagataattcgatctcagcccgcccgtaggcttaacgccatcttcctcaattccatcggtttcacgagatggcaacagagggaggcaagagctttgcaaggagagacaaactacttgaaatcgagtcaaaggttagagtttggtgggatgaaaaagatgttttcaaggctgaacctgctgaaaaaccacctcaaccaggtgaaaaattctttgggaactttccgtttccttatatgaatggttttttacatctaggtcatgccttttctctgtccaaactcgagtttgctgctgcttaccatagattaagaggtgcgaatgtgttattgccatttgcttttcactgtactggtatg

SEQ ID NO: 44038 - DNA, 410 bp, Gossypium hirsutum
  Clone ID: LIB3272-051-P1-K1-H1
cggacgcgagggtttttctacatatcaggagcagggcaactaactggtttagggtaaggggatagcatagctttagagataaccaaacactgcaccgattgacacatcatccactggctgtacttacaaacccatcacgccaccgaagatggaaacgtctgtgaatcttcaaggatcaaatgttttcagccctgccctgattgttacgctgattacacgacttgctcagaacgaaagcgtgccatgactgtctctagggacaacatgatctatccggagaggcactgtactcaacaggaagagaagatgcattgctttgccccggcacctaaatgatacctcaccggcgtttacttggcctacgagtcgggactatgagatttatgctaatgctccctataaggccttga

SEQ ID NO: 44039 - DNA, 415 bp, Gossypium hirsutum
  Clone ID: LIB3272-051-P1-K1-H10
acttgagagtcaatttgctggcttcttccctctccttggagcttcaaaggggaaactgcagggattttctttttcattctttcttttttggtttttgaaagcagagaaaatttgaatcgcttcaatgtcgtccgtactcaacactgtatcatccttgaggctatccagagtttacaatagcaacaacaacaatcacctgcgactcccaattcactccgttttaactcctccttctgtctccttcaccagacggagattgactatcagagcggcggacactgatactaatgaagtaaaatccaaggcaccggataaggcacccgccggcggtggttctagcttcaaccaacttcttggtatcaaaggagctgctcaagaaactgataaatggaagattcgtcttcaacttacaaag

SEQ ID NO: 44040 - DNA, 398 bp, Gossypium hirsutum
  Clone ID: LIB3272-051-P1-K1-H2
aagcaccgtgggaactaggtgatcctaaacgtcttaaccgtgggctgtgcagacaccgatagaagaatcgtgctagaagcgctaattataacagctgctgcgtgggcatctctaactgtctacactagctgggcataaaataaaggcgcggactccaactatatgagaccgattcagtgctaccagcttattaccctcatcataacgggtctaattcagatgtttattccgataaggcaaacatgtaccgctatatattgcggaattagagcgaaggttggctgtccatacatagtatataacaccggcaacctagaaagacaacctcacatattaggatgacagtatggccttcgccactctgtattaggacatcctgaatttgaacatttacattt

SEQ ID NO: 44041 - DNA, 414 bp, Gossypium hirsutum
  Clone ID: LIB3272-051-P1-K1-H3
accaaaaagaaaaaaaagaaaaaaaacagaaaatggcggtggcgggtctttacagaagagttcttccctctcctcctgccatcgagttttcttctcccgaaggcaagcaattgttcacggaagctttagcgggaggaacggcggaagggtttttcaaactaatatcatactaccaaacgcaatcggagcctgcgtattgcggactcgccactctcgccatggtcttaaacgccctcgctatcgatcctggtagaacctggaaaggaccttggagatggtttgatgattcaatgttagattgttgcgagccactggagaaaatcaaaagtcaaggcatcacttttgggaaagttgcttgtttggctgtttgcaatggtgctcaagttgaacctttcaggaccgatcaatctagca

SEQ ID NO: 44042 - DNA, 239 bp, Gossypium hirsutum
  Clone ID: LIB3272-052-P1-K1-A1
caggccacttataatgggctagaacacccttgattgccaacatacacacttacttgatctcttcaggcaatccaagggatatgtgacttgcatatgctcatatcacattcgcttcacctgttcaatgggatcatggacagggatcccacaccctatacgatgcatagatgcttgtattatactcggctctcgtgaaagcgaggcaggtaatggtccaagctaaggtgtacaaaagggga

SEQ ID NO: 44043 - DNA, 408 bp, Gossypium hirsutum
  Clone ID: LIB3272-052-P1-K1-B3
aagatatctacttcattgctttcttttagctcttcttactaccaaagcagcatctcatctttttcaatccaatgccaatgccaatgccaatcgaaagagctatattgtgtatatgggtgaccgacttaaagatggagcttccacagctttgcttcatggcagcatggtacaagatgtttttggcagtgagtcgaagacagtgctgtacagctacaaaaagagttttaatgggttcgtggtggatttgactgaggaagaagcacaaaaaatggccggaatgaagggcgtagtatcagtgtttccaaatgaaaagagaaaactacatacaacaaggtcatgggattttatgggattccctcaacaagttgaaagagcaaccatggaaagtgatgttatcattggagtttt

SEQ ID NO: 44044 - DNA, 393 bp, Gossypium hirsutum
  Clone ID: LIB3272-052-P1-K1-B4
cttttagggggggggggtttagatcgtgtgctttttttcagtttctcaaaaaccatggcgatttcttcgactttttccgctgctaaattggatagtttgttgatgaattattgttcatcgtcttcggcttctttttctggggcttattttcaagatcaacaacaaaagaaggtctttcccaggcctaatcatggaaataaaggtatggtttcgaggaatgggggagttagatgtgaagctgctgaattcaacgccgctttgggaccccaaaaaatcgatctttctaaggcttctgcactgtcagctcttcaacaactcaagacatctgcggctggcagatataccaagggaaggggcaacattggtgtcatagggctcaatgttcacactgca

SEQ ID NO: 44045 - DNA, 284 bp, Gossypium hirsutum
  Clone ID: LIB3272-052-P1-K1-B5
ttttaagtgtgattaatgtgtttttttacttgatctgttgctgggcttttggatctagtgacaacaaaaacaaaatagtatgggatgaagaggaaggcactgaagatgaactagaactagaactaggtgaccatgccaagggagtggcatctcccattgtttttactcattgatctttcaatgctatgtttttacctagaatttgtgtagcacaatttattttctctttttcttttgtttttgttattatataaataaatataagtagctatgttttttcatgt

SEQ ID NO: 44046 - DNA, 282 bp, Gossypium hirsutum
  Clone ID: LIB3272-052-P1-K1-C1
ttaattttatagctttaatatgcaatttttctttaagaccattaccaataagaccataacctttgcagtggaaagcacactctccattgatcgtgtgaagggcatgatccgatataacagaagaatgcgccacgatcaacacaggcttatttttgatgatgaaacctttttggatggagagacactacatcactacgacattgaggaggagaacacccttcacttgtaacatatattgtggggtgagatgcaaatgtaagtataaaccgtcaacgcactgac

SEQ ID NO: 44047 - DNA, 406 bp, Gossypium hirsutum
  Clone ID: LIB3272-052-P1-K1-C10
gtgagggtgacaagaaaaggaagacatcggtggtgtatctgaagtgacagaagcggatggccgctagcgttctgaagtgtggccgggacgaggatcggctcgttcctaatgaaatgaatgaaatcttcatggccaactgcaggcagaatgttatgaaactagccaaggcatggttatatcattcgagagcctacacaagatccactactagaactcgtgcacgcaggatgaaagaggccacgagacagggtggacatcatgactatggtaagaggaacgataccagggaggctagattgcatacaaagatcctgtggatgatgagaatgcatgtactaaagcgttggcttcgtatgtacagagaatgcaagactgatgacaagctcatgtaccatgacatgtacat

SEQ ID NO: 44048 - DNA, 354 bp, Gossypium hirsutum
  Clone ID: LIB3272-052-P1-K1-C2
gttccacgaaaacccaccttgaaatttgccaagtttatcactatgatacaccatgccgtctggctgacaacaggtcgcgaatctccacaggccgccacgcctgcaaatgaggtgcctggtcacatgacccactccatgccatctaacgagattgagatctttaaatgttggcagggctggagttataacaactgtttgactcacctcacaccattggaacaaatgaggcaaccgtccggctctcttacagatactaaatctgacggattgtatgatcaagtgaaacagcttagggcatggacaaagcagatccccgattgttactcgggcgctgtggttcttaatatcatcacc

SEQ ID NO: 44049 - DNA, 338 bp, Gossypium hirsutum
  Clone ID: LIB3272-052-P1-K1-D2
aaattgaatcttattactttacaataataaagggttgcgggaagtaataggtggttgtacctgaccctgaactgacacatcagtatgctgcaagcacatctaaattgtttattctgtgaagacctactgttctgatgccaatattgtgagaatggagcgcggtgaatataacgctttgagcaacagtactgcgcactatttgataatgtcttgcgtacatgcatggctgattctgctattgcagatcaagcacatgagagacagatggatgaaggtatcaattgttgaatcgatgagggctgtgtactgatctcgcctatggaccatgtatcaaggag

SEQ ID NO: 44050 - DNA, 393 bp, Gossypium hirsutum
  Clone ID: LIB3272-052-P1-K1-G1
ttctcatttagcattacgataaccaatcatggtagttatgcacccacttttccgatcctcagataaatcgggaatttaaccagtttttgcccaccattttcatcttcaccccaagcacgcttgaactcttcaaccacatgctcgctcaaaagctccacacccttctccttacccttctgatacgcggaccatgatcttaaataagtaaagtaatcctctaaacccatccatctctcattctcaaactcaaacggtcccgtactatcctctccatcgactgcctcgaacggaaaatcgatggttttgtacttatcatccaccatctgtcgtgctgaatcccagtatgggtttttgtaaaatcgttcaagcaccttgtccatggagtcgttgact

SEQ ID NO: 44051 - DNA, 367 bp, Gossypium hirsutum
  Clone ID: LIB3272-052-P1-K1-H2
cggacgcgtgggcgcctctttcgagtggtgagtcaactaatcttgatattgggcagaatagttataactctgaaatgtcatataatccaacacctgaaatggttcagtatagtcaaccggtgacttttagttctgaaaatgttacattgcggcaaaatgtatctagtgctggaaggattggtgataacaaatacaatgggcaatatataaggaaaaccacaaattagccaagcattggatgggcctctactgcgccaacaacttccattcacgaaaatatgaacaatgatgattgttacctgccagagtctgcacagacaatggcatttaagaaagcgccacacgtgttctatggtgccaatgagcc

SEQ ID NO: 44052 - DNA, 349 bp, Gossypium hirsutum
  Clone ID: LIB3272-052-P1-K1-H6
gtcggctacggccgggcgatccggtcgaaagacattgacaggtggggagttaggctggggctgcacatgatgctaaaagataacgcccgtgacctaagatgcgctcaacaagaacagtaattttgtgtggcacaaaagggtaaacgctcgtttgattgttgtttacactacgaatactaaccgcaaaagcggagcctatcgcctctttacacctacatacttttcagctagagatgcttcaaaagttaccacaatgcttactcgctatgggcatgcattcggcattagctacgctgattggtgatcctactatcacggctacacctatcattgaaatcggaattcacta

SEQ ID NO: 44053 - DNA, 401 bp, Gossypium hirsutum
  Clone ID: LIB3272-052-P1-K1-H9
cgattttgcatttagctgggaagaatgaaaatggatgtaaatttgttaagggtttaattgatgggattaaagctaaagagatgttgaatttgaaggatgaagatggtaacaccgtgttgcacttggctgctttgaggaaacagcatgaggtaatgaatttactactacaacaacctgaacttgatgtgaacgcagtgaattccaataatctaaaggctttggatatattgctaaaaggtccaaagcaatcaaatgatgaagagattgcccacatgctccatcttgcaagcatgccaaaactcgaaaaccaagtattaaccgacccatctcgacctaacaatgcagtggtcgatgcagtggtcgaagtagacatgacgatgaaagactcaacctcgaaaaag

SEQ ID NO: 44054 - DNA, 411 bp, Gossypium hirsutum
  Clone ID: LIB3272-053-P1-K1-A11
cgcctagtgcatttaccttagcggttcggatggatacaacacgtaccacgtggctattacaagggtcaggggaggccaacagggtgaacgatgatacagagaacaccagatggtgtatagtggctgacgagaacctggatgttggctgatgccggggggcaggtagactggcaaagtaacactgacaacacagctgaggtagggccccaaatgcgcaagtaatggtaacatgatgttacaccatttcaatggcacgttgatacggacaagttgtgatcattcaagtgccacaatctgaaggggctggtttgttatagcctgagagcaacagaaattgtgagcccggctaagctcaagaaaatggcaacggggcctatatctaggtgatagagcctaaacaggtgggtttgc

SEQ ID NO: 44055 - DNA, 420 bp, Gossypium hirsutum
  Clone ID: LIB3272-053-P1-K1-A12
aaaattattatttcaatccaaaaaatatccccaaaacctccccccatccccaccttcactccccataatcggccacctccacctccttaaaactcctatccaccgtttctaccaccatctttctcaaaaatacggccctgtcttctccctccgccttggatctcggctctttgtggtggtttcgtcttcagccgttgccgaggaatgcttcaccgtaaacgacatagttttagccaaccgtcccaagttgatcgcagggaagtacctcggctacaactacaccacagtttccacctcgtcttacggtgaccattggcgcaacttacgtcgcatcggcgctattgaaatcttctcctcgagtcgtctcaacgcctttgccgctgttcggaaagacgaggtccggcggttgttggtgagttt

SEQ ID NO: 44056 - DNA, 284 bp, Gossypium hirsutum
  Clone ID: LIB3272-053-P1-K1-B12
atgagatttatctattctcaagaaaaaggatatcgctagaataaaatatcatagcggggatatttaaagaggcggacggcccggatcatcatgacgcacacttcaagagcaaaagctgcattggcataaaaaccaaatgatgcttgattattctacagtgggtacacctgaatataatgacgcacaggtttccctgtagaaaggatatggtacggaatgcgataggtgcactctggaagctatcatgtatgaaatgcttgatgatatgcacccttttattcaga

SEQ ID NO: 44057 - DNA, 394 bp, Gossypium hirsutum
  Clone ID: LIB3272-053-P1-K1-B4
gcgtccggttctaactcaacattcccatttcaaatctcaagctcccaaggtaattatgcggttcagaaacatattaattgaccgacccgaataggctactaacccggatgctctaaaggaagttttggctgagttaatctaaaccttgatcttcgttttcgctggatcggcctcaggaatgctttttaccaagttgaccgacaccggagcaccacccccgcccggtctcgtagccgccgttctagctaatggcttcggtcttttcgtcgttgtctccgtgggcgccaacatctcaggtggccacgtgaacccggccgtcaccttcggtgctttcgttggcggaacatcactcttttgcgcggcattctttactggatcgcccaactcctaggct

SEQ ID NO: 44058 - DNA, 426 bp, Gossypium hirsutum
  Clone ID: LIB3272-053-P1-K1-B6
atgcgaaagtagagaagttggatgtaatgcatggatgtacacaggcacaccttgcacttgcctgggttctccaccacggtgatgacgactctcctattccgggatcaactaaaaataaaaatttcgaccgcaacattgcacgagtgcatgtaaagctcacagaagactgattggtaagaagttgcatatgctacccaaatccatgaggttgcagggtgtactcatcctgacggtttacagcagtacacttggagatatggccatacaccaccaaagaagaggacctatgtttagaagcgacctttcatgggtgttgggatgaatggatttcccaggaaactgcgtgcattacaagatcgatgagttactaaagctttgcattgtcattaatggagggttcagtgtttatgacgtaggtgcgtcata

SEQ ID NO: 44059 - DNA, 348 bp, Gossypium hirsutum
  Clone ID: LIB3272-053-P1-K1-B7
gataatacccaacacccaacctaaaaacatgtatcagatttggaagctcatgctcttagtttcacttttaatttgccaccttctatccaaggtgccgggaacatcatcggagccaccaaagcactttgtgctggttcatgggtcttgccatggcgcttggtcatggtacaaggtggtgccactgctaaaatcaggtggccacaatgttaccgccttagacctgggtgggtcaggggttgatccacagcaagtcaacactctgagatcgatctctgattacataaagcccttgagggaattcatggcatcgttacccaatgaaaaaaagtggtgcttgttgtcacagtt

SEQ ID NO: 44060 - DNA, 153 bp, Gossypium hirsutum
  Clone ID: LIB3272-053-P1-K1-C1
cgaccccgcctccgaatttttcttattcttcttctattggtcttgctccgcttgctctgattttcaggggaccttctctttctttctaggggccttccacagtcgaagaaactgagcagccaaaatggtgggaaaggtattcgcgaccccata

SEQ ID NO: 44061 - DNA, 430 bp, Gossypium hirsutum
  Clone ID: LIB3272-053-P1-K1-C11
cccgaccagggtttactattatacaaaagtttggaggagaacttttcaatgcaagacaagatttttctcctttcaatgtggttgcctggcatggtaattatgtcccatataagtatgatcttagcaagttctgcccttacaatactgttttaatcgatcatggtgatccatcaataaatacagttctgacggcaccaactgataaactgggtgtggcattgcttgattttgtcattttccctccccgatggttggttgctgaacatacattcagacctccatattaccatcgcaattgcatgagtgaatttatgggcctaatatatggtggatatgaagcaaaagctgatggttttctgcccggtggtgctagccttcacagctgcatgactcctcatggtcctgacaccaagacatatgatgccactgt

SEQ ID NO: 44062 - DNA, 237 bp, Gossypium hirsutum
  Clone ID: LIB3272-053-P1-K1-C5
atataacctgccactttagttgacgacaccaaaaggaaaaatatctgaacaattacaacctcgtccttgttgactcagttgacacggcttcttttgttgtcttgaagtcggcttgagttttcggaactcaaaacgtgcttggatctgacctggatgccaatgaaaatcagacactggataagagtgcaggcactcacccttgaatgggggcggggaacttggctggagccattgacg

SEQ ID NO: 44063 - DNA, 440 bp, Gossypium hirsutum
  unsure (1)..(440): unsure at all n locations
  Clone ID: LIB3272-053-P1-K1-D1
cgtccggttcactgttcctactcaactcgtttgattttgatcagaccgtgatcatgccgatcagaaacatagccgttggccggcctgaagaggnnatcatgagagccgtcatataacacaagtgtatggtttttatgattaatgcttgagaaaatattgtaagaccaacgtgtggaatgttttttactgacctttttgattatttaccaaacacatctcttattgttagttgcagcttttgtatctatcgaattctcgctttatgtttcgacacgttttacattatttgagcattggaccgtgtacaggaagttcctcatgaaggtccaatgtgtgatcttttgtgtactgattcttgtgaccgttaatttatgggggatctattatagtggagttatttatacattttgactaattattgcttacgtattttatcctta

SEQ ID NO: 44064 - DNA, 389 bp, Gossypium hirsutum
  Clone ID: LIB3272-053-P1-K1-D5
cttaaactagaaacacgcaaagaaaaaacatggagcactttaatctacttttgtatcagaccttatccatacaaagtggatggaacattcgtatcgttcttttgatacgactctgctggagttatggcaaaggagcttggtggaggatccggttataattaatggctatgggtgcgtgaagcaaccgcatgtctgcactcgacaaactctaggaaggactgaggcataaaacctattggatgacctgaatgggatgcactgggatctgcagacgagcaggaaagagagccggatatgcattgttgctgtgcttgaggagcaagaacatcagatgctccctgactggaaagcccaactgactgaaccttctaagcatcttcattgaacaa

SEQ ID NO: 44065 - DNA, 355 bp, Gossypium hirsutum
  Clone ID: LIB3272-053-P1-K1-D8
cttatacagttatacttatgaagttgagcagtaaaagagaaaaatggaaaaaggagggacaattgcagtggagaaaagaatgagaaacggttaaaagctttgcacgacattttttctattatttattcgcatctgatttgtgatatgaactatgagtttatgagttctttctatcaaaaagatctgtaatgagacttgagtttagtatacatgcgactacaagcaaggtgaatggctgcttgtctagacctcaatctcaatcagtgcaggacgtcgcttccagtaaatgcattggttccaatttccacggttatagaagctgataatattctcctttcaccggacgcgacatttt

SEQ ID NO: 44066 - DNA, 435 bp, Gossypium hirsutum
  Clone ID: LIB3272-053-P1-K1-E12
cccatagctccttcgatgagattgaggagattataatttcgttttatctcttccatctcttttcttttcttttattaataccctttttgttgtttaattttgtttttattttgtttttagttctctcttacccatccagtgatcctcagatttctgggtttgcattaaattttgcttctctgtaagaagatttctcagctttcagagaatttcgaaacaacaatgctgacgtgcatagctcgttccaagctacccggtgatgactcggtgagtcaacaagaggaaatggactcttccactactcctaacactaagcacaaccaagccatcaaatccctcacttcgcagttgaaggacatggcgctaaaggcgtcggtggcgtacaggcactgtaacccctgcacggcgcacagtcggttgaggaacatgggcgag

SEQ ID NO: 44067 - DNA, 302 bp, Gossypium hirsutum
  unsure (1)..(302): unsure at all n locations
  Clone ID: LIB3272-053-P1-K1-E3
cgtcctngctttggaagggcatgganncttcatagctacctanntcctgtttctaaggctcttgtcantctccgtccacnncaaagctttgtgactctcttggcggcnncctcagcnncagaatgacnntcggacnnctttnntggtcatcnnccaatctaaaatggcaaatggttcaaccatttcaaaacccacccaaaccctggactcnaatcgttcaacaaacagtcatgaacanntgtgcatcaaaagggacccagcaaggggtcatagtacccttgtcgagcccttgtaagcccaaa

SEQ ID NO: 44068 - DNA, 313 bp, Gossypium hirsutum
  Clone ID: LIB3272-053-P1-K1-E8
atctcgctgaatttcttagttggtggttggttggttggttggtggtgggggtggaggaggatgtggcctgcttaatgtctggcatcgggtggggccgcatgcgcctgtgatgcgtgccaaccgtggtttcggggattagtcggagatctgccagggtcgcttattggggaccttttggtttttcttttggtggttcggggattccttgggagggttgcgcccctttgatggagaagcttccttggatcaaccatttccataaaacacccggccgggaatggtttggaaccgattccatgcttggggttaactt

SEQ ID NO: 44069 - DNA, 163 bp, Gossypium hirsutum
  Clone ID: LIB3272-053-P1-K1-E9
atcttgctaaatttctcagatggtgatgggtcgaaagattgttgttgcggtggaagaggatgctttctagctgacgcctcacatgcacagggtcaggaagaccaaggtcatgctatgaactcgtacaaggattcttttcctcaggctgaagacattatcaagg

SEQ ID NO: 44070 - DNA, 441 bp, Gossypium hirsutum
  Clone ID: LIB3272-053-P1-K1-G4
aaacaaagcagttgaacccaaaaatacatttataatggtgaagccacaaaagccgccatctggtcgtacaaatctagcttcgtgtattgtagcaacggttttcttgatcttccttgtaataatagttcttatcgtttacttcaccgttttcaaacctcaagacccgaagatctccgtcaacaccgtgcagctcccgtcgttctccgtcggtaacaacaccgtcagcttcactttctcccaatacgtcaccgttagaaacccaaaccgggccgttttctctcactacgacagctccatccagctgctttattcgggctctcaagtcgggttcatgtttatacccgcggagaagatcgaagcgggtcggacccagtacatggctgctactttcgccggtcagtcttttccgttagcgccaacgaatgaggcatcggcggcgac

SEQ ID NO: 44071 - DNA, 412 bp, Gossypium hirsutum
  Clone ID: LIB3272-053-P1-K1-G5
tgcatatataaatagcgacgcgaaaaatagaattagcgacccaaaaagaaaaacaagaaaagagcttttgcgggaatggtgctgcagagattagagatgtgcgtggagatggtgaaactagttataaagtttgtcatcgttgtggctgaagctgttgggattgtcattcaccaaaatgatagtaaccggcccgtcataatgtcgatgcctatccgctctcatgcagctccttcggttccatttgttgggtttcttccttaaatttagttttttttggaataagttctgggtttttttgcttctatgcgataaacaaacagatgattccttcttaagtatgaaaactttgaggttcgcaccttttctttttttctttttccctgtggttgtaattcaatttgagtgtatatgg

SEQ ID NO: 44072 - DNA, 344 bp, Gossypium hirsutum
  Clone ID: LIB3272-053-P1-K1-G7
cacatactctttttaaccatcctcaaaccatatgccacatgcctgggtgcccgcgaaggaaaaacccggggttgagagttcttgatgacgatcgagctgatcggggtctcacttgtgggaaagtcgaaccttttgtcacgttctgctaggaactacttcaccagtaactaagaggcatctatttgtgtatagctcctaacgcagcgctttgaaatggatgggaacgaggttaacgcacagacatgatacactggtgactaagagaggataagagctgttacttttgattactatttgggagccgttggggctcattattgttaatgatatgactaggaggggta

SEQ ID NO: 44073 - DNA, 390 bp, Gossypium hirsutum
  Clone ID: LIB3272-053-P1-K1-H11
ggaaaaagaaaaaaagtcaactttttttccatgttgctttttaatttgagtttggttttatggttaaagtgaaaaggaaaggaagatttagttttcacggaaaaaagtgtggattcggttcagttcagtagactgtgatcggatccaccggaggttcatgttctgctgtgattggaatcaattggactgcaatttgtaatgcaatctgttgacgtgagtaaggaaaagaatacgaatttgaaacgatcaagatcactattcgtgcacgatatgcccgtgactgacagcactgctgcgcgaacccttgaccattattatattataactgttgaagatatagttcaatcacctttacctgtatatgtagcacctacatctgttagttttagt

SEQ ID NO: 44074 - DNA, 436 bp, Gossypium hirsutum
  Clone ID: LIB3272-053-P1-K1-H3
caaaagtttagggtttcaactatagagttaaaacttaaaagagtgatggaaggcttaatcccttatctcatccatgccatgaagaagcaaaagcctggccacaattacaggtcgacgtcggtgggatctagccgtagctaccatttgttggagggatcgtctcaccggcgaacaatgtctgagttccagccgcctgcgacggtggaggttgttgagcaaaggtcaggtttggggtacaacaacggttcttctagtgttggttcctatgctcatcagcaagcttcagtggggaacactggtgatgttagacgacgatgattgggttgtttaaatgtttggttgcatggatttgtttatttattttgttgtgatgagcagaaagcaagagtgctgtaaaatagggtaaagtttttcatctcaaataatggctttttgg

SEQ ID NO: 44075 - DNA, 290 bp, Gossypium hirsutum
  Clone ID: LIB3272-053-P1-K1-H5
cgaaattaaagctccaaccttatgcccaccaaacggggaactgtgtttgatggctggttgcgttattttattcaggccatgaagcttccaaagcgtgtccgcaaaaccttcatcgcttgatgtccaatacggacgcaagccttatgttccagtcccgaacccgcactggtatgaatattcactcgagctgctcccgtgagaaagaactgctacccaacttattgacgggtacgacagcgacttccacggtttctcggctaagctcttagcgactgaagcccttaaacttt

SEQ ID NO: 44076 - DNA, 447 bp, Gossypium hirsutum
  Clone ID: LIB3272-053-P1-K1-H6
agtgttcaacctgtgctctctggagttgcggtgggagctggatggcagcgcgtagtggcatgggttaacattgcctcgtattatctagttggcattccaattggtgttgtgcttggatacgtttggaatatgcatgtcaagggtgtttggattggcatgttgctaggaacattgcttcaaacaattgtactggttgtgatcacttggagaactgactgggataaacaggtcatcttagctcgcactcgacttaataaatggtttgtacctgaatccagagaagacaaccaaaatgtggctgcctgatttcaaatgcatttctttaaaattttggggtttctttggcctcaactttgcaatataccaaatgaagttacatcttgtatgtgactgcaataacctgttgtggatgaatatttgtaacaaaatttgatgcgttgtaatttc

SEQ ID NO: 44077 - DNA, 195 bp, Gossypium hirsutum
  Clone ID: LIB3272-054-P1-K1-A1
gtctgtagcaaccacatctgattggccttgggagttacagttacactggaccatcaaccaaagaaattaacgcctaccatgttcctaaaggggccacacttggcggtcctttactataataacccactcagattatgacaaaggctgccttacgattccattgtcctttgctaagtgagttcaagccccatattc

SEQ ID NO: 44078 - DNA, 374 bp, Gossypium hirsutum
  Clone ID: LIB3272-054-P1-K1-A12
aaaaaaaaatgtgcccgctgaggctgatcctcatattcctgtcggcaacactcgccggatttttcctccttagaaacatcaaatcccagccccaaaccaacgatgacgatcatacccgctccaacaacaataactcccactctgctttctccaaggtttgggcagctatagaatcaggattctgggcatctcttgacatggcaagtggtcgttacttgtggaggcatctggtttcctctaactccaagccttcctcttgattctgcaaaaaaaaccattctttgtaatggcagatgatgcagtgaaataaggcatgataagaactgcgggtttcaattatcttgtgccatacttatggttgtggatattggatg

SEQ ID NO: 44079 - DNA, 307 bp, Gossypium hirsutum
  Clone ID: LIB3272-054-P1-K1-A8
tttgtttctcgtaaagtagtactactgtttctttattcaactgcttaattgtgtccctatgaagaatcctttgggttctcttctaagcttcttaggtttaaagaaaaagtcccctcgattagaactaccggagggcttttgctgtcgtttttcactagcgcagatcaaagccgccaccaacaacttccacccactctcaattattggtgaagttcgttttgggactgtttacaaagggactctacatgatggaaccatagttgctgtcaagcgcttgatgagatcgtcatatggaggaggaggagag

SEQ ID NO: 44080 - DNA, 400 bp, Gossypium hirsutum
  Clone ID: LIB3272-054-P1-K1-B7
ctacttttaacgttattttacttattccgtgaatcggaggcggggcacggaaaaagaaatacattccatggaattggacccctctgaaaactccaactggctccttgattatggcatacctgatttcccgccttcagctgccgccttcgcatggccttgtcaatctactctcaatgctccctctaatgtcagtgctacagttgattgctcctttgctgattcagattgcttgaaggatgttgtctctaggaaaagggtgaaatcggaatcatgcgggggatccggatcgaaagcatgccgggagaaattgcggagggatagattgaatgataggttcttggaactgggtgccgttttggagcctgaaaggccaatgaaagcagataaagttgctattttg

SEQ ID NO: 44081 - DNA, 326 bp, Gossypium hirsutum
  Clone ID: LIB3272-054-P1-K1-C1
cggagcacgtcggcggggccctgggaagggagttatttttcttgtttaaacacgctcggcaccctgtgaacacgtctaacgggggtggggtccacagggcgtactcataaccgcataaggtgtctaaggggaacagactctgtgcaaagggacaaagtatgcaagggaggtcggcaaaatggatcctccacctcctgaaaaggagtgtctcttatggctggtcacggcggtgccaattcccaacccctcggttgtcggcgcactccttgagctggttcctccgggagagcgggtcgccccgtgccggccgggggacggactgggaa

SEQ ID NO: 44082 - DNA, 416 bp, Gossypium hirsutum
  Clone ID: LIB3272-054-P1-K1-C2
ctcgtaaacagcaaggatcttataccatgaagctattctacacctcaaacatgcctatcatgctggagcttgcacttgatccaaatttttatttcatctcccagctgctgaacaggaagtacagtggtaacttctttgtgaatctgttgggttaatggaaggaatctgaatatgtcaggcggccaacataattgtgcctgtggatacccaacatgagggactgctctatcaagctaagctgtcatgggaaaaaatttcttccatgcatcaatttagcttgcgttcatgcttttagtatgaccgtgttttttaaaaactttgaatatggtgttttcaggtctaatatatacattgatttttttcaacaatccttatgtaggaaccttttttttttaatactactttctatttttttt

SEQ ID NO: 44083 - DNA, 336 bp, Gossypium hirsutum
  Clone ID: LIB3272-054-P1-K1-C5
cttggtaggattttctacggactgacttgcatgaatgatacgcgatgctctaccccgtgcactagtactttggttagtgataaggtgctccccctcacgctgctgttttgccgtctttcacgtcggagggggatgcagtttgagctgcgggatcttgtggcctaggcgccgactactaatgtgcacatgttgaggctatactgacgtgaaccctctttttccaccggagtactgagtttacaggctgttggctgtataatcgtgagttcaactggattatgtggttgttgtcaaagcatgatggggttattccagtgggcatttttttcagcatac

SEQ ID NO: 44084 - DNA, 348 bp, Gossypium hirsutum
  unsure (1)..(348): unsure at all n locations
  Clone ID: LIB3272-054-P1-K1-C9
agaaataagaatacataccctagggtaaataggacattcgtcttgatggtctgtttcacgactggtacccatntctgaactaaatgctatgggttttatatccaaagctgaaccttgtaaaagaggggacttaaaagaacacaagatttgacaaaaggtgaacgtttcactcttttttttttaattgcataattagagtaaagtaaaaagtggaaactgcatggtgaaatgcattggtgaaagcacccatatctttgcgaaagtgcttgagagaaactacacggtgttggtggtgagaatggctaattctgtggaattgacaaagaacgacaagaatttcatcaaaac

SEQ ID NO: 44085 - DNA, 171 bp, Gossypium hirsutum
  Clone ID: LIB3272-054-P1-K1-D11
gaaacttcaactatttggggggatctgaattgtaatttgttgaaggttccttaatgctttagacctcgatctctatttaaactcctagcacccctctgccataaacaaaaaaacaatattatttttatggtttaatggagatgtggacaatccaaagaagaaacccgggtc

SEQ ID NO: 44086 - DNA, 404 bp, Gossypium hirsutum
  Clone ID: LIB3272-054-P1-K1-E10
ctttgtagtatgtttctctcacacgtcccatctccttcctttttctctctttctttgttaatggaaatcaactaatcggcgatcatctcttcctctttgtgaactgatcgctgggtaattctataatgccaaccttcattttaagcttcctttgcttttcaatgatctcgtctgaatattgaccgatgattttgtttttgaaggtcacagcgagaagttgatatcattttttatatttatataaaatttcttaaaaggggttcggtgtcaaagctgagtcataatacgaaatgctagatcttaatctcaatgtcgcgtcgcctgagtcgactcatggattggactcggcggcaccttttactgatgagctcaacaaccaaggttcaaggaaccaaatggaccaa

SEQ ID NO: 44087 - DNA, 338 bp, Gossypium hirsutum
  Clone ID: LIB3272-054-P1-K1-E4
ggcagagagctgcccttttattcccatgttctatgctctcttcagtctctcccttttgacctttatcttcttcataattgttgctggtataaactggggaacagttatgactttgcttctctttttaccactgtctgtgtttatccaaataaaagattcatttcatggccaggtgaagagcatccatcagttctagttagtcggaccggaccttttgtacgttccatttcatggtcaaatgaggagtgcccatcagtttgtcaacttgcctgattctgctcctttcttttgatcctatcataggtatgtcttgcttgaagtttatcaggtttcttttt

SEQ ID NO: 44088 - DNA, 266 bp, Gossypium hirsutum
  Clone ID: LIB3272-054-P1-K1-E8
aaaaaaccgttgaatctcgggaagaggccgaccccgacaccgacgccgactcgggtcacgcgctaagtcagcgacagcatctgccatgaaactcgagcctatgagctcagacacatgcagagaatggtgtcccgcgcagggatctaatgagagaggtggctggacatgttccgtggacaagcaaagggataagggcagggggagttggacttcactgatactatggcatgctcattagaacgatgccgacgatgagcgaaaacttc

SEQ ID NO: 44089 - DNA, 417 bp, Gossypium hirsutum
  Clone ID: LIB3272-054-P1-K1-F4
aaaaatttatttttctcaaattatttttttcctttttttttgagtgacgaattcaagcatgagtgagctcactcgttatagtcgggtattactgttaatggtattaggattaagcgcgggagcctgttacggtttcggtactttcggattcgaattccatcacagatactcggatcccgttaaacaaatcctggccgtcgatgaattgccgccgaaaggaagtccggaatattacagtgctatgatccaccgcgataaaataatcaagggccgttcattggcggtagagaacgatcagacgccggttacttttctcgaaggaaacgcaacttatcgattgaggtccttgggatatttgcattacgccaatgtgaccgtggggacaccagctttttggtttttggtagcattagacac

SEQ ID NO: 44090 - DNA, 292 bp, Gossypium hirsutum
  unsure (1)..(292): unsure at all n locations
  Clone ID: LIB3272-054-P1-K1-G12
aaataaattcaaatttcattctgttattttattttattttattacatattttgcgagatttagaacgattagcgaaaatgaatatcttcagattagcaggggacatgacccattggttaggggtcttggtttggttctttagatccacacaaccaagtcttgtgctggggtttttctgtagactaaagaacactatattgttgcttttttactcggtgcttggncatatttactaattatattttaccttattacaaaatcatgaagctaatattcctgggcaggttttttt

SEQ ID NO: 44091 - DNA, 262 bp, Gossypium hirsutum
  Clone ID: LIB3272-054-P1-K1-G4
agaattaaacttttctgcgctcttttgtctttgccggttcctcctaatgtggtgaaccctgctggggaagatgtcagccagaggaccctggagcaacaagtgcttcttaaacttctactagttggctatcaaaaatcaggcacaagtaccatatataagcaagccaagattcttggtaaaggtcctttcttaaaaaatgaacgcccaaatatcaaattggagatcccatgcaaattgggtggatatcttgctatattgcttg

SEQ ID NO: 44092 - DNA, 217 bp, Gossypium hirsutum
  Clone ID: LIB3272-054-P1-K1-G5
agccgctcctcactttccgaaccagacaggcgcatatcctgtacatcccagcgaccatgacaaagggaacgaagatggcctggattgttgacaagaatagtacccgttatattaccaagttgaggagtcatattaagaagatggatgtttgacaacatgaagttcttttgaaagtgaagtggaaagtgtgcactgaaaagaaaggctttcagaatgt

SEQ ID NO: 44093 - DNA, 202 bp, Gossypium hirsutum
  Clone ID: LIB3272-054-P1-K1-G6
gcattttctgcaccgccaaacagcaattttagttcatttctagacgcagggaacgatggcgaaagcgatcaaccgacagcaagttttgtcttaacaccttaatccttcagcttgtgctttttcgtcagaccaaagcaactttgccctctttgaactgcttggttagctggagatagcgctgcttatcaaaaaactaatgtat

SEQ ID NO: 44094 - DNA, 408 bp, Gossypium hirsutum
  Clone ID: LIB3272-054-P1-K1-G8
tgcgagggtggctaatgctcattcattcattgtgaagctacctgatggtttcgacactcaggttggggagagaggacttcaactctcaggtggacagaagcaaagaatcgctatagcgagggcaatgttgaagaatccagcaatcctgttattggatgaagctactagtgcactagattctgagtccgaaaagctggtgcaagaggcccttgatcggtttatgattgggaggactactctcgtaattgctcatcggctttccactattcggaaggctgatcttgtagctgtactccaggagggaagtgtttcggaaatcggtacgcatgatgaacttatggccaaaggagaaaacggtgcttatgctaaactcattcggatgcaagaggcagcacacgaaactgccct

SEQ ID NO: 44095 - DNA, 270 bp, Gossypium hirsutum
  Clone ID: LIB3272-054-P1-K1-H11
gaaaaaatattggtgccaaaggtctcttcttctttgctttgcttttcttttcacggtgttgcatttggcgaggatgaaaaacacccttatttttttgaacttctacaaagattcttgttcttaggctgaaaacattatcaaggagcaagttaagctactgtacaagcgacacaaaaacacttctttttcttggctgagaaacaattttcatgactgtgctggccacgcatgtgatacttcactgttgctcgactccacaagaaggagctc

SEQ ID NO: 44096 - DNA, 360 bp, Gossypium hirsutum
  Clone ID: LIB3272-054-P1-K1-H4
cggacgcgtgggttcggccaagccccaaaaggagcacgggatgtgcaagacagagcagttttttggggggggggggttgtttgggcaacaactcgtactctatgttacagatgatcccgtcgaactgcatatatacggagatcccaagggaattccaattcagcaaaccatgtatcgggatacccctgctccttttaactgcccattttggggtaataccggactcactctggtcagatctaaacctagcctagcagcggttgttggatgcatgatgccatttatgcttggaatctgctttctttgcccttcaatggactgcctttggcataagtattattattgtcccaaaagcactga

SEQ ID NO: 44097 - DNA, 289 bp, Gossypium hirsutum
  Clone ID: LIB3272-055-P1-K1-A2
acgcgtcggctgggcaagggccaggacccgtatgagtaggagggcgcggtggtcgtagaaaaaccctacgcgcgagcccggtcgtagcgagctttaatggagatctaggcgggcgtatcaaatatttaaaagagatctttgaatggggaatcgggcggtagatattaataactggagtggtggaatacatgttacgtcatcttaacttgactcaagttgggggggaccgctcaaggtgttgaaaagtttggggtagaatacaagcggttaaggacatttgcttttgttt

SEQ ID NO: 44098 - DNA, 340 bp, Gossypium hirsutum
  Clone ID: LIB3272-055-P1-K1-A3
cctgtaagtatcagtaggcgttagtatctccaggacttggttctgagctctaatcatctaactgggaaaatcccagctgagctaggtaactgcactagtctccggaaaatagaaatttatgatgaccttctaagcggtactatccctgctgaccgcgggaacttgactattatttaagctcttcgagctggggggaacaaacacattgtgggaagaatccctgatgagattggggactgcagccacttgactgcgttggggctagctgatacaagagttctaggttctttaccagcttcacttgggaagcgtagcccgctccataccttgtctatataca

SEQ ID NO: 44099 - DNA, 294 bp, Gossypium hirsutum
  Clone ID: LIB3272-055-P1-K1-A8
gggggcaaggtcaaacaatcctgttatgatcatctctcgttggtttcaaaatgacgcttagccgcaagccaaattttcacaagctttcatggctatcaatccttgctgctgtcatgtcttttacttatgcttgcattggtcatggactgttcatcgctaaagctgcaagtggcggagaacatgtgacgacaagcttaactggtgtacaagtaggggtcgacgtctcaggctgttgaaaggtttggagaacattccacggtattggggacattggctttgggtatgcttactcca

SEQ ID NO: 44100 - DNA, 315 bp, Gossypium hirsutum
  Clone ID: LIB3272-055-P1-K1-B2
tcgccatcatgtttgagggaggtgtgggataagatgactgttctgctccttaaagaacgataccatgaggagacggtttttgatttgcattagcatgcgaataatggctgttcgttataaaccagaacctgctatatgtggtctcgaatacgcgcctactttgatttgtttgctcgcatatgatcttagtgataacaactcgggattatgaatgctcgcgctgtaatatgggttttatgaatccggttttgcaatcttcaagggagggtcatgctgaatatagaacgcctagcggtggaaggcttagccagaatt

SEQ ID NO: 44101 - DNA, 368 bp, Gossypium hirsutum
  Clone ID: LIB3272-055-P1-K1-B4
gctggtggggctacaaaggactaggaattcactttgctactccttagaacaatacattgtaccttgtttgagctagggaaagagcaatctgtggtgaggtagaaccacaaggggccaattttgacagggaagatcacaatttatcaaatctggtacagataggtgtacccaacccagcggtccataatacatgattttatcaactctgtgagctctgtcgtataaaacaaaattatgtcgggacacttttggtgacaaaccccagggaaaaacaagtacgggtcctgcactttggatgagggcaaacaacttctccttgcaaatacagcgctcggtaaaacccttaataacgcacacttgtcagcgac

SEQ ID NO: 44102 - DNA, 323 bp, Gossypium hirsutum
  Clone ID: LIB3272-055-P1-K1-B9
cccgttcgagctaacaaggacaagttgaacagtctaagggttacttaaacggcaacggatggtgcaactgctgtggggatcgatgagatatgcatgattattcatgccattgggagctaggactacatggagggggctagaccctatgtccagccttaccagacaagtacgggttatattggagccgatacttgccatatgaatctccacaaaaccttctgcattccacacggcggtgggggacccgtcatgggacctattggtgctaagacgcattgggcaccatttatggcttcacaccgtgggggctccacaggaggggt

SEQ ID NO: 44103 - DNA, 384 bp, Gossypium hirsutum
  Clone ID: LIB3272-055-P1-K1-C11
gatgaagtagcagtgaaaaggctgtcgagacaatctgggcaaggttgggatgagttaaagaacgaagcaattctaataggcaaactccaacacaaaaacctcgtcaaagttcttggttgttgcattgaaagagatgaaaagattcttatctatgagtatttgcccaataagagcttggatactctcctctttggtaccaatgcaatggttacactaccttggaaaactcgagttcgaatcatcgaagggattgctcaaggtcttctttatctccatcaatattctagggttcaaattattcacagggatttgaaggccagcaacattttgttggatgaagatatgaaccctaaaatttcggactttgggatgggctagaatttt

SEQ ID NO: 44104 - DNA, 170 bp, Gossypium hirsutum
  Clone ID: LIB3272-055-P1-K1-C3
gaagtttcttttttcgattttctatttagccaaccaggatgcaaattttagttaggactctgaccggcaggacgatcactctccaggtcgaaagctccaattcgttccacaagatgaagaccagaatccaaaagtgggaaggctattctacaaaccagcggagagtgatt

SEQ ID NO: 44105 - DNA, 320 bp, Gossypium hirsutum
  Clone ID: LIB3272-055-P1-K1-C7
aattgacccacgcggcccacgcgtctcggtttcattgtttatcagagcaacgaaaaagaagggaaaatggaagggaaagaagaagatgttagattgggagctaacaagttctcagaaaggcaacctattgggacagcagctcagtcccaagatgataaggattacactgagccacccccagcacccttgtttgagcctagggagttgactttatggtcgttttaccgagctggaatcgctgagttcgtggctactacactattctcgtacatctcagtgttcactgtgatgcgagtccttaaggacatatccaaggtgta

SEQ ID NO: 44106 - DNA, 420 bp, Gossypium hirsutum
  Clone ID: LIB3272-055-P1-K1-D5
aaaaaaggttgtaaaaaactcagcagcgccactgtccctaatgtgaaaatcttctgggacctttcaagggcaaagttcggatccggacctgaacccgactctgggttcttcgttgccgtcgtcgtcgacggtgaaatgacgattctcgtcggcgatgctaccaaggaagcttatactcgaactagagctcaaaaccctgggagtagaagcagcccaactcttgttttgagaaaagagcacgtgttggggaacagagtttacagcacataagccagattcggaggcaaattaagggatatctcgatcgattgtagggtaaacgaggatgcgcagctgtgtttgagcgtggataacaaaagggtattgcaaataaagcggcttaaatggaaatttagagggaatgagaggattgaagtggat

SEQ ID NO: 44107 - DNA, 185 bp, Gossypium hirsutum
  Clone ID: LIB3272-055-P1-K1-E2
gcgaaaacgcgtacctctatatgtgtgagaaattcgacgcaacacatggcaacataccaggcatagacattgtaaggctcgaccgcctgctaactcttttttgtttatatacgcggtgcaagatggacaaaaccagtttgttgctccttctggtgggctaacctctttgacgagcgctacaaccc

SEQ ID NO: 44108 - DNA, 329 bp, Gossypium hirsutum
  Clone ID: LIB3272-055-P1-K1-E3
gagccagatgagtaggagggcgcgatggagcgtaacacaatctgatgctcgagccgcgtagcggagcgtcgcattgtgactgtcttgcacagggccgtacttattcgactcagagcaaggcctgcttatatatgctaaagggatcctaggacacactgcagctgtgcattttgctgtggcattgagctaaagcttgcactgaatataatgaccacagggctggctctatgagggattttcagactgaagaacgcactatgtatcaccagcattggctttctacagtgttgaaggaaagatataatgtgagaactatcaaggaaacactt

SEQ ID NO: 44109 - DNA, 168 bp, Gossypium hirsutum
  Clone ID: LIB3272-055-P1-K1-E8
ggctacaacaagtcgccggttcaatggatcacaaaataactttcttctcctgtagacggacgaggcctaatgctaattagactggaccgtggcataacctattgaaattagaaagcgcggggccaaaaagccaaaaggagttccaggatccacttgggggtgtacctt

SEQ ID NO: 44110 - DNA, 361 bp, Gossypium hirsutum
  Clone ID: LIB3272-055-P1-K1-F1
aacgctagcacgagcagtgctgaggaatttgttcctcatacgacccgtaaaacagaattgaagttgaacattgcaaatccgactactggttgccaaaaaatgctggaaattgatgatgaccataaactttgcgccttttttgacaagaggatctcacaggaggtcagaggtgatgccctcggtgaggaggttaagggctatgtattcaatatcatgggtggctgtgatgaacagggttttgcaatggagcatggagttcttactcctggacgtgttcatgttttgctttacagaggtacttcgtgtttctctgggtatggtacgagaaatggatagcgcaagatgaagtcaattcggggat

SEQ ID NO: 44111 - DNA, 312 bp, Gossypium hirsutum
  Clone ID: LIB3272-055-P1-K1-F2
acggaagattggagtttgcttctttttttttaaacaaaagaaagggaggaaaaccagcccttctttaacccatccgcgcccggaaggggcttgccaagaaacttaaggggggaaccaaaaatgccccaacccggctgccattaattaacctttgggccatggctttggttggcctcctggtggggtggttgctttttgatagaaaaaggtggattaggctttgaaagatattttggtttcaagttggtgatttaggatggattacactcacctaccaaaggattttggggctccatcccaggttgggaattt

SEQ ID NO: 44112 - DNA, 248 bp, Gossypium hirsutum
  Clone ID: LIB3272-055-P1-K1-H11
atcggaaaaagtggaaaaaagcgtcgtcgttttggggtcttattattcgtcgtcttaatggctctgtctctatatgtgactctgaagctccggtacttgctttcatttactcagttttagtaaaaatccaatcacggtgacaggtaaacaacctctcatctgctataatggtacaggcatcttgaaaggcgcttgtctccataaatgataataagagacaagggatgctactatgaatgaatggcccg

SEQ ID NO: 44113 - DNA, 293 bp, Gossypium hirsutum
  Clone ID: LIB3272-055-P1-K1-H5
gaatacttaactggaggatttagaaaaagaaaaggcagttaggtgtgcgaaccgctggacctcacggcctaaagcgcagacaaactgctcatgcatgcgcaacctacaccttgggtatcacctggagacaacgggtactcggtccatcatttatggcgttccaccagtgcagatgacctatgcgggaccagtggtgagccctactgcatcatgacatcaatgcaagtgtgggtcaaatagcgctagtgatccatgctaatgccataactcgaggtcaaagccagcttttgtga

SEQ ID NO: 44114 - DNA, 425 bp, Gossypium hirsutum
  Clone ID: LIB3272-058-P1-K1-A12
gctagatccaggactaaaaagtttgctacgaaagaggcaacttttaatgcgttccaaacactttacagcctggcacagtgcacacccgacatttccagtgaggattgctacagatgcctccaggacgctattgcagacttgcaattctatttcggtggaaaacaatcaggatttgctatgtaccctagctgtactgcacagtatcagacaagccctttctatagcctaaaccaaactggattagctaagcccccggtctcgcctcaacatcctcttctactccctgcacctccacctcctcctccaggtaaaagggggatatcatcacagacagtgatcaaaattgttgtttcaacagttggctttttggttttgtcctgtttcttatgtggtgttcttggttggaaagcaaccaagaaactaac

SEQ ID NO: 44115 - DNA, 389 bp, Gossypium hirsutum
  Clone ID: LIB3272-058-P1-K1-A7
gggaccacgcgtccgcgcctccaaatctttaaaacctttatacattccactggggcctaacaggggtcctccaaccacatggggtaaacacgtggtatgggagctgggcgcacgctgaggacccaccacaggctgcagaggtgggctgtaaaggcatacaagaagtctaacccttggaatgaaaggactgaagccatttggcgtttcttttcacatgctaaatggataggccattgaaaaagtaatgttcttacggctttaccttttcttagctgtgaaatataaagttgtcaaaagtgtaattgaccatattcggcttgatgattgatttactcggtacagcattcttcatgctatataaagaaaaccccaaaaagcgtaacttgatt

SEQ ID NO: 44116 - DNA, 206 bp, Gossypium hirsutum
  Clone ID: LIB3272-058-P1-K1-C2
ggccccagccatagacacaggcacagccacagccacagccgtagaagatctttataacatcggcgtagcatctgaggatcgctcaaaagctcttctatgtacgcctaatcgtatgtggaaaggtggtgttagtgtataatgcatacagaccataccacagatattaatgatagataccacgcgaatattacaacggacggcactgg

SEQ ID NO: 44117 - DNA, 375 bp, Gossypium hirsutum
  Clone ID: LIB3272-058-P1-K1-C4
aagattttatagcctgttgctgtgccagctattgcttttagatgccaagaagatgagtaggtgactattgggtgagggagaagactaacattggcattgaggtgatggagcacgtggggtctactaaataaccaagtattgtccatcggatcaacatgctcgacggtctagacaggtgggagcatgtaaggatgaagaaagagaatgctgatatgaacacgaagctgtatacgactcctttgtagcgtgagatgctcaaagctgacccggagcgaataatcactagtgttattgatttgagcggactggggagcacggattgcttgcgcactgagggtgacgcccctagacgccgggtgtttgtgaagggtttga

SEQ ID NO: 44118 - DNA, 425 bp, Gossypium hirsutum
  Clone ID: LIB3272-058-P1-K1-D1
ggaaccgatggttccgtttaattatacagggattgcaccgaataatacgaatgtgatgaatgggactcgtacggtggtgttgccgtttaatacgagtgtggagctagtgatgcaggataccagcattcttggtgctgagagtcatccattgcatcttcatggtttcaatttctttgttgttggacaagggtttgggaactttgatccggttaaggatccggcgaagttcaatcttgttgacccgatggaacggaatacggccggtgtgcctgccggtggttggatagccattcggttcttagcagacaacccaggggtgtggttcatgcactgtcacttagatgttcatacaagctggggactgaaaatggcatggatagtgttggatggtccggaaccgaatcagaagctgcaaccaccaccgt

SEQ ID NO: 44119 - DNA, 426 bp, Gossypium hirsutum
  Clone ID: LIB3272-058-P1-K1-D2
cacgcatattgaaaaagcaaataaaaaaataaaagaggttgctattctatttttttctttaattttgattgcaaactaaaacggtgcggtgtagagggggggaagactcgcgcgcaagcccaatccataggctggatccgcgccttggtgtttcggatggtaaattttcgtgtcaagtccttcgtctttgcgcaaacttttcgttgatccttatttatattttattttgtttcaatttttctctatagtttgcgtgactttgcaattaggtatgcacttaggcgtcatgtttgggatctggattattttcagttttgatccctgagcgttcgcgcgtactgtgattcagttattatttcaatagtttatttatttattaattaatttttttaagtttgattttacttcaattaagtttttctatca

SEQ ID NO: 44120 - DNA, 427 bp, Gossypium hirsutum
  Clone ID: LIB3272-058-P1-K1-D5
gtaccaaaaaaagataccttgttttatttgatcttcaagtcctgaggatgaggatgagtcgaggttacaacaggttagccagctccatgtttacaatggtcagccctcgattcttttccacagcagcaacacggggggtcctctccaacgacatggtgaaggctcccgccgttggacttggcgtgcgctgcaggagctctatggcggcgatagctggtggtgacaaggagcaggagaagaaacaagcagtaggcggcggcggcggctcctccaaggatgacaaagagatcgtcagttattggggcttggatccaactaaggtgtccaaagaggacggctccccatggaagtggacctgctttaggccatgggatacgtaccaggcagacttgtcaatagatctgaagagacattacgcaccggtgac

SEQ ID NO: 44121 - DNA, 427 bp, Gossypium hirsutum
  unsure (1)..(427): unsure at all n locations
  Clone ID: LIB3272-058-P1-K1-E8
aaataaacagtaaaaaagcaatctgctgctctgtttgggtttttttcgacaaaaaatcccaacaaaaccgctgccgttgttcaccttctccaaagcattgccggtgaattgctgattatcttacccaccccataaaataaaagaaggaaaggaagaacaaaaaaatgtatggaatcacaggttacagtaatggctaccaccaaaatcaacagcagcacagttcggaagagaagcgaggcggaggtcgacggaggaggggaggccgtagatcacgccaccgtcccggctttagggtttccgaccaccatcaccatcactacaataacgatgacgacgatgacaagcaagagcagaaagcacctncgccttgcacggacttcgacatggcctactttcactcttatgctcacgttggtatccatgaaga

SEQ ID NO: 44122 - DNA, 336 bp, Gossypium hirsutum
  Clone ID: LIB3272-058-P1-K1-E9
ttttatttttggctgaaaaaaacaatgaattgaaaggtgtctcagctgttcctctttacacttgagctgaggggaaacacatatttactactatatatataaaactcccaccacaagggggggaaaaacccatatattttaagccatgaaacagttacacaagcaatcaatctttaaccataggcgagatgaagagattttaatacctcacacactttcttactcacccaattcctaaaaacaccccagatctttccctagatccattttctttaaagaacaacgccttttggttttttttatgggcattttaaatgggtatactttttttatcct

SEQ ID NO: 44123 - DNA, 423 bp, Gossypium hirsutum
  Clone ID: LIB3272-058-P1-K1-F11
atttaaagctgccgctgatttctctcgtggggggtttttttttttttctcttttttaattttcttaagtagccataggatgaggaagctagagtttcatgagaaaaaactgttgaagaaagtaaattttttggaatggaaaagagaaggtggtcaccgggagaatctcattctgcatcgttatcatgtcactggtcgtgacgattataagaaatattccggtttgtgccggatggtccagaaattggtgaatatattgaagcagatggatcctcgagacccttttcgaatcgagatgactgatttgctgttagagaaactatacaatatgggcgtaatcccaaccaggaaaagcttggctctatgtgatcggttatcagtgtcatctttttgtaggcgtaggctctcaaccgtgctggtgcac

SEQ ID NO: 44124 - DNA, 334 bp, Gossypium hirsutum
  Clone ID: LIB3272-058-P1-K1-F7
ggatttcactatcactcttgacggcagcaaggctttaaatgaagggggtggggttgtctccttgccgagagaagcttacctatactgtaaatccgagatctgcagcgccaatgtaagtaccttaattagtattattcaacttagattgaaggaggggacagaatcccagcggggctcttaagaatctttcgttgtcaggactaataacgcaagaatcgtatggtacttaagaaagacattggtgcagagaaagaagtacggcaacctggcttgttatatatggttatttgatgccatttgttgtggcagaagggtatcagattttaactggctg

SEQ ID NO: 44125 - DNA, 429 bp, Gossypium hirsutum
  unsure (1)..(429): unsure at all n locations
  Clone ID: LIB3272-058-P1-K1-G2
cagactctggctaggttgggaattaggacccatcatcaaccctgcgctgcttgtaggatgctacgcaggcgatgcgacagtaactgcatcctcgccccatatttcccaggcgatgagcctgacaaatttgccggtgtgcataaggtttttggtgctagcaacgttatcaaactgattcagatggtggaggaaacaaacagggaggatgctgttaaagcgctggtgtatgaagcgagagcaaggctccgagaccctgtttatggcagcacgggaaccatttttcagctgcagaggatggtgcaagacctaaaactgcagcttaaatcaacaaatgctcgagtattggaattgcagcagcaaaaagatcagttgctgggcatctttatgaattttgatcatcttgatgtactctcttnncgtgatcatggg

SEQ ID NO: 44126 - DNA, 416 bp, Gossypium hirsutum
  Clone ID: LIB3272-058-P1-K1-G4
caaggttcgaaaggcaagccaaagtccatatataaaaagtaaacacagatttgcagaaatgttgaagcaagtttctttgatttgctttcttattttctcttgttatatgggagttgagtccaaagatttgaagcatcttaccaatgaacttgaagtaaatgtggcagcaagtagggtttgggagctttataggcaccttgggatttccatgcttactgctcgagagctcaaaactgtgatccaaagtgttcaagttttgaaaggtgatggtggtgttggaactatcctcaaactcacttttgttccaggcaactcaagctatactgaaagattcattaagattgatgatgaaaagaaggtgaaagtggcaaagggattggaaggagggtgtcttgcaattggttgctcggatcaaa

SEQ ID NO: 44127 - DNA, 380 bp, Gossypium hirsutum
  Clone ID: LIB3272-058-P1-K1-G6
cccacatcccccaattatatattttatcccaacaaacatcttcccaatcccaaactcgatccgatccatcccccatatctctccgttcatattgattcctcgtggcacctagctatctatcaaagtattttatgtatctcccaactacttagcatacatcattcattcaaaatcttttgagaaaaaaaaggtggatcatcgaagacatgggaaacggccactcccacccgaaacatcggcggagaaaagacaaggacccgatgacttcagaacagcttcttggcctgaatcagctgattcgtcagccatcgttacggctcttagtcaagtgataggcagcgatgatcagcagctcattggtttcccacaatcatcggcgc

SEQ ID NO: 44128 - DNA, 174 bp, Gossypium hirsutum
  Clone ID: LIB3189-010-P1-K1-B1
cacccaggcgtccgttaccattttatcaaaaaccaaatcagtaccccaatttcattttctcaaactcgaaaacaccgatgatcgcttgttgttatacaaggcaatttcctccccaacagccccactgaggtttgatggagcctagaaagacaatgaaactgaacacaaaacaca

SEQ ID NO: 44129 - DNA, 425 bp, Gossypium hirsutum
  Clone ID: LIB3189-010-P1-K1-B2
ctcttttcttcttcttctacttcttctctctctctttctttttctctctctctcttttaattttgcgaacgaccaaaccctaaattaatccctctgttaattcgttttcgcgatggtttagttcgaggtttttcttcagatccgatccgcctcagatagataaaatgtctgctccttcatctagggagcgcgcacagcgtctttatgagaagaatatcgaattggaaaaaaatcgtaggagatctgctcaggcacgagtgccttcagattccaatgcctggcagcagatgcgtgagaattacgaggctataatttttgaggaccatgcttttttcgatcagaccttttttgtttttcatttgtggatgtttcattatttgcggtttgatgaactgaatggtctttttcgagctttagtatcgtct

SEQ ID NO: 44130 - DNA, 403 bp, Gossypium hirsutum
  Clone ID: LIB3189-010-P1-K1-B3
aaaaaaccacagaccagagtagagaaaaaaagaaaatatatctagggagggagaaaaatataaaggcaaaaggcccaaactattaaatctaaaaaaaaaaattcaatttttttctttgtttcttccttgaatctctatgtatgcatgtcagctcggtaatggttctcgagtctgaaagtccatgagcttctgctttttgtttttgtaaacagaaaaaaatatatgaaaaaatattcggattggaaaatgtgcgcaaagtatgtacagcatgctcaggagttgatatccaagcttgactttccttctttttacaaagacgctattgttatgctcttaaagcatgctgctacatgtattattgagcttgatcaatctgctccatcaacaacagtggaatcaatgc

SEQ ID NO: 44131 - DNA, 395 bp, Gossypium hirsutum
  Clone ID: LIB3189-010-P1-K1-B9
gttggagataataatagcacactttcgagggtagattctggcagaaggcgtcaattacaaaggggtcagctttctcaatttctaccaacatctcggaggattgtacaattctcaaatggcaagggacctggaccaaatgctcgcattgtctacattgatggggcattcaatctctttcatgctggccttgtggggatcctcaagaaggcagggcagttggaaaacttttggttagttggtatctaccctgactatattgtgagtgagcagaggggaatgccgtacccagttatgcatttacttgagcgcactcttagtgtgttagcttgccgttatgttgatgaagttatcatcggtgcaccttgggaattacaaaggacatgattacaactttc

SEQ ID NO: 44132 - DNA, 199 bp, Gossypium hirsutum
  Clone ID: LIB3189-010-P1-K1-D3
tcccggtcgaccacgcgtccgggtggaaccaagcctaatatttccaccatgggtgccgatcagttcgatgacttcgagcctaaggaaatgtttcaaaagctgactttctttaactggtggatgcttagcattttctttggcaccctctttttcaacacttttttgatctacatacacgacaatgtggggtggcttcttt

SEQ ID NO: 44133 - DNA, 329 bp, Gossypium hirsutum
  Clone ID: LIB3189-010-P1-K1-E2
gacacacgcttctgaaatcttttttcaatacacttttgctaaagatgcagatcttcgtcaaaacccttaccggtaagaccatcaccctcgaggttgagagtgctgacaccatcgacaatgcgaagcataaaattcaagacacggaaagcatcccaccacaccagcagcgggtaatcttcgacggaaaacagctgggggacggccgcacctttggcgattacaacattcagaaggaatataacctacaccttgcactccgtgttcgagggggcaagaagatcttcgagaaaaccttaaccggcaagaccatcaccctggaagtcgagagc

SEQ ID NO: 44134 - DNA, 320 bp, Gossypium hirsutum
  Clone ID: LIB3189-047-P1-K1-A1
gaaaaaggaaacagaggacaagcccgagtcactgatcagaaaagacgagttatattgcgggactatctttacagtggggtaagaaacatgcagaagaagaagaaagcacccttttgtgcatgtgttaaacccgcaactaaaggagattgagcaatggttcatatcagtagagagaatttaattgcattgtccataaatatatacctttctagttgtggtggttcacatatttcttttgttacagaggcttcgttctatacttcatagattctactgtatatttcaggcaccatctaatagaaacaaattgcacttttata

SEQ ID NO: 44135 - DNA, 344 bp, Gossypium hirsutum
  unsure (1)..(344): unsure at all n locations
  Clone ID: LIB3189-047-P1-K1-C1
tatatataatatactattaatatttacaaaaagagaaagaaatagggggagagagaggtgtatggttgtttgagcggatatggggatggtgttggggtganttattcctctcttctgtagtttgtgctttttttgcccggccttttgcaccaaatctattcattcgggcaaacattacatgatttttctcgcccatttctttcctcaatcttcttactaacaacctaattaacgaattattgtgtaactattttaatattctttcaagaattctcttcatattccattaataacaagtgcatttttgcataaattttacaattattctctaacttttcaatttt

SEQ ID NO: 44136 - DNA, 460 bp, Gossypium hirsutum
  unsure (1)..(460): unsure at all n locations
  Clone ID: LIB3189-047-P1-K1-D7
aaattatacaaagcatcatcatccattgaaaagatcttataagaaaaagaaaaaaaaaactctactgtgtggttttttctatgagtggggagacattnatactatcctcaaagaagaagaacaacaacaagtctttttttctttatcaataataaacctcgatttttcaccttttaagctcttcaccacgtgttaacaccttttcttcttaaacgcgttcacttcttttcccaaacttaccaacgcgtgttttttacctaccagccttcgtgtcgttcgaaaaacctttgaagattgcaagaccctttttattatttcttatatttttttatttttttcatttacttatcttaataataaattaataaatttaatttttttatactattattacatatttactatttattcatataaaattaattttactttattttttttttttcattttcattcaatt

SEQ ID NO: 44137 - DNA, 196 bp, Gossypium hirsutum
  Clone ID: LIB3189-048-P1-K1-A4
gcgcccttctttatctttcccacggaaacgaagagcaatcatgaaaaccttgtgaagaaaaaatgagggaaatgttggatatccaaggaggtgcagtgggcgagccagatccgggctaaattctcggaagtcatatgacatccgcatggaatctacatcacttgaaatgggtagggggtcttctaatctccttttt

SEQ ID NO: 44138 - DNA, 323 bp, Gossypium hirsutum
  Clone ID: LIB3189-048-P1-K1-B10
aaagaatcatgatattggctttgtattcactgaaaagggttttcaggacaagggttaaacagagagaaagctacatagctgacactcatatgaatgaaagaatgaagacatttgagttttgtttactcaaacattgggcaaggcttgaggaaccaaaatacatccaacgcccttgcttggcttccatccgtaacattaacattattaataacagaagaacaagaagatacactgcttgctgctttttctggcttaatatccttggtttgcttcacttcttgaaggatttcccttttcataaatttggatctggaaaccttgga

SEQ ID NO: 44139 - DNA, 173 bp, Gossypium hirsutum
  Clone ID: LIB3189-048-P1-K1-B11
aaataaaattttaggttcatgtgttgattttgccaagggattgggtaccataatacttatcatcatattaaagccagtgctttttttgtttgatggtcttcacaaaatacacgttaacatgtaaaatactgtacgataggggaaccagatttcatactcttcctcttcttttc

SEQ ID NO: 44140 - DNA, 397 bp, Gossypium hirsutum
  Clone ID: LIB3189-048-P1-K1-B4
gttctagatcgcgggcggccgctcgcgatctagacggtcgcgtgggtgaaggtgtcttaataaacgccggcgatttaccttcgattgccatggactggtctattgctacgtttttgaatttttagtgagcgaaaatgagagagtgcatttcagtccacattggggaggctggtattcaagttttaaatgcctgctgggaactttactgtcttgaacatggaattcatccttatgtcctaattccaagtgacaatactgtcacattaagtgattatactttttacacctttttttattcaaacttttactttaaatctacaattccttgatgtagtattttttatttcacgattcctaatctctaatctatctaattacttaactatatttctctata

SEQ ID NO: 44141 - DNA, 258 bp, Gossypium hirsutum
  unsure (1)..(258): unsure at all n locations
  Clone ID: LIB3189-048-P1-K1-B6
gtgggtgagcagtgaagaaagatgatggaaattggttttattggtttggccttgacagtggtgtttcgcctcaacagtggttacggggggtgacnaaaatnnnttanccaatgattncaacaaatattttcagaacgtgatgactttcttaaactttggttaaggaaaagcaaattcttcataataagaattttgtaaattaatagtttataattataaaatattaaactctaaatatttcagtttatattttttaat

SEQ ID NO: 44142 - DNA, 382 bp, Gossypium hirsutum
  Clone ID: LIB3189-048-P1-K1-C5
cccacacgtccggggttacagaatctgccaaaaaatggttttttttttaaaaaaaaaataaattttcagataacgcgcctactttctctctgagccctcttacttaacatatttcctttctttactttacttatttctatttaaagatttccactaacaaaagctctacacttttctcttccccatttttctctcaccatgattcccttacacaaaaccttttttcttaataacactaccatctcttcatcatcaacccctttctcatacaatctcaataacctttcaccatcttcattccaactcacatctttaatccccaacattgatctaaacattatccttcttattaaaaacaacatctcatttaaagaaataaaat

SEQ ID NO: 44143 - DNA, 401 bp, Gossypium hirsutum
  Clone ID: LIB3189-048-P1-K1-H3
aaatatccagattaaaacgaaactaaatgaagatcttcttcctttttctcttgttttgattctttactgcgttggtgaactcttggttcgctggcagtgtaacctatgaccgccgctctctcatcattgatggccaacgcaagcttctcatttccgctgccattcattacccccgcagcgttccggcgatgtggccagggctggttcaaacagcaaaggaaggaggggttgatgtcattgaatcttacgtattttggaatggacatgagctttctccaggaaaatacaattttgaagggcgatacgatctagtcaaatttgtaaagattgttcagcaagccgggatgtatatgattcttcgaattggcccctttgtagctgctgaatggaattttgggggg

SEQ ID NO: 44144 - DNA, 296 bp, Gossypium hirsutum
  Clone ID: LIB3189-048-P1-K1-H7
atattctgtttactcgatttgcaatcgttaatttctgcaggcctagtctgcaggtcatggactttaggagcaaatgataaccatgtatgggaattgcaatatacgatattctttggcagatcaaacaattcttctagaactaagacacagtggagtggtaaatcggtaaacaaggattatacattttggaaggagaatgtgaatactcgaactgatattgatctggaaagagacccttaaaaccacatatggaggcgactattcaaagccaattaatgtccagatggtaatactga

SEQ ID NO: 44145 - DNA, 274 bp, Gossypium hirsutum
  Clone ID: LIB3189-049-P1-K1-A4
ctagaaccttctatctctctgttctccttcattccctaatttgaaagaaaaaaaaatggagatcgttttcgataattatattgtcggcacgttcttggtttccctttttgccttcctttttcttttcattttgcggcgctataataataataataatgataataacaccaggaagaagagattcgagaaagggtattctagggaatttaagatccaaaccggtaccggcaaaggagaatgctcgcctggaaatggttccggcgatgaagtcatt

SEQ ID NO: 44146 - DNA, 318 bp, Gossypium hirsutum
  Clone ID: LIB3189-049-P1-K1-B11
gaaaaaaaaagtgaaaaggataatggtgatgttgtctcttcagggcctacaacggatgtaatgggtgtgatttataaatgaaaaccaagaattgaataccatcatgagaactgccaagaccatgattcggttggagcctatggcttaaggatatggtgcaatcgtagtgatgatataagactcacagggcaatgacttggactccgttatatactcagatcttggtgctttcaggtacttgcagcatgctaatggtatatgggcaggctatttccttatttcagttaattttagatatgtgcctagttcttctactat

SEQ ID NO: 44147 - DNA, 206 bp, Gossypium hirsutum
  Clone ID: LIB3189-049-P1-K1-B4
aggagacagggttcgtgtggcttaaacagaagaagagctaacctcacaagtttgaaaagattgggaagcctggttcctatgcaactgaagtcactgcaccgattgagaaaaacaggataaagaagctgaatggggttaagagcactgatcggagagacccttagacaccttggcacttccaactccattgacatccatccttttgt

SEQ ID NO: 44148 - DNA, 191 bp, Gossypium hirsutum
  Clone ID: LIB3189-049-P1-K1-B5
tcgatccgtcgaccacgcgtcgtcggacagggaatccgactgtaaaaaactagtttgcatggcccgcggatgctcacgctgtgattttgccaggcttgagtacacgaaaaactgcaacacgtgaacgggctatcattacttttaaggaccaatcctcgtattaataggaccgcatgaggataacagattca

SEQ ID NO: 44149 - DNA, 165 bp, Gossypium hirsutum
  Clone ID: LIB3189-049-P1-K1-E12
gtcctattccggtcgacccacctcgatcaatctttcgaatctcgacgctaagctacctactgtgttccatcgatcttggcaaagagagagcttaaagaacctttgagccctcgctcaagaacatgctgtaagaaccgatatgtggtggaattcatgactgaaatg

SEQ ID NO: 44150 - DNA, 248 bp, Gossypium hirsutum
  Clone ID: LIB3189-049-P1-K1-G4
tccgaccgagtatcacaccagctttcgcatatcagcaatggtctcctgctctacgaccactaccgtaaaagtggtactcttttgtacaccggcgctatctccatcgaccaagccaaccgatcttaaaacacgctctacatcatcatcggcctcacgtaattcgccgattccaaaatcactgagagctcatcatgtctttacaagggccaacgccattgtcgccaagaaggggacagtcccttcggcag

SEQ ID NO: 44151 - DNA, 263 bp, Gossypium hirsutum
  Clone ID: LIB3189-049-P1-K1-G5
gtcctattcacggtccacccacgcgtcgatcacctttctcaacttcacttctttattttattagcttccaaaaaggcttctttcggagaagcaccattgattagaactcataaagcacacctcttaatgatttcttcaatggaaacctttctttaccttctcaacaccacgtttataaacaatccaccctagccaacgcgcctctattacgtacaattcaccatcatagttaacataaccttcgcagcacgaaagccatttag

SEQ ID NO: 44152 - DNA, 316 bp, Gossypium hirsutum
  unsure (1)..(316): unsure at all n locations
  Clone ID: LIB3189-049-P1-K1-H2
gcgttcgcacacttgctagtattcctacttggagtggggactttcattactcccacaatngnnacctanaaggggcgggtttatagaaaaccttctgctcccacaaacaaaccccacaaggccaaaccaccaccatatgaaccgaaggacccggaggaggaaccacacctaatagccgaaggttcaccgaacccgacgtttataggaccatcaaattaaatcaacctggtgcccgaaagagcactgcccaagcttgctaagaaagaaacaccacttgcaatctcaactgatgacaacccaacgctaaaagaacacc

SEQ ID NO: 44153 - DNA, 219 bp, Gossypium hirsutum
  Clone ID: LIB3189-049-P1-K1-H7
gcttctttttctacttcactctcttgaaaattttttgaagaaaaacttgtacgtacttaagaaatccggttatctagcgggccccacaaaagaacaatccagtttgaatatctgttggagctttcaagcctgctgctaatcttgatcacattttcctatgctaaaacttgcaagcagtttgctactagatcactgtgatgtcaaatattttcacgagtc

SEQ ID NO: 44154 - DNA, 379 bp, Gossypium hirsutum
  Clone ID: LIB3189-050-P1-K1-B12
gttagatctagcaatacttctctcatctctagtgctaatgtcactgtgaagaattgctctagcagtaaccgaagtgcatagcataatgaggaacctcgtcagggagttgctcggaagagaagtttgactgaaactggcgaagaagaaaacggaagaagcatagatttgaatgttgagctaactccgacaggtcaacccccaaaagatcgtttatctactaaccgatcttcggagatctcatcaacatcgctatcggaaacgtcacgcatgcttctgaatcaacaagactcttctggtgaagaagttgagttcagcaacgcaacaccggaggaaccgccacttgttgcgatgggttgtacccggtgttagtatttgtgct

SEQ ID NO: 44155 - DNA, 399 bp, Gossypium hirsutum
  Clone ID: LIB3189-050-P1-K1-E10
gccaaaaccagcttccttctccgtgaaaaagactgttcagatatgagaagaaaactcaaatgcttgggaaccagctatggagattcagagaaccttctccactacaaaacaaactatgacagactttgattcgtctgcaaccagatcctccaatccctttccaaaacccgctttacagaagccggaactccatcaacccaaaacccaaatctttggctttttcgcccttccactgccagggtatgagctgcttcgttaacagcacgagaaacaaacagttttttaataacagtcaaagaatccccttctacgatcaggcactggaaacccatctgttgcacgaacagaagcgaactttcacatgcccttgcttcagcaatgaacgcattagcaacattc

SEQ ID NO: 44156 - DNA, 439 bp, Gossypium hirsutum
  unsure (1)..(439): unsure at all n locations
  Clone ID: LIB3189-050-P1-K1-E4
gggaggtgaagaaggagagaatacggaaagcttcaatatatggaaagttacctggttgggacctacgttgctgttattgtaaagagtggggatgattgtaggcaagagcaccttgctgtgcagcttatctctcatttttatgatatatttcaagaagctggtcttccgctgtggttgcgcccttatgaagttttagttacatcttcttacacagctcttattgaaacaattccagatacggcctcacttcattctatcaaaagcagatatcccaatttatctagcttacgcgaattctttgctgctaagtatcaggaaaattctccaagttttaaactggcacagagaaattntgttgaaagtatggctgggtattcccttgtgtgctatcttctgcaggtgaaagataggcattatggaaatctgctactggatgaag

SEQ ID NO: 44157 - DNA, 397 bp, Gossypium hirsutum
  Clone ID: LIB3189-050-P1-K1-E5
gatgatatgaaggaaaaccaagacggatggcaatcaaattaacttaaaagaagttatattcatgatacaagtccaatgccaaacatatttaacacaaacataagctgcatacatatagtcaacttgaagttattgaattaacctgtattcatagaacaaagttttttaaaaactttaagtacaatactttttattacattcgcatgtttctcataatattttcttatattctatttttctcttttaaattttatctctattttctttttttttacataatttcttccatatttttaatttttttcatattttataattatttttttattttttttatacaatttttttatttattttttcttatatttttacttcacaatttttattaatttttttt

SEQ ID NO: 44158 - DNA, 268 bp, Gossypium hirsutum
  Clone ID: LIB3189-050-P1-K1-F4
atccaccagtgctttggacgaggtcaatgaggcccatttgtacgagaagatgaaggcggcgggcatcacatatatcagtatcggtcatcgtcgtaccttatatgcttatcataatagggtcctagatatatcatcggcagatgcagatagcagacaacgcaattggaacatcaaatccattgaggatgacactttacacaatttcttgaagttatagttatagctgccctaaagtttggtcaaaatgctttaaatcaatttcttcatc

SEQ ID NO: 44159 - DNA, 449 bp, Gossypium hirsutum
  Clone ID: LIB3189-050-P1-K1-F6
gcgcccacgcgtccgcttttagggaaccattctttaaagcaaattagagagaagagaaaaaagaaagctaaaaattccattactttgtctctttggagatatcttttttctgcaattaaaacctcccatgcttgtatctttaaaacctttgatctttacccttttgtctcctcttctgcctcagccttagatccataaaaaacaaccccttttttcttcgtctcttataattaaaaaagaaaatggcaactggttggagaagagccttttgtactgcaacccctagagaacctgaaaccactgttcctagtcctaaaaattgtgcaaagttaagcttttttagtagtggaagtaacccttctactcctcgtcttcaaccatcttccacaaatgaaaacacccctaaagcatcaaatccttcttctcctcgttcaccactaaagctctca

SEQ ID NO: 44160 - DNA, 230 bp, Gossypium hirsutum
  Clone ID: LIB3189-050-P1-K1-G3
ctagttctagatcgcgagcagcctccctttttttttttttttattgatgctatcatggaccaaggggtggcggcataactagatacctgtgaggtaatattctgcacatttagcatcatatctgtgcatttaatacaataaacaagggtcattttagcttaacgaagtttcttttggattcattaatttatccccccattatattattttttttttttctcactttcttt

SEQ ID NO: 44161 - DNA, 368 bp, Gossypium hirsutum
  Clone ID: LIB3189-051-P1-K1-A6
gtttgagcggctaccattgccgtcatcgttagtatcatcaaaaccactatcaatatgtcgttatcatgttccgatcgcttcacggacttactctgcgccgaggattcagacgaggtgttatccggcgagtcgccggcatgctcgtcggagctggactctcaagcgtcctgcatcgaggagtccagcatcgatggctttattgaagatgagacaaacttcgtccccggatttgattaccttgctcggtttcagtgtcaatctcttgacgcgtcggctcgagaagcatcggttgcatggattctaaaggtacaagcatattacaatttgcagcctttaacggcttatctttccgtcaactacttggatcg

SEQ ID NO: 44162 - DNA, 338 bp, Gossypium hirsutum
  Clone ID: LIB3189-051-P1-K1-C7
gcaatagcaacgatttaacaccaatccacaatttaattaagattgatttaatccctcttcttgctttccttcttaacttaagccgaaagcctaaggggttaatattttattaatctattaaatagaaaaagaagtaattcagaatcatctggttaggatcgatctaaaccagtctattatgtatataattcagtatgccaactattaaacaacttattagaaatgcaagacagccaattagaaatgtcacgaaatcccctgctcttgggggatgtccttagcgccgaggaacatgtactagggtgtattctatcacccccaaaataccatactctggc

SEQ ID NO: 44163 - DNA, 215 bp, Gossypium hirsutum
  Clone ID: LIB3189-051-P1-K1-D7
atgattgcttgaactaccataaatctatatggaacctcttgttccgattcggctggggaacgttctgggctacatatgtaggctgtgctttatgtgggttattgtttacttcacttgctactagtgggattttgatgaggtatttggtggatgaaccattgtcgattaaggtaatgttgaactttgattattgttagagtgtttcggtttcatat

SEQ ID NO: 44164 - DNA, 464 bp, Gossypium hirsutum
  Clone ID: LIB3189-051-P1-K1-E3
gtccgggatgatgagttgtcatggttccgcaaagcatccctgcttggagcgtgtaatggctttatactgaatagcattccagttgtggtgactgtgatttcatttggcttgtttactttgcttggaggcgacttaacacctgcaagggcatttacatctctttctctcttttccgttcttcgtttccccttattcatgcttccaaacgttattactcaggtggtaaatgcaaatgtatcactaaaacgtctggaggagctgttcttaactgaagagagagttcttctgccaaatcctcctcttgatcctgaacttccagcaatccaaataagagatggttttttttcatgggattttaaggcagagaggcccacattgtctaatattaatttagatataccatgttggtagcctggttgcagtagttcgtattactggtgaatgtaatacctcgcttatttttg

SEQ ID NO: 44165 - DNA, 138 bp, Gossypium hirsutum
  Clone ID: LIB3189-051-P1-K1-E7
gcgagaaagtgagagatcgagagagaaaatacttcgtagggaattagcgagatcctgaaatttgggggggttttctctcttcaatcgtgtccggctacctgatttattcgtcatcatgaccacatcaatgggacttgc

SEQ ID NO: 44166 - DNA, 471 bp, Gossypium hirsutum
  Clone ID: LIB3189-051-P1-K1-F2
atttgaagtaaatttccatatttttctttctttaaattaatcttaaccagggccggtagccactgggttacgattccttataataaaatgcaaatataaagtgtctgtattgcttggtgtaaggtgcagttgagatatccttgaagatagtttattcttctagtacaattattattataggaattattatggactgactgctgtttaacaacttcttttaacaagctacaaccagggcttctgggctgaaattggcttcatttgtgaaccaagaaagaaacaacctatcttttaagttgcgtcctgtgcctgctcgcttgcggatatcctgtgctgtacgtttctcaatcaattgaatgatattactttctgtactcatttgtgagggggcaaatgctactgactacacaatggggttcacattttttttgtatttttatattcattattcataaatgtctctgcatcttt

SEQ ID NO: 44167 - DNA, 274 bp, Gossypium hirsutum
  Clone ID: LIB3189-051-P1-K1-F9
tctttttactaattccccattcatttatgctgttttttcttaccacgagcacttctcattttcggggagcaccaatagtgcctttgagccctcaactataatcccttattacaatccactccatttaaagtacatgtctacgcttttaatatacctttctaatgatatttccaagtactttaattcatctatctcccaccatttataccaaacgcaccatctaattttatcttaatactatctactactatcaaatactattttaacatccaac

SEQ ID NO: 44168 - DNA, 430 bp, Gossypium hirsutum
  Clone ID: LIB3189-051-P1-K1-G3
cggacgcgtgggctgaattggagctcagaaattccaaaaaagagatggagataaaatccttatttgatcgaattactatactgaggatggggctttatcaaatgctgaaggctcttgaaattgatgtccatggttatgatgataagatcaaacaagaccaattagtccttgactgtatatttggagggatccaaaagatgaagaactcacatttaaagtctctggatgataatcagcaattcataattgagaattcagttcttattggattgcttgggcaactgaaacttgaggcagaaaatcttgccacagagaagaactcactgcaccaggagttgaaggttcagttcgagaagttctcagaattggagacttccctttttaatacaaatgctgaacttgaaatatcaagaacgaaacttaagagctt

SEQ ID NO: 44169 - DNA, 469 bp, Gossypium hirsutum
  unsure (1)..(469): unsure at all n locations
  Clone ID: LIB3189-051-P1-K1-G7
aaaaaggatgatcgcatacctacgaagatgcccaagtttaaccatcgtttgtggaaacaacgttggctccctccagcgttttctacacaatggtccggacaccttggaagagcttcttaacagacacctagtgaagaaggagaaatccctagatgatgaggaagaagaatcgctgaaccgacagcgtctcaccagcactcgacgagaggcgctgggtctctaccgcgacatccttcgagccacccgattcttcatgtggcccgattctcggggcattctgtggagggacatattgagagagaacgcgaggaaggagttcgaggaagctcgcttcgagaaggatccggaagttgtgacccgattgcttatcggtgggcgtgatgcggttgaatctgcattggagaagctagccgaaaagcagaggcatcagattcagaaggagcggngagatggtcggtgatgattgatt

SEQ ID NO: 44170 - DNA, 159 bp, Gossypium hirsutum
  Clone ID: LIB3189-051-P1-K1-G9
cttgaatctatttttttgaagatggagggtaaagaataagatgttaagctaggagcaaacaaggtgggatatttacaacctattgggagatcatcccatacattcaattacttcaatgtgccatcatcatcacccttcttttaacctgctgaactcaaa

SEQ ID NO: 44171 - DNA, 333 bp, Gossypium hirsutum
  Clone ID: LIB3189-051-P1-K1-H1
ctttacttgtgctctgttctaccaatgatagtttttttaacggttctttttttattaaatttcagggtcgttttgctgggggcggttccgtgtcccaaggacgttcgacggttgaagcaatcggacgtaggtggggagatcagcctaaatgaagcgtatgaaactctggattgcactttgtgagatagtgctagaggaatggatcacctagtaattccaacgagagatcattgattagctgcttcaatatcagaccttagcaaagctgtggcttagcaaagtgcgaaagatgaggcggttttgttttaaatagaaatggattattggatttcg

SEQ ID NO: 44172 - DNA, 401 bp, Gossypium hirsutum
  Clone ID: LIB3189-051-P1-K1-H7
caaaatcaaaatgtcctttctctctctctctctctctctctcaactgaatcaataacagttccattttttcatagcttggatttcattttatgaacaagaatttccctcattctctctcttatctaaatcttgagatttgacctaatcttgagaatcataattagaattagaatttgagagagattctaagatttcagcattttcgtggcagaaaaaaaaaactacgtaagaaaattgtacattaaaaatccctatacagagggaaaataaaagcaaagtgcgaaagagtgaggcgtttttgtttttaaatagaattgaattattggatttcgaagcttaaggagagaaaaagaaagagagagtagggattagggattagggttttctggtgcgtcgaaag

SEQ ID NO: 44173 - DNA, 239 bp, Gossypium hirsutum
  unsure (1)..(239): unsure at all n locations
  Clone ID: LIB3189-052-P1-K1-A12
ggtcaagttgttgaaactgattcaggtcgaccaattctgagtgttcgcaggattcntcctgcaaagctggattttgcctctgtggaagcgacctcttaatttgataagcccaagcgtaacctgaggaaagtttccagtcgtccagctgagatggcagtgcaggaaaacccacaaaatgagcttgaaaaggttaaacgcaacttgagaaaggtttataatcctgttatagaaaattcaat

SEQ ID NO: 44174 - DNA, 451 bp, Gossypium hirsutum
  unsure (1)..(451): unsure at all n locations
  Clone ID: LIB3189-052-P1-K1-B4
gcttcaaaggcttgtgaggtacgtatgtgaagagtgaagtacactcttcttttgttctgatgtatggagattaaaaaatcttcagccaggtggtgcgcgtggaaatttggaatcaccgggttagtgtagattaatattcatcaaattggtcagaatgatatgcacaagttgaggggatttttgtgttaattcttttttataatattgttttgtttgtgttttcgtttnccccattccccaccttttgtggcaaatacagtatgtccttttcatataaaaagaatagtacaagatatgtatgattgttgagagatggatactccgaggtggatgattcaatataatttcatttgtttcttcttaaaaatattaaaaataaattataattattatttataattatatatttttatatctattttcttaattcttatgataatttttttttttt

SEQ ID NO: 44175 - DNA, 475 bp, Gossypium hirsutum
  Clone ID: LIB3189-052-P1-K1-C4
gcggccgcttttcgacgccaccaccgtcccctcaaccttttttctcccacttcctccgacccagaaccggagctccactcgaaacgcagggtggaacctgggttcaaaagcttaaacccggtttcaccccttccgacgtcgaatcagctttacgagcccaacgcgatgccgatctcgccctcgatatcttccgttggacggctttacaacgtgggtacaaacacaccgataccacctacctcaccatgattaaactcctcatctccgccaaacgttacggccatgccgaaacgttggtcgaggaagttatagccggtgcttgccctatcagcgtccctctttacaacgccgttatccgtttttgctgtggtcgtaagttccttttcaaccgagcttttgatgtttacaagaaaatgctgaaatcagatgattgtaaacccacacttgaaacatttgctatgttgtttaattcttt

SEQ ID NO: 44176 - DNA, 151 bp, Gossypium hirsutum
  Clone ID: LIB3189-052-P1-K1-E11
aaaccatataacataaacatttctctcccaatttctttcatttactctttcctattttcctgcaggaacacatcctacttatggggtgctaactcaaacttacctctattccctctaatctattctatcaataatacatccactaaatatt

SEQ ID NO: 44177 - DNA, 438 bp, Gossypium hirsutum
  unsure (1)..(438): unsure at all n locations
  Clone ID: LIB3189-052-P1-K1-G11
gaagggatatgtctgtctcaatccctcaaactgcttttttctctcaaactaacgttaatgggaggagaagagccaacggggtggtaaggaaaccgctgatgcttaggagtttgacggtgagagctggtccaaagaggatctctttcgggggtgattgcagagaggcgttgcangctgggattgataagttagctgatgccgtttctgtcaccttgggtcctagaggacgaaatgttgttctttttgagtctgagaaacttaaagtagttaatgatggtgtcaccattgctcgggctatagaactatccgattctattgagaatgcgggagcaatgctaatacaagaggttgcaagttaaatgaatgatttggctggtgatggtactaccactgctattattttagttcgagccatgatcaagtttggattgttggtag

SEQ ID NO: 44178 - DNA, 460 bp, Gossypium hirsutum
  unsure (1)..(460): unsure at all n locations
  Clone ID: LIB3189-052-P1-K1-H10
caaacagtgccatttggtgcccttttcctgaatgaaccagtaactggtaaagaancanactgcaggatttatgaagatgacaggtgcgctgtangtctaattaactcgaaccctagaagcataattattacatttagtttaaatgttacatccaaagtttatgatgtaacaaaagccagcgatatgtgttcaacactaaatggatcatgccggctccaacttcagtttccccacactcagtatgttatagtttcaactcctgataatggtgatattgccggacggtacgttgagctgtcttttgtcgctcgagttgttacttacattgcaattttaagtttcttcatcattatcattttattggtgctgaaatacctaggagcatgcaatgatgagagaacagtaattaatagtaatacaacgttcagggaaatatcgtggaggacggagactgacccta

SEQ ID NO: 44179 - DNA, 203 bp, Gossypium hirsutum
  unsure (1)..(203): unsure at all n locations
  Clone ID: LIB3189-052-P1-K1-H5
gcgcggacgcgtgggctcaacgctctccttctgtttcttgtcaagccaatctcaaaagactcccctttgaggtcacagctcctctctttaatgctataatggntaaagagaaagttcacatcaacattgtggtcattggccatgtccactctgggaagtctacaaccactggtcatttgatctacaagcttggtggtattgac

SEQ ID NO: 44180 - DNA, 436 bp, Gossypium hirsutum
  unsure (1)..(436): unsure at all n locations
  Clone ID: LIB3189-052-P1-K1-H9
tgacgttcaagaacttaccgaagctcttggggcattaaaaacacgtcttcacggctgctcctcgttcttaaaagctgcgtagtagagtggtctgcanagtttggtgctgacaagaacggtgatccgcagctgcatactatgctggctgagtacatatattctgaatctcttgaaatggacatggccaaagtatcgtatcatttcgttcgaggaaacaacctaaagaagtttgcaaatactttagtaaacttcatgagcaagtgttatccaggtgaagatgatatagccattgcacgagccattcttatgtatttggcaatgggtaatcttcaagatgcttgttcccttatggaggaattaaagaagcatgtgcaagcccaggagctggaatttcctgtatttgatttgattcaacttaacaatttactttttgctt

SEQ ID NO: 44181 - DNA, 252 bp, Gossypium hirsutum
  unsure (1)..(252): unsure at all n locations
  Clone ID: LIB3189-053-P1-K1-A10
ctnccctttccccnncccccncccccancccggccanaccaancnacnacnngncgncagccggcggcggnnncacaaanacagaggcccaaaacaaaaaagagggaagaaagaaaccgaacgaccccnnnncncagncgcnancnccgacccggcganaaccgagggancacaccaaccccngcccagaagggggngccgagcancaaggcnagnggcccggcgaccccnnnnggcagcaagggcnagacc

SEQ ID NO: 44182 - DNA, 372 bp, Gossypium hirsutum
  Clone ID: LIB3189-053-P1-K1-B11
caccgccgcggcggaattgccgcgaccgacccacgcgttcgaagatatggcaccacccatcctactcaccagagaggaatcagatgttctctacactgcgatccctgtgtctggaagaccttcccaaactcaaagatacctgctttgagaatagctttgaattcccatgcttaagagatttaacactaaaaaattgtcctctgctgaaaacattcatctctaaatctgtatgtgaagataagcctcaaattcaccaacctacacaaacaaataactctggtgtcctcaatgaaaagggtggtttccctcggttggagaagttgctgattcagggttgtgattcggtagaagaaataattgagctgcaagcac

SEQ ID NO: 44183 - DNA, 367 bp, Gossypium hirsutum
  Clone ID: LIB3189-053-P1-K1-B4
gcgtacaatctgtcaaggctgagaaagctgctaaatcggttggcattacgaaggagagttattccgtgatgcatttggaccttgcgtcgcttgaaagtgtgcggcaatttgcggataccttccgtcgctcgggcaggccgcttgatgctttggtttgcaatgctgctgtgtacttgccaactgctaaggaaccgacttatactgccgaagggttcgaactcaccgtcggaacaaaccatctcggtcatttcctcctagcaaggctactcctagatgacctcaagcagtcagattatccttataagcgtctcattattgtcggttcaattacaggaaacacaaacacattggccgggaatgtgccacc

SEQ ID NO: 44184 - DNA, 166 bp, Gossypium hirsutum
  unsure (1)..(166): unsure at all n locations
  Clone ID: LIB3189-053-P1-K1-B7
ggnggnacaagngancccgaaancagncaaagcacaannccaancanancaaacggaaagggggaggcannnaaaaaccnngccaggggaagagaaggnananggnaccaacngacannngaacaangganngggannaaganngnangnnacccnacaagaagag

SEQ ID NO: 44185 - DNA, 177 bp, Gossypium hirsutum
  unsure (1)..(177): unsure at all n locations
  Clone ID: LIB3189-053-P1-K1-C3
cggacgcgtgggcggacgcgtgggttcgtcgcagccaaacatcgggtctcctttttggcttgtctcagcttgcactttatgcttcggaagctctcatactctggtatggagctcaccttgttagcgaaggtgtttcaaccttctctaaggtgattaaggtttttgnggtattggtgg

SEQ ID NO: 44186 - DNA, 298 bp, Gossypium hirsutum
  Clone ID: LIB3189-053-P1-K1-C8
accaaggtactgtcggagcgtgtgccgtggtgatgtacaagaaatcaaacaagggacttaaggggctataagggcggaatgcagagtggaaagctttgatggttcaatatctgtaaaggaggaagactttactgaaatgatggtcaaggtatggaaggacaggtgcaggagagaaatggctgggaaattcgcagggattgctgccagaataaaggaaagagataaagcgtgaaaaagcttatgtaaggggataaaatatcatcacctgattgtgacactgtacaccataagcgtatag

SEQ ID NO: 44187 - DNA, 427 bp, Gossypium hirsutum
  Clone ID: LIB3189-053-P1-K1-D3
ggaacacatctcatcttcttttctctcttgtcagaccaactttgacttcaatcaaatttcaatcaacaggaatttgctttgaaaacataaagaaaattccttttttgggtttcgaaaattgtgagattttgggcttttagaagaaaagtggaatgggctgtgctggatcgacgccggccaaaggagacgggaatgtgaaaaagatccggaagcccaagccctggaaacatcctcagccgataacgaagtctcaacttgagcagatgcgtgaagagttttgggacactgcacctcattatggtggcagtaaagagatctgggatgcacttaaagctgctactaaacaggatttaacatttgctcaagctattgtggacagtgcaggggtcatagtgcaatctgccgattaactatctgctacgatgaa

SEQ ID NO: 44188 - DNA, 393 bp, Gossypium hirsutum
  Clone ID: LIB3189-053-P1-K1-E3
aaatttcttcctttaacgtcccaactttatcgctaatggctgagcaacaacaagatcaactgcaacacagatccgccggaaaggttctctggttcaatgaccaaaaaggcttcggatttattcgaactggcgatggaggcgaggatctcttcgtccatcattcttcaatcaaatccataggctatcgtagccttgctgagggcgaatccgttgagttcactatctcccaaggcaacggtggcaagactcaggctgttgatgtcatcgccgtaggtggctctgccatcaataagaaggaccgtcgcagtggtggcggttggagaggcggaaacgatcggaggaatggcaccggcggttgctataactggggggatttgaatcatcttgccagag

SEQ ID NO: 44189 - DNA, 192 bp, Gossypium hirsutum
  Clone ID: LIB3189-053-P1-K1-E4
gtgcatttggagagagggctgtcatagaagattgatcacacgactggttactaaaatatggatggacgctaatgtttttgcataggattaggaagaggcatttgtagctggactggaggttggactcacatagattgagaggtattaacttagcaatggaggctgtcttactatcaagagctgtcttatact

SEQ ID NO: 44190 - DNA, 254 bp, Gossypium hirsutum
  unsure (1)..(254): unsure at all n locations
  Clone ID: LIB3189-053-P1-K1-E7
cccacgcgaccgcttttcgaaagccaaagactncatannncnncgncaagcnaanaggcgaggggggggcnncaaccgaacgggagaggggggcaaggcaaaggaaacnggccaannangccnnncaaggggagagcnnaaaaaanangacnccagcagnagnngcnagcgnngaaaccaagccngagaaanggaaaagnaaggagggcaaagagaaagaagaggnccaagagnnaagacnaaagacggcagaa

SEQ ID NO: 44191 - DNA, 304 bp, Gossypium hirsutum
  Clone ID: LIB3189-053-P1-K1-F8
ataaattcctttatttactctgactcaaacctttttcaatgttttttagtttttatttttggttgggtggaaaatgatttctatgggttgattttcctcagggtttcagtcttctttggctgtcactttcctattcaaaaccgccttttatgatttccaagtctgaaaaaatataatacccatttctttagactttccgattcttctctcccttattgaaaaaccatttcaatggcacttctttttgattctccataactgtttttatattaagctctttcggcattttcttatctaacaactt

SEQ ID NO: 44192 - DNA, 234 bp, Gossypium hirsutum
  unsure (1)..(234): unsure at all n locations
  Clone ID: LIB3189-053-P1-K1-F9
gtgatttggataaagatgatgtaaagggtttggtttgatgttnttnttnaaaggattatttggtgggaggtgaaaataggagggggggggtaaatctaatgaatacagtattgtttattgaaaatactgttaaataaggagggatagtttttggttttagagggaagttgattgtatatattgagtggatttttgttttaattgggaaaattaaggatgtgagttaattttatt

SEQ ID NO: 44193 - DNA, 185 bp, Gossypium hirsutum
  unsure (1)..(185): unsure at all n locations
  Clone ID: LIB3189-053-P1-K1-G7
gcgacaggtaccggtatagaaaacccgtaaggtgctaggaagctgaatgacgacatacctgggggggggaaattcaaggcggcgggagggtctcacaancatttctgtactagcaaagaggtccttgctggaaggactgctagctcccgcacttctaagaaggctgaagaggaagaagaagaaga

SEQ ID NO: 44194 - DNA, 422 bp, Gossypium hirsutum
  Clone ID: LIB3189-053-P1-K1-H1
acccaaccatctctcactctctcaaatatcctgttaccggcgtcgcaatcgctgctgttgccgtggggggctccaccggcgtattctggggctctcccgttgcgatcattttcctccctcttatttttcttctttcttcgcttcactgaattccccttcacttcttgtctgtttccggtggctcttcttgctttttcctcgctctgcgaccttcactaaactccccgacagcctcgcttccgtcactcctcattgctcggcctataacacaaggttttgatcttcaatggagtctggtaaacaaaatgagtatgctgctttcgaggagaaggtgaggaggacggtttacttggacaacctatcaccgaatgtaactggagtaatcgtgagaactggtcttggacagtatggaactggcaaga

SEQ ID NO: 44195 - DNA, 436 bp, Gossypium hirsutum
  unsure (1)..(436): unsure at all n locations
  Clone ID: LIB3189-013-P1-K1-F11
gccaatgaagtcccaccagccgcttcttcctcttaagaagaagatgaggaagactccaaaacggagatctactccgttgaaccaacagagcccgccacccagaaagcctgctaaacggcctggggagtcggagttggatgccaatgaagcgaaacgacccaagaagaaggttggggaagaagggatggcgactgcacctgttgtggaggaggtgaaaaaggcgaaacgccacaaatcccatcttttccccaaatcttttaaagtccatgaacaacatgtttgtgttgtctaaaaagatttggggcaaagacgggattagtgggaaagtctagtcttcaactgcaccgacaaaaaaaattgacgatgcggtgccaatagaggtttattaggtggnntcttaagatgtttccgttggtcgtttgattagaaatttttt

SEQ ID NO: 44196 - DNA, 368 bp, Gossypium hirsutum
  unsure (1)..(368): unsure at all n locations
  Clone ID: LIB3189-013-P1-K1-F5
ataacaacggnaaacgaaaatagnattgttggaatttaaggtgattactgcaaaactacacattattaacaaacttaactaccttaactaatcattcattaacacccatcctaccaaaacccacaaattccaatatatcctttnnanaatattattcaaatacaaaattccaatattttattacaagttttaaaaaaaatttatacaaaatatatatataaattactgttcaatatcatctatccttaatacattttttaaaaatattctatccaaacccacttatccttattccttctttctatttcatttatattttatttttaatacctaatttcattatttaataactttcccatttttttttg

SEQ ID NO: 44197 - DNA, 211 bp, Gossypium hirsutum
  Clone ID: LIB3189-014-P1-K1-A7
gcgaactgagaacattgtctctgtaatgtgcaatggtcggtggattatgagagataagaagatcttaaatgtagatgaggaggaagttatatcattagcaaaagaagcttcaagcaaacttttgagaagagcaagtatcaaattaccaagcagaatgaataagatcctctgaccccaacactggtctctttttgatccattgcctttaaac

SEQ ID NO: 44198 - DNA, 351 bp, Gossypium hirsutum
  Clone ID: LIB3189-014-P1-K1-A9
acccacacatcctctcatctcaaaatctgtaactacatttacccaataccaaccccttcaaagaaattttctctaacaaaaaagaaaaccccatatcatcctccccctatcttcttttattttctcctttatttatttccttcacctttttctttctttccccaaatctctcttactttcttttaaacttacccaccatttcaactttcccattttttattttctatatccaaccattccccccattttattaaccccctaatccattataaatttttctttctcttttatctaattattatctttacatttcatttaattactttaaattttttttttctatcttttttt

SEQ ID NO: 44199 - DNA, 306 bp, Gossypium hirsutum
  Clone ID: LIB3189-014-P1-K1-B3
caggttttgaaaaatataaatttagagatcaagaaaggtgaactcaccgccatcgttgggactggaggatccgggaagtcttctagactggcttcagttcttggtgagatgcacaaaatatcaggaaaggttaagctttgtgggacgaccgcatacatagctcagtcatcttggattcagaatgggacgattgaagacaatatcctattcggtttgccgatgaaccgggagaaatatagggaagttataagggcttgttgtttagagaaagacttggaaatgatggagtttggtgatcatacagaa

SEQ ID NO: 44200 - DNA, 205 bp, Gossypium hirsutum
  unsure (1)..(205): unsure at all n locations
  Clone ID: LIB3189-014-P1-K1-B8
gaaaaatatatagcccaatgtatcttttgccttgtataaactatatccatagttctctcaagatntgaagtgtgaaaaagaagaagaaacaaanaggaatcaaaaacatgcaatatcttttgcaattttgatttggtagatccactatggtcctttcatttatatacaatgaatcagttagtgaagttatatgcccccttaaaaa

SEQ ID NO: 44201 - DNA, 252 bp, Gossypium hirsutum
  Clone ID: LIB3189-014-P1-K1-C2
gccagaggtcaatgaaacgcaatagtaataactcttcttctaatggcagtctctcacagcctgcagctgaaggtcctattgttgagagacgctgttaatagcccttcttctagggaccagacacagagaactggatttgcatcacagcctcatactggtagtaatgatcaccaacacccacggaattcattcagacaacgtaatggtggtccacatccacgaggagagggttctcaccattagaattttgga

SEQ ID NO: 44202 - DNA, 390 bp, Gossypium hirsutum
  Clone ID: LIB3189-014-P1-K1-D1
ctaactttctttcccatcactatcaccactaccttccatggctgagcaacagcaggaacaacagcagtcaagatccacaggcaaggtcctttggttcgatgaccaaaagggtttcggctttattcatcccgacgatggtggcgaagatctcttcgttcatcaatcttccatcaaatccgaaggctatcgtagcctcgctgagggtgaatctgtcgagttcactgtttcccaaggcaacggaggcaagacccaggctgttgatgtcaccgcaatcggtggctctcaaatcagtaagaaggaccgtcgcactggcggcggcggttggagggctggaaacgatcggaggaacggaagcggcggttgttataactggcggggatctgaatcatc

SEQ ID NO: 44203 - DNA, 330 bp, Gossypium hirsutum
  Clone ID: LIB3189-014-P1-K1-D7
cccacctccatttatttattttaaaattggcggactgttatgttgctgccctattaaaactgatggggttgtcaataggacagggcgtgaaaatagcccttcaatgaagaacatcattagaaacaagagaaaaaggagaggatgttatggataataaatagtctgattagttgttcatccaagtatcccctcttttcttatatgatattcatctgttattcataactctgtttagtataaaccttaaaagtttattatttattttttaattactcaatttgtatattgtttattttattcattctcttttttatttcttttaaattgttt

SEQ ID NO: 44204 - DNA, 177 bp, Gossypium hirsutum
  Clone ID: LIB3189-015-P1-K1-A2
cgaccacgcgtccgcccactctcactgaacacaacaaccatcaaaatcgtgtctctatcaacactcaataacaatatgctgtgcaatttgctatgcattgcgaggccccacttatccatctgacaaatgccaatgcaccaacctacatcaagaatcggcgaaagcagcggacgccca

SEQ ID NO: 44205 - DNA, 305 bp, Gossypium hirsutum
  Clone ID: LIB3189-015-P1-K1-A6
acccttccgaccacgcgttcgtccacccgtacgtttttttcttttttttcacagctgcattttagacaattaggcagacacaaaggacaacagagaacgagacctattctctcatgtctttctctgcaactattccgtctcctcttcttgatttctcccaaaccaataagaacccagatttttcttcatcaaggcctaacatgtctttctcaattccttacatcaaatactacattgggtcttcatacacagccttttttcaaaatggatgctgcttgtcataatttactgatcattgcattatc

SEQ ID NO: 44206 - DNA, 216 bp, Gossypium hirsutum
  Clone ID: LIB3189-015-P1-K1-B3
cggacgcgtggggatggatgtggagaggaggcattttattttcaagcctgttattaaaaaggcaggggtagaatttgatggtgcggcgggcaataaatttgcttccttgcggtaggagcgttccattaaaaactgcttcatttttccttgtcctattcaatatttttgcccaattttttaatgcatattaccatcacttttcttttttttatcttt

SEQ ID NO: 44207 - DNA, 133 bp, Gossypium hirsutum
  unsure (1)..(133): unsure at all n locations
  Clone ID: LIB3189-015-P1-K1-C2
cgcgtccgtacttgagaagtgtattataagatgttagctctcgttcctaaattgaaatacccactacttttaacgtgtgttttactttattcacagagaatcgggaggcttaaacacanatctcctctttctt

SEQ ID NO: 44208 - DNA, 294 bp, Gossypium hirsutum
  Clone ID: LIB3189-015-P1-K1-D8
gtcaagaagcttgctttgctggaaagcatctatatgatactcgtcggaagctctctcgattgaagactcggacacgaagaccacatgcaatattgaagcttgtattgtgtggaaaatgtctctcttcaaaatcttctagacgttgatgttgtcaagccttcttccatcttccatccgaccatggttgatcacggattttgattttccactcaacggcacatttccatttatgtatgagacattctattatgtctatcttatctcttatattttgtgaaatttattcttcttttt

SEQ ID NO: 44209 - DNA, 169 bp, Gossypium hirsutum
  unsure (1)..(169): unsure at all n locations
  Clone ID: LIB3189-015-P1-K1-E7
ggtccacgccacgcgtccgctcacttcgccatcttcaatattttcttccgtggtactttgtctagagacagcnnnntaattttgcattattttaaaggtcaagggcgcaatcaaaggatttggaaggatcgggcttttggtttcgagagttcgctctccaaatcgatta

SEQ ID NO: 44210 - DNA, 382 bp, Gossypium hirsutum
  unsure (1)..(382): unsure at all n locations
  Clone ID: LIB3189-015-P1-K1-E8
ctgagagatggaagagccgaaagcagcccagaactcaccaccgtcccaagatccaaacgcaccagcagcaaccgtaaacgctggtgggacaacggctcctcctccacagccaccaccaacagcaccagagcaaccagctagcaggaaaagacctctagaaaacagcaatgaccaataccaaaactccccgtatttcaagatgcgccttgtcctcaaagatcttcgtcctcatttcatcgaggttcttcgaacgcctgattttcgaaattgcaagggtgcccatgaaattaaagaaaagatgaagcatntagtggatttgtacaagcagatgatagtctctatagagaaaagtattaatggagcaggaaaccagacaatgcaa

SEQ ID NO: 44211 - DNA, 310 bp, Gossypium hirsutum
  Clone ID: LIB3189-015-P1-K1-F3
cccacccatccgatcgcgagcgacctcccttttttctcattaacatctctgtttctcattccagccgtctcatttttaccagctagggtgctctcaaaaaacaccttattgataaataatacctacatcgtccaaatgcacaactctgcaatgccagctttattcttaaattcttttttattttactcatctaaattaaatttctttaattcctatacccatagttaattttatttatttatttaaaatattatcatttataactaccaaaatgcttttcatttatttaccttttatttaacttaataat

SEQ ID NO: 44212 - DNA, 182 bp, Gossypium hirsutum
  unsure (1)..(182): unsure at all n locations
  Clone ID: LIB3189-015-P1-K1-H9
aacaatcaatcaaatggagttaggggaactgttttcgatcttcggtcccggcgtctctttcgcagttttctatagccggcttggggttttnnttanacnccttcatatacattctttacaatttatatttataatcactttttacaatttattaatatatttttatcttatttttttttttt

SEQ ID NO: 44213 - DNA, 216 bp, Gossypium hirsutum
  Clone ID: LIB3189-026-P1-K1-A10
gaagccacttctcatctcacttggcatgctcctagtatgacaaatagtgtcccatattgcgtgtgcaagtaaggtcactgttgctaatggtcagtctttgttaatatctagcactggccagagtacctttcttataaataataaacctctccatatgaaaaatttgatgtatgtacttggcataacaaagaacttgatgtctgtatcacagttctc

SEQ ID NO: 44214 - DNA, 189 bp, Gossypium hirsutum
  Clone ID: LIB3189-026-P1-K1-A8
tcgctgactcgtgggctttgggcgacagaaagtaaaaccccaaaagcttaagcttacccttaggttgctacacatccttgcctttgtttccctttgaagaaaccaaagaatcattgaagatgcccagaccaggttcaaggccttatgtctttgagaaaaaatcttggcacattgacatacaccaaccca

SEQ ID NO: 44215 - DNA, 166 bp, Gossypium hirsutum
  Clone ID: LIB3189-026-P1-K1-B11
gtccgtatcccgtcacccacctcccccacctccggtattgttggtcgtccccgcacactggtgttatggttggatgcggaggggagcctattattaatcaaccctttctaaaaacctccttacctttataatctatcgacatcttaatcccccactcttatatcca

SEQ ID NO: 44216 - DNA, 214 bp, Gossypium hirsutum
  Clone ID: LIB3189-026-P1-K1-B2
aacaatcacgataaaaagtattctgcttactctaataaagcagacaacaggcttacaaatatagctttggatacttatggacaagtcattatacgacccactattcagttatattgacagtagctagagcaggaaaaccagtacaacaaacctcccaagaaggattgtaaaactttaccagccaaaagaggagactttgatgctaatttattgt

SEQ ID NO: 44217 - DNA, 307 bp, Gossypium hirsutum
  Clone ID: LIB3189-026-P1-K1-B5
tatgttccccagctggctcaactcatttatgacataaaccaagggtcaagtccagattcctacagggatgtcaagggattcatgatcgggaatgctgcgatcaacgaaccgacagacacgttggggctgttcgattatgcatggagccacgccatcattttggaccaactctacgacaaaataaacaaggaatgtgactttaaacaaactaataatctaacggttcaatgcgccgatcatatgaaaggtttcatggatgcttatgctaacatcgatatgtacagcatctacactcctgtttgcatta

SEQ ID NO: 44218 - DNA, 376 bp, Gossypium hirsutum
  Clone ID: LIB3189-026-P1-K1-C1
cttagaagcagcagaatgttctcgtgacatagactgttcattcaagtgtaaatatggtggcatgtgtgagtggcacaaacaccagaaaatgcttttgttggccacctaaggtgttcatggaggttgtttgtttctttttatgactacttttgcttttatgatttgcacctctatgtttttatttctacttatgttctctttgtctttgtttttgtaaattgttgtctattctcttttttttattttaattttttttatttttattaaattttttttattttttctaatttctattataaattattagctatttattgttatttttattttcttatttttttttttcttattttatttttattaattatttatatta

SEQ ID NO: 44219 - DNA, 123 bp, Gossypium hirsutum
  unsure (1)..(123): unsure at all n locations
  Clone ID: LIB3189-026-P1-K1-C2
gcggcttcggatctgcaaaaagatcaataatggcgtttattggagcctggcaatcgtacccatgaggcgtggaggggtgtttgtactatctgactttncttccctagggttacattagtttac

SEQ ID NO: 44220 - DNA, 165 bp, Gossypium hirsutum
  Clone ID: LIB3189-026-P1-K1-C9
atcccgttctttggcacagattctttcatatcatcgtagcattataagctatctacaggaaaggtatcctgatgaacacggaccgtttgttattacagccacttgtcttgaaacctttataaaaagttgtgctggctactctgttatcacatatatacatgtaat

SEQ ID NO: 44221 - DNA, 199 bp, Gossypium hirsutum
  unsure (1)..(199): unsure at all n locations
  Clone ID: LIB3189-026-P1-K1-E11
gttttctttaaaccaccatttaaagccttaaaaccatcattcatccaattatcatatgcttttgaatgtctatcttattttatacactcaanactttccatttaaattcctcataacatttttatatttttttatatttctcctattattttctcattctattctaatccaatttttactattcttatccttttctttt

SEQ ID NO: 44222 - DNA, 200 bp, Gossypium hirsutum
  Clone ID: LIB3189-026-P1-K1-F11
tcgagcgccagcgcgtccgaagggttctttagattttcttaccagttccttttattatgaaaatggcctcccacattgtttagtatggccgtatgggaccaaagagagagcttaagtttgctttggaatccttttgggataagaagagcagtgcctatgatttgcaaaaggttgctgctgatcttatgttatttatttgg

SEQ ID NO: 44223 - DNA, 150 bp, Gossypium hirsutum
  Clone ID: LIB3189-026-P1-K1-F6
gctctagtccgactttgtgaaatgacttgagaggttatgataaggggagctctcgggcgatgttgaaataccactacttaacgttattttacttattccggaatcgaaggcgggcacgttccctttttttatacccaattccatttttat

SEQ ID NO: 44224 - DNA, 222 bp, Gossypium hirsutum
  Clone ID: LIB3189-026-P1-K1-G1
gggaaccaagataaaaagtttttggcttggcctaatttgtaagcttggaggttaagggaaaaaactatggttgaagagggacaggtaattgcctgccacactgttgagtcatggcagcagcagttccagatgggaaacgagtccaccaaactgggggggggggatttaacagcatcatggggcgggccatgccgttttatttaaccaatcctggtggatctt

SEQ ID NO: 44225 - DNA, 369 bp, Gossypium hirsutum
  unsure (1)..(369): unsure at all n locations
  Clone ID: LIB3189-026-P1-K1-H2
ttcccggggtcgacccccacgcgnntccgcgatattttgtatttaaagaaatcgcnncctttagtgggatcagtgggaggtgannagaaaaatggtcttgggctgtgggtgggagagactgggcggttggcggctttccggttgggcaagtngnctggctagcggcttgggcggcggttgggcaagattgttnaccctgaggaatgatacttttgcttgatgcataacncacatacncggtgacaaacttgttcttgggcgtgtgcaaccccgggaaaagtgctactnttgattgggagcctgaaaatgggaaacctgggggcttggatatatggctcgcaaaatgtgggagataaacttggcacttgc

SEQ ID NO: 44226 - DNA, 306 bp, Gossypium hirsutum
  Clone ID: LIB3189-026-P1-K1-H8
cccacgcgtccggaaaacacaccctcctttccatttccattcattctttctctgtcgaaggaggcttgagtgatggcgtcccaacaacacctggagaagatgcagctccgtcagaactataggaatctttggcacactgatctcatcactaccattcatcgccaccctctttattgttgctttgctttatggtgtggaccatgtgcatcctacatgctccggaaacgagcgctttatggtgacatgtcaaggtatacatgttgtgctggttatttgccatgtagtggtacggagtaatacgatatt

SEQ ID NO: 44227 - DNA, 326 bp, Gossypium hirsutum
  Clone ID: LIB3189-030-P1-K1-B1
cggacgcgtgggcgataatagaacttcgagatctgcttcgggcttggttgtatgcggtatggagggggatatcatggcctctaaatcagttattcactccaacatttcgtcatcgtttgtagcggaggcacatacagggttaaaggcgattcagttagggattgaaatgagattacatagtttggatataaaaagagactcaagaacagtaatcaagaaatgtcagttcataaatcaagacaaatcgattacaagagcgataatcagatatataaacagcataaaagttgtctttcagaatatcgtgttttattttactctcaaaa

SEQ ID NO: 44228 - DNA, 405 bp, Gossypium hirsutum
  Clone ID: LIB3189-031-P1-K1-B10
cattgatgttgactctattaagacaacattgctcacgtcgaatttaccacaaaaacttggtgtgcttgtctattgcaccacctgtctacgtatatagatagcaaccactgctagctttgcttttatataagaaaaacaaaaagagatttgcaaaaacattgtaaagtgtattaattttaagacaatggctagggttccttgcaagcatgttcttcttattgttttcatctttctttgcttcatctctacaactccagtagctcggagtttgccgagcgaaatgaagaagggtctcgacgaccgggtggttacgacggaaaacgaaagtggagcaccgcctgatgttgatgaattagaatctatggactatacttcagcaagaagggagcctccgatccataactt

SEQ ID NO: 44229 - DNA, 130 bp, Gossypium hirsutum
  Clone ID: LIB3189-031-P1-K1-B12
aatgctgtgaaacggcatgctaatgggagactgttatttatatatctggataactgtgactggctagatggagaaaacactattgtcgtgaaggacaccgctgactctattttgaatcttgtgatgatag

SEQ ID NO: 44230 - DNA, 349 bp, Gossypium hirsutum
  Clone ID: LIB3189-031-P1-K1-B7
cttttcccaagctttcatcaaatggattttagttaaatctctctggattaaaatcaacaagttccataattgagaacagaaatcaagttctaacgaagaaggaacatccccgaattccaaaatgaagagacctaaatccatttcttccttcaacttgcttcttctcctttctgtattaataacccatctctgtttctctcttggtttcgccgattctcacttcgaaggattcgattcttaagacgacgacactgttgaagaagaactccttgatccccactctgttaaatcaccttctttacctcagtccgagtcacaggccttttttgattctgatctgaacactgtt

SEQ ID NO: 44231 - DNA, 153 bp, Gossypium hirsutum
  Clone ID: LIB3189-031-P1-K1-D5
ctatctctctctgtatttctctctcccgcaaggatttaattttctaattaaaaacccatcttggatgcggagatgttttgcttgtcacttgcaagcatcactctcatggcttccatcattgaatctgggtggcctgaatcttgatcacccatt

SEQ ID NO: 44232 - DNA, 347 bp, Gossypium hirsutum
  Clone ID: LIB3189-031-P1-K1-D8
gctatataacaggcggactgccaaagctattctgattactaagcagagaacaatgaatctggagtaataaaaatcttgctaactttgattgctagaaaatatcacagcatgacgcaactagctatctatataagctcgaacaaggacacgcgcactaacgttgcttgcagacgtagaagaataacggatgccttctctgcgctccggcaggatcttacattgacccgagacttgtgtcacaaatccagatggcgagacaattcaatggctgttgcagcagttggaaccatgtatcattgctgcatctagaactgggacgatgcccgcttcaactttggcatctgctg

SEQ ID NO: 44233 - DNA, 333 bp, Gossypium hirsutum
  Clone ID: LIB3189-031-P1-K1-E4
gcaatggaaagggttgaatccggtagagatttaagggccagaatgtacgcgaagcttagtaaagagaagtccctcgacggactcgatccaaccgaactggatctggatctcgattgggtctccgagttagtgaagtgaactcgatactggcaactcacccaactcagctttctgttatgatttatttcgggaattctttttatatattaaaaaaaacaaatcggtggctataatctgaccttttgtgaatattaatggggtttttttttttataatctgattttcgatcatcatttgcactgtgtaaatagacgacggtggaaaagaaagatg

SEQ ID NO: 44234 - DNA, 240 bp, Gossypium hirsutum
  Clone ID: LIB3189-031-P1-K1-E6
cccacgcgtccgttaatttgaaaaaaaaaacatggaaggagacgatttagacatggcatctgctgaatgcgctgaagcatatcttggtgacatgaataaaaggttaaaagagatgtatgaagaatctcttgctcttcttgagatgcaagtttaagtcgattaaagagatttgttccctttctagatccttctgctgttttagttacaacttatttaaatttagatggattgtttttttat

SEQ ID NO: 44235 - DNA, 311 bp, Gossypium hirsutum
  unsure (1)..(311): unsure at all n locations
  Clone ID: LIB3189-031-P1-K1-E8
ctttgctgttgaagtagtaatatctatagcatacagagatggagaggcaaagaagcaagcagggttgtttgttgatgtgggttttggtttctncctttttttttcacaatagggtcattgcagtgtccttttactttctttgttgagctttataacttctatttatcttctgtccctcatgcttgtacttctcctttattgttctcattgttttccattcgttttctagtttattggattcttctctttttttttatatttcctttttttttttgtttgttttatttttttccgttcatcttatttttttt

SEQ ID NO: 44236 - DNA, 177 bp, Gossypium hirsutum
  Clone ID: LIB3189-031-P1-K1-F3
acgaccccgcgtccgaaaagacaacattgcataggccagcattatacttgagacattcattgtccttctttcacaacatggcagctattctttctttatacactaatccttcacattttaaaattctcttcaacaccatcttactacctattaatcttcatctttcctattccttta

SEQ ID NO: 44237 - DNA, 284 bp, Gossypium hirsutum
  Clone ID: LIB3189-031-P1-K1-F4
cttgaatatcttggacgagttgttttcaacaccaacggcatgctttaccctgatagtgtggttggaactgattcccatacaactatgatagatggtcttggagtagctggctggggagttggtggtattgaagctgaggcagccatgcttggtcagcctatgagcatggttttgcctggtgttgttggattcaagttatctggaaaattaagaaatggtgtgacagctacagacttggttctaactgtgacacaaatactgaggaagcacggtgttgttggcaa

SEQ ID NO: 44238 - DNA, 178 bp, Gossypium hirsutum
  Clone ID: LIB3189-031-P1-K1-F5
ctcacacgtccgatatgacgaattattatccattgctgttgagttgagccggaatgatgtgttggaacggagctagatacgcctaggattaattgattcggaagacccagatggggaagatgaagagaatgggataagaaagtgtttggtgaggggaaaccaatggttctactggaac

SEQ ID NO: 44239 - DNA, 338 bp, Gossypium hirsutum
  unsure (1)..(338): unsure at all n locations
  Clone ID: LIB3189-031-P1-K1-G12
acnactagtcgaataatcgtacagtccagaggcacccactcctttctttcttgcttactggcgtgtcttcattaccataaaattatatttctctccatcgacccctatcccaagctctcagctgcaccaggaagtaatttgaaggttttatgaactctacaatctccgacgcgaaatcaattgagtttatttccgtttttatccatttattgcatagaatgctaatatctagcttntggggtcttgttgcatccactactcagtgttgagagaatacaaaaacttttttttcttccttttccccaatgcgtgacatgtattttcgattttaatggaac

SEQ ID NO: 44240 - DNA, 369 bp, Gossypium hirsutum
  unsure (1)..(369): unsure at all n locations
  Clone ID: LIB3189-031-P1-K1-G6
agcctctcgggtttgatgtccacaagaaaaactacaagatgagactccagaatttgaaagcagggggagaaggaaaccttaatgtcgccactganatatttcaagtggcacctagtttacatatggttgaggtccgaaaagcaaaggtggacacattggaattcaatacgttctacaaaagccttttgacctgtctggaagatgttgtcttgaaaactgatgaggacataaaatagttgcacgtatgaattgacctatgtttccaagttaataaaaattgtggatatttatacttttattattttcaattgtggggggtggggggggtttttttttaatatatttattatttcttatttacattaattt

SEQ ID NO: 44241 - DNA, 371 bp, Gossypium hirsutum
  Clone ID: LIB3189-031-P1-K1-H6
cggacgcgtgggtcttgagcacgtgcaaacagccagagaggcaaagattaagacacttggttgggctggcatggcaacgaaaaccaaaaaattattattttaaaaaaacatttcgtttttgaaggaaggaaagaaagaaactcgggaaacatcaacagcaacaacaacatttgacaaagttgttgttcttcttcttcaaagaaaaccctttttctttactcatcgcaaggtttttgttgttgggttttggaaacatcattaacttaacaagaacagcacagcccagatcactttagttatcatttttggaaatctatggagcagcttgttaactttataattacgccctcccagagctgaatacaattcat

SEQ ID NO: 44242 - DNA, 475 bp, Gossypium hirsutum
  Clone ID: LIB3189-031-P1-K1-H8
cccacgcgtccgcgagaatccacgacccttcccttcctccgtagacagattgtagtagtatctcgatcctatacaccgccgcagccgaccgccgtttattttttcataccgcggccttacggcgacgatgagggtcgactggggcgatcttcctgaagaaccacaacagccggagcaagattctaacctcaatttcgactttttttctcttatttccaagcccaaggattattataagatattggaagttgattacgatgctacggaggatgctattcgctccaattatatccgtcttgcactgaaatggcattctgataagcaaaaggacgatggggatagcgccactttaagatttcaagagataaatggggcttaccaggttctcattgatccagtcaaaaggagtgagtatgataatgaaggggatgttgcatgtgtatgactatgacataattgggtacctgaaccgttt

SEQ ID NO: 44243 - DNA, 418 bp, Gossypium hirsutum
  Clone ID: LIB3189-032-P1-K1-C4
gttctagatcgcgagcggccgctcgcccacgcgtccggataatccgaaaaattggccattttcccctcgcaatcttcctcattcaccatcaacactccatcgtcaatccctgctgtcatcacaccaaatctaaaaccacacaccaccaccatggcgccaccaccaccaccgtcagtttccatgtcttcttgaattgctcttgctctgattcttcctttgctcttcgattgcgtgtttgtgtaagttgattgaaacaacccaacgggaacaaagtattgatatcgtgtgtgttttggatttttttaataacaataaattattgttaagaagagatgaagttctgcaagaaatatcaagaatacatgcagggacaagagaaggaactacctggtggtggtttcaggaagcttaagaagat

SEQ ID NO: 44244 - DNA, 209 bp, Gossypium hirsutum
  Clone ID: LIB3189-032-P1-K1-D4
cagccctaaataaaaccgatgagaaatttctttgaaaaaaaaataacagttcattgttcaggaatcacagctttatcccagacgaaaccaagcacttaaacatagaaaaccaaacgttcatacgcttaattacatgatgcctgcctgcctgtgttctatcccttacctgtatttaaacaagggtcttcctggttagaaagtgtggatta

SEQ ID NO: 44245 - DNA, 316 bp, Gossypium hirsutum
  Clone ID: LIB3189-032-P1-K1-D7
cggacgcgtgggattcccttccttcatcgctgaatagccattccattccacgggagtgttttttttcccttttcatttttttccctcagcttcatcttcttctttcctttccatatctgtgtctcccttttttccttcttatttccctttatcttatttcccttttttccttcattactgatgttgaaattccgctgtaagatccattaaaatgacattcttttcatcttcaagaatcatatattgtgaaattcatgattgctcatttttctctctcataatttatttttattatcgtatatggctattttctctt

SEQ ID NO: 44246 - DNA, 138 bp, Gossypium hirsutum
  Clone ID: LIB3189-032-P1-K1-F1
ggatttctaactttaacacaagcatataagttcatttattatctgaatgaatttactcacatggggtacggtgatagttaaaattgatgtaaaacctttatgtcaaatcgtcttaaggactcttttaaattgctttat

SEQ ID NO: 44247 - DNA, 325 bp, Gossypium hirsutum
  Clone ID: LIB3189-032-P1-K1-F2
cccacgcgtccgaaaaaaaaaaaaaaaaaaaaaaaaaaaaaaaaaaaaaaaaaaaaaaaaaaaaggagaaaagataaaaaataataaaaaaagtgggctgccggtccttcggtttcataggttccaaactggggtgtccgtttttgaggctccttgtttcttgtcgcgtgcttgcaaaaattggccgttttttagcgtcctcgaaattgattaattggccgttttttcccacttttaagtttgggaaacccctgccctttcccatttttccggcttggcaaaaatttccttttttttcgcctttcttattattaaagaggcccgc

SEQ ID NO: 44248 - DNA, 452 bp, Gossypium hirsutum
  Clone ID: LIB3189-032-P1-K1-F3
attaaagctcatgaaaataggaaacagttattctccaaaagtacaataagagagaacccgtttcaacatcaaacgagatccgtagctgagccacctccttggtctagttcttcaaaggtccccacgagttcaccactgttaggaccgccaccaaatggagttcaagctggaagccaactgagacgaaggccagctgtggatggcacgccttcaaaccacatggaaatgcctatgttgcaacaggtagttcccaggcaagaggaatactctcaaggtagatcagttgcacttcaaaatgtcgaatctacaatttcagaacttagtgggatctttacacatctagcttcaatggtttgcacatttaaggtgaactagctttcaggattgatgaagatatggatcaatcattagctaatgtcgaaggtgctcgtagtgcttctattgggcatttt

SEQ ID NO: 44249 - DNA, 447 bp, Gossypium hirsutum
  Clone ID: LIB3189-032-P1-K1-H3
cccacgcgtccgctttttttctcaccaatatctgctctttttcgtcattctcagtcaaagtttcattctcttccatgctatcccttctcaatttctttaagtggttccaatgcattttccggggtttcttgtatcttatcacagtaaaaagagatcaaaggcatggaggaaaggtttctgaagaaaccacccatgtcatcaacacatcgaaacagggctctgtctttcagcttaacccccaaggcaccttctccaatcaaatttcccataacctgccagtagttggttttaaagacccaaaggatgaagaaaccgagttggaattcgatgtaggggaccaagataacattacaccctgcacagagttgaagagcatagtggctggagaagatgattctcagcttcaagtatcttcagagaccgttatcaatgatgatcatagcattc

SEQ ID NO: 44250 - DNA, 432 bp, Gossypium hirsutum
  Clone ID: LIB3189-032-P1-K1-H9
gaccattttgtccttcatcttcccaattagatcccgtttaactggtctgcaatccttggtctttgatccgcaaagagaatcagttacacttcaaattatcgaaaggaacttttctttttgcttttattttagttatgttgggggcaggattggaattcaggagaggtcgtggagaagatcggttttacaatccacccaaggcgagaagagagaaccagaatcagcaaaacgatcaaccgtggagggatcaagccgatgtttcaccgagtctatcaaaggataaatccaagtctgtcatagggattgttttaacttgaccattccaaagcggtttccattctcgctaccgaacccaatgtttcttctttgagtaatatagaaaggtttttggaattggttcaatcctttccgtccctgccctttttctttttt

SEQ ID NO: 44251 - DNA, 158 bp, Gossypium hirsutum
  Clone ID: LIB3189-033-P1-K1-A10
gagacatggcaatgccaagatatcgtccccttcatctctgtctactcatcttgctcatctacaccactccttccataggaggactcaatggcaccgagctcctcaaggcggcctgcaaccaaacgtccgactacgcattctgctatgctattttaact

SEQ ID NO: 44252 - DNA, 421 bp, Gossypium hirsutum
  Clone ID: LIB3189-033-P1-K1-B1
ctagcaccaatatcaaagcccgagggacataaacttcaatttttgtgataagttagactaggatgaaaatgaatagcaaaagaaatgcactatctaatgccattcaattccattttacaaattggaatgaatatttacataaccaagaatcgaaatcacgacatatattattcattatccatcctacttccctcattagtaccagggatatgaatccagcaaatcttgaaatcaacagtcattaccaattgagtgctgaaacaaacctacaacaacaaatttgcttttcgcttaacatcgccaccatcaacaaatttttctatgacatgttcagtttagtcaccattattcttaaaatcggatctaatgtcttcagccaacatttccttatatttgcatttgtttcattatcattgagcat

SEQ ID NO: 44253 - DNA, 324 bp, Gossypium hirsutum
  unsure (1)..(324): unsure at all n locations
  Clone ID: LIB3189-033-P1-K1-B10
caaaacagagaaaatggctgcatcttcccttataatctccccaagaaagcttcgatccgatctctactgttattcctatcaacgtgatgcaaacaccccactggttatatcagttcttgcttctcttatcgagagaacaatggcaaggaacgaaaggattgtcaagaactgtaaatgggcattgacgagaaaagatttcaggagcagggttttcgattgccacgaaacacccgacatgacgattcaatcttacctagagagaattttccgatacaccaaagccggtccctcgatttatgtggntgcttatgtgtatatcgatcg

SEQ ID NO: 44254 - DNA, 193 bp, Gossypium hirsutum
  Clone ID: LIB3189-033-P1-K1-C8
atatatactagcttaaaggatatgtgtcgatgctcttgactactagagacatacaatctcgggggtgatggcatgagatatacactgaaaaatccaggtgcgataaatggggaagatatacttggcagcaagcgtgatttaggtatttctggatatggaggggaacgagaaacgataaccttgagcttataat

SEQ ID NO: 44255 - DNA, 221 bp, Gossypium hirsutum
  Clone ID: LIB3189-033-P1-K1-D2
ctactaacctatgtgtgcaaaaatacccaaatctaattttgccacatccagatctaccctatgtgtgcgcatacgcactactaaatgcgatccttaacaccatactgtctcttctaaaattttagctacactttacaattatcacgatacatccatcacctcctagaaatacctccttgtgttcttgattcaattaaactatccccctttttcaagttttc

SEQ ID NO: 44256 - DNA, 215 bp, Gossypium hirsutum
  Clone ID: LIB3189-033-P1-K1-D7
cccactcgtacggttagaatccccaattttctcctctgaagaaatacccttctaattatagtatggtctttttatacaaaagactccgatcttttaattttactattattataaaaaatcgtgccaaatccgcatctataatacacaatttaccgcagataagacggctataattaactctgtactcgaaactgtggaaagtatctagggctttt

SEQ ID NO: 44257 - DNA, 306 bp, Gossypium hirsutum
  Clone ID: LIB3189-033-P1-K1-E1
gtattcttccaccctctcttccgcaaacacttaatctcaaaattttctcaggaaagcgagggtgggttacaaacacagctatgtagtggggcaccaatcaacatctatcgagatctggcatccagacgggcattggtttctaggcaaaaccttatctgcggcacacaagactcctctcatgcagctgactcttgcatttttcatatcaacacgcgagtcttcagctatcagcggttagaccacgccctcggttctcctagggatacgcctgagcgccttgaaaggtggctaaaacatggctacata

SEQ ID NO: 44258 - DNA, 394 bp, Gossypium hirsutum
  Clone ID: LIB3189-033-P1-K1-H7
gacccacgcgtccgcccacgcgtacgcataatctcagctttgattcaaatcgaaacctgatagctggattagaatctgaaggtaaggtttgtgtattcgcgcagactaattcttttttcacccaaataatattgtctaatattcatcctacaaacatagatgaaggtaaatataatttaatgctatttatcagcccaatttgagaaactttttataagcctggccagtacgacttttctaccgccgatagctataacaatggggaaagaagggtttctttttcgtcactgaaaatcgaacaaaaaatggcgatggcgagcgtgcgatctggtcttctccgaaccgccctttcgggcggatcttgttcttctgctcctcccaagcgaggcttttt

SEQ ID NO: 44259 - DNA, 135 bp, Gossypium hirsutum
  Clone ID: LIB3189-034-P1-K1-E1
accataaggtagggtgatttttttattgattgctaataatgatatttagtacatttaggactttccctgtatcagcttttgagattgaaggtgaacaagtttaggggtttaagggtaaggtcgtatagaaactag

SEQ ID NO: 44260 - DNA, 182 bp, Gossypium hirsutum
  Clone ID: LIB3189-034-P1-K1-E7
ctttttctgagtctctatatggtttgcggaggagagcagcaaaaataagaacaaaacaggctgatatccgatcaaagtctaatgatgggatccaacactctagtctagaaaagcgccagagagttctttcagttgtattttttggttggttgccttaccttaattcaatatcgtattcaatc

SEQ ID NO: 44261 - DNA, 422 bp, Gossypium hirsutum
  Clone ID: LIB3189-034-P1-K1-F7
gcagtccgcagtgacaaagaaaataggggtttgtgcaaggaaagtttgggcatggattcgggtattgaaaatagggtttttcggtttggagtaccttctaacgatgagttccaaggactgtcagttttattaccagccaaaggggattcacaacgtcgcaaaccgcctaatgagttagtaaatcgccagtagatactgtggatttagtggcagctatggagggcataatttttgggttgaagcatggtcatgtaaccatggagattttaactgaaaacccaaaaaatgatgaaccgatgggtcaattagattcgactaaacgccaaggttagctgctaacaattttgttgccgctagggttctcttttggtattttatatatagattccaaaatcattttttggaattgtcaaggtgagggc

SEQ ID NO: 44262 - DNA, 211 bp, Gossypium hirsutum
  Clone ID: LIB3189-037-P1-K1-B9
cacgacgccacgctcaactattagccttttagcgctttattagaagagccccctctactctgcagcaaagaaacaacaggagatacgcgaggtatcatcagcactcagagagggcgaggatggaagagagaatcaattctcaaactccataattaaagagaaaatccgaagacatccgattaacacagaagcctgtaaccatgtgaaagaa

SEQ ID NO: 44263 - DNA, 173 bp, Gossypium hirsutum
  Clone ID: LIB3189-037-P1-K1-C3
gtccgaatcggtcgcccacgcgtcgttaatctcgagcgaaatgaataccgattgttttatatgagcgggatgctttcctgggtcatgtgtgccgtgattcgtacggagactttctcggcggatggatttgaagttgatcctgtgttcgaacaagtaacggactggtacgaatg

SEQ ID NO: 44264 - DNA, 116 bp, Gossypium hirsutum
  Clone ID: LIB3189-037-P1-K1-C8
tccgagccacgacgtcacgcgtagatcgcagagcggtcgcacgatatctagatctattctgataacgagcggacgccctctagggtgacggtcactcagtacgcacgccaaatctc

SEQ ID NO: 44265 - DNA, 151 bp, Gossypium hirsutum
  Clone ID: LIB3189-037-P1-K1-D1
cgacagttcctttgattttgagagaaaagagagagtgagagaagagctgatcttggcttctctgggtcgttcgattccgcttaatcatagcccgcgtttctctcacacgtgaaaaatggggctgcctctcacaaagctatttagccggctt

SEQ ID NO: 44266 - DNA, 201 bp, Gossypium hirsutum
  Clone ID: LIB3189-037-P1-K1-D6
gcgtgcgctttctgtacatatactttgctgcaaattctcccatacttttcagaaaatctaacacaaggttttgtaaatgttagagatccttcatggtcaaggtgaacaatgcgggaaccatatctgttccaagttttgggaggttgtttgcgattagcacagcatagatccaactggtaggttcattgtttcttcggatct

SEQ ID NO: 44267 - DNA, 126 bp, Gossypium hirsutum
  Clone ID: LIB3189-037-P1-K1-E4
aatacatttacattcttaaactagagcatttccctacaaaatactttttcttgctacaaatgatttacaatgaagatgtcatctcccttacttaacgtttactattatttttcaccactatcacct

SEQ ID NO: 44268 - DNA, 387 bp, Gossypium hirsutum
  Clone ID: LIB3189-037-P1-K1-E6
ctatttttttattttcttactttttcattttttttttttaaggggaattttattgatgtctttttttttaatttatcttcatttctttacataatcttgactacactactaatcatagaagagttctatctgctttcatccctatgcaccagcagcttgatcatttattgttaaataatactcctactgttgttagaacaaaggaatggatccaaaaaaactcaaatggattggtgattttttttatgccatagatacctgaaacccagattaaaacttaaatttgtcctatagctttgccattaatttaaagatacttgcacttttttatttcaatgcattgcttagatcattgcaacatttatatattgtgtttatgctatttat

SEQ ID NO: 44269 - DNA, 230 bp, Gossypium hirsutum
  Clone ID: LIB3189-037-P1-K1-G10
agaactactacttcaaacaagcacagacctcccacgaaagatgttcttgagaataatcaatgcgggttgctctacgaacgaacagctaaaacttgtgacgcagcttgagattgccataaagcgcacacatttatcttgcaacctcaacacaacgagaaactaatagctttctagctcccagccatagaatcatgactctacttgatcatggcttccatggataccccaaa

SEQ ID NO: 44270 - DNA, 346 bp, Gossypium hirsutum
  Clone ID: LIB3189-037-P1-K1-G5
ataacccctacatccaatgtgcactgacgttcatcgtatagatcttgagcaccaagctgaataagggtcgctttacaaaactaaagctaaagctcctaacgatgatacagagagccatagtagacagatcctccatcccccatcttatacacagcgtctgaatgtatgagctcttatcggcagacttagaaagtccacttaactatctgccatctttatttcattcccaagatgacttcatctgtagggtttatactgtctgtccattatacactcacccggcatgtgagatgatgtatcatcgaaccttccagcgaccggctatctagaataaaatctttttttg

SEQ ID NO: 44271 - DNA, 262 bp, Gossypium hirsutum
  Clone ID: LIB3189-039-P1-K1-A10
cggacgcgtgggaaaagatataatctttttttttttcaggaaaatttccataccccattcttcacttcatttccccggataagtctttctctctctttcgccttgaactttttttttctttttgttttgaataaaggtcttctttcttttgctgaagttgagggattgggagattgctttggatctgtgttgattgggatatctttattcatagttttcacgtgcgactatttattgactcgttcgagttagtagattatta

SEQ ID NO: 44272 - DNA, 486 bp, Gossypium hirsutum
  Clone ID: LIB3189-039-P1-K1-A4
cacttctcatccttgttattttaaagttgtatccaatttctctagagttacgagaagaatctggtgatgatgattccattaccaatctctggttgtggggagggatataagataggacgagatcggcttacatgaccttgcctttggttttggtttaggctaagggcaatattaaatgaattatctggctcttttatgtgtataatacaaataaaaaaaattaaatattgaaatgacatttgaatattattatttattaaaaatggtatttttgaaacaatatcaaagtgggaagggggagagatgggctataccattttatttgattttatttaattatttttaaaagtgaggagagaggaatgcgcaacactagtataacaaaaattaacatactatattatacgaattcgtatatggcatcgagacttggagggctatagagtggtacccataggcggcactagtctgatggaggtttgacag

SEQ ID NO: 44273 - DNA, 305 bp, Gossypium hirsutum
  Clone ID: LIB3189-039-P1-K1-B10
attctgtgtctctgaatgtagatgcagcatatgaatttactgacccaaaccaatcggcagcgggaggaaatgcagaagttattgttcttagtgattcagatgaagagaatgaaatattgatatctcctccaactgtgtataaggataatcacaaccaaaatgatggtgggggacttggtttttctgttgcaccttctggaatttcttatacgtattcagaagatccacctcttgtgccttcttgctaattcagttcttatttcatctcattgttgaatttgtccttccttttttgttttcttcct

SEQ ID NO: 44274 - DNA, 338 bp, Gossypium hirsutum
  Clone ID: LIB3189-039-P1-K1-C2
ggggtttatggtgaggttaaagagataagggaaacaccatacaagcgacaccataagttcattgagtgttatgatgttagagctgcagaacaagctcttaagtcactgaatagaagtgatatagccggtgaacgtattaagcttgaacctagtcacactggaggagctcgtggcaatttgatgtcgcaactgaatcaagatctcgaacatgatgactcttggggatcctgacatgaaactgggactcgccctgccaaggctcattcagggcgcggggcgcagtggaaccgcccaatataacctattcccatgccagctccttagcagccccttctttt

SEQ ID NO: 44275 - DNA, 212 bp, Gossypium hirsutum
  Clone ID: LIB3189-039-P1-K1-C7
attaaactaaaaacccttcacagatactgagattaatggcaccctcccattctacccggggagagtgaatacaccccgattcctaccatccttacctaactccgacagtctaacaagcatagctatctccttttgcactatcattgtctacctagccatttcatggctcttaatttaccgtaccaactctcacaaatccctcaaatcctcta

SEQ ID NO: 44276 - DNA, 346 bp, Gossypium hirsutum
  Clone ID: LIB3189-039-P1-K1-D6
agaccaactaatgtgcgctctaatcccagatcacactactgcctcaggcagcaaatcaaatcgtgggcggacatgaatcactaaatgggatggtatacaacattccggtgagtctgtataacacgctgttgtttacagtgattacatgcgagcgtcatacatatatatactgagcattggtgatgatacatataaaccatctgatcttactaagtttgcgcaatatcacgctgaatatatgatgggtgatgacctcatggacataccctccctaatgtggtgtggtggacagatcccaaaatttgatcatcaccacggagcggtgatcccagaacatgcatcctct

SEQ ID NO: 44277 - DNA, 299 bp, Gossypium hirsutum
  Clone ID: LIB3189-039-P1-K1-D9
ccttatccctccacagttcacacacagccgtctgtctttcaaaaaagtttgcgccagggatttaaaaggaacaaaaaatcttctactcaataaaagagagaaatatcttccttaccgtaactatttgcaggaaaattaaaaataacattgatgagttattacaatcaacaacaaccttcagttgttggtcctcctactcaaggtcatccaccctaaggatttcctaaggatgcttattcaccacctggatatcctcctacaaggatatccttaatgttatccttcttaaggatttcctt

SEQ ID NO: 44278 - DNA, 205 bp, Gossypium hirsutum
  Clone ID: LIB3189-039-P1-K1-E7
ggaaagacttatcaagacgcaaagctctcccacaattctatcaacctacactatgatgtgggtggggattctagaggcgctgccaaaattcgagtttcgagcgatttaagatactccgttgtggagtcgttgcagatgattttgaagttcgcgtggaattaggccgagtttcatactaaagtgactgttaaagatccggtgattt

SEQ ID NO: 44279 - DNA, 195 bp, Gossypium hirsutum
  Clone ID: LIB3189-039-P1-K1-F12
cccacgcgtccgcataaaccaaacagtactcaacaagttttgggaacttcttcatcttagggtgattggcattgctggtgggtatggcttgttcggtcgtagatatattgataatggtaatcttgatgattctcactcgcatgcttctggaatggtccatgtttcgtctatatttgttgatggtttcgaacattc

SEQ ID NO: 44280 - DNA, 455 bp, Gossypium hirsutum
  Clone ID: LIB3189-039-P1-K1-F2
acgcaagatagaggaagagagggataaacagtgtctggtctctttatatttgaaagtaaaatggccactctcaggcggagagagacgcattttatcaaactcttcatcacccaaatatgtgttccttctctctacactttttcaatctttgaattccttactttatgttactaggttggtgcttggttgtctcttctctttcttttttttttcttttaatcacgagcttcatggtttctgattttgtacttttgatgaactggaagtgtatgttttgcttcgtctgtctgatagtatgaatcccaaaagaaaaacatagtattcctttttgtcttgttttcagtggccttttttcgccacttcccaagcttgaaaggttaacagcttttcaattccttgaaatttggataaaaaacaccgctttctgatcctcgagcctcaaaattccattttct

SEQ ID NO: 44281 - DNA, 363 bp, Gossypium hirsutum
  Clone ID: LIB3189-039-P1-K1-F5
aattctgcgaaatgtgtgctgcagaagcatggtccatatacctactatgctgcatctagctctggggatctcttccggcaaagctcaaaacgattgcgtctttcacttcaaggactaacacctgatccaagacaccaagctatggcaaaggctgccactataccgcaccgcaaaaacatctgatggttcaacacactgattgacataagcatacacaaacgatcgcggacgatgttctcaaagagacttttccagcttaccagcactagaaagatgatagattcatgacaactgggactgattctactcagctatctgcatctattgatgattcacactttatgaacgatcatgtttataggc

SEQ ID NO: 44282 - DNA, 348 bp, Gossypium hirsutum
  Clone ID: LIB3189-039-P1-K1-F7
gagcagagctatagcgagcatgcctgatgaacaggctattgaaattccagataccagctgtggagagacgtctgacagaactgggacaggacttatatgataccgtggactacatctggaaacccgttggctgaatatgaaaataaggtggctacctccatggtaaaatcttctccaacttcagttgtaaatcaggacaatcagcttatagaatctgactcactggaggaccaacacatattcaatccatctgtcgccgcttccacatatgggaatgttttaagccaatgtcctgcaatacctgctttatccaacatccagtgtggtgaattttatcacccggcctta

SEQ ID NO: 44283 - DNA, 215 bp, Gossypium hirsutum
  Clone ID: LIB3189-039-P1-K1-F8
atttcaccagcttttgccataaaccactaatcgggcgctcgggtccaacagagggggggatttctctcgcgctctctctctaaaaagacagatcaatattttttttatttcctttttaattatgacgagaaagtgtagaaaacttggagaaatcgcagtcatggagctctctgacgtctgacttgaaacacgagccatggctgctgccacaggaa

SEQ ID NO: 44284 - DNA, 126 bp, Gossypium hirsutum
  Clone ID: LIB3189-039-P1-K1-G6
cccacgcgtccgattaatcttatggcgactcatagaaacgagcagaagacagactcaactagtgggacagtgcttgctagtgtaatgaggagtctacacacaagtgttgactgtctttaggcattc

SEQ ID NO: 44285 - DNA, 456 bp, Gossypium hirsutum
  unsure (1)..(456): unsure at all n locations
  Clone ID: LIB3189-039-P1-K1-H1
attggtggctactgaactcatgtgaaccatttgttgtccaggaatcaattgcgaggaacagcataatccatgtttgactaaatttcagtcttctctaaaggaggaatctaatccacaatttggtttagctgtaccttatacatctccagatgaagcaaatggtcaaaatggagtttctggcactcatttgcgaccaaaccctcaacctccacttgccaagcaatttcatagtaatcttcaaaatgggactgactcatcaggtgaaactcagattcgaaatgggaggcctcgaccagatggccgtggaaaaaacaatttatttcctcgttattggcctaggtttactgaccaagacctgcagcaaataactggagattcaaattctgtaatcactcctttgtttgagaaaatgttgagtgctagtgatgnctggcgaattggacgtctggtgctacc

SEQ ID NO: 44286 - DNA, 253 bp, Gossypium hirsutum
  Clone ID: LIB3189-039-P1-K1-H10
gtcgcgccgccacgcgtccgatcgcgagcggcctttctcctttttctctttctttgagaaagaagaagtattagactgaggctttttattagctcagtcatgagcacctgatctctcttcaaacatgagagaaaacattagtacattccgtgcactaatcagacctaacatcagccggcaggtcctcttattataaatactaatattcctagcagctcaattagagcgaatgggtagctgatgggggcattct

SEQ ID NO: 44287 - DNA, 419 bp, Gossypium hirsutum
  Clone ID: LIB3189-039-P1-K1-H2
ccatttgttgttcatgaatcaattgcgaggaacagcatgatccatgtttgactaaatttcagtcctaccaaaagaatcagccattatttttgtagcaatgtatttttttaaaacaaagaaaaatgggtattcttgccaaaaaactggaaaatcccaaaaaaattgaacaaggaaaagaacaccgctctttgagtgaactgcccttgaaaagaacgatgggtctccaaaaataatcaagccgccaagggtttttggcatggattcaaacccagggtttccctttcccacttcaatgcaccaaactctccggacccgtattcgaccaacagacttgaacctcttacttgtgccccaccaagtgcatgttggtcccatttatgaaaaatggtttccacattcccagcaaatcctatcggaaa

SEQ ID NO: 44288 - DNA, 305 bp, Gossypium hirsutum
  Clone ID: LIB3189-039-P1-K1-H5
gttttgcttgcgattaatcgatatggctagctcaatgtcccttaagcttgcatgtgtagccgagggctgcatggtggctggatcacccgtgcatgaaggggcccaaacctgtggaccagtcacaagctcgctcgcgcgctgcattggtctctagccagagaatatggctggtgcacccaccgcagcttgttccgtgcagatatacaatatcaacttcggcgctcatacagctccacaccccgtggcccctaagcgctacgttaaacgtgcgcacgctgacattctttgcattaaacatgagcttg

SEQ ID NO: 44289 - DNA, 244 bp, Gossypium hirsutum
  Clone ID: LIB3189-040-P1-K1-B7
ccaaacccttaattcaggatgaatttcatggctttaaaacaacctgaaaatagcttactcgggtctgaatctgactcccagaggactctgtaccccatatgtgactggaacatcagttgcggctttaaagtacaaagatgggattttaatggctgctgatatgggaggtcatgttcattcactttcattggccttttatctttttttctgaattggtcagtttcttttaatggtttgaatcatt

SEQ ID NO: 44290 - DNA, 204 bp, Gossypium hirsutum
  Clone ID: LIB3189-040-P1-K1-E3
cccacgcgtacggaaaagtgaaaaaaaaaactaaaaattctacagtaaacaaactttatgcaaaagtatgtgaacttttttttagtggagggacaacacataaaatttcacgaaatataagctatatttaatttatatattgggggatgactgtacatggagaactacaagatgattatttatttagtcatggtttaaattttt

SEQ ID NO: 44291 - DNA, 196 bp, Gossypium hirsutum
  Clone ID: LIB3189-040-P1-K1-E7
cccacgcgtccgcggacgcgtgggttcagagtagaagcttcactaagcttactccctcccggggggccgctctctggttctggggcttccatggctgtcttgtttaaaatgcctgtcgttttgggtttctttgtgggtcttatgatgctgggttggggtgtcgtcagttgagttcgattagctttttcaacctggt

SEQ ID NO: 44292 - DNA, 467 bp, Gossypium hirsutum
  Clone ID: LIB3189-040-P1-K1-F3
cggacgcgtggggctgtgccggtccctggtaaatttggacgcggaggtggtgaagatgaaacggcgcgggatagggcccgtcttcgtcccgttggttccctcaaccttctttctgattcctgggagttgcacatcgatcgatttttgccttttttgactgagaatactgattttaaggtggctggaatcatcggtccacctggtgcaggcaagtcgacgataatgaatgagctttatggttttgatggggtatcacctgggatgttgccaccatttgctatacagtcagaagaaaccatagcaatggcaaggcattgtactgtaggtattgaaccacagatttctgctgaacggcttatactacttgatacccagtctgttatcagtccttcggctttatcttgagattatgagacctgatggcttatcacagtttcaggactaattggtgagtcactgtcttgctg

SEQ ID NO: 44293 - DNA, 306 bp, Gossypium hirsutum
  Clone ID: LIB3189-040-P1-K1-G1
gttagatcgtgtcaagacgagtatctaagcagttcagttacagtactactaactgaaccagaaacggcgcccaccacatttttatatgataaactaactcaaaaaccctaaacactccctccctcgctccctccctctttctcacaattcatctcaagcagttactgtacaacaatggcgacgccttctttgggtgaagatactgccaaggctgttctccgccaggttgagttttacttcggtgatagcaatcttccaaaagacgactttctcaagacaaaaatcaatgagagcgaaaatgatatg

SEQ ID NO: 44294 - DNA, 215 bp, Gossypium hirsutum
  Clone ID: LIB3189-040-P1-K1-G7
gaagcagccgctcctccttccatcttctaaacaaggttcagccataatggattcgcaaattgagtttgctgttgtggtgaatgtaatgggaaggaccggttcatgaggttaagtgacgcatgttagagtgttgtattttgtacgatcagatattggttcattagttatttctttgttttgtctgttttttgtggttagttattttttttatttgc

SEQ ID NO: 44295 - DNA, 406 bp, Gossypium hirsutum
  Clone ID: LIB3189-040-P1-K1-G8
ggcagaaacatccaacgtcaggccaggatctgaaatcgttgtcaacatccacgctttttcggtgggcacccttcccaaaatccgcagccttttcaacttcccactctttctttcatctctcgcaaccaacaaagaggaaaggcgggcgccatactcctcactcatctgctaatgtttgcggctgcaaccacccaaccatgatctgcctttacctttctcaaccctattccgcttcttcattttctttaatcccttcactcataccctcttcaatacccaaatttaaacctgcttttcattgctttcctaaaacccacaaaaagaaaaagaagattaatagatgaatatgcagagcggagttttcaccggatgctccccttgcggcttcaatctttgcctgtatgct

SEQ ID NO: 44296 - DNA, 462 bp, Gossypium hirsutum
  unsure (1)..(462): unsure at all n locations
  Clone ID: LIB3189-040-P1-K1-H3
cttcgatacacttatccagtcctgttatgtatattgattttaatgcagggccgctggggatatgcagtgaaggacgaaattttccgggaaaatgaaacgaaaatttcccatcacattaaaagcgcagaggttgggttattcaccatggatgaactccttaattttcacgttggtcaaaaactccccatcttcttccccatccgaaacctctcactgtacccacctttctttttgcccccaaaataccaaaatatcatccctttcataaaacccgctgccatgttcaacctcttcaaggtcccaccgtcttccccaaaaggtaaagcctttttgggtactttatactcatgcgattccatcaatggcgaaaccaccaaaatctgcgccacctctttggactccatgctcggnttcgttaaaaaagctttcggacccgacgttgatttcaagttcatcaccacg

SEQ ID NO: 44297 - DNA, 311 bp, Gossypium hirsutum
  Clone ID: LIB3189-040-P1-K1-H9
ctctgttcatagccacttatggtctatttcctgcgtcagctccaatgggaaagggaacagggcgtcttggtaaaagaaggaccatgccacacggcgactcaccccgatgctctcaacgcagctttgactgatagcatctcaaccttgatcttcgctttcgctggatcgggctcaggaatggcttttaacaagttgaccgacaactgagcaacaaccccagccggtctcgtagccgccgctctacctaatgcctaaagactttccgtcgctgaatccggtggcgccaacatatcatgtggacacgccaaccc

SEQ ID NO: 44298 - DNA, 187 bp, Gossypium hirsutum
  unsure (1)..(187): unsure at all n locations
  Clone ID: LIB3189-042-P1-K1-A3
ccgtccgaaggactctatcttgttgacagttttcctaactcttancttctcgccgaaaaatactataatgtgcggggaatatattaacatcggcgctatcttcatttcttacactttctctnnnaagtttacaaccaccggccactttatctacaaactttacaatcacctcatccgattcttatat

SEQ ID NO: 44299 - DNA, 305 bp, Gossypium hirsutum
  Clone ID: LIB3189-042-P1-K1-A5
ccacgcgtccgaaaaaaaatttctctggaaacatagcaactatcaactacttttacctcagatctaaaacacctgccgctcatatccactaaattcaccggctctactactttcatcggctatgtaacggcttccttttttcgcttcctcgtctccgccttctttctcgtctcttcctttttgctttttgttttttctttctctccttactattatctttttttctattttcttctttccctttctctctgtcttctctctttctctctttttcttttcttcattctctcttcttttctctctct

SEQ ID NO: 44300 - DNA, 455 bp, Gossypium hirsutum
  Clone ID: LIB3189-042-P1-K1-A6
cccacgcgtccgaaaaacttttaaacactcccccctctcttatttcttctctgctagggttaggaaacccatcattgccgccatcggcgaactaccgctcctccaccttgcacggtggtcggagggatgcaaaacggtccctttaggctcgttttgaccggatctagaggcctatcctcttatttgcaacaaaaaccgaataaaagaggactatttggtccttttacttagccgacgcagccgtcaaagccaaagccaaaccttaaacggtcttggggccctcggcgtaggtgaatcgccctcgacgacggatgagcgtgaggctacttaagtaagtttttcttttcctcttttatttgaaagatttgtgttataaaaataaaataaataaaataaaagaagcaaaaaaatgaaaatagatggtgaaaagattaacctttcgaaacttttgtcta

SEQ ID NO: 44301 - DNA, 299 bp, Gossypium hirsutum
  Clone ID: LIB3189-042-P1-K1-B8
gaaaaatcggacacggctactactctgaagatatgtatgctggagaggatggtcagctttcatggtttaatgctggtgttagagttggggttggaattggccttgggatgtgccttggggttggaattggagttggactgctaatgcgatcatatcaagcaactacccggaactttaggagaaggtttttctaagatagatcccatcactttgcagtgtgacgatgtcctcttttaattacgaagaagttaaaaggaaaatgaaattcacgattctttgtagcattcttagtagatttt

SEQ ID NO: 44302 - DNA, 289 bp, Gossypium hirsutum
  unsure (1)..(289): unsure at all n locations
  Clone ID: LIB3189-042-P1-K1-C4
aaaaaaaanaaaaaaaaaatttgggatattttaaaaaaagggggggggtacaaaaatgttttttttttaattttaacatacatatttattctttacctatccttatttttgcttccactaacttgtgaactttccattccaaaactttactttaccctttttcacaccatgctaagccttttctcttaaaggaattttacaccccactttccttggaattcctcttcctaagcccaaatttattcccattattcccccctccctttctaaaaatccaactttccttccc

SEQ ID NO: 44303 - DNA, 474 bp, Gossypium hirsutum
  Clone ID: LIB3189-042-P1-K1-D1
gggaactcaaagaaaaaaaaaaaggagagagagagagaggaagagtcagtttatttgaaatttagacgctccaattctttaattctgcttcaccaaattccacgaaattcaaaacccagctttaaaaacctagcctttccaatacccagatctcaatttccttcagtttgattaaatttgcctcgtttaattcatttcccctgtttctcgttcaaccagagcatcttctcttatagttcaaaaaaactgagcttttcattcatctttctttgttattagtttcgcagctagctatctttgattcctcttttgttcttaaattatctctaaattctctagaatttatatatcctctgccttgtatttttttcccaaacgctcaattcccagaccaaaaccaaattttacctctgtggttgatccaggattcttgaaactttgaccaagagtcgagccattggagtccaaaaagat

SEQ ID NO: 44304 - DNA, 200 bp, Gossypium hirsutum
  Clone ID: LIB3189-042-P1-K1-D10
ccccgcgtccgcggaccgtgtggtttttatgttttatcccatcgaattaaattcatatgcgcacattttaatcgttagggattttttaattcctcacaattctccattttcctgagttttaaggcagtagagctccatttaagaagaaaaaaatgttgaaatctttttgatcaatgtaaggatcattttttacttatcat

SEQ ID NO: 44305 - DNA, 316 bp, Gossypium hirsutum
  Clone ID: LIB3189-042-P1-K1-D3
tccactcgtacacaactttccaatctatctcttgctgtatgatatgattcgcggacataaactatcgagcctttacaactcactctggggtccataattaccatcaccaccaccactgctttaacccccatctgagcccataacctttgaagaacgatctcaatattccctaccctttaatttttacggcgcactaaaatgatcgcttctacattcataaagttcttcaccgtccccaatgcatcacatagaaataccttcttgctgattctctacaccatcaacactctccctacgaactatctccccactctct

SEQ ID NO: 44306 - DNA, 320 bp, Gossypium hirsutum
  Clone ID: LIB3189-042-P1-K1-F1
atatgctgggtttattaaattactccgagtcattcctaaattcaccaactgggccaacaaaaccgaacaaactgcctaaaaccttctttctatctatacaactaaattcttaaattcgacccatggttttaccaaacccacccacctttttttaatctattccccactcataaactttaaatcccttcccccgaaaatctcccatatttcacccctctaaataaaatccaccatttttcttttccaaaatttaaccaaattttttaaacaaaaccttttccataccctttttttttatcgaattttttttttttaaacta

SEQ ID NO: 44307 - DNA, 402 bp, Gossypium hirsutum
  unsure (1)..(402): unsure at all n locations
  Clone ID: LIB3189-042-P1-K1-F10
cccacgccgtccggaacgatctgtgcttcaactttttatttattactatcagcacataacnaacgccgcgataatctataaaacgacgcaccgcgcactaataaatattattatttaccccccaccaccaccatcattaagttgctctataaccttttaaaaaaatcattttacacaacatacttatttcttaatatatttcacctatactcttcctttacacaacacacttaactctgatatttcacacaagccacatttccccctcccctcacacatattctgctgttgcccttcttggtattgcttgggccttttgtggcatgatcttcatccttgtttactgcactgctggtatttctgccggtcatattaacccagcagtgacatttgggctgtttt

SEQ ID NO: 44308 - DNA, 271 bp, Gossypium hirsutum
  Clone ID: LIB3189-042-P1-K1-F6
caagtcctttcaggaacgaatttcatactgaagaaaaacagcttggctgtcatggtctcaaaaatgatccagctgagtttattacagctggtaaggtggactatccgatatgtctggaggaacagcatgccaaaggtggcggtgctggaaagaccgactctagcaactttcatcatggatgagttcaagagagaatagaacgtgatgcgatggaaacgagaccactgatgcctatggacatgatagggcgcatgcttgtagctctaacaac

SEQ ID NO: 44309 - DNA, 400 bp, Gossypium hirsutum
  Clone ID: LIB3189-042-P1-K1-H3
tcgcaaaaatcctttggtttcttcattcctcaaatcaattcctttctttttccccaccattaaaaaaggggccttcccttaaaccagggcgagggggagttaaaccaaagaccagccaggcttctaaaaatgccgggcttaaccatggggtccttaattacccctgcttccataataatcaaccccaccaccttcttaaaaatcccttttttccttttaattaaaccagcttcaaccttttacccctcctcttccaggggtttttaatgaatattcaatcccccaaatttggaagcatgtaagagctactcaaagttgtcgatcttctttccgaccgtgtcttcccgagaatgttgtttcgggaggcacggttaagaggatttgttgggaaagtagcttg

SEQ ID NO: 44310 - DNA, 463 bp, Gossypium hirsutum
  unsure (1)..(463): unsure at all n locations
  Clone ID: LIB3189-042-P1-K1-H9
aataaaaaancgacccgcgcgtncataaaatttctttacttccttcatacttcaatccattctctttctctcccccaacaatcaaaaaatccgcatattttaaaacagacccccgcgctaaataaaactaaatacaatcaattcttctacaaatccatatcttaacatttcatacttcacttacactctctccatcatcatcatttccaacaccttcctcaaaatcccctctttcccttttaatcaaacaacctccacccttttaccctccttctcccaacttttttaatcaattatcaatccccacatttttaccatctaaagctactcaaattgtctatctctttcccaccgtttcttcccaaatttttttttcctaaccacccttataccaatttttttaaataactcatacccactccaacttcttcttcccccaatattcctttcctatcaatttctc

SEQ ID NO: 44311 - DNA, 166 bp, Gossypium hirsutum
  Clone ID: LIB3189-044-P1-K1-D11
cgccgctacaagcagattaagcgcactgaaggtgtttctagcacggatattgtaggaaggatactttcatctgtaaatgataataaaggtgtgggagacactaatcgcacactttcgagggtagatcctggcagatggcgtcaattacataggtgtccgctcttct

SEQ ID NO: 44312 - DNA, 181 bp, Gossypium hirsutum
  Clone ID: LIB3189-044-P1-K1-D2
caagctctaattttagcccataagcctactcccagttacccttaaccctccatgggcaaaggcggaggtggtgtcccaagcaaaaagagacaacctttctatgacgaaggctgtgccactgggactgccactgccgccaccaacatcgcacccatagaagccgatgaacaaactcaccaaa

SEQ ID NO: 44313 - DNA, 282 bp, Gossypium hirsutum
  Clone ID: LIB3189-045-P1-K1-A6
gatttcgggtctgcacaaacatgttacacaactcaaacacgtggctcaagagatctagaactgatgcacggatacagaatgaatttgtgtccgatctgcaaatgctaatgagcagagctcaggcaggagtaaaaagcgggatgacaaagctgaatcgaactgttgctcagcagagatcgaatcacattttgcaagtgataatctttggtcttacatgtttctccatcgtctacttatggccatagcacttccagagatgacaacattggcttcgaggcttcc

SEQ ID NO: 44314 - DNA, 187 bp, Gossypium hirsutum
  Clone ID: LIB3189-045-P1-K1-B10
cggacgcgtgggctgaagtcattggtttggaagagaaaggacttcgattaaaggcaaatgggctaaaattggggaggacaattgggaactcacaggctgtaatttcttctttaaaaaagaaaatgcaagcttagagaaagatcgtcaggatttgctgtcaactattgaagctcttcaagaagagaag

SEQ ID NO: 44315 - DNA, 178 bp, Gossypium hirsutum
  Clone ID: LIB3189-045-P1-K1-C6
cgaccacgcgtccgacacatctggtgtatactccggttttcgcgttctttttctaattcaaggccaagaggagaagcatgacagcattgccaagaagctggcgtctgcttcctctgattctcaccattgatccactaagagtggagaaaaaaaaaagccaaacttatccccatctatc

SEQ ID NO: 44316 - DNA, 466 bp, Gossypium hirsutum
  Clone ID: LIB3189-045-P1-K1-E12
gagcttcttctttgccggcaaacagaccacttccaatttgctcacttggaccgccgttcttcttgcaatgcacccacagtggcaggtgcaagcacgtgaggaggttcttagggtgtgtggattacgtgacatacccaacaaagataatttcgtaaagcttaagacgctgagtatgatattgaatgaatcgctgcgattgtatcctccaaccgtagctacaataagacgcaccaaagttgatgcagagttaggaggttacatgatcccacatgggaccgagcttttgataccaatcttagccgttcatcatgataaagccatatggggcaatgatgcaaatgagttcaaccctgcgcggttttccgggggcgtggcacgtgcggccaaacatcctattgggttcatcccattcggccttggggtccgtacctgcattggccaaaacctagccattttgcaagcaaaa

SEQ ID NO: 44317 - DNA, 153 bp, Gossypium hirsutum
  unsure (1)..(153): unsure at all n locations
  Clone ID: LIB3189-045-P1-K1-E5
cccggtcgaccacgcgtccggtgagattggaggctgatcagctggttggtgacatctctagattcagtagcacaacaagtcattggagagactatcaaagctctcatggcggttgatnctcaaaatgaagaaaaaatgaagcctgaagagagt

SEQ ID NO: 44318 - DNA, 253 bp, Gossypium hirsutum
  Clone ID: LIB3189-045-P1-K1-F11
cggacaaagaaccttctattaactgtgaggtatttgtttagacctagcgagaaagctcaatattttgccatttaagagaaggtgagggactacaactacatgcccaatggtagcttgtgtctgaatactttatgggaaccgaggacctgacaatacaccattgatactgaatacaatgcttaaaatatcatacatagcagttcgtgtcttgtcttttattcactacacatgcaaggcttttaatactacccat

SEQ ID NO: 44319 - DNA, 470 bp, Gossypium hirsutum
  Clone ID: LIB3189-045-P1-K1-F12
aaaccccccaattctttactcactgtatatgaaatcggaggtttctgaaatgggaagcggtgttggcggcggtggaggagggaacaagtatggcagtttaaaccttactgatctaccgcaagattgcatcgctaccgtgttttcattcacttcccctcgagatgcgtgtcggttgtcactcgtttcaactactttcaaatcggcttccgaatccgacgccgtttgggagagtttcttgccgtcggatcaccaggcttcgattccttcgtcgctctctttttcttcgaagaaagaactttatcttagcctttgtgaaaatcatatcctaatcgatggtggccgaaagagccttcaattggaaagagtgagtggcaagaaagtttacatgctatctgccagggacctctttattgtatggggtgacactccaacctactggagatggatctcattacctgagtccaggtttg

SEQ ID NO: 44320 - DNA, 433 bp, Gossypium hirsutum
  unsure (1)..(433): unsure at all n locations
  Clone ID: LIB3189-045-P1-K1-G10
agcttttccgggacatgccttatctgttgatcattgacaatcttgagacagagcgagagtggtgggaaggaaaagacctgcatgacttgattcctaggaacactggagggactcatgtgatcatcacaactaggctaccaaaggtgatgacttttgacatgatgcagcttcctccattgcctttatccgatgctatgattttagtacgaggtagaaagaaaaaggattatccgaccaaggagttggagttcttgacaaaatttgatgagaaattgggaagattgagctttggtttgtggattattggntcattacttttcgagctgtccattttttcatctgcactctttgaagctgtgaaccaagtctctacctcacttgaagatgcctctacttcacccactgatgagcagttctttaaacacaacccttt

SEQ ID NO: 44321 - DNA, 231 bp, Gossypium hirsutum
  Clone ID: LIB3189-045-P1-K1-H4
aaaaggaaagcagtcacatttattacttgggagataagtttggatggtaatagatgaaaatagtagcggaagcaagagcaacgaaaaaaagcttaaaactggattattaaatatattaccgggcactacagaaaacacatgtttagcaacagcagccagtatatgactagaaagggggaggaccaatatcagggcgtttaccaaaagcattcttgtagtattccaacaaca

SEQ ID NO: 44322 - DNA, 418 bp, Gossypium hirsutum
  Clone ID: LIB3189-045-P1-K1-H6
cgagcgtccgatgagccaaaaccacatggtttctcccgcctgaaatctttcattccttttgacccatcacaaacttcaccaatttctcttgcagttcccagttcttgctcttcttttgatggggactcaactttgagtaccggttgtaactcagtgatgaaaagaatggtacgaatatgagatcagcctcgctggaatttttcactctgatggcttctcggctgcttggattctcggaaaattctgaagctaagaggtccaatgttagccagtattctatgctgtgttgtgaattcaatccacctggatatgatggaatttttgttctaatatcaagccaaacactgtttccttgtggttccagtccaacaatccgaagtggaactctggatctaaaatatacaagaaaaatttcaat

SEQ ID NO: 44323 - DNA, 316 bp, Gossypium hirsutum
  Clone ID: LIB3189-045-P1-K1-H8
aaaaaaaaaaaaaaaaaaaaaaaaaaaaaaaaatttttacaaaataaaaaaaaacaaaattacatgcgcatacttaaatacataatgggtggtactatatagccccctttttccgttccagtgtcccttgtctttcatcgttgtttctggttattcttttgggttacccaatttcattgcctggctttactttgcccctttctccccctggcgtcacccctgaagtttcccttttttttcgccctgtccatcttccctttttcccccttgtccttactgactctcaaattcggacacgccttttcctctccccttt

SEQ ID NO: 44324 - DNA, 219 bp, Gossypium hirsutum
  Clone ID: LIB3189-017-P1-K1-C10
gtactactactccaagcaagtatttcccttactttttggtttttctggggattaaccgatatggctagctcaaggtccctaaaacttgcatgtgtggtggtgttgtccttggtattggttgccccctggctcaaggggccgcgacccgtggtcaagatacaaacttccttgcaccctgttttttttactcttgaggcacaggtgcttttgcccctcccc

SEQ ID NO: 44325 - DNA, 413 bp, Gossypium hirsutum
  Clone ID: LIB3189-017-P1-K1-D4
ctcccatttcttctcatctccgtcgtgcgccctatattccccaaataaaagtttgtttttcttcagctgaaatcccccaaatttcccatttccaacaacagacttgaaggaagaaaaccagaagatgggatggaatcacccagacatatcgctggaagaactgatgaaactgatagaagggtttgttgatatcctggttttttgttttgttttacttttttaattttatttacttttgggactttttaaggaatgacaagtaaaaaagatattggcgatttcgacaaacccatatcagagactagggtctcaagggaagaatgtggttcaaatgggagaaatctaaataagaagagaagtattgcacagtttcatttaaaggtaggtcaatcttgttttcttttcatgccttt

SEQ ID NO: 44326 - DNA, 313 bp, Gossypium hirsutum
  Clone ID: LIB3189-017-P1-K1-D8
aatagttgtgtttttccacatttaaatacatattatcagagcccctaattcaattaaacatcatttttctttccccagtttttcaatttcaggggctctgattgggagctgttacaatgtatcgacctgtggctacagctgcagccacgggtggagtcccaactgacaatggggactatgttgtgacttttgatcaagtcccacggtggtacgatgcatatatctggtctctcttggagtatgagaattaagatccttcatttttaaaaaccttttttttcgtccccttttattctcatgtgatagtttttgt

SEQ ID NO: 44327 - DNA, 333 bp, Gossypium hirsutum
  Clone ID: LIB3189-017-P1-K1-G12
agatctcactcatcaatcgttttgccattttcctatgacggggacaagctgacagggctgtgaccttatcgtaccttgaagcaattgctagccctcccaaatttttcatccagagatatgtttctgcagtaccgatgcctaggaatgttcctgataaggtacaatgtcttccactttgatgattagctaattgggtttttccggttcaagagttgactggatactggctgacttataagtgaaatcttctgaagatttctcagctgcaaattacttataatgtgtggtaaatatagattgtcagctttaggattatttttctctatatttttt

SEQ ID NO: 44328 - DNA, 237 bp, Gossypium hirsutum
  unsure (1)..(237): unsure at all n locations
  Clone ID: LIB3189-017-P1-K1-G5
ggcacttgcacatgagttagcacgatccccccnntcttttgaagcccgttcgacagcgcagtcagcgcgagcttcgaaagggaatcgggttaaaattccagaaccgtgacgcggaggctgacgacaacattagggagtccggagacgtcagcaggggcccaaataagaggacatataacacacaatctttctatccataagtggaaacggcagaaacggtagttggctactgagaac

SEQ ID NO: 44329 - DNA, 246 bp, Gossypium hirsutum
  Clone ID: LIB3189-017-P1-K1-H4
ggatcatccaaatttaaacccgaacttaatatcaaccaaaacctcaaatcaaaggaagccttttgacacagaatcaatgacttggttcgaattgtctaatccagttttctacgattcctcgatttttgtactcaatacaagactagacaaacctttagttagtggtccaattgaccagatttttgccctcttggacaattagcccaagtttactcaaagcatgcaatgtgttctcttatgttatca

SEQ ID NO: 44330 - DNA, 265 bp, Gossypium hirsutum
  Clone ID: LIB3189-021-P1-K1-A10
aattttcgtacctctactaattcccatgtttttttcttattgcaaaacataaaatatatttgtggtcttttatgaaaataacggagcacttatacatttattttaaataacgccagattagttacgtctaggtaaaaataacggaccaccgcccattccgattaaagttctaccacatgctattatgttgccgtcagtccatgaacatcctttcgctataggcctatgctcaatgccacctcacccattttaactggatgaacta

SEQ ID NO: 44331 - DNA, 447 bp, Gossypium hirsutum
  Clone ID: LIB3189-021-P1-K1-A9
aattttcttccgtctccaaatagccagctagtgtttgtattgcaaaatttcaattagaattttgttttctcattaattttcccgaacacttttacattgattttaaagaacgatagtttagttatgtctggaagaaatcgtgggccaccgcccattccgatgaaagggccacctcatgctggattgctgccgccggtgcatgaacatccttatgctagaggcctaggaccaatgccaccacacccagctttactggatgaaataagagaaccccaatttgtgttgggtcctagagggtttcctcctcatccagctatcattgaggagcgtcttggagttcaactgcaagaaattcaagccctcctggcggataatcaaaggctggcagcgactcatgttgcgttaaagcaggaattggaggctgctcagcatgaattaaaacagatg

SEQ ID NO: 44332 - DNA, 197 bp, Gossypium hirsutum
  Clone ID: LIB3189-021-P1-K1-C3
gagactgagttcatttagtgggcctacggtaatttttggttctcgactctccaccgcttatcacgaaatgcttatctttaatgcccggcctcacttgttgtcttgttgctccactgtgcacggtttccatatcttttctctcctccattccccaataatttttctccctttctaatggttttcgttttccctatttt

SEQ ID NO: 44333 - DNA, 188 bp, Gossypium hirsutum
  Clone ID: LIB3189-021-P1-K1-C5
cttctctgtcatctccatcaagatttctaagagctaagtctgctggagaagaagctgatttgtgagagcgtttcttaggctactgggatggaacctgctgtaatgattggtaccgaggatcttattattatattgatggctcatattgcaaagaaatatttgttttttctactaattggttattggct

SEQ ID NO: 44334 - DNA, 181 bp, Gossypium hirsutum
  Clone ID: LIB3189-021-P1-K1-C6
cccacgcgtcatggcttcctaccaaaactagcatatatgtactttgtaatgaacacctttgatggtctccatgcacaaatcatgccatagaggacttgaacctaatcccatcttcatccaccaatgagatagagacagcatccagacagcacgaaagcgagaccttctattctcagacctc

SEQ ID NO: 44335 - DNA, 192 bp, Gossypium hirsutum
  Clone ID: LIB3189-021-P1-K1-C7
tgacaatattattatctcacatagtgtatttattttttctacccatgaaactggcactggtgtccaattcatgaaaaatgggcggatcttcctttaaaggctttgttatcctttactgcataacatacctaactatcaccaatcgttcaccattaatgtatacaagaattattaccctacttaacttacttc

SEQ ID NO: 44336 - DNA, 437 bp, Gossypium hirsutum
  Clone ID: LIB3189-021-P1-K1-D4
ctttgctgttgaagtagtaatatctatagcatacatagatggagaggcaaagaagcaagcaggtttgtttgttgatgtgggttttgggggctacctttttctcccacaatagggtcattgcacatgacctccactcaccttgatgagcataaaaactactatccatctcctgaccctcacgcgttaactccccacccatgttcactattcacaccaccatcttcatgaagcggatcaccttcccctcatggaacctcgtcttatgtaattgtgaaccatccttatcctaattaccaaaagctatctagctagattaatttctattttcttaacttctccctttaacttcctttacacctattacattattcttactttcataacatcctatcttcttatagtacttatatccctacatttatcatataacatctctt

SEQ ID NO: 44337 - DNA, 173 bp, Gossypium hirsutum
  Clone ID: LIB3189-021-P1-K1-D7
tctctctctcactctttctctctcctctttttctttatctcattagatccattcaaagggcatcaaatcatcagaggaagaaggggagcaaattttcataaatggcagcaacattaggagactcaatctcctggtacaccgctcttgctaagactgtaccttatactttcttc

SEQ ID NO: 44338 - DNA, 236 bp, Gossypium hirsutum
  Clone ID: LIB3189-021-P1-K1-E6
accacgcgtccgaatacacagatacacttgcttctcactttagaatgttgttttttcgattcaacaccgcttatgtgttagtgtgataaaccgggagaaccaagacagactgctagatctatcaatgagacgcgatccgggatgacaagtagtcttttggaggcttcaagcatgatttgaaattgtgaccttaggcttgggaagttcatgtacttgttacttgttgtattatagga

SEQ ID NO: 44339 - DNA, 261 bp, Gossypium hirsutum
  unsure (1)..(261): unsure at all n locations
  Clone ID: LIB3189-021-P1-K1-F10
ctccgtaaagatattctatcccgaaagcctcattttactttcaatgcaaccgnctactatgtgtgcattccagggccaatgggggggccaaggttttcagagatgttgagaaggctctccatgttccaattccctacacgaactggaattgcaagaattctactttgaaagctcttctggttataattttggggggatctcttatcactcttcatccttctcctgcagtttacatttcagaacggtcatccaatctagtat

SEQ ID NO: 44340 - DNA, 270 bp, Gossypium hirsutum
  Clone ID: LIB3189-021-P1-K1-F2
tctaaatttccccgcataccaaaaaaccatttttttttttttgtgaaaaagatccacctcgaatttgaccagcaccaccggagacgccgtggtttgtcacgccgtcgtttccgccaatctgttcgaacattacttatataaaaaaatttacaacgataagccatgaagcgaggcttcttttttttctgtaaccgtttgtctatttggccatcgttttcatttacttttgtacggtcattttttttattttattgttagttttttaatatt

SEQ ID NO: 44341 - DNA, 259 bp, Gossypium hirsutum
  Clone ID: LIB3189-021-P1-K1-F3
aaagctcccaaggatgttgtccgtggggttcatgtatatttagcataagcagaagagaagatttgtctgaccaataaccgattggcttggctgaaatcaactgttatgctttcacaatagtgcttcatattggtcattttttcaggtttagcaatactacactaatcttttttgattatttctaaatgtttactgcttgtatttttcttgtttcctttctatcttttctgtttttcccgatttatattttttttttatt

SEQ ID NO: 44342 - DNA, 205 bp, Gossypium hirsutum
  Clone ID: LIB3189-021-P1-K1-F8
cccacgcgtccggaggatttaatgtccagttattccttctgctttattttactttgaaattgtgtgatctggagtatgcatatagtccttatgttgggactcacatccttaaaattcattgtgtagtaattgtttggtttcatttcttaaatagggaattttattattttttatattatatttcaattttatattattttttact

SEQ ID NO: 44343 - DNA, 152 bp, Gossypium hirsutum
  Clone ID: LIB3189-021-P1-K1-G11
aattcccgcacgacccacgcgtcctgttacttcaaccaattttttgagctagctcgcttttactcaaatggcaaccaaaactatgatgtttcaaatatagtcactgttcttctctttcctcattatctccaactccattttcctttaagcta

SEQ ID NO: 44344 - DNA, 130 bp, Gossypium hirsutum
  Clone ID: LIB3189-021-P1-K1-G5
cggctgagtatcaatacaagtcagaccccgttgtagtctcttctcgtttgtactgtccttagagagagtcttgcagggactgttgatgtagcaagtgctgggtaacgaagcatcaaccgttctgtacatt

SEQ ID NO: 44345 - DNA, 345 bp, Gossypium hirsutum
  Clone ID: LIB3189-021-P1-K1-H2
gaaaaatatcagctattgccaaagactgagagcgtaaatctatgaattcgctgctcaagtttcgaaggcctttaagttcttctctcacttcactatctttgcagcgcctctctacaactctccactatgttttcgaagagaaaaaggaggggacgagctttatacaccccactgcaattgttcatcccaatgctgtgattggccagggtgtttcagtaggtcctttatgtacaattggtccttcggcaaaactaggaaatgggtgtcaaatgcatccttccagccatatttttgggaatacagaatttggggagccacttgcgtttgatgacgcattgttgcggt

SEQ ID NO: 44346 - DNA, 193 bp, Gossypium hirsutum
  Clone ID: LIB3189-027-P1-K1-A6
gaaaaagggcgaccagcgccgagaagcaagcagacaacagagggaagggtagttttaagcactgattaatgccctaattgtggaggtccaactgctggaggacaaacgatctgtgatgaacaccaattaaagcttgaaaatgctcgactaaaagaagagactgaccgaataagaacaatagctagaaatggat

SEQ ID NO: 44347 - DNA, 291 bp, Gossypium hirsutum
  unsure (1)..(291): unsure at all n locations
  Clone ID: LIB3189-027-P1-K1-H9
cgggacgacccacgcgnccgcggacgcgngggcgacaacgccacaaacgcgcgccgcgaaacaaggccanacncagcacgcacgccgccgaacgccgacggagaggaaagcggcgggccgaaaaccccacggccacaggganggcaggaacccaagcccgacgggccacaagaacaaaggcaacaagggggggaaaaccgagaacagaagcgccgacagagcgangggagaagggaagcgaaccnccgacgagagggaccgggaagccgaggcgacgaacgacggaaagag

SEQ ID NO: 44348 - DNA, 474 bp, Gossypium hirsutum
  Clone ID: LIB3189-005-P1-K1-A2
gtgaaaaaagaaacacaaaaggaaacctttaaattctctcgtttcctctcagaatattcttctttttcttcttcttcttcttcttcttcttcttcatcattgtctgctagggtttctttaaactcttttcatttgaccaaaatggcggatttgcctgaggcgactcgtcggaacactaacgttgtttcccgcgatatttccattgatgtttcctgcgatgattccaattgtgctgattcttcaggttgttcaagtgatatgcctgatgttgaaattgtcagtgaagatgataagagttcttcagcatcagattcaggatctaatcagctatcaaaatctcggagactaacacacagcaaactggttaaatatgcgtccaaatttttggatgatacagttccatttagaaagaagatcaagtggttgcctcgacttgctattgtgaaacatgatggaaccgtacaatgtgatttt

SEQ ID NO: 44349 - DNA, 259 bp, Gossypium hirsutum
  Clone ID: LIB3189-005-P1-K1-A4
ttcctttcttgtggcaaatctgctaacaggcctggtaaatttatctgtggataccatatttgtgtcaccattatcagctgttttgatcttggtttcttattctttgacattgtgttttgtcatggtactcgtagatttttctggggtgaaatataaattttggtcggtttagggatttgttttttacattactgacacatgtacctaataacttttggcattttaattttatttctttatgaactttggctccttttcg

SEQ ID NO: 44350 - DNA, 291 bp, Gossypium hirsutum
  Clone ID: LIB3189-005-P1-K1-A7
aatggtcgatcgacgcgtgcgtccgaaaccgttacccaaaaggaaacctcactaaccagtaaccaacctttggatttttatccgcttttgtgtttagagcatgcagagacaatccttatgttcgccaagctccaaacttccaatccattgtggataagccaaaatggccgatttgctcagaaacgccaaggaatcatcgatgatgatgacagctaagacatcatgactcgttgattgtccttctcttcaacctgctcgttgacatcgcctgctaagcctgagaaggccatt

SEQ ID NO: 44351 - DNA, 154 bp, Gossypium hirsutum
  Clone ID: LIB3189-005-P1-K1-A8
gcggacgcgtgggcctaagggagtgcacgtcttcaccgagctaatgtgaacctggggcattttacttggtgggcatgcccgtgcggtcggactcggattctatgtcggagtcgattttctgggttggtggcctacttcgccggtgtgagcctgg

SEQ ID NO: 44352 - DNA, 312 bp, Gossypium hirsutum
  unsure (1)..(312): unsure at all n locations
  Clone ID: LIB3189-005-P1-K1-B10
aacaaanccganncnncacncnccaccccaaacaaanggcnganccngaaacccccacggcgagggacncagccgcaccaaccacggagccccaccacacccaaacccaaggagacgacacggccgccaaacacagcaaccgcaccggaaaaagaaggccccacacccaacgaacccgagacgcagaccgcaaccgacacgaagagacgcgagacngcgaagacgaccaaaacaaacgcaaaggaaccagcccgaaagaggaggcaaacggcgcggccaaagagaacgaggaggaggcaacaaaggacgcca

SEQ ID NO: 44353 - DNA, 449 bp, Gossypium hirsutum
  Clone ID: LIB3189-005-P1-K1-B2
cgtgaatctaatcggctattgtgcagatggggatcaaaggattttagtttatgaatacatggcaaatggatctttggaacatcatcttcttgatttgccccctggtaaggagccattggattggaataccaggatgaaagtagctgaaggagcggctaaaggactagaatatttacacgattttgctgatccgctgataatttatcgcgactttaaagcttcaaacatattactagatgagaacttcaatcccaaactctcggatttcggacttgcaaagttaggtcctactgaagggaaagaccatgtatcaactagggtcatggggacctatggttattgtgctgctgaatatgcaatgacaggccagctgacgacaaaatccgatgtttacagctttggtgtaatgtttctggagcttatcttggggaggagagcttttgattttt

SEQ ID NO: 44354 - DNA, 329 bp, Gossypium hirsutum
  Clone ID: LIB3189-005-P1-K1-B4
cattaccattcacggtaccgttctgaactatattttgcataggagaaaaaggcatgcaaagtgtgagaaactagaaaaaaaatagtggttaattttagttcatggtgctgaaagtgtgaagggtttgttgccagcatttcagctccttaatttcgtttcaatgttgggaattaggacccccaatttgaggagaggataaattttgtgcggcgaccccttagaaaaaagaaaaaaaagatggctactgagggctttttctttttaaaccattattggtgaaaaaagagaaagaggttattgatgtattacaaaattcaattctttctagt

SEQ ID NO: 44355 - DNA, 429 bp, Gossypium hirsutum
  Clone ID: LIB3189-005-P1-K1-B6
cccacgcgtccgcggacgcgtggggggaagtcggttgaagactgattttattttcactgccagctacagaagcactagcagtgttgcaaatgttggcaacgatgatgatggtaccgatgcacggcgttttcttgcatgttccatgcggaaggccctgaattctgtcctggagaaggcttctatttcaccggaacactccccattcttgacatttccgaacaagaggcgaaggatctcctacattgattccccaagctcatcttgatttttcaaaaaaagattagccttttcaacgtttggggtaaatggacgacacatccatttatctctgtatggatgtttgtctgatatgcccaaaaattggtttgaaatcaatactattaatagcatgtaattgattccagaagaccagaacgttttcaaactgct

SEQ ID NO: 44356 - DNA, 430 bp, Gossypium hirsutum
  Clone ID: LIB3189-005-P1-K1-B8
caaccaaaaatttcttgatggcctcaccagtacccttgacatcggccgccggaagcggaggagggggcggctgtggtgttgcaccttttcttttgaagacatacgacatggtggacgactctgcgaccgacgatatagtgtcatggagctcccacaataagagctttgttgtttggaaccctcctgaattcgctcgtcttttgcttgccacttatttcaagcacaataacttctccagtttcatcaggcagcttaatactgatggattccgtaagattgatcctgaacgatgggaatttgctaatgaagattttgtgaaaggtcaaaagcatttccttaagaacattcacccggaaaaagccgattcacagcccacagtaatccttatgggtttttcgtagattccgaaagggctggattcgaagaagaa

SEQ ID NO: 44357 - DNA, 431 bp, Gossypium hirsutum
  Clone ID: LIB3189-005-P1-K1-C11
cccacgcgtccgcgacgagttctctctcatcgacgaccacgaaactaaccctagccaccaccacgttctccaccaccaccattcttacgcgcaggtccacgcgccgccacccgataaccacaacggcgatgatgactctgattctgctttccgcggagccaacttcgttaacaacaacagtagtaacgcgacgtcctccgatgtacggatcgagaagaggagggaccaagaagagataaacgatggagttttgaagagatcgaagcaatcggcggcgactgagtaccggaaagacagagaagaatggagcgatgccgcgatcgggtgtttgttggaggcgtatatggagaagttaacgcagcttgaacagggggaatcttagaggaagggattgcgaagaggtggctgtggtggttattgagcggtgcgag

SEQ ID NO: 44358 - DNA, 474 bp, Gossypium hirsutum
  Clone ID: LIB3189-005-P1-K1-C3
gaaagaattaggagaagaaggcctcacgggtaatgaatgggaagatcgaaaaattggaagaagaaaggattttttggttagacgcatggaattggctaagcattttattcgaacaaatatagaaccagaatggatggttttatgtctattaccggttcttcctcccgagttgagaccgatcattcagatagatgggggtaaactaatgagttcggatattaatgaactctatagaagagttatctatcgaaataatactcttaccgatctattaacaacaagtagatctacgccaggggaattagtaatgtgtcaggaaaaattggtacaagaagccgtggatacacttcttgataatggaatccgcggacaaccaatgagggacggtcataataagggttacaagtcgttttcagatgtaattgaaagcaaagagggaagatttcgcgagactttgcttggcaaacgagtcga

SEQ ID NO: 44359 - DNA, 193 bp, Gossypium hirsutum
  Clone ID: LIB3189-005-P1-K1-C5
gagacctgaaattgttcagagcaaaacttacacatgttttattagtaattattgttacaacagttacattattactaatgttatattgtgacaaagaattgaaatacaatgaatgaaaattttgatcttaatgggtttattgtttcggaaaagtccaatattaagaaaaacaattttcttgacaataggatca

SEQ ID NO: 44360 - DNA, 109 bp, Gossypium hirsutum
  Clone ID: LIB3189-005-P1-K1-C7
cgggtgcgacaccgacgtcgtccgacccacgacgtaccgtcggacgcccagtgggtctaccccgtccgcttcggtagtgagacattacgcgtccagaggaggcggcccg

SEQ ID NO: 44361 - DNA, 298 bp, Gossypium hirsutum
  Clone ID: LIB3189-005-P1-K1-D2
agaagtaaaactttttctaaagccttgcatatgaaagtaactataatcacatacaaattttctgatacaacatagtttcctttaaaaaaggaaaaagacttgtgatcataaaattcaaaccaaaaggtgataaactaaacatagcaatcagatttttacaaatcaaattctcataaaaaccaactattattcttcatcccaaatgcacaggctgggttatcaacatacgtatctgcttctggcattgtacagcaaatatctggtctacattcagacttgatggctcttcaatttgacc

SEQ ID NO: 44362 - DNA, 285 bp, Gossypium hirsutum
  Clone ID: LIB3189-005-P1-K1-D4
agtacctctaattctcttgctctttctttcatttccatcccaaggaaaaccatgcccttcttctgggctgcattaacggtcacttgtttttctttttttatattactggctatcagctacatagggacatatgtgaattatattaaccaggtcatggatccgaaattacaatggcttttattttatctagaagacaccttttttcctttgacttatggtatattaagtgaaggtactcaagtcattttagaatttatgatttagaagcttggaaacaagggcaat

SEQ ID NO: 44363 - DNA, 456 bp, Gossypium hirsutum
  Clone ID: LIB3189-005-P1-K1-F1
cccacgcgtccgatggttactcctagtaaggttcattaccttagacctcgtaggcatttagctggagccactaagaatgtttcagaaacattggaagccactgctgatgtttatgtttcatcagatgaaaatcatgcttgtcatgaagcaacgaggatcaagaatgcctcctctgtcatgcctaatcgccttggaaggagtatgggaccttcaggctatttcacaccttctagccaaaggagaacactggggagagatgctcaaaatctcctcaattatttcaaaaagatgcaggctgaaaatcctggcttctattatgctatacagcttgatgatgataatcggatgactaatgttttctgggctgatgcaagatcaagggcagcttacaattactttggagatgcagttacttttgatacaatgtatcgaccaaatcagtatcagatcccattt

SEQ ID NO: 44364 - DNA, 461 bp, Gossypium hirsutum
  Clone ID: LIB3189-005-P1-K1-G2
agctgctgggttagaagatcggcttgtccatggcttgcttgttgcttcactgtttccttggattatttcctcccacttttctggagctatatatgtttcccaaagcttgcacttcaggtctcctgtttacgtcggagatgaaattgtgggtgaggtaaaagctatcagcattaaacaaagcaagaagagatacatagcaaaactatcaacaaagtgcttcaagaatggcgagcttcttgttcttgatggtgaggccatggcaattctaccaactctagctctggaacatgatagtagaagaagctgatataaagttgaacttgtaagtcatgaattcattacacagcttgataactgttgggattgcagaaagttgactgacatgttttcaattttggattaatattatttaggttacatatcaactctaaaacccaagtgcttcagtcaaaacacatttc

SEQ ID NO: 44365 - DNA, 457 bp, Gossypium hirsutum
  Clone ID: LIB3189-005-P1-K1-G9
cttcactcacgtccttcacttagcggctcaggccggcgtacgttacgccatgcaaaacccacagtcgtacatcagctccaacattgcaggctttgttaacttgctcgaagtagccaaagcagccaatcctcagccatccattgtttgggcatcatcgagctccgtttacggcctcaacaccgaaaacccattctccgaacgcgaccggacagaccaaccggctagcctttacgccgccacaaagaaagccggcgaagaaatcgcccacacttacaaccatatctacggtctttcccttacggggctaagattcttcacggtttacggtccttggggaagacccgacatggcttatttcttcttcactaaagacatcctacaggggaagtcgattgacatatacaagaacgcatgatcaggaaagaggtggcgcgtgacttcacctacatagacgacg

SEQ ID NO: 44366 - DNA, 343 bp, Gossypium hirsutum
  Clone ID: LIB3189-001-P1-K1-A2
ggaagatgcttacgatgactgcaacactgtaaatgccatatctactttgaccaccgggccggcaaggattacccttaacaagaccggtgaccattacttcatttgcagtgtccccggtcattgttccgccggccaaaagctcaaggttgaagttcgaactggtaacaccaccggtggcgttgctccgtcgccgcctgtaacttcaagcaccaccacttttacagtgggtgactctactggttggcgtgtccctaccaatgatgatttttatgaagattgtgctgatcataaacacttcgttgttggggatgatttaatgtttaattttacgaccttacagctt

SEQ ID NO: 44367 - DNA, 397 bp, Gossypium hirsutum
  Clone ID: LIB3189-001-P1-K1-B7
aaaggtaccattccaatacctgtgtgttaaaacagtgaaacaagcagaggaaagatctgggtgctctcggatggcgcctaagttcaaatgagctgcttcagttagattatgcggctcaggaatcaccacgaagaatgatccaaaacattttccagacaaattaaacagtttagaatcgcaacattttcacttggatatcatatggaattttgatccaatgccatagcgttcttgaggaaacagaacgattatgggggcacaaactaaagcaatcagagatcatgggggcagaatttctatcaactaaaagagcctggggattccttaaatccggcatatgctaacagagagaaaaaaagggagggttggagcaaatatgtagccaaatttgaagctg

SEQ ID NO: 44368 - DNA, 341 bp, Gossypium hirsutum
  Clone ID: LIB3189-001-P1-K1-B8
gaaagaattagggggtaaagttaatttagcttattgttaattgtacaagcccaaatttacccgggctcataccagtaaaacaaaaaaagaggcccaattacaatgttgactcaacaggctcaaagtctttagcccaaactgctaaggcccattacaaaccagatcagcccaacaagcccattacaaacccaatcctgaacaaaacctaaacggcccaaatggcccaacacaaagaagaaacagaaaactccaacccgcaccttagggccttctgcccttctgccaccgttcctttgcttcttttatgaaataaaaaaaatattttattctttttttttttt

SEQ ID NO: 44369 - DNA, 394 bp, Gossypium hirsutum
  Clone ID: LIB3189-001-P1-K1-E8
gaacggtatgcctgtaactgttggggtcggaaatatcatttccgacgaaggttttgcattgttgatgtcaccagcggcagccgattccgtctggaaaactcttctatctcaaggtgctattcctttaggttctaatgcctgggaaaagctaaggattacacaaggtagaccagctcctggaaaggaacttaccaatgactttaatgttctggaggctggtctttggaactcaatttcattgaacaaaggctgttacaagggacaagagacaatatcaagactcattacatatgatggagttaaacagagactgtggggtattcatttatcagcacctgcagaaccaggcagccccattacagttaatgggaaaaaggtgggaaagctgacaagc

SEQ ID NO: 44370 - DNA, 392 bp, Gossypium hirsutum
  Clone ID: LIB3189-001-P1-K1-F1
tcggccaacccttccgccaacccgtccggcttttggttaagcagttgaaggttcattcttccaatccttttttaatgggctggttaaagaaggcaaggtttttggtccatttgggccaggaattaattggcctccaactgtttcggttatggttcaaaaggggggggtggatctttttttttaccaaaccttttttatagctattacacttttcataaactggaaatttccagcctattaagtacttgcagccagatttcctgaagcatcccactgttacagcattgttcacccttaatgattgagatgttggatgctgctattgaggatgcaattgaacgtggtagctggcttgaatctctttctttattggccacatcttttggagccca

SEQ ID NO: 44371 - DNA, 162 bp, Gossypium hirsutum
  Clone ID: LIB3189-001-P1-K1-F3
agccttccgccaacccttccggaaaccaaaaaataatgaccaggaaaatttctgagcttccttttggttattttgtagatctttgtggtaattcttttaaggtttcctacacttctgtaaatttaaattaaaactgaatttatctaaagggttcaaaaggaa

SEQ ID NO: 44372 - DNA, 379 bp, Gossypium hirsutum
  Clone ID: LIB3189-002-P1-K1-A3
ccttacccttccaatttcttgttctgtattttgaaaaccgaatatcaagggctctgtgttcttcttttctacttagttaaagaaaagagatgcagcacgacgaggtgatatggcaagtcatcaggcacaagcactgcagtttcatgtccaaaatcactactggtattttctgtagaaacccttataacgtcactgggatctgcaatcgtagttcctgccctctcgctaacagtcgctacgccactatccgtgaccacgatggggtcttttacttatatatgaagactatagaaagagctcataaacccaatgatttatgggaaagagtaaaattgcccagaaattatgagaaagcacttgaacttattgacaagcatct

SEQ ID NO: 44373 - DNA, 255 bp, Gossypium hirsutum
  Clone ID: LIB3189-002-P1-K1-B2
ctcacgcgatcgtatatatgttcatttttccgtcactgactcataccatttgggtgtatagctttgctacggggatcagtctttcaacttcccaccgttctaaaaccttagacttcctcatgttccatcgaattcagaattttttggcctcaagctatctcattcttgcttttccacaaaaaccttttcttctttttcacgtcgggcgcttcattttttccaaggtgactaaaggttcaaagccacctaatatta

SEQ ID NO: 44374 - DNA, 331 bp, Gossypium hirsutum
  Clone ID: LIB3189-002-P1-K1-C1
cccacgcgtccgcccacgcgtccgaactcctttttttacctcttcacattctccatttcacagggttctgatcatgttggggaagaggccccggccaatgatcggaaagttgtcggagttgttggtctcgagaggccttacggtggcatatttggacaccaccggaagccctagaggcccattagacatgaagatgatgcattcatcaccaagaggcttaaaaaactatgatcttggtggtgttggtcttggaattgtattggctcttgataaattcaacgaggttgttgtacgtgaagttttcccaaacacaccgtttgtaccctcaatt

SEQ ID NO: 44375 - DNA, 376 bp, Gossypium hirsutum
  Clone ID: LIB3189-002-P1-K1-E6
cccacgcgtccggcagaacatattatcatttcctcttttttttttttttttttttttttggaggtttaacaaatggcaacaaccactgtgatcatgaccactctcccccaattcagtggtcttagacctcaattctcagctgcccctgtgaagaacttggttgctgtccaacaacctatgaggcccaaggggaagggtgctttgggagctcgatgtgactacattggttcatccactaatctgattatggtggcttctacaaccctgatgctgtttgctggaaggtttggattggctccatcagcaaacaggaaagccactgcagggctaaagctggaggtgagggacttaggcttgcaaactggtgaccctgctg

SEQ ID NO: 44376 - DNA, 381 bp, Gossypium hirsutum
  Clone ID: LIB3189-002-P1-K1-F10
cccacgcgtccgcttttctctgcgagcattttccgctatggccgaagaatttgtgaagggcactgttcatcaaaacggcgtcgctgtcatcaccctcgatcgccccaaagctctcaacgccatgaacctagatatggatgtaaagtataaaagttatcttgatgaatgggaatctgatccaagggtcaaatgcgtactggttgatagtagctcgcctcgtgccttttgcgctggtatggatattaaaggggttgttgctgaaatacaaaaggacaaaaacactcctttagtgcagaaggtcttcactgctgagtattctttgatatgcaaaatttctgattacaagaagccatacataagcttcatggatggaataactat

SEQ ID NO: 44377 - DNA, 378 bp, Gossypium hirsutum
  Clone ID: LIB3189-002-P1-K1-G10
cccacgcgtccgcccacgcgtccggtaagcagcggctaccctaacctcgtcttgctctctactaatttcagctatggccgacgaagctgtggttgttccagatcccacccagatcgatgtcaagctctttaaccgctggagcttcgaggatattgaggttactgacatttcactggctgattacattggagttgcggcatccaagcacgccacatatgttcctcacaccgccggaaggtactccgtgaagcggttcaggaaggcgcagtgccccattgttgagaggctcaccaactctctcatgatgcacggtagaaacaatggcaagaaactcttggctgttaggatcatcaagcatgctatggagattattcattt

SEQ ID NO: 44378 - DNA, 379 bp, Gossypium hirsutum
  Clone ID: LIB3189-002-P1-K1-G12
cccacctcaacaacaagatggcttctcccctctccctggttggattattgagtggctcaaggctgtgaagttcattgattcaaagcatttcaatgtcccatttgggctgggagcagtggagcttgtggcaggtagggaaagtgccattgcccaaatcatcagaacagttaccaacaaagtctacaacatcacattctcagttggagatgccaaaaatgggtgccatggatcaatgatggttgaagcatttgccgccaaagataccttcaaagctcccttcaaatctgaagggaagggaacattcaagactgtaagcttcaagttcaaagcaattgcaccaagaactagactcactttctacagctccttctaccatacc

SEQ ID NO: 44379 - DNA, 323 bp, Gossypium hirsutum
  Clone ID: LIB3189-002-P1-K1-G5
ggaaacagcagcatcagaaggcatcatcaacaatcaacagccatagtagttgtgaattctgttggttgactcaagaggatgtgattaggttccttcttggttccattggggtcttcactccacttcctgctttgtctattgactctcttggcatcgttagctctgatgtgcttgccattgactactactcccctgcatcttctacagttggagccatctcaaagtcccttgcccagcaaacttctgttgccattgtggacagtgatggcactttcattggagagatatcacccttcactctcgcttgttgcgacgagacggtc

SEQ ID NO: 44380 - DNA, 374 bp, Gossypium hirsutum
  unsure (1)..(374): unsure at all n locations
  Clone ID: LIB3189-002-P1-K1-G6
cttctccccaattctcaaaccttacctagtattttcgtttctgaacccaattaatgaagcacacaaggaccataacatacctatacctcaatatcacaagtcttatggaggcagagcgagacaagtacaagatgatcaactntgaagaaaccgagttacgactcggcctgccactcagtggaaacgagacgctcaaaaacacttgcagcactgggaagagggttttttcggatactgccgtggatttgaagcttaacctttcctcaacctcaaacagtgcttcttctgacctggctaaagagaagaacatcactgctgctgcacctnctgctaacgacccagcaaagccacctgcaaaggcacaagtggtgggg

SEQ ID NO: 44381 - DNA, 378 bp, Gossypium hirsutum
  Clone ID: LIB3189-002-P1-K1-H10
caactctcaaaaaattcccgaaccaatccccatcgttgaccgaccctctgcgcaaagaccacgtgtccttccccgcccgccgcgccgatcggactctcagcctcgcgccccctcctcgtgcggtggctcgtgaggtttccgacggagcattggcggcgatgaagaaggggttggagaaagatccgcgcgcgctgtggcggagatacgtggattggctgtaccagcacaaggaacttgggatttacttggatgtgagtcgggtcgggttcagcgatgagttcgttaaggaaatggagccctgtttcgaagcggcgtttcgggcgatggaggagttggagaaaggtgcgatcgcgaatcccgacgagggtcgcatggtgg

SEQ ID NO: 44382 - DNA, 381 bp, Gossypium hirsutum
  Clone ID: LIB3189-002-P1-K1-H11
cccacgcgtccgcccacgcgtccggttactcagcatcacctccttttacactctcgaattcgcattctcttcactcattttccaatccatggccaagggagagaaaaaacctgcagagaagaagcccgcggcggagaaggctccggcggagaaaacaaaagccgagaagaagatcccgaaggacgcagcctccggcgagaagaagaagaagaggacgaagaagagcgtggagacgtacaagatctacatcttcaaggtgctgaagcaggttcaccctgacatcgggatctccagcaaggccatggggatcatgaacagcttcatcaacgacatcttcgagaagctcgctcaagaatcttccagactcgcgcgctacaacaa

SEQ ID NO: 44383 - DNA, 232 bp, Gossypium hirsutum
  Clone ID: LIB3189-002-P1-K1-H12
atggtttcttcattcacttgcctcaaatccatggctggctttcccaccaggaagaccaacaatgacattacctccattgcttgcaaccgtctaagagtgcaatgcattcatgtgtctccaccaattgtcaagaagaaatttgatactttttcctacctgccatacctttattattcacaattgtctaacgaagtataataccttcttacgaagggattgattcctttctttg

SEQ ID NO: 44384 - DNA, 382 bp, Gossypium hirsutum
  Clone ID: LIB3189-002-P1-K1-H5
ctgtgaagaaactcaagttgtggtccaaatagaaaaggaagaaaaagacccatggccatgagcatcctcctcactattgctgcagctgctattgttcctcatccatccaaccatcagctccacccttaccttcatcctcatgccttgattttgaatacagcaactatggaacattcttaccaaccccggagccggagccggagccggaaccgcaaccacaagagattgccagcctaaactcatcgtatcagcaatatatggtatcagtttcggaacctgtttatggcattccagtcccggtaattcatgcatctcgaacagaaagatcagctggtcaatttggatgtctttttagctttggttcttatttgttccgctgctt

SEQ ID NO: 44385 - DNA, 275 bp, Gossypium hirsutum
  Clone ID: LIB3583-043-Q6-K1-A5
gcgacataaaaccagagctacataataatcccattagcagccaatgccagaggaacccacagataaaattagcttttagttcccccccttgtgcaggtttcatttattcattcattcctcattgctctagggctccctgttcttcttcctccctttcaccttttccttaatttctctgcccctctcttttacattttcaaagtaggccagcctggatttgtatcactactttcattcagtgggaaacttgaaaaaaaagaaattattacaaatag

SEQ ID NO: 44386 - DNA, 273 bp, Gossypium hirsutum
  Clone ID: LIB3583-043-Q6-K1-A6
ctgggacattggctctgcgtcaaggatattggacagcatcacgacgtctgtggcatagcgacatgctggaacattgagcaccaccaaagtagtgaagatacaattgatctatagagtcctaatggcgataggagcacgagatcttcttcctacttactaccttgtgcttaatctctctccccctctcttttccatcttcaaagtatgccagcctggtttgggatcactactttcattcagcgggaaacttgataaaaagaaaaaagctaaatg

SEQ ID NO: 44387 - DNA, 258 bp, Gossypium hirsutum
  Clone ID: LIB3583-043-Q6-K1-B10
agcacttggagtccgctagaaactgaataggaaagccacggtcggcgatgttcaattgtaatacctgaagattgtggagggtacgtgtactccatcgcgtgtttgaaatagcacagaacttcaattctttgaaatcggttcattggacaaagatgactgatacggataccgatctcgaaattttagctctggctagagggaacgttgtacagggtaaagagcttgatactatgctctggtttcttcactgatggactc

SEQ ID NO: 44388 - DNA, 146 bp, Gossypium hirsutum
  Clone ID: LIB3583-043-Q6-K1-B2
ctcttcatcttctgcactactggccaagtaacgagcagaagacgtgctacaataacaatagcgtcatgcaacaatagaactgaccatgggtgcatatagcttctatacaacgctattataagggaggccagacatgccgactagta

SEQ ID NO: 44389 - DNA, 425 bp, Gossypium hirsutum
  Clone ID: LIB3583-043-Q6-K1-B7
tacagagctgatggtgctcatgaggaggcagcagaccagtcgcgctgggtgagccaccaccaccccgcggtcctcaacgggcagtacccggacacgcaccatccgggcctagggcactcctacatggacccggcgcagtacccgctgaccgaggaggtggatgtactttttaacatcgacggtcaaggcaaccacgtcccttcgtactatggaactcggtgagggccacggtgcagaggtaccctccgacccaccacgggagccaggtgtgccgcccgcctctgctgcacggatccctgccctggctggacggtggcaaagctctgggcagtcaccacacccgtttggccctggaacctcagccccttctccaagacgttcattcaccacggcttccccggggccaccttttcgtttaacccccc

SEQ ID NO: 44390 - DNA, 260 bp, Gossypium hirsutum
  Clone ID: LIB3583-043-Q6-K1-B8
gagagaagagagctttttcaattccggaagcttgttgttatcacgcactaaatcaacgatacaaagagctcagctttcagctttcctactctactatggctatcaatctttggcagaaacaaacagaatgtataatccgaatgcgtagtctgaaccagcctgtgaattcctttgcaactgctgaagaagaggccccacgatttggacatggacacaggtggggcctcggcgcagagcttccctccaacccaccacgggag

SEQ ID NO: 44391 - DNA, 253 bp, Gossypium hirsutum
  Clone ID: LIB3583-043-Q6-K1-B9
cgcacttggagtcgttgaaactgaaaggaaagccacgggcggcgatgttcaatttaatacctgaagattggggagggtacgtgactccatgggtgtttgaaatagcagagaacttcaatttcttgaaatcggttcattttagaaggatgattgttaaggatacggatctcgaaattttagctcggtctagagggaacgttttacagggtttgagcttgattaatgctctggtttcttcactgatggactcttc

SEQ ID NO: 44392 - DNA, 195 bp, Gossypium hirsutum
  Clone ID: LIB3583-043-Q6-K1-C10
agaacgcttgggctcctgtagtatgggagccctagctcactacgtctgaatattgtagcactatcggatactgaaagtcatctttgctgcattcaagacctcaagtaactcgctgtcctcccgtttatatgggcccacaaattcttgataccgttacaaaatgatacgcaaaaatagctggtgttttgtgtgtga

SEQ ID NO: 44393 - DNA, 393 bp, Gossypium hirsutum
  Clone ID: LIB3583-043-Q6-K1-C12
cttttcattctagctattgcattccgttgcatattactaaaagccaatgccttggaagccaaccattgtgatgctctttcttggtgtcatgttacttttactagcagagaataatgcagctagcagcagccatgaaatgagtcgtgaggcaccagctccgcagccccagccacccggcaactttacaatgcatggaatcactcaaggcagcttcttccacaagagtgtggacctcgctgcggtgaaagatgttcaaacacgcaatacaagaagccatgcctattcttctgcaacaagtgctgcgccaagtgcttgtgtgtgccgtcaggcacttacggaaacaagcaagtttgcctttgctataaaaattggaagaccaagagaagaagacct

SEQ ID NO: 44394 - DNA, 404 bp, Gossypium hirsutum
  Clone ID: LIB3583-043-Q6-K1-C7
gagataacctgtgtagcctaggttctacatgatctacgcttacttcacactgcctacgactggagccttttacatataccccaaaatgaagctggtgacattcagcagcttggttccttttctccctgttagagcttcttgtaattgatctctcgtggcatgtagtcctgagcaaaatgtaataataaattttgtataaatcggaaaaaaaaaaatcgaacttactagacaacatgccaagtgtatggccaatgacacaaagggggggcgctgttgcgtccgttttagtgtatccaagcttgcttacgctggcttgcaaatctttatctttcttatagtgccacctaaattgaatgtactggtcctgtgtttttcaatggtataactgggaataaccctgttgt

SEQ ID NO: 44395 - DNA, 312 bp, Gossypium hirsutum
  Clone ID: LIB3583-043-Q6-K1-C8
ggtccatatgggcaccaacaactgtgatttcacatatggatcgttacgatttcaagcgtcgcaatgacggaactatacatcatcaaccttgccaagacctgtgagaagcttgagctcgcatctcgcgtaaatgactctatagagaaccctcatgatatcatggaacaatctgcaagaccctatggtcagagggctgtattgaaattagctcacacactggctgtcatgccattgctcgtaggcacactcctggttcattcactaaccaactccagtcatgtatcagtgagcctcggcttagtatcctcacag

SEQ ID NO: 44396 - DNA, 313 bp, Gossypium hirsutum
  Clone ID: LIB3583-043-Q6-K1-D1
gtcagttttcgtagttttgctcttttctctttgagtttgctttgcgtggctctgactttgcagacactcgactggcaaaacagaatatgttatctgggaagatagtatcaagaccttaaacacagagatgtcacatggtgaccatcctctattgaaaaagaacttataaaattgtgcctgtaagcaagaggcaaagagaatcgggtgtgctactaattggagcctcagacgatgctgccactaaactcatcacctaggtgtccaagcccctggcccctcacatccttgtggtgaaggtatgagcgaagctcaa

SEQ ID NO: 44397 - DNA, 339 bp, Gossypium hirsutum
  Clone ID: LIB3583-043-Q6-K1-D10
cccacgcgtccgaaggcatggatgtttcttttacagatgaacgcgattcataggatgtactgacagcctagcataagaccgtcctcgcacggtgatgttctaccactgcttgaagctctctacctacaatctctgacgatgccttgattggatacacacaaaggtctttgagagaggactgtgccttgttgcttcgtgcagagagggatatccgaagggtaaatcgttatgggtcgctgaacccgacttagtggagaggctttaccacactattgtcaccgggggataggtatctataactcatcctggatgtgttaggtagtttgtcctgatgacgaa

SEQ ID NO: 44398 - DNA, 290 bp, Gossypium hirsutum
  Clone ID: LIB3583-043-Q6-K1-E10
agaaactcaagaaacatgggacaaagttctggttataactacaggacttcagttctgcagctgatcaccatcgttacttgtgtcggggtgctctcctgtttaagatccagaagtgcttacaagaactacacagctggaggattcctaggctgactagatgccctatgaaagcctgatgtttattaccataaacgggctgattacaagaactcagcttgggagatttcctcagaaagtcctttttatgtattcctttcagttgcctctttcgacttcatatgtgatgaaaa

SEQ ID NO: 44399 - DNA, 116 bp, Gossypium hirsutum
  Clone ID: LIB3583-043-Q6-K1-E11
cccctagctagcaaagtttcccgaggaaaatgattctatcggcgtgaaaaagaacactctaaccgtgcgagtatccatttccatgagggcgatttatgattcctttatacacttac

SEQ ID NO: 44400 - DNA, 282 bp, Gossypium hirsutum
  Clone ID: LIB3583-043-Q6-K1-E7
aaagtatagctgaaaaaggagtggtgtctaacatcactgcttcaccgacaaagaaaaagaaagacaatgggagtggttcagagatgtcagctaaacaggggattgagagtttaatggaatctttaatgaaatgtgatttgtttgatggagaatgggtgaaggataattcatatccactttacaaaccagggtcttgttccttcatcgatgacaatttagttgtatcatcaatggaaggcctgataaaagttaccagaaaccgaagtggaatcctcatggctg

SEQ ID NO: 44401 - DNA, 271 bp, Gossypium hirsutum
  Clone ID: LIB3583-043-Q6-K1-F10
cattaagagccttagttacattcctcctagagaaaagatatttcctcaaagagatgtagcttcggatggtagtgaagaggaaggatcaggacacgctaataaacctgagaataatgttcagcgtatgagtgttcaagacgcaattaatctttttgagagaaaacaaagggatcagattactgatgttcctaaaaggaactcattagcaaacactctcttggtgcaggtaagtctgtattgagatgatggagtgcatgtaatagtgaattct

SEQ ID NO: 44402 - DNA, 188 bp, Gossypium hirsutum
  Clone ID: LIB3583-043-Q6-K1-F11
tcgcttcaatagactaagtgaccttcttgataagcagattgtatttactcaaagacatgcaacttcggatggacgtgtaatgttacgatcaggacacccttatcaacttgagactaatgtccatggtatgagttttctaaacgcaattaatctttttgagttcaatctctaacggtatctggatctct

SEQ ID NO: 44403 - DNA, 158 bp, Gossypium hirsutum
  Clone ID: LIB3583-043-Q6-K1-F5
cccacgcattcgaccacacatccggggttatattaagattgtccacgaaaatcccgaccactcaggcacctcgttggcaccttctcagtcatgctactaaacccccgatcaatcttaggctacactacaattcaaaggatacactgttagtccttaat

SEQ ID NO: 44404 - DNA, 388 bp, Gossypium hirsutum
  Clone ID: LIB3583-043-Q6-K1-F7
caggatctgacaggagggcgatctctccgctctttttcttaccgctatggataatgcctgcgagtcgcccacggaaaaaggtggagaggcaagggagtcagatgaaacggcccctgctcccggggtccccgggcctacagatactgacggaatcccggaggaaactgacgtggacggagatggggacttgaaggaagccacggccgaagacgcgagctcaagaatcaggacatctcagatttaacagcagttgaaagggaagactcctctttgcttactcctgcagccaaaaaaaataaaaatagattccaaagaaaaagaaagagaagaggcaaaaagtggatgaagatgagattcaaaaggatgcaaatcctggtttctttttttt

SEQ ID NO: 44405 - DNA, 436 bp, Gossypium hirsutum
  Clone ID: LIB3583-043-Q6-K1-F8
ctaagacaacggggcgagtttctcttaagtattaaggaaaccctggctgaagctatgactgggaaacccagatcttataccatgcatgctcactgtggccttgaaagacgctctgacttatgacaaggctacaaactacggaggctggcatggatcaagaggaaactgacgagaactgagacggccactagatagaagcctcggtcgtactctgagagctcaagaatcaggacatcatggaatataacagctgatgacaagggaagactcctctttgcttactgctgcaaccaaaaaaataaatatagatgccagcgaaaagaatgagacgaagcgtaatgttgatgaagatgagattcaaaagatgcaaatcctggttccttctttctcggaggagcagctgaaccgttatgaaatgattcgcccggtcagcctt

SEQ ID NO: 44406 - DNA, 376 bp, Gossypium hirsutum
  Clone ID: LIB3583-043-Q6-K1-G2
gccacgcgtacgttgaggaatatgtcagcttgcgtagttttgctcttttctcttttcctttcctttggcttgctttgttctgccaaagactttcccgtaatatgagtctacgatgatcctccgaagaggtacgaggactgccggaggcgatgcgaatgtgatacactgtggtcaaacggagcaacagcagtgtgaagaaagttgtaaaagtcagtatcggagaaagatcaacagcagcgcctccgccctgaatatcctcagagtagattcgaggagtgtcagcatgtatgcctacatcaaggatgaaaggcatcgaccactatgccttcagtggtgcttgtaacgaatcgagctagatcattatctattccagagg

SEQ ID NO: 44407 - DNA, 190 bp, Gossypium hirsutum
  Clone ID: LIB3583-043-Q6-K1-G4
gaagcgcggatgatactaaacagaggtacgaggactgccggaagcgatgtcaattggagacacgtggacgaacggagcaagacatgtgtgatgactggtgttaaacgctattgaaggtggagcatcagcgtgacggagaagatcctcataggagataccagtattggcgacatcactgccaacaggaaga

SEQ ID NO: 44408 - DNA, 181 bp, Gossypium hirsutum
  Clone ID: LIB3583-043-Q6-K1-G5
tcggccacgcggacgatagcgattagagatacgaggcctgccggaagcgactgcaattggagacacggggacggactgagcaagacaagtgttattacagttgttaatcgcaattgttggaggatcactagcgtcaccgtgaagattcttacacgagatactcgtattggtcgtccactct

SEQ ID NO: 44409 - DNA, 441 bp, Gossypium hirsutum
  Clone ID: LIB3583-043-Q6-K1-G8
gttcgatgcccggtgagaggcgtccctcttcacagttcttctacctcgcgcagtatgtgggtccgcggcaagaccggcggcaaggcccgcgccaaggccaagtcgcgctcgtcgcgcgccggcctacagttccccgtgggccgcgtgcaccggctgctgcggaagggccactacgccgagcgggtgggcgccggcgcgccggtgtacctggcgccgtgctcgagtacctgacggccgagatcctgtagctggtgggcaacgcggcccgcgacaacaagaagacgctcatcatcccccgccacctgcagctggccattcgcaacgacgaggagctcaacaagctgctgggcggcgtgacgatcgcgcatggaggcgttctgcccaacatccaagccgagctgctgccctagaagaccagcgccaccatggggccgaaggcgc

SEQ ID NO: 44410 - DNA, 218 bp, Gossypium hirsutum
  Clone ID: LIB3583-043-Q6-K1-H7
gcgtgctactacaggtgtgagaggagatggggctcttgtccatcctgcacagcacctactccctccaggcagctcagtggtgtttagtctgcagacactagcccagaaccttgagtgggcccccgaaagagcagggtggcttggggctcccctggtagttttctgtctgttccagaggtgcttccctgatctttctataatagcaaggatgagagtct

SEQ ID NO: 44411 - DNA, 448 bp, Gossypium hirsutum
  Clone ID: LIB3583-043-Q6-K1-H9
cccacgcgtccggaaatgaggcatcatataatatagttgccctcctgtctttccttgtgtcctgagtgagattttttctaaggcatgcttttatatatatgtgagattcaatcgtaagagactcaaaggtcgtattggagaagaagactgtcatatggctttttctactctttgtaatgtatgtactattttttttttcatttttgtagtggaaatcattgcttctaacctgctatcatatgttcagcaaaagtcacagcttatttacatgcttagaaatatgcaataaggttttaggtgctttttagttcatgtaaggttatggccccctttacatcatttttcattgaggttctttatcaaaacatgctgagagtttctgatgaagtagaggaaaacattcactattggtgttgtcttcattaagaacgaaaggtatgcttcatct

SEQ ID NO: 44412 - DNA, 518 bp, Gossypium hirsutum
  Clone ID: LIB3584-047-P1-K2-A11
agacttggacaactttttgatttctttagaatgttatctttcttcttcacgaccgtcggttattatgtctgcacaatgatgactgtccttacagtttatatattcttgtatggaagagtttatctggctttctctggactcgacgaggagatcgctaggcaagctaggatgtcgggtaacacagcattggatgcagctctgaatactcaattcttggtacagattggagtttttactgccgtccctatgataatgggttttatacttgaattggggttgctgaaggccgtattcagttttattacaatgcagcttcagttatgttctgtcttcttcacattctccttgggaactagaactcattattttggacggactatcctccatggtggtgcgaaatatagagcaactgggagaggttttgtggtgcgtcatattaagtttgctgaaaattacaggctttattcaagaagccattttgttaaggcgcttgaagtggcactgcttctcatagtata

SEQ ID NO: 44413 - DNA, 515 bp, Gossypium hirsutum
  Clone ID: LIB3584-047-P1-K2-A6
cccacgcgtccgctggcctccgtcatcaccatcctccgcctctgtaatctccgacccatcatttctctgaccaggaaacacatgggaaacttggaattcaccaagactgtcaccagaatctctacacttggatgagatagaaacttggaaccttgacaatatccaagaaggataaagacaaaataacgatcacttggagattcaaaaagattttcaagattgacagtaatttgaaaatcaaggcattcatgtataaacaaagatatgatgggagaactgacaagatacgtggaagcaataataaattcatccttatcagaaacactgttcaggattgaagaaaaaattaaatggagtttagaaattttgctataaatagaaatgtaagaagcctaaacagggcatcgaaaaatagcttagaaatcttttcttttactttcagtattctctctttgtaaacactctctctttgtaaaaaccttccttttactattaataaaatacttatcttcact

SEQ ID NO: 44414 - DNA, 517 bp, Gossypium hirsutum
  Clone ID: LIB3584-047-P1-K2-B11
atttgatggattatatttattgttgaaagtatagtttgttttgtaattgtctgctctcctcacccctttgtgtgtgcgcaaaaaaaagaagtcattttaagatgcaacaaatgaaatctctgcatctaagttgataaacttgtccctgatggctgcggtttgatttgcgttgcagggccctaggaaaaagattcttcttgctctcttgcctcgttccaaaaggcaaccatgattaatattttcatttgatgattagattcatgaaagttgtctttaagtaaaaaccagtgtatctctcttttggggtcggaaagaaaatggcccttgaatccaatcagttcggatgtcaaaattttggatctctaatactgctgattctgattaataaaatggtagtgtcgaccaaattttgagatgacagactagaaggaagtagaaactattgatatcaacgttgtatgtttttgttcttattgcttgtgcaattgatttataacgcattcttttacatgtttca

SEQ ID NO: 44415 - DNA, 523 bp, Gossypium hirsutum
  Clone ID: LIB3584-047-P1-K2-B2
caagattccccaaacttaaggttctgttttcccgagacaaaaaaaaaatgttagaaggaaaagcattagtggaagacacagatatgccattgaagatgcagatccaagctatgtcttcagcttctcaagctttggatctctatgatgtttttgactgcaaatccattgctggtttcataaaaaaggagtttgatgggaaatatgggaatggatggcaatgtgtggtgggttcaaattttgggtgttttttcactcattccaaagggactttcatctacttcacattggagagactcaagttccttatcttcaaaggtgcttcctcaccttgatgtcaactgtttcatggtttattgtgagttatccattttgatggacccattatctgtgtttttctttacttatgaaatgatgacatctgcttctcttatcttttccttccttccaaatatcatggtttatctcatgatgatattggttaaaatatgtcgttgcactttctacttttttaagatttgtaatt

SEQ ID NO: 44416 - DNA, 501 bp, Gossypium hirsutum
  Clone ID: LIB3584-047-P1-K2-B8
gagaggttctgggagttgataaaggtgactgggacctccaattttattgatctaattcaaattgttaaaccatttgatccacatggcttgtagagaaaaaccaacacgatctatggggagactgatgctttctattataagacaattgagcgagtggttgactgacaatgaaaaagctgaacttgatggaacgataccttacaaacgtgaaaacggatatgtaagatgtactgttgagttatgagagtaattatcaataaaatggatggaaccgattaccagaatgtataatataaagactgcttactgacttgacaattgcatgaactgtaacaccgtcatgcactgaagagtgactcatgtcatatatgctaaggaaacccacagtactcaagaaactggtactgtaacagcatcacgtcgttgggaaagccatacatgtggaggatagcgatgtgcgctaacagacataccttaaggtatacttgaaagaatggacta

SEQ ID NO: 44417 - DNA, 506 bp, Gossypium hirsutum
  Clone ID: LIB3584-047-P1-K2-C10
cttttgtgggaacaaggaggcctgcggatcgagatttggggagtgttggttgaagaaacaaaaggaccctttgtcccctgatcggcaggatgcaggaaaaagcgttatttggacctctgggctcatctttgggaaaggagaggtttcaacataagctcaatgaaagtttcttttatactatactggctgcataatctgatattttaagtactattttttctatcgattattttcatgaggacaattcttctttaatcttttttattgtagaaatttcatctatctatcatgtcaataacacctctccagcatcgatgatcactcttgcgtcttctccattcagggcattgttgggatggaaactgaatatggtactcttcatataaaacttttcccaggctgtgctccatattctgtggcctacattcttgagttgttaacaatgcgccattgtgtgggttgccaattttatcgtgcagaaagccgaggacagtcctgggattcag

SEQ ID NO: 44418 - DNA, 219 bp, Gossypium hirsutum
  Clone ID: LIB3584-047-P1-K2-D1
gaaaccacccacgccccacgcgggcggacatacatccccaacccgcgctctacaagaacacaagcttctgactttctgcaagcaacccaatagagcgccgggaggaatacctaaatggaactcacttcccttaattctacaacgtacctgactgataaaaccctggcaaaacccaactcacatcacaaacatcacattcccctctcaacacctatcata

SEQ ID NO: 44419 - DNA, 423 bp, Gossypium hirsutum
  unsure (1)..(423): unsure at all n locations
  Clone ID: LIB3584-047-P1-K2-D7
cccacgcgtccgcccacgcgtccgcaagaaaacacggttctaaaacgtgctgtggctatccagcatgaacgccaaaaggagtaccaggacaaaaacaatgagttggaacacttgaagcagctggtttctcagtatcaggatcagttgcggactctagaggtaaataactatgccttaacgatgcatttgaggcaggcacagcaaagcaattccatccctgggcgtttccacccagatattttctagaagtaaagatgcaaccaagtaaacatggaagcatagcgatggaatgtttagttttatgaatcatagaattacttagcaatagtgatatactgacaatgttttttaatctgcttgccttttcttatgtacaatttctgatattgatcgtatatacagaaatatgatgtgttcaacana

SEQ ID NO: 44420 - DNA, 516 bp, Gossypium hirsutum
  Clone ID: LIB3584-047-P1-K2-E6
gatgggtatttatgattggtctttcatttttgctttcgatgttgaaacatagctgatgaaggtctttattcttggaatgtttgtctctcaatatcccctgattttcaccgtgactgggttacattagctatattggtgacaaagaaaactatgtattgtgccaacacaattcgaaagactgttgtgaggaggtttcaagcttgcagttgattaacttctttttgatacatctgttgtgtttgagatgaggtttatgctttaagctgttcaaggtggagtgatacaactcgaaaagaaatgtcgattatgtcttgctcgagttaagtaacttatagttcgtcgagcttgaatcaagagtctgtcaaagttgtgggtttcggatctgcttggtaatagtcttaatcttttgagagttataacttagtactaagtattaacagatatgaatgatccgccaaaaaagttgatgttcactttgagatggttgggtttatgttcatatttggactgactttg

SEQ ID NO: 44421 - DNA, 518 bp, Gossypium hirsutum
  Clone ID: LIB3584-047-P1-K2-E7
gttgctaattaagtgtggtattccgctgccagaccatgcagtagaaagttgttttaatcatactgaaattgctcgagttatgaatgcagctggcaggcaggcagcgagatgctctaccggaggaccttcatatggggcttgaccttcagaggtactgtacaacttttttgatgtggagcaatatcctcttatttcatagctcacccatcggttccaggtccaaacattggatgagtgcagagcacgtccatattctctggcaaaacctgaaaaaaaaaaacaccattttcaacctggacaaaagaaatatgatcaagggggttgaagcaaaatcataatatcatacttgcaataaaacgtttcttgggtgttctttgaccgagagcacatcgacaaacaacatgtggcgtttgaggcgacgtaatggcattgagttgagtacctccgatagagataggattgacgtgcatatcaatatcacatcattatctgcttcaagaaatggaattacgtcccta

SEQ ID NO: 44422 - DNA, 451 bp, Gossypium hirsutum
  Clone ID: LIB3584-047-P1-K2-F4
cccacgcgtccgggccgccctttttttttttttttttttttttttttttttgggtgcaaagattcagaatattttcattccatgcaaccaaataatatttcttatgtttgaatttattcgtaagacaatcaccacgtaactcccaagtaatctaaatcaatacaaatacaatcccaaccaacagcatacactgactggtaagaccagtaccaggtgcataccatccaatcagctttgttgcaaaagggagaaataggaattaccttatggcaccattgcagagcatgagagatgaatcttacagcgcatatttgaatatgcaaccataagtgtaatcaggttcaggtgcagatgatgtaatgttgattttgattagaggctttgaacctggtactggtcttaccagacagggtatgctgttggttgggattgaattagtattgaacgagac

SEQ ID NO: 44423 - DNA, 522 bp, Gossypium hirsutum
  Clone ID: LIB3584-047-P1-K2-F6
cggacgcgtgggcggacgcgtgggcacgtgttacaaaaaatcatatctattatttttggtttgattcaccattttcttcgttgtaactttctaaaccacccaatagtttaactatgactacttttaaaaaaaaaggaaaagaaaaggaaatagtttaactattattgatttcaataattcaacaatggaaatctaagcctaatagttaatcacattgacaatgacatggccttggaccaaactagaatttccacttgaaatagtttccccatttgtttaatcaaggctcttttaatagtaagtattccatttatcattatagccatacatactttcccaatacacagagataaacagtgttattatcaggatgtcaaatatcaactcatgaagcagatgtttacataattttaataaaaatttattgatcatggttccaatcatataatttgagaaatacaataggattaatattcaacccccccctttaattctcgtgtttttggtagaaagaattataaa

SEQ ID NO: 44424 - DNA, 500 bp, Gossypium hirsutum
  Clone ID: LIB3584-047-P1-K2-F8
ctcaatcgtgagcgtacattgtaggagatccatgttgacgatccaaggtatgctacgcgatcattctactatagagttatcttattgcaatacattgatcgaatttactcaacgtcgtgactgaaaaaaccgtgtggtaacacaatttaatcacctagcttaatatccttgtatcacatgctggtttaataaggtggaggactagacaaatggcccttaccaacagttgttcagaataaatggccaatgtgactggccattgagacgcgcattaaacgcggccattatgctcgttacgcgcagtgtgtacgctccacttgacagctacatatggcagggtcctagcgctcgcttcttttgctttcttgcctcgtttgctggctatgctcgtcaagttttaaattgaaggtttaatttaggggctcgatttagggctttactgtagcgctacaccgaacatctagattagagagatggattaggtagatggccaacgtcct

SEQ ID NO: 44425 - DNA, 522 bp, Gossypium hirsutum
  Clone ID: LIB3584-047-P1-K2-G7
ctacgatcgttggtcttcatggactgtttcggtttcgtggggctatgccattcaagcatacagcaaacctgtatctttaccagatgttctccctgtgccagaaacattcaggcaatggaaacggggaaatgtattggcaggagtgtacacatttaacaccaaaaaattccacccacacccttgccagagacccacaatcttctatttaaacagtgtatcttctaccaagcacggaataatcgagactgtttacaataaatctcacgaagattgcatgcttttcatggatccaacgcggaaactcgaagaaatccgagttttcactaagaaactagaccttaaccacaagcagatgcaggcaccgagaaggcattgttgtgacgtgttaccgtctaaatccggcaaagttttggatgttgcgatacgggaatgcggtgaagatgaactgatttacatgcatgcatagatgtttaatttcagacggtgttaatgggtagattcttaaatgtcatatgttgctgg

SEQ ID NO: 44426 - DNA, 168 bp, Gossypium hirsutum
  Clone ID: LIB3584-047-P1-K2-H4
cccacgcgtccgctagaaaagtgattgcatttttagcttaaggctactcgtagtgggaatattaggggacaatgggagttttgttgcagggtgaagataaaacgatgctccaataacttgtaacactcttgttgatttttgtatatggaaggtggtcacttagcctgt

SEQ ID NO: 44427 - DNA, 458 bp, Gossypium hirsutum
  Clone ID: LIB3584-048-P1-K2-A11
gaggctgagtatggaagcacaagagtgtctggtgatggcaagatggatggattcggcttctttaatgcttacttatgctgagttggtctttaccaaggtctctgataaagatctccaacgtatctttactgttatattcaatgtatcctcaaagctggaaaattcagatcatgaacttgaaatggcacagatcatatatacaaaaatgagtcaacaaccaattgataaacctgcaatgcctcaaaagatcttgatcaatctctacaatactatggaaggcccatatagctcattctttcgttacatgctagccttagatttaacactgaatggcaaatgcattgatcatattgaaccatcttctaagaagatagatagctctttgaaagagtggaatattggtgtcaaggatcaaagtaacctatctcttaccgtcgcaaatgtactgaatgaaaaca

SEQ ID NO: 44428 - DNA, 358 bp, Gossypium hirsutum
  Clone ID: LIB3584-048-P1-K2-A4
ggggaaaaaaaaaaacaaaaaatttttttttttacaaaaaaaaaaaaggtgattttataaagttaaaaaataatctaaattccaataaaaaaataataactttcagggatccaaataaaaagttaaatgctaacacaactttaaatgttttggaaattttaaaggaaaaccctaagggcggaattttaaatttaaatgcaaaaactatgcaaatattttttaaaaaagatccttccccttttttttttaaatctttttaatataaaaaacaaattttttgccctcaaaaagaaaaacatttgcacggccaattttaccaggccgtgaaaaaataaagccaaaaaaaaaccatttgcaa

SEQ ID NO: 44429 - DNA, 484 bp, Gossypium hirsutum
  Clone ID: LIB3584-048-P1-K2-A8
ctgcaattagatcgccagggtatgctcactaagatgcaattttcaacccgcgagcgatcatatcataatgtactgtattgatgacaatgagtagataaaaaaggcgactgctgtacggcaaaataacgctgaagaggctgccaggactattctaggaagagaaaatggtggtaattgtgacataaacaaccttagtagacgatctaaaatatatctttcggtgtttgttgaaggagctcaccttagctgtggtgacatacattcctttcaaggtgacagtgaactctcactctgtggagcattcgagaagagtggctttttcaatcttaagtgtgaaatggcacgagactgcaggaacgagtacctgatttcaatggagctaagccctctttatgtaaatactatttatgagatcgctccatttgaaccgagattctaggaatggctggttcctgaagcaataaacatggatgagagtggaagg

SEQ ID NO: 44430 - DNA, 482 bp, Gossypium hirsutum
  Clone ID: LIB3584-048-P1-K2-A9
cttaacatcgaaggggagtaacaccgagcttcgacttggattcaggaagccagccgtgatcatgattgttggcgttaatggaggtggcaagacaacatcacttggaaagctggcttatagactaaagaatgaaggcgcaaaaatattgatggcagcaggggacacattcagagcagctgctagtgatcaactagagatatgggctgagagaactggttgtgagatagttgtagctgaaaaagagaatgccaaagcatcatcagtgctttcgcaggctgtgaaaagaggtaaagagcaaggttttgatgttgtcttatgtgacacatctggacgccttcacaccaattacagcttgatggaagagttgatagcatgtaagaaggctgtcgaaaaagttgttcgtggtgcacctaatgagatactactagttcttgatgggaacaccggattgaatatgcttcctcaagctagagagttcaatg

SEQ ID NO: 44431 - DNA, 483 bp, Gossypium hirsutum
  Clone ID: LIB3584-048-P1-K2-B9
ctgtggatgagtttctctagtttgtagttcatgctttgaggttgaattacttgaattcttgcgacaatccaagtattatcaaagatccggaggcagagaccatatttcggtcgctatcctagaaatatgtcgagtctaagcaaagatgtggttgccccgtatgtacatgttgttgattccttcacagatgatgaccctctggacccgtatgggtctcgaactacacttcttttcttccggggaaatactgtcaggaaagatgaaggcaaaattcgagtcaaattggccaatatcttggctggtatcgatgatgttcatttcgaaaatagtgtaggaactccaaaaagctttaaaatgtctacgaaagggatgcgattgtcgaagttctgtctgcaccctgcaggggacacaccatcctcttgccggctctttgatgctattgtgagccactgtgttccggtcattgtcagtgacaaaatcgag

SEQ ID NO: 44432 - DNA, 483 bp, Gossypium hirsutum
  Clone ID: LIB3584-048-P1-K2-D1
gccacgcgtacgggaagagggaagaagtcccatgcatatactcatagtctagaagcaggacatcatgtttacatcaatcttggaacagagaaggcttactggcttcctgatgggtatgaaattaatgacccatcactggatggtatttaccatgggctatacccaaggctttccagagaacaacttgaacaacttgataagaacaagcaacggtctagggcacttgatggttcagatgaccttgctgggatggttgggctgaataatattcaaaagactgattctgtcaatgtcaccatgcaatctttaatgagaattacttccttaagaaacttcttccttatccatgagaattaccagcactgtggatctcaacttggtcatcggattggagaactcacacgaaagatttggcatgctcgaaactttaaaggacaggtgagcccacatgagtttctacaggcaggtatgaaagcaagtaaa

SEQ ID NO: 44433 - DNA, 268 bp, Gossypium hirsutum
  Clone ID: LIB3584-048-P1-K2-D11
ccgtccgcgcaagcacctcacagagacagatatctaggcatacagatagagttgcaatagtatcctgagtgatacgtaatttgatcaattggggatgatctatacaggtttagtgtatagatgcaaagagttatcggattaatatatggtaataagcatgccggaatgagggattgatcgatgactctaacgagcaaataagctatattgtgagctagatgattaaaaagccaaataatgtacaagtggggaatggagctaacagcac

SEQ ID NO: 44434 - DNA, 482 bp, Gossypium hirsutum
  Clone ID: LIB3584-048-P1-K2-D8
ttttggatccagttgcagacaagcttatggttgctgctacattggtcttattatgttctagacctttgaacattgctgtgtttgggcaagtgccatggctactgaatgtaccatcaatagccatcattggaagggagataactatgtccgctgttagggaatgggctgcttctcaaaatggtaagcttttagcggctgttgccgtaaataagctggggaagtggaaaactgccacgcaaatggctgcactaaccatccttctggctacacgagatagcagtctcggagaaactgggatcttagttgcttcgggtgttatttttctttatctttcagctggtctctcagtaatgtcattggtcgtgtatatggagaagatacggaaaatattataggagtcgttaacttcacctgctggattgcaatggctgcgttcttttgtcgtggactgtttgtggcaatttctcatgctacttcatgcc

SEQ ID NO: 44435 - DNA, 488 bp, Gossypium hirsutum
  Clone ID: LIB3584-048-P1-K2-E1
cccacgcgtccggcttgaacaaatcagggtctctctctgtgtttagaattgaggattacaatgccacagtggaattttattgggcaccatttctggtgcaatcaaattcagacgacccagacatgcatagcatattgaatcgtataataatgccaaaatccatccaaaaccatggcaagaactggaaagatgtcgactatttggtattcaacacatatatttggtggatgaatactttcaacatgaaagtcttacgaggatcattcgatcaaggcgatacggaatacgacgagatcgaccggccagtagcgtatcagaaagtcttaactacatggtctaaatgggttgataagaatgtgaatccaaatcgaaccaccgtcttcttcagcagcatgtctcctcttcatatcaagagcttggattgggaaaatccagatgggatcaaatgtgccttagagacaaccccaattctaaaccagtcaatgcac

SEQ ID NO: 44436 - DNA, 119 bp, Gossypium hirsutum
  unsure (1)..(119): unsure at all n locations
  Clone ID: LIB3584-048-P1-K2-E3
atcagcaactactttnaatttttttagatcctttgctactttaaaattatgctattatacaaaaggttactcatgggaagggggattttaccgaacacaggtatcactttttattatta

SEQ ID NO: 44437 - DNA, 412 bp, Gossypium hirsutum
  Clone ID: LIB3584-048-P1-K2-F11
cttgcctgtttcggtcgttaacatcctcaactaatgtttcatatataggacacatttttcttcctcgaatttagtttgattctttgcctatgttttcttattacttttcctcttgttggtttgtaattgtcaaagacattctaatattggtttttaatcattatctatgtgtgtatatatacaaatatatattgtgaaatacattaattcctatttgaaaaaaaaaaaaaaaaaaaaaaaaaaaaaaaaaaaaaaaaaaccccaaaaaaaaaaaaaaaaaaaaaaaaaaaaaaaaaaaaaaaaaaaaaaaaaaaaaaaaaaaaaaaaaaaaaaaaagggggggggcccttttaaaggaaccaagttttcttccccgggcttgccacctttaatttttttttttggggcccca

SEQ ID NO: 44438 - DNA, 483 bp, Gossypium hirsutum
  Clone ID: LIB3584-048-P1-K2-F4
cggacgcgtgggcggacgcgtgggttttacttcaatttgggatcttcagatccccactaaaataaagattcatctttggcgccttctgcagaactatgtacctcacttcatgaatttggtgaagtgaagattgcggaccgactcggtgtgccctctgtgcatgtcagagccggaggactttcatcatctattatggtactgcagcactctgcggcagctttggtttcatttgaagctccctatggattttgatgccttctcctctattggaacaacaaattttgtcagggcttttctagcaatgaatatgaattctcagaaactcagtgctatttcattatgggcactttggtataaaagaaataaactagtcaatgaaggattaaatttcgatttctgtgaattagtgggttttatttagggctattttcaagaattaagtcttgttaaaactagagttctgactaccggtatgaaaagaaa

SEQ ID NO: 44439 - DNA, 466 bp, Gossypium hirsutum
  Clone ID: LIB3584-048-P1-K2-F5
atggttctagggcgcgagccaaccttgtagctgaaccaaacttgcatccacctgcacaccacgtcttgccacctctacagggtgacctatggttacaaaactcggccggctaggttacaacgactcaagcactcgtgaagaccgatgtctggtactccatcataaaatcagatatgcaaacacatcaagctcaatgacaactaccttcatcacgataaggacctcaccgatcgacatgtcatacacttattcaatctgtatgaacaatggatcacgcgatgtatcggctcattaatcgcggccggtgggggatgcacacacagggagcacgtcactcgcagggccctagcacccgctcattgaatgacgagcctaacgttattgacacggttgatggatcactccgacaagctgtaactccagggctccctataggtgaccgcttgaatgccatactgtacctaga

SEQ ID NO: 44440 - DNA, 437 bp, Gossypium hirsutum
  Clone ID: LIB3584-048-P1-K2-G10
acgcggacgcgtgggaaaaaaaaaaaaaaaaaaaagaaaaaaaaaaaaaaaaaaaaaaaaaaaaaaaaaaaaaaaaaaaaaaaaaagaaaaaaaaaaaaaaaaaaaaaaaaaaaaaaaaaaaaaaaaaaaaaaaaaaaaaaaaaccttcggggggcgggcccttttaaaggggccaaactttagcaaagcgaaaaggaaagcaaaaaattttttaatggggaacccaaaattaaagcaaaggggcgggggattaaaaagggtgggcaggaaaaaccctgggggaaagaaaaataaaagacgtaaaaaaaaatcccattaagcacaaagggcgaaatagaaaaagggaccgaacagaaaaaacttcaaaaaagtcaaccacctaaaaggggaaagggaccccctcttaaaagggacaaaaaaggggggggggggtggg

SEQ ID NO: 44441 - DNA, 461 bp, Gossypium hirsutum
  Clone ID: LIB3584-048-P1-K2-G12
aattggtggtgctggagagaaaaagcccatgggctgggatgagcgaacgaagattactgatacatgtacttatgctccgagaaattggtgatgggatgcacccataataattggggatgtaaaagctatggaacccggatgactgatagatgatgaatccctggagatcgattatcctgaagcaaccaactactcagatagtcaacatgaataagatggtgacgaggaagcccccaaaatggaggatcccaaagtgctagatagtcactcatctctgcgaatggtagaggccaatgaacatgaacacagcttatatatgaatatggcctacttcactaatagacgatactagtgacatgggtctttgagagccctcagatattgcacaccgctactactactatcttgaaaagcccgactgtgatgctatagctgccattgatatagagatttgaacaatg

SEQ ID NO: 44442 - DNA, 517 bp, Gossypium hirsutum
  Clone ID: LIB3584-048-P1-K2-G4
gtcgacctcagacccacgcggacgcgctgtgaaaatgaataaagcttttatagaaaaaaccctttcctttataagaaccaacaaaaagaattccctaaaaaaaaaaaaaaaaaaaaaaaaaaaaaaaaaaaaaaaaaaaaaaaaaaaaaaaaaaaaaaaaaaaaaaaagaaaacaaaaaaaaaaaaaaaaaaaaacaaacctgaaatcaaaaattgctgataaaaaaaaaaagaaaagctaaaaaaaaacaaacaaaactggggcgcacatttacaggtgatacacattcaaccccctggaaaaactcaattagaactctatatgggcctgctaaaaaaaataaaacggggggcgaaaaaaaaattgaggccttggaaaaagccctacacaaacaaaatttagggttaataccaaaacccccttatcgcctaaggcacaaaaaaaaaaaagggccgccactatgcatcttctaaaattgtttgcccccacataggtgaaggaacccccccacaagct

SEQ ID NO: 44443 - DNA, 489 bp, Gossypium hirsutum
  Clone ID: LIB3584-048-P1-K2-G6
cccacgcgtccgtgacattatatcccgtggctgcacgattagttcttgaagaaaagctttcagctacttctgatgatggaaaaaaatatagagaaatagtgttcactgaatcaaattggaaaaccagtagcttttacaagcttgaaaacttcttgtatagttttttagatggatcaactagtagaggaatggagagaatgaagctcaaacttggaacaccaattgcaattgctgagcgaatactttctgcttgtgaaactcttaatagaaaagattgtgagtctgcagagcaggacttgtcttctgcaaatgaaattattgatagtgtgaaagagtatgtaataaagatggaaaatgaaagcatctcttggagaagacgaactttgtcagcgattgatgctacaaaatcacgtactctggagctcatagaatctaccttacagctatcgaatcttgatgttgtggcttcctttttactcaagggggaat

SEQ ID NO: 44444 - DNA, 239 bp, Gossypium hirsutum
  Clone ID: LIB3584-048-P1-K2-H5
cgcgcctgcaaagctatagtatagcgataccgaaacctaattcaatggcactggccgtacaacgacaacactgggaaagccaaaaccctacccaacctaatctgattgcactagatgcacattccgccagctgccgctatagcaataaggaccaggccgatcgcgatcgccaacagtaacacatgctgaatgtcaaaggggactggcacctcgccctgtagcattaacactcaagcgcg

SEQ ID NO: 44445 - DNA, 537 bp, Gossypium hirsutum
  Clone ID: LIB3584-048-P1-K2-H6
cctcgctgtaccggtccgcgaatcccagttccgggctagacgtacgcgtacgcgtacgcgtttgcttgttctagatcgcgagcggacgccctttattgtggtcgatgtacaattccctggcatgcccatgagggtaagcttcttctaaagataaataggattttgaggcctggtggatactttattttgtcaactaaacacgacagcatcgaggtggaaaatgcaatgaacacattgacttcttcaatctgttggaatattctggcgcataaaaccgatgatgtcagtgaagtgggtgttaaaatatatcagaagcctgaatccaatgatatatatgtgttaaggaggaggagaaatccacctttatgcaaggagaatgaaaatcctgatgcttcctggtatgttccaatgaaaacttgcttgcatactgttccatctgcaattgaacaacatgggacagagtggcccgaggaatggcctaagaggctcgaaacatatccggattggttgaacaacaaagaaaaagcgattgatgat

SEQ ID NO: 44446 - DNA, 318 bp, Gossypium hirsutum
  Clone ID: LIB3584-056-P1-K2-A4
cggacgcgtgggtgaatctttctgctcgctttctgacagctacatcatgagagtatcgctttggttccaagagctgttgcctgtacgcaacggtatataatgagagacttgtgttatttacgtttcctaatttgattgaccgaaaatttgatgtatggcaaactctagtactttaatttggttacgaaccatttggcattactagtcacagcctatcatgtctgggtccgtaaacacactagtctccctacttggatggtttaaattaacggttttatacgctatcagaacggttaagatgccattgttttgaggttt

SEQ ID NO: 44447 - DNA, 320 bp, Gossypium hirsutum
  Clone ID: LIB3584-056-P1-K2-A6
ggccacgcgtcacgcttcgctaaatcgaatacgcccttctaaactaacagcatatttctcattctttcgacctaaactttcctgagcggacctaaatcaatttagtgggcatttttacaacacttgactaaataaacccccattacccaattattctcctctctaacattcaactttcttacgtccattatactaactagcacagacctatctctctttctaacattacacactcttattggtaattggaacgctccaataaacggcgcattacgctcttcgaacgtgttggataccctcattgtgacctttacaataaa

SEQ ID NO: 44448 - DNA, 548 bp, Gossypium hirsutum
  Clone ID: LIB3584-056-P1-K2-B12
gccttggaaatgaagcctacttcgaaagggaattcagacactttggcaagcaacgaaatctcgaaacattcgggcaatggttctgaagttttccggctattggataatggagataacacaaggaaaaagtcttcggcagcacctttacttgcttcgaatccacttgttccaacactgggtatcacacatggggaattggagggaccgtcgatggcgttcaggtcatttgataaccgaaagcgtcagatcgttcgtgcatctgttagaagcaaaagcttgctctcagctttcttcgtcaaacagaaatcaatgaagctaaaagctggatatgttgcatgaatctccatttgaacaatcccaatgccaccttgtaaatcactcattgtggataatgatgagttacattatccactcttatgaatagtttgtatagttgaatgttcattgttaattttccctagaaatttcataaattttccatgaaaatgaattgtcaaattacaaattttcacatccaattgaaaaaaaaaaggttagtggttgaaaat

SEQ ID NO: 44449 - DNA, 153 bp, Gossypium hirsutum
  Clone ID: LIB3584-056-P1-K2-B5
cggacgcgtgggcggacgcgtgggttataatcttttgctggttattcctttgggcagacctttcccctgctgagaaaacgctagtgcttgcgtttttaagattgaaacaaaatgagggtatgatcacagtttatctattattacatgatgaat

SEQ ID NO: 44450 - DNA, 518 bp, Gossypium hirsutum
  Clone ID: LIB3584-056-P1-K2-C3
ataataatcttttcttttatgataatttacatctgttgatcattgaagtttgaaactttttcaatattagattaaaatactttcttttgatatgttgattgctaatgcttatggtgcctattcaactaaacttatccggaaagtgcttgattaggcaagatactatgtagtaaaagttttggtttgccatttagccgatgccccagggtgttaaatgcttttccgcagatattccggactcattttatcggataccttcatggcagaggtaacttctcttgtttcctttcatttcttttcgttttttacggttaattggcaacttattatttttctgtttgttgtccagctagttcttctttggtttaaactgtgaaattttattttggaaccggaattcaaaaacggtacgtggtctgaaacctcattttatgttttatctaatttctgtctgctttaagaaagatggatgagtttctgctttgtcttcggttttaagctaatgggtttcaatttaa

SEQ ID NO: 44451 - DNA, 341 bp, Gossypium hirsutum
  Clone ID: LIB3584-056-P1-K2-C4
acggttggcgatgcctggcttgtttttggaaattggtttttttggaagggttaatttttttgtggcttttggacccaaagtggtggaatgggtttcaaccatttttttaccaggttttaaggaattcttaccaaatcttatttcccctgttaagttggtcttgataaccaatcaacatatggcaattaccgaagtaaattttgatgatgaaaaatcgaggcattgctttctggccggtctggtgatcagaagtctaagtatcagtacttcaaatggagagtgtgagaccttgtgatattagcagaaagaatattatgggaattacgatgttgacacgcgcg

SEQ ID NO: 44452 - DNA, 102 bp, Gossypium hirsutum
  Clone ID: LIB3584-056-P1-K2-D4
caggcgcgtcattcagtcgagggtggcaacaggctctggcttgggagctattttgatatcaaaagtaagggtggagtatccagacggaacgatgatgacatt

SEQ ID NO: 44453 - DNA, 545 bp, Gossypium hirsutum
  unsure (1)..(545): unsure at all n locations
  Clone ID: LIB3584-056-P1-K2-E10
cggacgcgtggggtttatggaattgtttgatgtttctagcgtgcccatctcgttttcttgctccaacaagtaagcacttaaccgcagaacaataaaaagccaaataatatatttgtagcaatgctcttgtttgcgttgaatagtgttataattctacttgtttttggtgggacatacgacgattatccatgttgtctttgaaatttattgttggaaaggtgctattacatcaacaaaagtcaaatggaaagatttttgaagatgtcttctgtttggtgcaaactgctctcgggctcaggcctaggcctaatgctccgcgtcctttctttattgacgacacggatgtatttttggtcttatattgtttatcatgtcataaggatgtgtttggtttaagacggtaaaattttttttcctaannaaaaaaaaaaaaaaaaaaaaaaaaaaaaaaaaaaaaaaaaaaaaaaaaaaaaaaaaaaaaaaaaaaaaaaagaaaaaaaaaaaaaaaaaaaaaaaaaaaaaaaaaaaaaaaaaanggggggggg

SEQ ID NO: 44454 - DNA, 550 bp, Gossypium hirsutum
  Clone ID: LIB3584-056-P1-K2-G1
taccaagagggcttgatccccattctgttccatcagaggagctcgctgcctcgttaggatacatggtgcaacttctgaatcttgttgttcgtaacttggctgttcctgcacttcataactcaggttttgcggggtcttgctcacgaatatggcaacgagattcttattgggatgcatgcccgtcttctcgaagcaatgagtatccactttttatacctcgccaaaattattgctctgctagtggggataattcatggacagatagaagctctagtaattttggtgttgcttcaatggaatctgataaaagattccgtctggattcatctggaagtagtagcttcaattgttcttctggttctccccacactgctgaaacacataaggacttgcagaaagggatatctcttctgaagaaaagtgtggcatgcattaccgcttactgctacaactcactctgtttagatgttcctactgaggcatctacttttgaagcattttctaaattactggccacactatcttcaaccaaggaagttcaatctgtttt

SEQ ID NO: 44455 - DNA, 526 bp, Gossypium hirsutum
  Clone ID: LIB3584-056-P1-K2-G11
gaaattgaaggcttatgaggggattcctggaccatatgataagactaagagaatggttattcgtgatgctctcatgttttgcggtagttggtttctttcgtggaatttagaatttggttttcgtacttgcttcagtggatagttagtcatgctcaatgtttttattgttctttcggtttttttaaattagggttttgaggtttcagaaaggacacaaattggtggagaaaatagcattacctggagtaaatatgaaataaaacattgaatgcttttatgtaggttatccaacatgctgaatgcttaggacttggtttggagctttaggaactactgatgaagaagtttatgaagacatcaaaagagtcattttattggtttggcagttctaggacttggttgtcctttactcagagacagagcaggtaggttctgtttttactcggctgtttgtgattgatgtttgttgcaccttttccccctctctttttctaactgtattgtacgtttgggtcactggatgggc

SEQ ID NO: 44456 - DNA, 344 bp, Gossypium hirsutum
  Clone ID: LIB3584-056-P1-K2-H1
aaaaaaaaaaaactggggggtttaaaagggggaaaaacccaaaaattgttggaatacaatttaatggaaggccaaaaaaacgggccattttttttacaaaagcataaaaaaacgatcccaacttgaaaaaggcaaagtttttggagggtaaaataaaaggttaccagggcttttgtttaaaacccgtttggggggaaaaaactggaaatgcactttttagaaaaaaatttgaaaggttttgggaagcgcctttgaaacaagaagggtgtaacaaccggggacaaatttttaaattcaaaaccaacgaacggcccaatttttaaaagggaccaagaaagaaaatt

SEQ ID NO: 44457 - DNA, 513 bp, Gossypium hirsutum
  Clone ID: LIB3584-056-P1-K2-H11
ataaaaatctatgttgttctgactaatgaagctgtaattgtccaaacctttgttagtagcattatcatgaaaaactgtgttgttcatacttgggtataactgtcaaatacaagaatgttcaaaaatttttaagttgtttcatgtattaggagtccttggaaggtcatgtttgagcaagtgttacttagacatgagtgttggacatgggcatttcaagaagaaaaaatgaagagtctaagccaacgtattgaaaacaaacttagttaaggaaagggtcaatttctacttcgaacttagttgtggacatttcataatatagcatcatcttatccatgatgtcaatttttcctgcaggtcacttcattctttgcagaacagtttctctcagacaataataaggtgagcaagctatcatttcaaattgtttggtgccttcagtttttcttctctttctgcaaatctcaaagcagatcgttagtttttgaaaattgatacatacataaaaactattcg

SEQ ID NO: 44458 - DNA, 446 bp, Gossypium hirsutum
  Clone ID: LIB3584-056-P1-K2-H12
gggttttcccactggtggccaactattgccttgcttattctagaaatcttgagatcctcacaattctcgactgtcagcctatgaaacaaggtataagcgagggggagatagtcggggatgtacaagatacacgtgaggaggagataggaggagatgaattcttccaaaatctaaagacgctctctttgacttgtttgccaagtctggaaaccatctgccgcttgccccagttcttttcttctcctatagagatccaagtatctcggtgcccatgtttgaggcaactttcatttgacgatgaaaacgtagatttcctgaagaaaatcacaggcgaattttagtggtgggcagctttcgattgggacagtgattttgttaaagtcgcctgtcgcttcaaatttaaatccacctctgcaccctcaggaaaggccaaagaaatgatcgct

SEQ ID NO: 44459 - DNA, 242 bp, Gossypium hirsutum
  Clone ID: LIB3583-044-Q6-K1-A11
ctatgccggctgctctaattaacttaaatggggatttgaaagaaccaaaggggggaactaatcaggagggtattcagaactccatctcctattatgaagatatttgcagaagagaaaatcagatgattaagcaagctcttcttgctaacctggcatatgtagagttagaactggaaaatcctttgaaggcggctctctgcagcacaagctctcttagaactggcagattgttcaagaattta

SEQ ID NO: 44460 - DNA, 107 bp, Gossypium hirsutum
  Clone ID: LIB3583-044-Q6-K1-A2
gctacgcgttagcgcatgttagggaggagtatcacatggatgctgaagatataagagatataccataaccatcaacagcattgacaacaggagcaaacaaagctgcc

SEQ ID NO: 44461 - DNA, 199 bp, Gossypium hirsutum
  Clone ID: LIB3583-044-Q6-K1-B10
cccacgcgtccgcccacgcgtccgaaagaaacccttgtaatctattatcaaaaaagaacacagtaggggctatttctttgaaatctacagtagagggattgtttcatttaaagaaccacaatacccattctcagtgtcgctttccttaattcagaccctaatgttaaaataatagatttactcaaatgaggtgttcttg

SEQ ID NO: 44462 - DNA, 162 bp, Gossypium hirsutum
  Clone ID: LIB3583-044-Q6-K1-B11
caccgaaattcctatatttcgccttattttccctctgttttgcttacgaaaatccgacatacgtgtgcagcgatgcatgaccttccgatccattgcaaattccgtccttaatgcttaggttttcgaccttaggtagacctgtgtttgattcagtgggttggg

SEQ ID NO: 44463 - DNA, 394 bp, Gossypium hirsutum
  Clone ID: LIB3583-044-Q6-K1-B3
cccacgcgtccgcccacgcgtccgcccacgcgtacgcccacgcgttcggccacgcgttcggttttattcacctcgcttggattcatccttcgccatagcgattcactaatcacacataatgctactgaatgtgtattagccggatgcagatgcacatcgcgtagatgttttgcgctcaccataataggacatactgagtgagcttgtgagcgaggttttcaaaggaaactttgcagattctcatgtttaaatcctgaagttagcatgcaggtaagctatcgttgtagggatttataaatgcagtgtagatgcttaaatattatgttattcttactaagttcgatcgttagtaacgaattgaaaaatggacaattaaatgcttatatgtctgctt

SEQ ID NO: 44464 - DNA, 116 bp, Gossypium hirsutum
  Clone ID: LIB3583-044-Q6-K1-C3
agataatgttatcaatgccaggatcaagtaacaatggcaaagctcgcagtttacttagccaccctggctcggattgcgttcctcgtcaaagctactatcacatctgaggcggccag

SEQ ID NO: 44465 - DNA, 257 bp, Gossypium hirsutum
  Clone ID: LIB3583-044-Q6-K1-C6
aaatgctctgctactaaaaacccattttttgcaagcatctttccttccttccctctctatgtctctgacgaacaaaaccagccgtattgcaaagagccactcgagagttatggacagggatccttcgtataacaaagagacaaacgaggaagaggaatgagaaggtcaagaaacggcttagaagaaacattctgctcaatgagactgaaacacaggacccctgcttgctctgctgatggatgcaacccacgacgtgg

SEQ ID NO: 44466 - DNA, 173 bp, Gossypium hirsutum
  Clone ID: LIB3583-044-Q6-K1-C8
cccacgcgtccgggcttacacttctttgctttcttttagcgttcgcttgcttgttctctaccgtggctgctgttctcagatagatctcttcactaaccatcaccaggatccaccttgtgggcatcctaatcaaccttagcctcgtcaccattcccaatgccaactccataact

SEQ ID NO: 44467 - DNA, 381 bp, Gossypium hirsutum
  Clone ID: LIB3583-044-Q6-K1-D3
cccacgcgtccggacaaacgaaagctatatctaatgaacaccttttactacttccgttagggatcgaacaccgaacaattccggcatagcattggatttttaaagccaccgagaggcctactgtataccatgatttacggaatgccataaaggactttcgaactgccaagttataaaacgaacgacaccattttatttctcctacagaatcgtgaccaacagcaaatcaaaggctctgtcgacgaagatcacacttacgtaggtcccctatcctatcactgattataacaattggtgataaaggaagcgttaaaaaaaaagaaaaagaaaaacgaaatattaaaggcaggaaaacagaaagatatatgaaaaaacgagagt

SEQ ID NO: 44468 - DNA, 313 bp, Gossypium hirsutum
  Clone ID: LIB3583-044-Q6-K1-E10
cggacgcgtgggcggacgcgtgggtttgcatcggagaagagtcgtcacggtggtaccgataatagcaacgctgagcaacatgactgaatcgggagcagatctgagactggagacgcggccgaaagttcctaccatgaccacgcacacccgaacggcccccgcgcgtcgaaccatccgtgatctgcagcgacgcatcttccaccaggtttgcggcataaactacttcttgatatggttgaacttttcgagtctcgcactcgattagagcatccaccagacgcttaaacggtggaggagtcgaagactgagaggc

SEQ ID NO: 44469 - DNA, 136 bp, Gossypium hirsutum
  Clone ID: LIB3583-044-Q6-K1-E11
attgcacgcggtttgtcgcactgaaagtgtttgggtaattcatcttgatacctcgtccttttacactgcaggataggaatccgaatagagctatctcggcctagttatgatcagcatttcttctgcttgctcataa

SEQ ID NO: 44470 - DNA, 409 bp, Gossypium hirsutum
  Clone ID: LIB3583-044-Q6-K1-E12
ctagaaactgtaaatattgccgatgagttgtgaccatttaatgtttgggcgcagggagaccgaatagtaaggcctgtgcatgcggagttgaataactcgtctaccgtgctctgcacattatagaaaactctgttgctagggcggacgtgatctaatgaggaatagagactgtttatgtatgaggcgtcgggtgatgcgaaggccattctggcagacactcttctcagatttctcatgcatattgactgttgcattcacgcaggttactcgctgttctcatgactgctaagcactgatactctactaatgcgctgtacttcttacactaaatctgtccttgcaagtatagagagatgcattaatagatgcttcatggatcgttctgacctggcgtattatgctgttacct

SEQ ID NO: 44471 - DNA, 149 bp, Gossypium hirsutum
  Clone ID: LIB3583-044-Q6-K1-E4
cccacgcgtccggataatatatgtccattaacccttatatgatctatgtttaagttctttgtttacttaacgactgtctatctcatcagacctttgccacacattaattcccatatgagtgtcaaattaataggctccgcccctctgcg

SEQ ID NO: 44472 - DNA, 131 bp, Gossypium hirsutum
  Clone ID: LIB3583-044-Q6-K1-E5
gcgatgtttggaataataactcgcacatgatgtccattgaaatggttgcatgtatagccattgatgccatctcaatcttggaaaagattcacttcacactatatattcatggagatgttaaacctgtgaat

SEQ ID NO: 44473 - DNA, 363 bp, Gossypium hirsutum
  Clone ID: LIB3583-044-Q6-K1-E7
acgcatccatccggacgtgggttccagataacaacgtgcgtccacgtacagtcccaaatacctatggtggcttctattgcctacccattagaagatcatatcatgtacttcatacactgcattaaacgcaactgcatgacaaccttcacacctatacaacagtgtgttaacaagacatgctcaaactggtgaatgacttgcttgcatcagtgcggctctctaacctaaacaaagcaatggctttcctttcgcccatcaccactttcgcagccgacctccttctctttctgtcacacccgactaggaacgtattactcatctaacctgactggcgactccatatgaccatgaccagactgacaa

SEQ ID NO: 44474 - DNA, 222 bp, Gossypium hirsutum
  Clone ID: LIB3583-044-Q6-K1-E8
cccacgcgtgcggttctagatagaaagcggtcgatctcaacgatacactatgaggttctcgggtatgttaaagtcaatcattactcatcactcactaaccaaagctaccaagccccccattcacgcactctgtaacagggcatatcatgttccgtattattactgcattgatctatgtaggtgccaaagataggacaaatgaatggattgtcttacgatcaa

SEQ ID NO: 44475 - DNA, 162 bp, Gossypium hirsutum
  Clone ID: LIB3583-044-Q6-K1-E9
tccacgcgtccgtccacgcgtacgaaaaaagccggtttaacctgtttgaatcatcggaacatgataagaaacttcaattggttagatccgagcttgcaagatatggttaccgatttgtggtgcagcaagattgcaagaagcattaacgagttcggtaaaccg

SEQ ID NO: 44476 - DNA, 203 bp, Gossypium hirsutum
  Clone ID: LIB3583-044-Q6-K1-F10
cccacgcatacaccaggattgccgacaacactgccgacaggaagaaagaaggctgagcccacataatgaacaaatctaaaggctacaatacaacaaacattagtagcagtagcctgacaagaaaatcaaggggattcatcgacggtatcaagggcaagaccatagaccgaaacataatcaaaacaaagtgacgaatgacagcg

SEQ ID NO: 44477 - DNA, 328 bp, Gossypium hirsutum
  Clone ID: LIB3583-044-Q6-K1-F2
actgaatgtgtcgaaacatttcaggattcacagcaatggcagcatcaaagccgtggcaggtttcacgaccagccccagatagtacgacagctgcaacatggcgacatgattgtttttacttaaggtgcgctctactgcagctacaatgatgtgaatgagcgagtggttactgtgaatctacttgactgtggcgagtgtactactgaagcttacaccatgcgtacaactactaatactactggtctcgcagcagaaggacaaaaccgactgatgacgctggctcagcagatgctgaagagactcaacactgcggaggaggttcgtgaag

SEQ ID NO: 44478 - DNA, 479 bp, Gossypium hirsutum
  Clone ID: LIB3583-044-Q6-K1-F8
cggacgcgtgggcggagttttctcaccaagatcctttagacctcttgacagggctaaacagagagaggacaagtttggaggagggttgtttttcaattcttcatttgtttcataattggttttcttattggatttacaccattcatttccatggacttttcatatatgaatccggtttcaaagcatcaggcattttcttttgaggtagtatcaactgctgggaattttcaatcactcaacaattcacaaaggaatgtagcatcaacaatgaacaaccctggggttgaaaataatttcacattagagggattggtgcagagacaggaaatgacagatgggaatttagatgatgccttgactaatcaatcggtccctcaagatttgaatctggaatctcgcaagcttttgataaatggtgactccaacatatgcttaaatcgtttcaggcttatatctaaatcgatcggcggacatcattt

SEQ ID NO: 44479 - DNA, 580 bp, Gossypium hirsutum
  Clone ID: LIB3583-044-Q6-K1-G12
gaagagtatagggatgctaaagcaaagttgtttgcaaagatggtggaccctgagaggcacaggaaagttgttaacattgatgatcctcatgcacctttttttgttgcgcaaggtaaccctgaagttcctatggtgacatttgcaatggagaataagaatgcagatgttcatcccctgaagtttgagttgtcactatttgagacacaggtcttggttaatacacctcatgggatattggagatttcgtcaggtttgcttggaaggcataatatctataatattcttgcgtctgtggctgttgggattgctgttggggcacccttggaggacattgttagagggattgaagaggttgatgctgttccaggcaggtgtgagttaatagacgaggagcaggcatttggagtcattgtggactatgctcacacacctgatgccttatctagactgcttgattctgtaagagagcttggaccaaagaggattattactgttatcgggtgtcctggggagagtgaccggggaaagagaccaatgatggcaaaaattcgaacatataaaagtgaagtggcaatgctga

SEQ ID NO: 44480 - DNA, 372 bp, Gossypium hirsutum
  Clone ID: LIB3583-044-Q6-K1-G6
cccacgcgtccgcccacgcgtacgaggagcaacagcagtgtgaagaaagttgtaaaagtcagtatggggagaaagatcaacagtagcgccaccgtcctgaatatccccacatgagatacgaggagtgtcatcacgaatgccgacatcaagaagaaaggcgacgaccactatgccaacataggtgcttgaatcgattcgagctagaacaacatcaatctcagaggcaattgcaggagtgtcagcaacattgctatctgcacgaacaaatgccgcataggatgcaacaatgtgtgatgcattgcagggaaaggtaccaggagaatacatggaggagagagagagaatagcaatcttaagaggaggaagctgaag

SEQ ID NO: 44481 - DNA, 254 bp, Gossypium hirsutum
  Clone ID: LIB3583-044-Q6-K1-G7
ctcttatcctgatcttgaaggtcgatcaaccactggtgtgtttataagggatgcaaaacgactatggtgatgatgatatcaatacatactcccagggtgatgtatatcctatgaaaccttatgactgttatcccgaatgtgaacttcttgatcatgagcgcgacgacatttccgacgaaggttctagagacctttcgatccataacatcatcaatcctagaggcgaatcgctggagtgtcaacaactgtgccac

SEQ ID NO: 44482 - DNA, 206 bp, Gossypium hirsutum
  Clone ID: LIB3583-044-Q6-K1-G9
tttatatcggcattgatccaaggaactactttaccatgggggaaaggtagcgagggatacgcgttcaacttattgaaccatacccctcttttctccaaccaaaacttccgtttttactaggcttgacctcgtaatttccattaataactgcaataagtggattcctgcgtggttgccttgtaaataaacaaaggatatatcttagt

SEQ ID NO: 44483 - DNA, 550 bp, Gossypium hirsutum
  unsure (1)..(550): unsure at all n locations
  Clone ID: LIB3584-050-P1-K2-A2
aggcaacagcagatccactatctcgtcgtactagaatgtactggcaaccaccaatggaccggtttttcattgatcttatgcttgagcaattgcagaatgggaaccagattgatggtgtattttgcaagcaggcatggacagagatgattgcttcatttaatgcgaaattcggttttaattatgatgtggacatactaaagaatcggtataaaactctaagaagacaatataatgtaataaagaatcttcttcaactggatggatttacttgggacgatgaccgtcaaatggtgattgctgatgatagtgtatggcaagactacatcaagggacataaggatgcacgacaattcatgactcgaccggtgccgtactataaagacctgtgtttgatatgcaattccccatatcctgatggaagtgattgcttctcccttcaatgtacggacccagaaaacagggttcaagaagtgaagcttgggcaagcaaccaagtgttctccgtctcctgtaacatctgtttcgggtgaagatgaaatangtgatgtgct

SEQ ID NO: 44484 - DNA, 338 bp, Gossypium hirsutum
  Clone ID: LIB3584-050-P1-K2-A5
gccgatcgcaacggcagccatgctgtagtcctctgcattaatacgaaacgcgccattcactgagtcaatggctgatctactggactagagcgctatctcaactaccaaccacttactgttggccctgtgaggtgactgtagctacgttaccagagctggatggtcattcctaactcaaccaaatttggctggatgattcacttgatgtgagcatatagtgcatctgataaacgcataactgtcatcattacactgaattgtggtggacatgatggaacagggagggttctagagactctgaagatcttgtagatactgctaagatcttgaaaagacca

SEQ ID NO: 44485 - DNA, 325 bp, Gossypium hirsutum
  Clone ID: LIB3584-050-P1-K2-B1
acccacgcctcgcggcgaccgcctgcttctatcaaggtcagagatttgcagctcataatcaatatatctctattgtttttgcactccttgggggtattttgtcatagtgtgtccatctttccaaactgtcaacttattacaaaattgtcaagactaattaaacacaatctatccaatccatagaatatttattatcacttttcagtgccacatttcttttatactccactagactcaatcatctcgattcagtcatcctcatcactatttacatgatagactgctgcatccaatacacgcatcattttctttacctcatatatac

SEQ ID NO: 44486 - DNA, 550 bp, Gossypium hirsutum
  Clone ID: LIB3584-050-P1-K2-B4
cggacgcgtgggcaggctctctttcaggtcggatctgctcagttaattttcctttttctctgtttattttttcctgcttgtttgcctctctttctaggtttcttgcgcattttctcggtttatctcttgaggtttgatcggtgagggaatcgggggatttcattttcctagtgttttcgagtggttcgaagatcggtctttggagaatccgcacgtgacgaagagatttttttccctttttcatatatgtaaaagaattactatttgaaaggatttggtttccgttgaactggatttttgaaactcaggacttcggctttttcccgggaaccaatcggaaaaaaatcgttcgaaaaattttcagatcttactagatccggttgtcggatctgaatctgaagaggaaaaagtttttcagaaaagctctttaaattgaattatagtgtaaagaatatcggagtctgtaaaaccgtttttttgaaaaaatgtcgtcggcgccgacgtctagctccctagttcaactttggaaaagctcttgttcactcccttc

SEQ ID NO: 44487 - DNA, 532 bp, Gossypium hirsutum
  Clone ID: LIB3584-050-P1-K2-B8
gttattagcaacagatagtcgatagtcgtccacgtctacaacgacaattctaggtgccccgaaagcacgagctgccagaagtgtaacgagacctattggtcctgctcccatgaccaacacattggtttctggaccgatattagctcggcgacaagcgtgaaccgctacacttaagggctcacacatagctccttcttccaagcttagattgtctggcagcttgaaacacaggtctgcaggatgcactacctacattgaaaataataatcttgtacactattagtcatatggataaacagagcagaaccaaggctgaaattgcagctttataggttcacctgacgggcaagagaaccgtgaaccggtggagtggcgaaaaacttcatatcagggcatatattgtatcgaccttccttgcaaagatcacatcgccagcaaccaatccctggttccaatgccactcggtcaccaggcactaaattcttgacttcactttcaatctcctctatgatcccagcacactcatgcccta

SEQ ID NO: 44488 - DNA, 488 bp, Gossypium hirsutum
  Clone ID: LIB3584-050-P1-K2-C12
cggggaggccttcacatatatagggcagcttgactttttcttaagggagtgccccaaagggatgaaagcgatgagtacaggtttatttttgagtaccctttcattaggattcttcgttagttctttgttggtgaccgtagttcacaaggtcaccggtaacaataaaccatggctgccaaacaatctgaaccaagggaggctctataatttctattggcttttgacaattttgagttgcttcaacttgggaatttacttggtttttgctaaatggtatatgtacaaagacaagaggcttgcagatgaagggattgaattggaagaagccgaacctaccttccattagaagaacatgacagtttcttaaactggttaagatttttgtgcttatattataactttgtattatttttagtcctccgcttgactttaaataagtctgaaaccctatttacttgtacaaaaagaatgataaaagatcaacatgg

SEQ ID NO: 44489 - DNA, 531 bp, Gossypium hirsutum
  unsure (1)..(531): unsure at all n locations
  Clone ID: LIB3584-050-P1-K2-C5
aaaattgttttggcgacaaatattgctgaaagtagcatcaccatagatgatgttgtgtatgttatagactgtggaaaggcaaaggaaacaagttatgatgctcttaacaagctggcatgtcttttaccttcatggatttcaaaggcttcagcacatcagagacgaggccgtgctggtcgtgtgcaacctggagtttgctataggctgtacccaaaattgatccatgatgcaatgcttgagtatcaattacctgaaattctccgaacaccattgcaagagctatgtctacatatcaaaagcttgcagcttggatctgtgggatcatttttggcaaaggcacttcagcctccagatcctctntctgttgaaaatgcaattgagcttcttaaaacaattggagctttgggtgatgcagaggagcttactcctcttggtcgtcatctttgcactctacctttggacccaaatataggaaagatgcttctaatgggggctatttttcaatgcctgaatcctgctttgacaattgca

SEQ ID NO: 44490 - DNA, 542 bp, Gossypium hirsutum
  Clone ID: LIB3584-050-P1-K2-D5
ctttacaagaagcaagctttcaacatcatttgccaaaaagaagggtttttcttttttatagtgaaataattcattcaatctgtttgagaaaaaacaagaaaaaagaaaaactggtttttgtagagattagcatgagagcttgagttcagattattggtgaaagatttgatctatggctggtgaagatttggtggaactcaaattcaggcttgcagatggaactgacattggtccaagcaagtacagtccggctacaactgtggcatctctcaaagagaaaatacttgctcagtggcctaaagacaaagaaaattgcccaaagacaacacaagatgtgaagctaattaatggtggaaagatacttgaaaacaacagcacacttgctgactgcacactactggttggtgaacttccgggcggtgtaatcacaatgcatgtggttcttcgccttcctttgtcagacaaaaacagtgagcatgtcaacttatatggtgatttaactatccacagagaaacaacaggatgattctccaaagaaaagc

SEQ ID NO: 44491 - DNA, 502 bp, Gossypium hirsutum
  Clone ID: LIB3584-050-P1-K2-D8
gttggagatgtagagaaagggttctccaacagattgaagttatggtatgattcattaggaggtgatgctatcggtctaacatgggaacggtcaaagaaacgagaacgagaagaggaagagacggacggaaaatatccggttgatttgttgagaaatataggtgaactggggaaaggatttgtgagagatgtttatctgctcaaggctcccaggctttcgagttaaggggaaaaaaaattaggacacccacccttggtagctgaaaacacgaggtgccagcatagggtggagtaagggaaagcagtgttcaattttggtagcatagatcaccaatctccagagccgttgccctggctaactgatatagcaaaacccttcaatcttgttgttatatttaatggttttcattgctagaatttactttgtaaaatgctgatgtaattgcaggacaaaggttaaaaacagagggtatatcttaatggaaaaaatgagttaatttttc

SEQ ID NO: 44492 - DNA, 443 bp, Gossypium hirsutum
  Clone ID: LIB3584-050-P1-K2-E11
accgtccgtattcccgttcgaccacgcgtccgcccacgcgtccgcttactctttgacgtacgcgtagttagaactttgaatattggacagttatgggtgggacgtaaatcttttgctataaaaaaaaatatattaatttatcattcttatcattaacaactctttatcgatattaagcttgtcactagcatattgactagtcttaataaacacaatccttacaccatatctcttactattcacatgacatccacatacacaaatattaaagacttactatcattgtcatgtgcatattataagttccttgaataccttgaataaactaaattaatctacacattccaaatacaatcaaacaatatattaagaagtcattatatatttttgtaccaaaagatatattacttcaatttcttaataagtcttcattgttaaatcta

SEQ ID NO: 44493 - DNA, 541 bp, Gossypium hirsutum
  Clone ID: LIB3584-050-P1-K2-E12
gttgctaatcataaatacaggtactctaatagactatcacagccccagcattcaacactgacaagtatcagtaataaaaaaaaagaatctgggtctaattccgagacgatattgtccaatatcgtttctgaacatgatgctgctactcctagtcccacggtaacctctcaaagaaacatgattccttcgactgcgggagctactgatcaatcgaggcacactgaagtagccacatcatgcatggaacagagagaatgtccaagctcagtcaaccaacatgaacctacctttggtgtgaatccatttcatcattccagtctcgaaatgaattcctctagacagttttatgaccgacttgcgtctggaacaaatcagatggatcaaaagttggattctgtcgaagataaaggtcatatttctcctaccgttaatcaaagtggaaccggcagcttctgtaatggatccattagtcaacttaatggtattgcatatgggagcggtagtgcaagtaatagcaatgttgatcaggttattgttcgag

SEQ ID NO: 44494 - DNA, 508 bp, Gossypium hirsutum
  Clone ID: LIB3584-050-P1-K2-E7
gctacacatcgggaggggctaatcatagaggaaacaaacttacttacaccagcatgctatcgaatggagcctatatacacatgaataggaaaaatcaactgtgcgcctaacatcaaaaacttgaacagatgaaatccttgtcgctcaaaacacaaattgcacagatgtagactacactctttaagggacgagatatagctagtgaccatacaagtgcatattcttcataacagttagcacagtatgaatgtaaaaagggatgcgcactgtagaaccgctaattactgcaagttgatgaggagagtacaagcagagcgtgtgattctattgcatgatatttatatttcacttacaaacatcacataactcatgatatcatcaatggcatatgttacaatcatcagctataacagaagtgaagcatgggctgtaaagaatacaaggtaacaagatcataaacgtaaaaattatcgaatatggagaccgaaacatacctgaatcgagcaac

SEQ ID NO: 44495 - DNA, 551 bp, Gossypium hirsutum
  Clone ID: LIB3584-050-P1-K2-G4
cccacgcgtccgaagatgagtggagcaagataacacgatctactgtcagtgattgggataggaatgcggaaactatagtacagtggtctccattttcaagtgaagcagacctccttcgtcagttcaatcttatgaaagaccatggcacacgaattattatttataatctctgggaggatgaccaagggctattggagcttgattttcatgccgaccagcatgatattcaactcagaggtgttaaccgtgatgagaaaaatatacaaatggcaaaagagtttccaaactctaggcactttctgacatatagacattcattgaggagttatgcatcaatactttatttgagacttccacctaacttcagaatcattttacgtgggaaagatgttgagcaccacaacatagtgaatgatatgatgctcactgagatgataacatatcgaccaaatcccagtgcagagggggctcctaaggatttgaatctggctgctttggtgaccattggttttgtgaaagatgccaaatatcacattgatgttcaaggtttc

SEQ ID NO: 44496 - DNA, 306 bp, Gossypium hirsutum
  unsure (1)..(306): unsure at all n locations
  Clone ID: LIB3584-050-P1-K2-G9
cccacgcgtccgcggacgcgtgggcagacgcgtgattctgttcttgantttcgaacaagtacaggcaggggtactagaagaagttctatcgtgttcttttagaagtcgtgtttaaatttttgtaataaaaaaattgcatgtagtatatagtagtactatagtaactacatcatactagatacacgtgcttaatagttaaattaaatgaccttaagataaatgcactcactctgttgaaactatttctttataaaaagacttaatttgtgaacatgcacattagattttatctgctattggttcatt

SEQ ID NO: 44497 - DNA, 449 bp, Gossypium hirsutum
  Clone ID: LIB3583-045-P1-K1-D3
aggaaaacatggaacggagacagagcagtttgagtaaagatgatgcattctttttaactatcctgtggatatgatccgctctgacagagacagcatctggggtataagatatgatgcaagcctgagcagaaagtacaaacaactgtctcaaaggaaaccagcagctatcacgggtgcccacgggtcgcgacaatgaaggaaaagatctaaaaggtgacaaacggatgaaccggcaccacccggccacgacaataatgatgtatatcaccgatggggcaaacattcacgcctataacaaagatggctgctcctcacaccagcatacaataacgtcaggtgacagcatctaagcatgctgctgccgcatatatgcgggcaccaacacaggctataacgccaccttcaaggacagcgcatgcaccctatccgcgcatcaatgagtgaatgaa

SEQ ID NO: 44498 - DNA, 614 bp, Gossypium hirsutum
  unsure (1)..(614): unsure at all n locations
  Clone ID: LIB3583-045-P1-K1-H1
cagccttctataagntggtcgagaagacaattttgtgtatgtctctgaggcccttatggcagggatggcagctggtgctgtcgagtcactaacaagcacgccgtttgaacttataaaactccgtgcacaggttacttctgcttctcgtattacaagagcatcatcagcatcagaaaataaagctgttatgccagcagtctccaaattattacgtggatatactctggatatgaaggtattgaacaatgctgtaggtatgttgtccatcttaaacagcaagcactctaatatggtcggtgccatacaagagtacccttggatgatgactgggtctggaaggccaccaccagtttatgatgttcggagaccatctgaaattatttcgttggaaggatggggtgcattatggagaggccttcgttcaggaatagctcgagactctgtatttggtggcatatttttctctacttgggaacttttgcaccaagttatgcttaattggaaggcagctgggatggatcccccacccaggtatgatgaagaaatcggtccactctcccctttagctgctagtcttgcagcaggattttcaggtttcagttgctgctgcagca

SEQ ID NO: 44499 - DNA, 624 bp, Gossypium hirsutum
  unsure (1)..(624): unsure at all n locations
  Clone ID: LIB3583-046-P1-K1-A2
ccccgcgtccngatttactcagtttgcttcagtagttccccgtaatgtattgttgcagtgttgcccttagaagttgggatgcgagactgtcacacttgcaagacaattaaaactgccttcactgccttgccaagttcctctaagattattcccaacttgaagcatttactacttttgttcaaaggccctatagaggctcataacaatggctaaatccaggggtttgtgcatttgaacatccagtcaaatggtgttatccagtccaaccgtgaataacccgacatgttggtctacctaatctactgaacaacccgtggtaatttttcctgaaattttccttgatagagcgctacaattcctgtttgtttcaaactaaccttatctcctaaggggctgttgcctactgaggaccaaaataaagggagcaattgttgcgaatttttaaccagttcatcgcgtgtccctccaacttaatatgataataccaaagttgcctcatccagcatgtggaatgctgccaaacttaccttgtccaccttattggtgtgctggtttttgaagacttttcacactaatgcagccaaatcaagggatcttccaacccgtcaaaagtaggaaaatcta

SEQ ID NO: 44500 - DNA, 249 bp, Gossypium hirsutum
  Clone ID: LIB3583-046-P1-K1-C1
tgaacagagttatattatatgagggctatctataaactaaagtttatttattgagatcttctctgttggtaggtttgtgtatacagtagggcttgcatagggcaaaagggctatcaagggtcttcaaaatattcgttgaaggttatcaacagatattagcaatccatagggcttgaagtggtgattgtgtctagattggtgatgctaatgcttcttatatgatggagaacattactggtggatcactac

SEQ ID NO: 44501 - DNA, 310 bp, Gossypium hirsutum
  unsure (1)..(310): unsure at all n locations
  Clone ID: LIB3583-046-P1-K1-D2
gcgtcagtctggnatggaggaagcttcctgttagaagtgatgcctagacaggtaattgntgaagggagaaaaagaaatcagatatccagatgcaaccagtacaaagtcaacaagatcaaccctcagatttagtgggcaattcgtctgagaaacaccagccctaaaagctgtaaaagcctttacgaattaagtcattagctgttgattgcaagaggagaaagaacaggcgattggctttctttgacaatccctaagtttaatttgaaaatctgtaattctttttttggttaatctaacttttggttcctct

SEQ ID NO: 44502 - DNA, 602 bp, Gossypium hirsutum
  unsure (1)..(602): unsure at all n locations
  Clone ID: LIB3583-046-P1-K1-F2
ccccgcgtccgccccgcgtccgcagctgtgaaacatacctagcgagtcatcgagtttgaatcggttgactcagttgaaattcaactcagcactataatttcagtgagttagaaggaaaaaaagnggcaagtatggaagctacacctgaaggaaacgagtcatcgagggacgctaaaaccctaatctcattttactccaattatctgagcaaccgtttcacctctttgtttccttcctttccgtcaaattttctcgagaaaatctcaaatctttatcgccaaacgcttcttcctatctctactaaacgcagagctggtctccctctcccattgcctaccaactcagtcaactcaattcggacggcatcagaagcatcgagaatttatgaagttttaaacgatataatggatcgtttcattttaaatttgcataaaattcaagagaatttgcaattttggcaatctatagctgagggatctaatgcaaggaaagtttacttcatgattttcgagagagggccacgagcttttgttaatggatcagttcaactcatgcgtgaagctgtcactgatggatcagcaatgcaaaatctttcccaatct

SEQ ID NO: 44503 - DNA, 518 bp, Gossypium hirsutum
  unsure (1)..(518): unsure at all n locations
  Clone ID: LIB3583-046-P1-K1-F3
tccgaatggttactattgttgnggcaaacggnggcttaaacagcanagncttcgntatgcaacgctgttgctgtggctggctatcttaatgcaacacttctaatcccaaacttccattttcatagcatatggnanagatcccagcaaattcaaanatatctatgatgaagattatttcatcagnntgccttgaanaatgataattacagcctggtcatccattcagtattataaggatgtagtcctacccaagctcctcgaagaaaagattataaggatttctccttttgcaaaccgcttatcgtttgatgctcctccagctgtccaaagactgaggtgcttggcaaattatgaagctttacggttttcaagtccaatattgagccttggnggaaactttggttgccagaatgaaagagctcagtgcaaatagtggtggcaagtatgtttccgtgcatcttcgctttgaagaggatatggttgctttctcttgttgtgtatttgatggtgggcagcag

SEQ ID NO: 44504 - DNA, 521 bp, Gossypium hirsutum
  Clone ID: LIB3583-046-P1-K1-H2
ccccgcgtccgccccgcgtccggccttacactcgtttcatgactatgtagcggaagagttgatgggtgcattacatgaaatatatgggctcagatggagcgtggcgacatatattgaaggccatagcacacttgccagatacataggatgcataccaaaaccagcacctgcagagtgcctcgtgcatcggctctttacactctgcacattaaccacacaccatagccagaggattttcgaaactgaaaaattgaaccatgttgggcatcaatatcagcaagccaaggaggttttcttacgtgatacaatccagctcaaggactgttattgactacattcaccaatgcttctaactttttgtatggtcagcagggggaggcatttgattaaagcgttattgccaggtttaaccacgtcatatcagatgactacggactcatgttatacatgataggtctaagcgagctcagaacgaaatgactaatgctgacctatgtggaggatgagaccctctttcctgc

SEQ ID NO: 44505 - DNA, 373 bp, Gossypium hirsutum
  Clone ID: LIB3583-047-P1-K1-A5
ccccgcgtccgactggctatgcttttgattatgggaagaacggtctttctttttcagatcaggcctttcggttggtttctgaagcttggaatgtgttgtctaatccttctaagaaagccatttatgataacgagttgaggtttcttcagtttggcccggtgagtcagttcggtgagggggggggcggttatcagcagcagcacttgcttcatcaacaaccgcatcttccacgttccgtgatctcttccttttttcatgcgtcgtctcctgcatccccatcatactctgtctctgatgatgtgccttcccctcttttttccgtctcagtgttcctcttctgtttttgctttcgttccttttctttgcttgcttt

SEQ ID NO: 44506 - DNA, 447 bp, Gossypium hirsutum
  unsure (1)..(447): unsure at all n locations
  Clone ID: LIB3583-047-P1-K1-B1
ggactcttctctgattttggcaaaaagcncaagnattactcaacaagnactacacctccgaccagaagttcaccatttctagttccagctacactggattggcacttgtatcaaatattgtgaacaagggaggcctctcctctggggatgtggcagcacaatacaagcaccagaatgctgtggttgatttcaagcttgacacagtcaaatatcttgacaaccctcaccatcacagatttacatccatctgcaaaaacagtggcttcttttaagctgcctgattataactctgggaagttggaggttcagtatttccatgaacatgcaactgtggctactgctgttgggctgaagaaatccccagctgctgatttttctgcaacaattggagcgcctggtgttgctttgggggcataggcaatctatgagacgtcttgtgtcgaattc

SEQ ID NO: 44507 - DNA, 528 bp, Gossypium hirsutum
  unsure (1)..(528): unsure at all n locations
  Clone ID: LIB3583-047-P1-K1-B4
gnaggcaaacaacccantggnactttggggttaaccatttctttcgctgnaaagccttggcaatcagctgataggtttaggtgtataaagtggggttaaggctcatccagcctttgaaaggaccctgatatgacagataaggnanaaactggagtattacaaaagccaggagaaggattataaaaggaggattgaaagagctaggccttgtttgttgccaatgcaagtgcatagggaagtgttacaaatgttgagggaccaagggaaagtgagtgctaggttgttgcagaagataagagatagggttcaaaaatggtaccatgatgaagggtatgcttgtgctcaagttgttaactttgggaacttgaatactaaggaagtggtgtgtgaagttgtggaaggggatattacacagcttgtgattcagttccaagataagcttgggaatgttattgaagggaatacccagctccctgttgtgaggagagaattgcctagacagcttcgacaaggcaatgttttttaata

SEQ ID NO: 44508 - DNA, 598 bp, Gossypium hirsutum
  unsure (1)..(598): unsure at all n locations
  Clone ID: LIB3583-047-P1-K1-B6
gccttcttctctttacttcacaanatattttctttatgttgggatttgtaatattattttttaacaaccaactttttacttggcattaatcaaccaaaatctcccacttgaagatttgattaggataatcatatcttcacaccattctttctaccttgcacttttcatgttgctcacgtctctatcaggccaatagaggattgacgccaaacaaacttatcagtattcattacctttgtcatgaaatctgctatgttgtctttggtataaattttctgtatatctaccgtcccactttctcatgaacgaagtgatactggacccggatgtgtttcgttcttgagtgaaaagcaggattcttacaagatacaaggcactctgactgtcacaaaataaagagatgtactcttgttcgtgcttgcgttcccccaataccttcattgaattaacattctgagaagtagggctaaaatctggaatttattggtgaactttactgtgtacgcattactttgcatacgccttctgtctaactgtaattataatgaaagcatatgttacaagaataacaatgaaattatttaaacattcagaaaag

SEQ ID NO: 44509 - DNA, 523 bp, Gossypium hirsutum
  unsure (1)..(523): unsure at all n locations
  Clone ID: LIB3583-047-P1-K1-D1
ttattctaaatcccnaacaaaatacttttccttctccactccaacacccaccggccaccaccatcatcgttcaccagtcaggcagtcactaccaacccaccacacacccgctggaggctttataattttaatacggatcgagcgagcagacttgccatttctttctgaaacgtttcaagttttaagacgtctcactttcagctcacgtttcagggcagctagctcttggttccgaaaccctcaatcacaatatggctcgaaacgaagagaaagcccagtcgatgctcaatcgattcatagccctaaaagccgaggaaaaaaagaagcccaaagaacgccgccctttcctcgcctctgagtgccgtgaccttgctgaggccgacaaatggcgtcaacaaatcatgcgagagattggccgcaaggtcgctgagattcagaatgaaggcctcggagaacatcgactccgcgaccttaacgacgagatcaataagcttatacgagagaagtcgcactgggaacggcg

SEQ ID NO: 44510 - DNA, 475 bp, Gossypium hirsutum
  Clone ID: LIB3583-047-P1-K1-D3
ctctattgtgaaatatgggtaatatagtaatatattatgatttgtggtaagaaaaaaaaaaaatataacaaaaaacaaaaaaaaaaggggaaagccaggtctaaacgttcccagctttcctagcgactgcatgcggacgacaccagctcttctacacggggacctacatacaatgacctgcccgaagacatttcaacagacgcgactgtaaaaaaccgcggcattgccgacagttacgagccttacaggacataccagctttgccggctacactgccaacaggaaaggcccaaggctgcttgcactgcccaaccaaagctccctctaacattgcgagtggacacccgccgtggcacggtgccttgcgattcaaggggtgttaacaccacgcccaacgggacgagtcagctcgcgatcgccttcaacactgggtgcttggaatgcactggccacagtctccattaggcatccatgg

SEQ ID NO: 44511 - DNA, 450 bp, Gossypium hirsutum
  unsure (1)..(450): unsure at all n locations
  Clone ID: LIB3583-048-P1-K1-A2
nggatttagagttcaggaaagggtttgttctgtgagtctttggagccgcttgcctgcacttgggtagcttaaaataaaccagaagttttagtacgactgtttgggttttgatttcaggttgagttttatacagcagatctgagaacaaaattttaaaaagtgcttcttgcaaagactgcaaagttaaaatgatagtgggtggatgtttgttatattttacagttctcattcaaacttgtatacatgttaagtgattgttagctattactcactttcactgcacagagaaaattttacaagatttgcaaccgcctcctgaaataactacaatagtgaattactatgaaggtattctgtgaatcagctacacttgaaagatgaatacttttgtatgaaagctgcagagcaaaatatatggaagtnaaagccccngtgccgnttttattgtga

SEQ ID NO: 44512 - DNA, 558 bp, Gossypium hirsutum
  unsure (1)..(558): unsure at all n locations
  Clone ID: LIB3583-048-P1-K1-B2
gtaaattggtngagattgagaggcagtggaggttttagaccaaatggtttcgagggattgttcccctaacactgttacttataatactttgattagcaccctttgtaaggagaaccaaattgaagaggccactgagcttgcacgtctacttacaagtaaggggattttacctgatgtttgcacatttaattctttgatacaaggtctgtgcctgacgagaaatcatactctcgctttggaattgtttgaggagatgaagaataaagggtgccaacccgatgagtttacctacaacatgttgattgatagcttttgttgtagagggaaactagaggaagctttaagcctgcttaaagaaatggagtcaagtggctgtgctcggaatgttattacttataatactttgattgatggattctgcaaaaacaagaggatccaagaagcagaggaaatctttgatgagatggagcttcaaggggtttcaagaaattccgtgacctataacaccctcatcgatggtctctgcaaaaacagggaggtagaagaggcggctcagct

SEQ ID NO: 44513 - DNA, 343 bp, Gossypium hirsutum
  unsure (1)..(343): unsure at all n locations
  Clone ID: LIB3583-048-P1-K1-B5
ccccgcgtccgctgttgggtgttattctcttttaatccacttccaagatccatggnggcagtggtngaaacttaacagtgaggtcctcgaccctaggagatattcagctgttattttcaagnagaataaggtacccaaaattatcagttccaatgaagatgctgatttgattgggaggtataaaggaattttgatttcaaaagggaaggatcaagggctaagggtggatctgtctgtagtggcggcgttatcaacaaaatcattttgaaccatggcggatgttttaaaaactctagtaatgcgtgtgttccattatcagattctttgaactctatggctaaac

SEQ ID NO: 44514 - DNA, 456 bp, Gossypium hirsutum
  Clone ID: LIB3583-048-P1-K1-C2
ttcttgtccaaaaacatgggcacacaactctattatacgggcaatgaatatggaattactagtgtcatgaccaaaggaggctacggcgtcacggatggacgaggaaaggccggacgctagcgaagcagatgctaaaacaagaataccaaaggctgtctgctagctataacatgaacacataaccacacaaccgatggaacatataatacattaccaacacttaactgctagactgcaaattagacttaaaagactgggtccctatggttcctcgtcgtacttataaacaacaagatcctagaacgacaccagaagtcaattacacacgattctgtctctaacgaatatactgctgttgcacaatgaacattaacatatgaaacggctaaacttgagtgtcctagatctactgatgatcattgaataccattattacacctatagctcatatgttcg

SEQ ID NO: 44515 - DNA, 596 bp, Gossypium hirsutum
  unsure (1)..(596): unsure at all n locations
  Clone ID: LIB3583-048-P1-K1-C4
ccccgcgtccggntgtatcatggctgctcattcatatgcaatattggactttggtggtgtgaaatgtttggagtgttgcttgaatgaagctctcgcgctgcacagaaactcaccaaccttctcgaaccccgaggagatgcaggcatcggactctcatccaaaggcatcggatgacacagaggaaaccgtgactggggttgatccaattgcatcacctgattctgttgcactcaatgcctcacctgataagataggcactcctactcccggagcagttcctgcagcagaaactgaaggagagtcctccgtgaattcacctgctggaaccaaaaagtcccgtaagaagaagggtcgcaagaatcggaaagatgcctctaaacaacatcaaatccaagcgaggtactcgccaaagaccagcccagaggagcttagggaaatatgcagacaggccaaatcaagtcttatccctttgtttgagaaaaaattgactgctagtgatgtggacaccaggaatgggcgccttgtgttaccaaagagatgtgcagaggcttatttcccaaagatttcggggcaacaaggaatcttcctcactgtgc

SEQ ID NO: 44516 - DNA, 606 bp, Gossypium hirsutum
  unsure (1)..(606): unsure at all n locations
  Clone ID: LIB3583-048-P1-K1-C6
gnacgaaaacatgataaattgctggtagacaaaaaacagtcaacaaggttagacggtggattggttgagaatttaggggatgcattttgcaaaccggatcttgagatggttgatgtgtctgcagtaaactcggatgttaaagtgtccgaaggatcttctactcaattggtaaataataagtttctcatgtacacaagaaagcggaagaaggatcctttgagcagccccgatagagattgctcacttgataatgataattctaaaaggaagacggaggataaacgaaacggttctctagactcagaaaagtcaacattgacaactgaatcatctcgagacagtcggcgactggcacaggtggctcgtcagctcatatcattatcggaaaagaagtggcggtagtaaattgggctgctgttgggtgcatgaatacagggatgctgaactggagcagcaaaaattgctgtctgatgggcttatattgttgagctggtgttttattagaagaagatagatggaagaaccaaggaagagttactatatccatttaagtaaaaacaacgttgttgtatgttttcggtgttggttnggtctcattattatgga

SEQ ID NO: 44517 - DNA, 589 bp, Gossypium hirsutum
  unsure (1)..(589): unsure at all n locations
  Clone ID: LIB3583-048-P1-K1-F2
ggaaatcgaccgttctaaagaaagccagagacgtttctggtcggcgaagtttccttccttacctttcttgttccctactccttcctcttcttcttcttcttcttcttcttcttcttctctatttccccttctttctatctctctcactctgtctctgcaattttctgaaaatgggtttgttggattcacttctcaattggctccgcagcttattctttaagcaggaaatggaactatctctcgtcggtcttcagaatgcaggaaaaacatctcttgttaattccattgctacagggggctatagtgaagacatgattcccaccgttggatttaatatngaaaaaagttacaaagggaaatgtgacgataaagctttgggaccttggagggcaacgaaggtttcgtaccatgtgggagcgttactgccgtggggtctctgctatcgtatatgtagttgatgctgctgatagagacggtgttccgatatcccgaactgagttacacgacctcttgacaaaaccttccttgagtggaattcctttgcttgttcttggtaacaaaattgacaagtcagaagctctttcgaagc

SEQ ID NO: 44518 - DNA, 546 bp, Gossypium hirsutum
  Clone ID: LIB3584-049-P1-K2-A8
atggaacgaagggccgaggctcgtcaacgcaggaaagctcgatttgattctaagagattatcatccatggagacagaccgttcctaccagaaaatagaaggagaatcaagcactgatgagagtgatagtgagagtacagcatatcggtcaaaccgtgacatgttgcttcaaacagcaaatgaaattttcagtgatgcatccgaggaatattcccaactttctgctgttaaacagaagtttgaaaaattgaagaaagattattcttcaagctatcgggatgcttacatgtcattaagtattccttctatcttctctccatatgtaagacttgagctgcttaggtgggacccactccatggtgatgaagacttttctgatatgaaatggcataatttgctattcaattatggtttttgtgaagatggaagttctgcacttgatgattctgatgctaacctcgttcctgcactagtggaaaagattgcgcttccagtattgcatcatgaaatttcccattgttgggacatgcttagcacacaagaaaca

SEQ ID NO: 44519 - DNA, 167 bp, Gossypium hirsutum
  Clone ID: LIB3584-049-P1-K2-B8
gccacgcgttcgatcgcgagctgaatctaaacacggttcacatgtagataagtgtgcacgccatcatggaaagctaatagggtgctccctaaatcacctaaggctatcataaatctcaatgacgctgatgctgctatgaccactgcctgactcaatctgatgagcta

SEQ ID NO: 44520 - DNA, 243 bp, Gossypium hirsutum
  Clone ID: LIB3584-049-P1-K2-C12
aaaaaaacctcacaaaaaagggctccaaccctgggagctccggcctcgcggccgccctggctcgtcccagggtctggctgtgtgtggtctacacgcacttaatgagccgccaccagacccaccgtatacggtggatacggtttcaaaaaccctcccttttctttggcaatacataagtatcaaccttgttcctttgatatcagatactatttttctagatctgcgtgcgtacatgttagcaaa

SEQ ID NO: 44521 - DNA, 237 bp, Gossypium hirsutum
  Clone ID: LIB3584-049-P1-K2-C9
aaattactgatgtacctactgatacaaaggatagagatgaaattcttgagagtgaattcttcgatactaggcaggcatttttgagtctttgtcaagggaatcattatcagtatgataccctaaggcgggccaaacattcctcaatgatggttctttaccatctgcacaatccaactgcccctgcatttgtcacaacctgtaatgtatgccatctggacattgaaactggtcaaggct

SEQ ID NO: 44522 - DNA, 120 bp, Gossypium hirsutum
  unsure (1)..(120): unsure at all n locations
  Clone ID: LIB3584-049-P1-K2-D1
cccacccatncggctagttacctccccaatcacacgggtcagtccaatgctgacgacaatgcctaagaagtcggattggtgccctgctgcttctgttccagctagatcacgaaccaccac

SEQ ID NO: 44523 - DNA, 460 bp, Gossypium hirsutum
  Clone ID: LIB3584-049-P1-K2-D12
gctgaaagagaagtttgttgcaacagtctccgcagggggtttggtcattaacgacactactgtacatctggctgaacccacactaccattcggaggagtcggggacagtggaatgggtgcataccacgggaagttctccttcgatgcttttagccataagaaagctgttctttatagaggtttcgcttgtgatgcatttgtcagatacccaccatacacgaggggaaagctgggattgttgcgggctctttttgatggcagcatcttacgcatcattcgcgctttgctgggatgggccaaggcttgaatgacaataggtatggggtggttttgtcgtaaattttcatgatgtgacttaaggcactcaatttcaatgtattatatatatgaagcatcagaatagctttattaaagtaggttggttacaggacaggaaaattagtaaatgacctttcttttt

SEQ ID NO: 44524 - DNA, 521 bp, Gossypium hirsutum
  unsure (1)..(521): unsure at all n locations
  Clone ID: LIB3584-049-P1-K2-F11
cagagatcttccaaaacttgaatgaagaattagaaatggcgagtcgtttacttcttcaaaatctgtcaaaacgacatctacttcgttccaccttcgcttctagatccgcaagtacgttggtgttagccgagcatgaaggtggctcgatcaaggctcagtcattgagcgcggtggtggctgccaactccctaagccaggacaatcccgtttccttgctattggctggctccggctcttcccttcaccaagccgccgagaaggccgccacgtgtcacccttctatttctcaggttcttgtagctgattcagagaagtttgcatatcctttggctgagccatgggctaagttaatccaattggttcagctaaaaggagactactctcatgtaatngctactttagattcatttgggaagaacatattacctcgtgctgctgcccttttggatggttcttctgttactgatgttggtgacattaatggccctcggcaatttattaagccaatttatgctggaaat

SEQ ID NO: 44525 - DNA, 514 bp, Gossypium hirsutum
  unsure (1)..(514): unsure at all n locations
  Clone ID: LIB3584-049-P1-K2-F12
aattattcagtcctcatatggctagtcctcctttgttatcatcttacatggaagcccccattgatcctcaacaagacgatcacctncttctttctcctgatagaaacttcgctttgcatggtgagatcatgatgtttgtttttctcctactctttgctgccttcctttcatttctgctcttcgacttctacaagaaacgctgcggctgtagtgataatgctaatcggcaagatttttattcatcggagccagtgtcgctgaataaactcttctatgttcagccgaagacccagtttccaaagcagtagatgaatcaagctgtgtagccaatgcaatatatagtatctctagggctctcttaaaacttgggtgctttattgcggtaaggtaaactagcttagaggcatggccgtcgggttagcaagaggccatggactagatattcttgtatgcagtagtgtaagaagtgccaaatgaacgggcaccacgagatctgattgcatccctagatttt

SEQ ID NO: 44526 - DNA, 434 bp, Gossypium hirsutum
  Clone ID: LIB3584-049-P1-K2-G12
cccacgcgtccgcaacttggtagattcataagttaaaaaattgtcctttggtaattggatttaaatagctcccattttagtgtattgatgaaactcgtgagaggtagatgctatttctgctgtgcttttctagaagcattattgctactaatacaagttccaaatattaaacttcaatggtttctaaaagtaggagttactatttaaattgttaagaattttaatatttaattaaacttaaattaaaaaaaaaagattgtatctttttctgtggatctgctttgtctcctgaggaaaaggttagattagatgaaacccatttttctgttgagtagttatcttttttaataattatatctttgaattgcgtatgtgttttattgtgctgaaaggtaaactcgtatactgatgatatttttgcaagtactaaaatt

SEQ ID NO: 44527 - DNA, 522 bp, Gossypium hirsutum
  Clone ID: LIB3584-049-P1-K2-H11
cccacgcgtccgagctggccatgattctgcatggatcctgcatgccctttgggggtgtttcgatgagttcaaggttgtctaagccttttccatgtacttctgtttttgcatcaattcctcgtttttctacaacagatgcattatatacccggagttcgtggaagcaagatcaggattcaaagtcctggcaagttaaaggtttgcctcccttgcacctttctgctgcatcaacccctctattaagtggggatttaggtggtttggctcttacagtacccttgtttcgtaggcgtacgagctcttctttggtgcctcgagcatcaaaggatgtgccatacagtttccgctatccccctatgactaagaagcctaaatggtggtggaggagtttagcatgtctcccttatttaatgcctttgcatgaaacatggatgtatgcagagacagcatatcatttacacccattcttggaaagactttgagtttttgacgtacccattccttggtgccattgggaggttg

SEQ ID NO: 44528 - DNA, 377 bp, Gossypium hirsutum
  Clone ID: LIB3584-049-P1-K2-H4
tgcaagtgcaggtgtgctgacgctcgggtatgggctgagctggcgcggacgtgactgctggacggtacggagcatacggaatgtgggcgtggcgcgatgtggataggctgctcgtgaggactgcagcgcaaggagggaggggtgacctaaggtttttcgcgtttataatatgttttgggccatttgggccttagatatttgggtacagatttgggcttgggcattagtttaggtatagagtcactgtaacaatactgggctttgaactgtaaatggacattaatcattgggtcgtattatgatgattgtactcattttgggaccaaaagggtcgggcaaattggactgtttacaatattagatttatgtcgttcggt

SEQ ID NO: 44529 - DNA, 414 bp, Gossypium hirsutum
  Clone ID: LIB3584-049-P1-K2-H5
gattgatatatctgaaagcagcattagctgaaacactacgtttatacccctcagttccccaggacttcaagtacgtagtcgaagacgatgtcttacccgacggcacattcgtgccggccttctcaacggtgacttattccatatattcagttggaagaatgaagactatatggggagaagcatgcatggagtttaggcctgaaaggtggctatcaccagaaggtgacaaattcgatccaccgaaggatagctacaagtttgtggcattcaacgctggaccaaggacttgcctggggaaagacttggcttacttgcaaatgaagtcagtggcctcagctgtgctgctgcggtaccggctctctctagttcctggacataaggtggagcaaaaagatgtctctcacactgtttatg

SEQ ID NO: 44530 - DNA, 559 bp, Gossypium hirsutum
  Clone ID: LIB3582-013-P1-K1-A12
agcggattttctattcaacaggaatgaacgcccggtttggaaacagagagccagaatagcgtgggacgtggctaaaggtatcctatatttacatgaagagtgtgaggtaagtatcatccattgcaacatcaagccccgcaacatactcttggatgattcattgactgcaaagatttcggatttcggattggcaaagctattgaggcctaatcaaacaagcattacaagtggaacagcatggtactcggcacctgaatggcaaaacagggcattgttatcggtaaaagttgatgtatacagtttcagagtgatactgttggagatcatatgttgcagaagcaacatacaagtcgaaggtcgcagtgcagatgagatactgctttcaacatttgtatacaattgctttgttgggggagagttgaataagctcgtggaaggtgaagaagaagtggacatgaaaatggtggaaaggtttgtgaaggtggtgctttggtgcattcaagatgatccaaatttgcgtccactcgtgaaagatgtgatcttgatgctagaaggaaca

SEQ ID NO: 44531 - DNA, 417 bp, Gossypium hirsutum
  Clone ID: LIB3582-013-P1-K1-A5
agcacgctttcatcactatggcgaactgagtgcggcatgaatatcgtggcgctcttatgcgcgatttcagtggaggagggtacgatccgggtccaataggcaagctccttgtccgtcatggtacaaagatgttaaatgggtacctcacacgaaactctggcgtttagttaaatatctcataatcacgtccctctaacacatttacctatactctctctctatcaaagagatccaaattatctaccagctctatcagacctttcttgatagcacaactcctgaagatcactcccaggcacaaacttacactttccagctttcgcacacgtataaaggtcttaggaatcatcggaaacaaacacagtctccttatgttggatgcttagtgtattcattatactgttacggctcataaga

SEQ ID NO: 44532 - DNA, 549 bp, Gossypium hirsutum
  unsure (1)..(549): unsure at all n locations
  Clone ID: LIB3582-013-P1-K1-B1
cccacgcgtccgcccacgcgtccgggcgaaggctttttggctcgggatataacaatcgacaacagtgcaggccctgagaagcaccaagcagttgcattaagagtaaacgcagatttcaccgcattatataggtcttccatcaatggtttccaggacacattatacgtccactcttttcgacaattttaccgtgaatgcgacatatcaggcaccatagattacatcttcgggaacgcagctgttgttttccaagcatgtaatataatcactcgaatgccaatgcccggtcagttcacagtaattacagcacaatctcgagactccctggacgagaccaccgggatttcgatccaaaactgttcgattctcgccacggttgaactgtatgggaattcaagccgcttcaaaagctacctagggaggccatggagggtgtattccacaacagtttatattgaatcatatattgatgattntataaatcctagtggatggactaagtggtccaacgatgaaggcttagacacactttattatggagagtacgat

SEQ ID NO: 44533 - DNA, 484 bp, Gossypium hirsutum
  Clone ID: LIB3582-013-P1-K1-B11
ggcaaaatagtagctccattgctagatctcttgcgattcaaattcctcgttttttatatggatctgtctttctatctttatcaaacaaaattcatctcgaaaaaaagtccgattccgagcgattaaaacccgtcatgattactctaagcacgatcaaatccgacgattgctacaacaaaatccctacacatttaacagaggcatatttatccggcgcagggtattccatcatagctgcattggctgtgatgttcatattcggcatggaattgaatagttattttacagtcagcaactatacatctggtatagatgacgatacatctgatggagacttcctacgcgctgattttgacatgagtcttccagcgctctcatgtgaatttgcgtctgttcgacgtgagcgatgtcttgagaactaccaggttcaatatcacgaagaccatgcgaaagttttcaatagatcaacatttaagacctactg

SEQ ID NO: 44534 - DNA, 519 bp, Gossypium hirsutum
  Clone ID: LIB3582-013-P1-K1-B8
agacattttccctttctcctttctcttctaagcaaattttcttccacatcctcatctccggtcatcacctcccctcaccatctccgtccgtcatctccgtcgaccgtcggccttacttctattttgaagaagccctaaaaaattggcaggcacagtcaagaaaagaaaacccagaagcagtggttctctctctgtcatcaacaggtattttttctgttaattttcactgatttgagtggtggatcgggtctggttcttgcttttttcttgctagatggtagcttgtgcattgttgcataacatcaagccttttgcctagtctattgatgaaatccttaagggatatattagggtaataagaatggcgaattaggaaatctgggctcagtgttaaagttttacatttccttaagaatggcgacaaatctttgtaatgtttcagtacttgaccatttccagcctaaaatgatttttatatgaataaaatatatctttacactaccacgattgattttcata

SEQ ID NO: 44535 - DNA, 562 bp, Gossypium hirsutum
  unsure (1)..(562): unsure at all n locations
  Clone ID: LIB3582-013-P1-K1-C7
cccacgcgtccgnnagaaagnccggaggggnnctaatgcgggcaangactnnnccatggagcatacgactcctccatttagttctctaccgtcaggccagaggaagaatggtgaagagtcacctagtgactttagtcctggtctcatagatctgcattcttttgttacggagcttctgcctgaggttaaacatttgagattcaattgtgcgagtatttggacttctggatatgatgctgaatgacataaagatatgttgcatatgctttgtatggcgtcaaatttgcttttgccctgattagagtttctattggtttttgcctgcaggtgcgcaaaagacctcttaataaaaaggggttagcaaggaatgaggaagatattatagagacagtttccaattctctagtagtccatgagactaaacttaaggttgacctaacagagcacttggagcagcatgaatttgtttttgatgctgtgctgaaggaggaggtctcaaatgatgaaggagtggaaaaacctatactatgaagccactttcccttaaagcttctcgggatat

SEQ ID NO: 44536 - DNA, 424 bp, Gossypium hirsutum
  Clone ID: LIB3582-013-P1-K1-D12
ctcactccttagtggtcaaaaagaggacgtgtgattgatatgacaaacactcgaacgcttgtgcactgtgaagacataacatgaaaagctgatcctctggttgacaacagtcgaactcgatttcaattccaatttctacctaacactgcattgtatgtatatagcctaaaaaacatgaaggggatgcacctgctaccataataaacatgtattgcaagccgtacttagctcaatacattatagatcatctgtatgctgacatgcaaagaaagggaagacacatgagaattatcattccttcaaagagaatggatgagcgcacagtccatcagtaaataatgtgttgctgcttgatactgtcaataatgtataacatgacacaatatgaagaaatgaataatgtatgtgcatatatacatatata

SEQ ID NO: 44537 - DNA, 380 bp, Gossypium hirsutum
  Clone ID: LIB3582-013-P1-K1-E10
ccgacgcgtgcgccttaaactagcatcggatgtgcaccagccgacaacacatctaggagacgtgcggggtctaatggacaaatgaacactgagccatgacaaatatcttgatactgtcggggtgtgaaagattctatgagcagaatcaatgactaagggatgaataacactggtgtcgaagagtatgctatctgagtgcatctagagagtagtgagaatgtaacgatcaaatgaggaatgcaagctgctcaaacagcctggcacaagttcattggacaggttagtcgggcaagatactcttcataagagagagcgggctcatacatagcatgttatgaacatcatcactacgctaagatgagccaaggctgatgagttta

SEQ ID NO: 44538 - DNA, 442 bp, Gossypium hirsutum
  Clone ID: LIB3582-013-P1-K1-E12
cccacacgtccgtagcttgattatttcctcacttcccttcttttttgcttcatcgcgagggcttcattaaccccttttgtcagccatataaattgacgctattcttttaatcttttaaatatcttttttccatgatgagaaggagaggtgcctcagctgtggctcctgccgcctgtgcaaacgccgtaactaggagaccaggactgcaaccaggcagatctattaaagagcccagatacatatgtgtaagaaaacagccattgaacagattcgttaccgacattctataccccttgaacaagaccagggactggttaaggacgttccactcattcgaagaagccgttcgagcctacaactcggtttctaggacacttcgtggactcaaagctaaaacaaatttccccataaattctttaaatattcccgatttttctttttt

SEQ ID NO: 44539 - DNA, 571 bp, Gossypium hirsutum
  Clone ID: LIB3582-013-P1-K1-E9
cccacgcgtccgggttaaacgagcagtggtggtgccttttctgaaagtacatctgttacatgtgcggcaactaaagcaaaagtgaacgctgttttaggacaaattccctaaactgctcggttcatgaattcctttctcagtttccccaatccctaagtttctgctcacactttcctcatatttcaggtgatcagaatggcttcaagtgataatgggaatctgaaagagcaaattgaggaatccagtgatactaaaacaacagggcaaatttctcttcaagtttcatcgtcacaaaagattcttctaaacagtgaaaaccctcaaagaaagccatttatgaactttatgtctcccccaagtagattcaagtttcttgactttagctctgcatctgctagtttcaagcgttttgccgaagaaagagatgaggtttctcggttggtggcttcttcaagtggtcataggatacgagaacgtctgactggggtttttgctaaaaagattgattgggtttctctcatgaaaatgtgtaaggaatggattagggaccctatgaatatgggcctttttg

SEQ ID NO: 44540 - DNA, 544 bp, Gossypium hirsutum
  Clone ID: LIB3582-013-P1-K1-F1
gacccacgcgggcggccacgcgtccgaccacccgttctattagcttaactaatcacgctcataagctgttctcatcaatggccggcggtgactctatcttaccggacctctgaccaaggacaaattgcctatacaactaactataaaatctcgccatcaacaacctaacatctaactgtccttaccctacttcccatatgctgcactctacttgcattaaccggactaaccctcaccgacaccttcatctgcctatgcatagcaacgccactcttcatcatcttcagcccggttctggtcccatctgccatcactgtcttcatggctatgggcggggggtgtgtggaccgcgcattcgtatttactgggctgtcctcactcttctacgtatttaaccgcttcagacaggcgactgtcaccaagcatctctactcggaccggaccaaaaggtgcttgcaagatatcttgttgtatgtggaacaaaaaaactatcaaacttggctaactatttaaaacaaagcttattaagggttttgtacattaa

SEQ ID NO: 44541 - DNA, 514 bp, Gossypium hirsutum
  Clone ID: LIB3582-013-P1-K1-G11
gtcctgcttggagcttgctttcacctgaatctagcagaatctggttgctttcactgatcacaattgcaaatggaggaatctaatcttgttctggccgggttggtatgcagcggacgactgagaatggatggggttctctcatttggttttatggggatatcactatcatacaccaaacctgaaatgctcaaatctgatttcaaggcttcaaaacaatactgtcgcatgagtgtccaagaatgtcgttgaataccatggaagaggttatacgcaaagaatatgaggatagtgcgagccataacatatgatttgtacgacccgtgagactctagcacaagatacgtcaagtccattattgctttctccaattcgatcttatcttcttggccttgtagtataatgattactatatttacagccaaagcaaccgatattatgctactctcttattttatgcatataacttgctagacagtgaacttgccagcttttactgctttaacccgatttcttt

SEQ ID NO: 44542 - DNA, 485 bp, Gossypium hirsutum
  Clone ID: LIB3582-013-P1-K1-G12
aacccacctgatactaggttaaacgacacacgagcagagtcagatactactcaccgagcgcgtgtgtttactgaagtatctaatcaagagcaaaccatgggtgttgacaacacatctaccgtaaagcgaaggagaacaatcagcagtttgcatcgggataacacgagcagacaccatagctgaaactgtcaaagatccaatacaggcttaacaactgttgtgcggcaccaaagtcccttatactatgtgaactctatatcactaggcactccccgcagactgcatctgcatctgcatccgcatgttatgaatagaacgaaccaaataacttattcacgctatacctgcagcccattattgctctatccaaatcgggcatatgcaactgcgtgcattacatatctgacacataggttagcagcctcagcaaccggtagcagcccacccatgcattggatgcttatgactagctgccacatgccatg

SEQ ID NO: 44543 - DNA, 578 bp, Gossypium hirsutum
  Clone ID: LIB3582-013-P1-K1-G6
cccacgcgtccgctttcggaatcttcaatgccgctgtcttgaagaaaaccctaaagattctccttttgccttaattaaaaccaacaaaacctaatctttctattgcttcgatttttaagatctaattgatttgtttctatattttctcgtccccatatctgccctaaatctctcaacattccccagattcttaatctgctctttgaaattgagtgtgttatcgtagctgaatttaattgattgacggaaatgagtgataacaattcaccacctggttcacccaaacaaaacccagctcagaattctgagactaacttattacctaaagatgatagctctctggaaaccatagttagaaagattcaggattccatgtccttagcaaagagacacaagttctgggaaacccaacctgttggtcaatttaaggatgttggggacacgagtttacccgagggaccgatcgagccccccattcccttgtctgaagtaaaacaggaaccttataaccttccaaatccatatgaatggaccacctgtgatatggattcagaagatacttgtaccgaggtttataa

SEQ ID NO: 44544 - DNA, 229 bp, Gossypium hirsutum
  unsure (1)..(229): unsure at all n locations
  Clone ID: LIB3582-013-P1-K1-H10
gcacaagaacgcgggcggacgagccacgagagccaagacaacaggacgccgcaggcgacgagagaggaaagaaaaagggacaccaaccngcaacncacaaggacggcgacgacaacaccgcgacggggaaaacaccaccggaaccgaacggaagagccaagcagcacaaacgcacggcgccagcagggccaacaacggacaggcacacaccgagcgcccggcccaacaa

SEQ ID NO: 44545 - DNA, 143 bp, Gossypium hirsutum
  Clone ID: LIB3582-013-P1-K1-H3
gcttactattccccttttttttcgccataagcagcagacccaattcttagggtttcaacacaacagaggttgtggtcctactactcgcctatctgatcactcaactgccccatttcaccattgaaattgatggatggttgctc

SEQ ID NO: 44546 - DNA, 574 bp, Gossypium hirsutum
  unsure (1)..(574): unsure at all n locations
  Clone ID: LIB3582-013-P1-K1-H6
catagctttggaaacatttcaggggagatgaaaagcctccagaaaagctgggggcaagcagagaatataatgttgatatgatgcctaagttcatgatggccaatggcagtctggttcgtatattgatccacacggatgttaccaagtatcttaatttcaaggctgtggatgggagttatgtgtacaataagaaaaaagtccacaaagttccagcgactgatgttgaagcatttaaatcgccattgatggggttgtttgagaagcgccgagccagaaagttcttcatttatgtccaagactatgatgacaatgatccaaaatctcatgaaggactcgacctgaataaagtaacagcgagagaacttatctcaaagtatggacttgaagatgatacaattgacttcattggtcatgccttggcactccacagtaatgatagctacttggatcaaccagctttgggttttattaagagaatgaagctntatgcagagtctttggcacggtttcaaggaggttctccttacatctatccactatatggactangagaatngcctcaggcatttgcacg

SEQ ID NO: 44547 - DNA, 307 bp, Gossypium hirsutum
  Clone ID: LIB3582-013-P1-K1-H7
cagcatcagctgtaacctgcctgcaattcctcaccccacttttgcccgcgagcctgttccattttcactctctccgaaattaagtaataagattggattagaggcggcggtggaggcagctgcagagttcttgaaacaggcgggcaaacccgttttagtcggtggaccaaagctgcgtggtggccaaggatgccaagctcatgatagagtgagtgctgctataggctacgacgtatcggtgatgccatcaggtcatgggcttgcacctgaacattatcctcattagatcgtgacatattggggagct

SEQ ID NO: 44548 - DNA, 595 bp, Gossypium hirsutum
  Clone ID: LIB3582-014-P1-K1-A10
gcagctggtcatagatatgttaattgggctgcgaaaatggcggtcggattagatagcggagttccatgggtaatgtgcaaggaagatgatgcaccagaccctgtgataaatacgtgtaatggcttttactgcgatgcgttctctccgaacaaaccttacaagcctatgttgtggaccgaggcttggagcggttggtttactgaatttggtggcccaattcaccgtcgcccagttcaagacttagcatttgcagttgctcgcttcatacaaaagggcggcacgtttattaactattatatgtaccatggaggaaccaactttggacggactgctggtggaccgtttattacgaccagttatgactatgatgctccgattgatgaatacggattaatccggcagcctaaatacagtcatctaaaggagcttcataaggctattaagctatgcgaacatgctttagtttcctcggatcctacagttacttcattgggaaccttttaacaagctcatgtattttcttcgaaaggaagttgtgcagcttttctctcgaattatgatatgaaaacttgctgtagtgtgattttcaataatc

SEQ ID NO: 44549 - DNA, 531 bp, Gossypium hirsutum
  Clone ID: LIB3582-014-P1-K1-A12
cccacgcgtccggagtaattcatctcgaactactattatcatatccatcttggctgttgcttttgctgcactactcatatccaatgtcatctgcatcattttacggtttaggaagcgaaagctgaaacctcaaaagcatgaagcaactgaagaaggggatgaaatcgcaactgcagactccttacaatatgatttcaacaccattagagctgctacaaatcgcttttctgatgcagataagctcggacaaggtggatttggagcagtttataagggcatacttgctggtggaaaattaatagcagtgaaaaggctgtctacggattctggacaaggagaccttgagttcaaaaacgaggttcagttaatggccaaccttcagcataggaacttggttaggctccaaggtttttgccttgaaggaaatgaaagacttctcatctatgagtttgtgcataatggaagtttggacaaattcttatttgatccagctaagcgaccgtatttgaattgggaaatacgatacaaaat

SEQ ID NO: 44550 - DNA, 289 bp, Gossypium hirsutum
  Clone ID: LIB3582-014-P1-K1-A2
atgactcataggttgtgtactgatcccttgctgatttggaatcttcaatgcggatctgatgacgagggtgcctttgttaatatggaacgtatttttggatcttcttgaagaagagctattcctacatgggcttaaaaaggaggggtgtgatgagtgagaaccaaggtatggtttgcaactgtataactaataggggtttctgtggagaacaaaagacaatactcactaaaaagaatgataaagtcaagagacgttttagaggacacattatgatcaatcatactggaac

SEQ ID NO: 44551 - DNA, 488 bp, Gossypium hirsutum
  Clone ID: LIB3582-014-P1-K1-A9
cccacgcgtccgcaaagaagatgacttgaagcttcatggcagtggctgtatacagatgatgggagaatttgaagagaagaaagtggctcagtcttttaactcatgtttccccttttttgtaagaattatgaaaagattcaatgtcagtggctcatatacattgaatattccatatcagtttgcaatggaacatcttccaaactgcaagactgagatcgtgcttcggaatctgaaaggagcttgttggacggtgaattctgtgcctacaacaagagtgcatacaagtcatactttatgtggtggatggttgagctttgtccgtagtaatgagataaaggctggagatatttgtatttttgaattggtgcacaaatttgaattccgtgtgcatattcttcgggttggacaggaagacttgatcaggcaaagcagaaaagcagtcctggacaggtctgattccactttactgaagaaattgtaaagaacac

SEQ ID NO: 44552 - DNA, 530 bp, Gossypium hirsutum
  unsure (1)..(530): unsure at all n locations
  Clone ID: LIB3582-014-P1-K1-B2
gtttattgtttatgagttgatggaaaatggttctttggaaactcaattacatggaccttctcatggttcatcattaacttggcataggaggatgaaaattgctttggatacagcaaggtaaggttttgtatatggtttcacttgttgctcttagttaatgaatatgattagaaaaagtcccaattgttgaccagaggattagaatatctacatgagcattgcaatccaccagtcatccatagagatctgaaatcatctaatatacttttggatttggacttcaatgcaaaggtaaataattataatgtaaattattagaccaccttctatttttttagtattaaaacttttgtctttgtatgaagtccattgaagctcactttgtggatacagctttcagattttggtcttgcagtaactgatgcggcaacaaacaagaataacttgaagctttcgggtactttaggttatctagctccagaataccttntagatggtaaattaacagataagagtgatgtttatgcatt

SEQ ID NO: 44553 - DNA, 559 bp, Gossypium hirsutum
  Clone ID: LIB3582-014-P1-K1-C5
gtaaaccgtgaaagaagaaaatcttcatctgcaacaaaaaaatggaagactcatcgcccaaagaagacgaccctggagttctgaagcttctcgaagctttgaaacaagcatcccacgagttacaagctcatccaacttacaaatcggtccagtctaattcatctcccattaaagctcttctcgagcttgaaaccgagtccgattcgatcatctcgaaagacccacatctttctactctttcccgacacttggctgagctcaagatcctcgtcgaaaccctagaaaggaatcgtggttatggtctcaggagttttttgactcgtcgtgtgtcgactcattccatctctcgagttgctggctcgatcgagtccgaggttcaagccttgatggatcgtgggagtatcgatagcttgataaatgctttgaaagatccgtggaaggacgaggacgagttagctcggttactgagtcagtttgaagtccgagtatcacaagggtttaatcccgagttacaggattcagtcttgaaatcgaaagccttttcggttttacaaacagt

SEQ ID NO: 44554 - DNA, 517 bp, Gossypium hirsutum
  Clone ID: LIB3582-014-P1-K1-C9
cccacgcgtccgcccacgcgtccgaacaaccctcagaggttaaaaccctccatctacgcgcgccactgcgccagcctttgtttaaatacaaaagctcagatctgtctctttttcttcatctttcaaatcatatttgaaatggattctcttccagatgccattattcagtacattttgtcacacttgagcaatgctcgggatgttgcagcttgtaattgtgtatccaagagatggagggagtcattgacttaccttagaagtctctacttccctcgcaactcctttgatagccgtccaggcagttatagctccgacactgtcgtctggaaaatgctttccgcaactgcatgcttggaggagcttgttgtttacagtccattcaccagtgcaagccttgcttcgtggctgtcgctggtgcattcatcactcaaggatcttgagctaagaatggataatgttatggattatcaggcatatcttgatagcccttccaaattggactgtattgctgcagcga

SEQ ID NO: 44555 - DNA, 577 bp, Gossypium hirsutum
  Clone ID: LIB3582-014-P1-K1-D1
cggacgcgtgggaaaaaaagaagaaaaactccaggcaatgctaatcacatgcggaagaagctatggtgcagacgaacgaatttcatggaaacacggtcttttccggcggcggattcatgccttctcaagccactcagacagtccccgatcgtccctcctcctcctacaaaagtgatgcacggtgctcaatgccacttacagtgaagcagttgaaggatctctcaagagttggagaatctggtatttccattgatggtgttgatgtcaacaatgcctgttactgattttaatgagattgcaaaacacttcattgagggtatatatgttcatttgtacaacaccaatttgaggggtggcatgaccactcagcctgaagtggcaaattcaaattttggtaacccaacaaagagctatggctaccaaactaacctgacaaaccagttttctggccagtataacactgtcgaagaacagatccgtggtgttagttcaaaggtcttacaatacttgcgtcggctcgcatgcctgtgaatcgcctatgatatcctctaaacccaatgtgttatgtgagcctgtt

SEQ ID NO: 44556 - DNA, 288 bp, Gossypium hirsutum
  Clone ID: LIB3582-014-P1-K1-E2
cggacgcgtgggcggacgcgtgggcggactcgtgggaaaaaattccctagatgactcacccctccgcgccagcgtgtcattgtgaacttcttgtcctaaacaaatctggaggatccttgtcgcaacttactctaaaaaggtactgttgatcaaaattatcaggtgaattccatcaagcttgatgttgaccggagagaaaaaaaagaaatcagaaagctaaaggaaaaggaaaaatgcatcaagaaacagtgcctgccccgggtaaccagtggggcggcgagtttagga

SEQ ID NO: 44557 - DNA, 382 bp, Gossypium hirsutum
  Clone ID: LIB3582-014-P1-K1-E9
attgaagagtcacattccattgagatggagagctacaaaaaggctggacagggctcggttggtacggaaaactctggtgatgctacaaaagatagttctgcggctgcaaaagattgttctccagctgctgataaacactttgagcagttacgtcttgttagcggcaaaatagagtttccagattgggccagtgatgtatcctcaattttatggattcctattcgtgctattgatgataagcttgcaagaaggtcatcttcaagggcccctgagaaacaaattattgtggacagaatgaagacaatagctttgaagcttgagtttgggatatcaaagaaccagatctatgacacaaccatagcttttcatttcaatgatcctt

SEQ ID NO: 44558 - DNA, 595 bp, Gossypium hirsutum
  Clone ID: LIB3582-014-P1-K1-F3
gcaagatcaatgcagagttcaattggacaagaatgtaaaattattggattgtcctggtgttgggatgctgcgatctgaagggaacgatgcgtcaatagctcttcgaaactgcaaaagaatcgagaagctggatgatccagttggcccagtcaaagatattctcaagctttgtcctgaaagactcttggtaacaatatacaagatccctggctttcagtcagttgatgaattccttcagaatattgccactgtaaggggtaagcttaaaaaaggtggtatcgtggatgttgaagctgctgcaaggatcattttgcatgactggaatgaaggtaaaattccatattacaccatgcctcctgttagaaatcaagaagaaccttctgaggcgaggattgttactgagctggggaaagaattcaatgttgatgaggtttataacactgaatcttcattcatcggaagcctcaagtcaaccgatgatttccattctgttgaagttcctgctagccacccgctcaagtttgatgaggctatgctagaggataatgcccaacccttgcaatcaaatgaaggtgatgaaaagcaagaagataca

SEQ ID NO: 44559 - DNA, 416 bp, Gossypium hirsutum
  Clone ID: LIB3582-014-P1-K1-G5
accacgcgtgcaatgcagacaggattgaaagccatattgttagcctaaatgttaccccaaaatatagggagaggaagtcctactggaaatactatgctgctcaagaggttgccacagttatcactataaatatcgaaggtaataatgatgcttgcaattatttataggaattgtattatggacgatagtcatcctctaatatatactctttggggtatgactgtggtcgatatgcttgtcaatatacttattggaggactcactgcactttacaatgcgcgtagacatcgtgaaggacaccatgataggcacacttctatcgacactgctatcaaggctgggtatcacgatgggcacaaccacgtgcacatgctcatgctgctagaggaactgattgaaatctaccttccacacaa

SEQ ID NO: 44560 - DNA, 225 bp, Gossypium hirsutum
  unsure (1)..(225): unsure at all n locations
  Clone ID: LIB3582-014-P1-K1-G6
cacactgataacaccaactcagggacatacatgcaccgctgcagccctaccttcaatcacagctgacgtttgtgccaaaggcctgaccgagcgccttcgtgatccttgtaccgaaggaaatggatcgctgaaatggttttcctatcttcctaggcaagctatatganaagaagaagaaaagacgaagagaggacaagacaagagaggaaggaaatggcaatcaga

SEQ ID NO: 44561 - DNA, 376 bp, Gossypium hirsutum
  unsure (1)..(376): unsure at all n locations
  Clone ID: LIB3582-014-P1-K1-G7
acccacncntcctcccactcntccntttctgttatacatccttcccattgatgattnnagatgcacatgtcaataaataaagtaacacactcccctaataaaaaatngctnttttaccctttcaaccaataattccaagaattttattacaaatatcttcttcaagttcaaattcaaaaccatacaagactcactttcgtaacaactttccaagaaacattccaataaatcttatcattcttctcaaatcaaaattatttatttaaatattaattgcaacacaattccccattaattaaaaattattcaaacttccacctttttactcttgataccttttacattataattaaactttactaataattctcaatca

SEQ ID NO: 44562 - DNA, 584 bp, Gossypium hirsutum
  unsure (1)..(584): unsure at all n locations
  Clone ID: LIB3582-014-P1-K1-H1
cggacgcgtggggtttggaaactttgagaagttcagatttgattagtcaaaaacagcaggtttctgcgtgtctagaagatagtggtctggtcaaggaattgccagcaaaattaatagagatagagaagcttaaatcggacaatttggccaaggataatgagctcaaggctttgaggaatcggcaaaaagagttagaagctcatatttgttccgttgagaagcagaaaagccagttggaggaaaatatggaaataatgcggagagaagttgttgttacagctaaattcttggatgatttgcggagtgaaatgatggaacttaatagcaatatggattcccggatgtctgccaacaaaattctcataaagaaaccttcagaactcgaagaaggaaagaagggcatggaagtttatttatctcaactagaagaagaaaatttacttttatcagaagggttatgttgtttagaagaaaaattaatgtaccctaatgatggaagagagtactgtcacgtggaactacaaattccagaaattgatgctacgaatntcaaagatgagataataagaagatgggagatgaaa

SEQ ID NO: 44563 - DNA, 429 bp, Gossypium hirsutum
  Clone ID: LIB3582-014-P1-K1-H10
cccacgcgtccgcccacgcgtccgaagcagcaaatctctcatagctgaaccttattgatttggctggttctgagagctcaaaggctaaaacaactggcattagatgaaaagagggatcttatatcaataaaagcttactaacactaggaactattatcttatcacaagagaagaacattcagagacttcaagaacttgttggtattgcttccttttcttatttggcttggttaatcgcttcctccacccagacttgagcatcttgtattcacgaaatcactttatgtcaggtttttcccaatgaagtgtttctttccaaagttctcgaggaaccaaaaggaaatgggttccacaagaagatgctgcgttggttgcttgtatggtcgacttgcataatgctggagcctttaatgcggatatgggattcaa

SEQ ID NO: 44564 - DNA, 546 bp, Gossypium hirsutum
  unsure (1)..(546): unsure at all n locations
  Clone ID: LIB3582-014-P1-K1-H11
cccacgcgtccgctttcttctcctttcataacaaaccctagacacttccgcgccatcaacaccttcgggcgtcttacctccgatcaaagttttgggtcactgaatgccaaaaaaaaacacagaaagacgctacactaggttttctctgccgtttctggtttttgtgattttttgaaattctctgcttcattggaactgctttgaggtatgaatcatcaattatactttgtctttttctttgccatttcattttgttttagttttagatctattcattattacttgtatttcagttggtttttgttatgatttttttggtttcttctttataaatcctttgacgttgcctgttcatctttatttttttggttcagatatatttatttatcactgctttatttgatatgtaggtttctctatgaatgcattatgtgcaaatttgaaaagacatgctaatggtgttttaccagggaactgtatctaactccttgtgctattgcagatggatataccttccaatngggccttatctttccttttctttct

SEQ ID NO: 44565 - DNA, 248 bp, Gossypium hirsutum
  Clone ID: LIB3582-014-P1-K1-H6
cttagaatggtatattgcttttcattaggtgctcgcttccttgagcctaaactctaaagcaccaacttctgagcttcaaaatatgtgtcgggagattagttgtcatcaactaggtgatccagacagtctctgacaagttgcttttttattcgtgtgtaaccttttataagtttgtaatgatacagatatcaaccagttcactttgaaacttctcttgatatctaatttaatgcggttttaattttttc

SEQ ID NO: 44566 - DNA, 508 bp, Gossypium hirsutum
  Clone ID: LIB3582-015-P1-K1-A1
cccacgcgtccggaccaatcccatcagcatatgggtttttcaagagacttgaatttcttcacttagctgggaattttatctctggaaatattccacctgaattgggtaatctccaaacagtgacacatatggagatagggtacaattcttacgaagggaacatcccatggcaattgggcaacatgagtgagcttcagtatcttgatattgctggttcaaatctctcgggatcaatccccaagcagctctctaatctcaccaagcttcaatcactttttctcttcagaaaccagctcactggattgattccatgggagttcagcagaatcttggctctcaccaatttggatctctctgataacttcatttctgggcctattcctgagagctttgctgacttgaagaatctaagactgctcagtcttatgtacaatgaaatgaatggcacttgtccagatggcatagctgaactttcatcactagatactttgtttatatggaacaattt

SEQ ID NO: 44567 - DNA, 405 bp, Gossypium hirsutum
  Clone ID: LIB3582-015-P1-K1-A11
ttgacgtgtgagatgacgcgtgtgtttattttgatttttttgagcgggctacgaggtaccaaaacaggcatgctagttcaacccatcgttgtgttaccacagcgacctttgtacctcccgtatcagccgccggcgtccttttataagctgcggtgagcaagaactggtggctactgtggtggatcttataggctacgcgggtgacttatgttatctctttggagacaacctgtctactgagacaaagctcgaggccattgatgcgttcgcgatatggtttgggatcctatacgtggctaacaacatgttacaaggttcatgcagagcgttactggctgatatctacagaaacaggcataagaaaactctgacggcgaacgcatgcttatgttttttcatggcggc

SEQ ID NO: 44568 - DNA, 438 bp, Gossypium hirsutum
  Clone ID: LIB3582-015-P1-K1-A4
aaaaaaaaaaaaaaaaaaaaaaaaaaaaaaaaaaaaaaaaaaaaaaaaaaaaaaaaaaaaaaaaaaaaagagggcggggattataaaaaaaaaaaaaattaaataaacttaattaaaaaaaaaaaaaatattatataaaagggggctggcttttttaaagtttcaaatttttttacaccttcttgactaggaaaacttttttttttggtgaacttaaatttatttcaactggtccccttttaaaaagttgggattttaaaaaacatggctttacccatttttattccttttagaaaaataccctttttggcaattgggatattaagtaaaaaggcccataaatatcgctttttaaaaaattttcccactctaaaaggtaattggtccccccttttttagggctatttaattcgggtgtgttggtttttttcctcaaca

SEQ ID NO: 44569 - DNA, 398 bp, Gossypium hirsutum
  Clone ID: LIB3582-015-P1-K1-B6
ctcatgtgtctgtctacgcgaactctgacacctctctcattgtacgatacatcgtacagcgaagaggatcgggaggctagtggtccatgatcaatgccacacactgatacatttgcatttcaagctcgaatcaatcagactacttagatcgcataccaacactctgtgcaccagcatggagacattgctcatggatcttataatcaacaccatcgctgattagtattacatcaagtccgaaagcttcaccgacacatatcaatcataggtgcacgaagtgatcacctttattcatattgtcctcgactttaccagctacactttatcaatcatccctaaggcatgtcatatgaccacataatatactggtgcactatgttcagacgatcagcctagct

SEQ ID NO: 44570 - DNA, 388 bp, Gossypium hirsutum
  Clone ID: LIB3582-015-P1-K1-B7
ctcacgcatcggatcacgctttggctgactctagaacgcgagcggtcaggctacatgaagcacacagacctagcgctgcactcctggtatatcgctgttttatcatatggccactaataaatccacgcatcgtggtgtcaccacagctagactaaagctacaatgtcgggacgctaaaagatcacctagcggtggatgcatatctctggctcagtcataactgatgactattctgagccactcgatgcaatccacgatgattcatacgggagggcgaatggaaatcgcacggtagctgtacctatagatctgcagatgatgtgagtacacactacgatacccttgcacgggccagatccttttcgccaactcatatgctgtggatggc

SEQ ID NO: 44571 - DNA, 522 bp, Gossypium hirsutum
  Clone ID: LIB3582-015-P1-K1-C3
gtacgccggaggaaaatccgatgactatcagcctttccctgtcaaagaccagctccccggtgttgatttctgcctgtccagtactccttcttggcgtacgcccatctttaccttcctctccttgtctttttcttttctttttcactttcattcggttttctatgtggaaaagaaaacccgtgctggaatgataatgcttcatcttcatcttttccttgtgaggttctggttttcgtgggtttcaagtaacgaaaaacctcgctcaagacgcttgatcactctttcacaaactctgttttttgaacctaaaagagtgatagcctcataggggatttcttatgtatgttgtgacacattatgttctaaagtggcttagagtttctggtttaaagtgcagctgaagcagtacttctgggatttcagcattatttggtaatgcttgggaccactgttatcatatcttctatcattgtccctttaatggggggtggaaatgtggaaaaagctgatgttataaatact

SEQ ID NO: 44572 - DNA, 527 bp, Gossypium hirsutum
  Clone ID: LIB3582-015-P1-K1-C8
attcattgtgtccagagaacgttttcttccatttccttgtctcagagaccgatatggaaaccctcgttcgatcaaccttcccccaattgaaattcaaggtttattatttcgatcctgagattgtacgaaacttgatatcgtcttcagttaggcaagcgcttgaacagccgttaaattatgctagaaattacctagcggatctgctagagccatgcgtacgaagagtgatttatttggattctgatctggtttttgttgacgatatctctaagctatggaataccaacttgcgctcacgaacaattggagcaccggagtattgtcatgccaacttcacaaaatattttactaacagtttctggtcggacgatcgattttcaggaactttcagaggaaggaaaccatgttattttaacacgggggtgatggtgatagatctggtgagatggagacgggccgggttcactagacggatcgaaaggtggatggagatccagaaaagcaatcgaatctacgagcttggttcc

SEQ ID NO: 44573 - DNA, 512 bp, Gossypium hirsutum
  Clone ID: LIB3582-015-P1-K1-D11
ccattaccaccaccaatgccatacgatcctccggaagaagatgaagaagaggaagaaaagaaagaggaagaggaggaagatcctgaaaaggaagaagaacccgagaatcctgataaacaatagttagaatgtgcttggttgtgaacctgaaaatacttgtctgcctcactttttttgtagtactgagtttcaatggtggttccaacttgcttatttgcttagcatatttgagtggatgcaagagtcatccatttttggagtatcttcctcaggctaatataggctaagttaggtcgtctaagttcctattttcggagcataataagttacaagtctttccgaaatggaatatactagtttcttttggctactctgttcttagctgctgttttcttgttcatttgttctgaaaaatccagagtgcaatataagggttaggacttcatggtttgattgttggttatcttgatgagaggatgagcggatttggattctcatcgtggagctacttc

SEQ ID NO: 44574 - DNA, 554 bp, Gossypium hirsutum
  Clone ID: LIB3582-015-P1-K1-E1
ctcagcaaaatccaaggcttcaacactccgtaacacaattattagcctgtgggttgccattgttgaaatggggtatgccatgagtaggctggagatagaatctgagttgtttgaaggcggtaatgtcaccagtgaagctggttgcagtaacaggtccgacaaaccattctgtaaagtagaccacgagattgcccagcttacaaaccttaaatcagtgcctaatgaacgattgcatcaactcatgccaggaaagaaaaaattacctgtttccccagtgaaaatgttggcaggtcgagaaggtaattattcaagaagaggaggattctcatcagcagatcgttgtcacatgattagccgatatttgccggtaaatggtccttggcttgcggaccagatgaccagccgagcctatgtttctcaattttcagctgatggttctctattcgttgctgggtttcagggaagcgatattagaatatacaatgtggatagaggctggaaagttcagaagaaacatctttgccaaaaagttgcgttggacttgtactgacaca

SEQ ID NO: 44575 - DNA, 596 bp, Gossypium hirsutum
  Clone ID: LIB3582-015-P1-K1-E4
aaaaaaaaacccagttgagttgaccccctttttgttttggttttaaaaattggatcttcgagagacatcaaggcacaaacagctgtttcaaagattgcttctttgagatggctatggcgatgacacatcatcacaacagggaaagcagcatagacaagcatttagatacaggcaagtctgttaggtacacagctgaacaagttgaagctttggaacgtgtttatgctgaatgtccaaaaccaagttctttgcgtaggcaacagttaataagggaatgtcctattctttctaacattgagcctaaacagatcaaagtttggttccaaaatcgcaggtgtagagagaaacaaaggaaagaagcttcaaggcttcaaacagtaaatagaaaattaacagcaatgaataagctgttaatggaagagaatgataggttgcaaaaacaggtttctcagttggtttgtgagaatgggtacatgagacagcaattgcatactgtaaatgcatcggcgactgatgcgagctgtgactcttgcggtacccactcctcacaattaactgagaaatgctaataaccctgctggactcctctctatcgc

SEQ ID NO: 44576 - DNA, 379 bp, Gossypium hirsutum
  Clone ID: LIB3582-015-P1-K1-E6
cccacgcgtccgcagcactgttcttttttttttctgagagagatatttattctctatctctttttccacaaaagccatttgcttgcgtttgctatccccttttttttttaagctctgcaacttttttgcttacaaaaatttcgtcttttttggctcactcttggttttctcgtcgtttgatgaactttttgatgaagagattaatggtggatttctcttcgtttcaagcttctctttaacgtggttgttctttctttctttcttttagttcttcagctttccctttattctcctcgtgtctcgactctcaaagctcaaaggaatctctttccttttgatcttcctttttatctcacttcatactcttacttaacaccac

SEQ ID NO: 44577 - DNA, 541 bp, Gossypium hirsutum
  unsure (1)..(541): unsure at all n locations
  Clone ID: LIB3582-015-P1-K1-F1
gcttctaaaagcttatttcggcagggcagattgaaaagggcaaaaaaccctagagatttgctctcactcggccgtcgctttcaacatcacaattggtgaatggcgccgttagattccccttttaacaccagcgccaatcctccttcataaatgacaaccgacagatgtggccttttgatgataattttcggccttgagacctctttttcaacttcaagtctgacgaagcaaagagggatctatggccgatccataaggtgagatatcttctctctttctttctattattttttaatacaataatgaaagataaaaaatgaagtcattcaaccgaattcaaaaaagaaattattaaacagaaaatcacctctaaaaaatgcttgtgaaatgctctattttttatatctggtgtgcgtaatatgcgtactgtgtgcgtaaaaattaaaggattacatcaatggccttttatagccagatttacaaaataaataaaggattttaaaatcctatnttcctactgtcatttgctgtgaaattctgt

SEQ ID NO: 44578 - DNA, 394 bp, Gossypium hirsutum
  unsure (1)..(394): unsure at all n locations
  Clone ID: LIB3582-015-P1-K1-F11
cccacgcgnccggcgggagacnggcaccgcccaaanngcacaagcaaacagagagggacgggcggaggcanagcacaagaggaaacaagaaacgaaaacgcaanacncgaaagcagccagagcgagaaaaaagaccacaaaccangcacggaaaggacagaagagcaccaaacagacgccaacaganaagaacaaccaagaggagggcagacaagccaagagcagggagagcaagcacagaaggaacaaggggccaaacaagagcaagaagcaggacaaacacggacccgaccacaaaaaacaaacgcagaggcagaaacaacagccaggggacaaacacagaggggagaaggcaacgcaaaacaaacaggagcacagaaagagaaggaagaac

SEQ ID NO: 44579 - DNA, 507 bp, Gossypium hirsutum
  Clone ID: LIB3582-015-P1-K1-F12
atctgcttcttcctcttcttgttcttcccctatcgaatgtagaggatggaggctttttagcgggggttacatatctcagaaactcagagaagaactgacaagggcactaatcgaagtgaaagatggcaacattgttgatgggggaacagagggttcacttgagacgttcagtgaacttgtgaaggagatgacgtcaaaacaacaagatatcaaggcctttgctttcaagacaaaggccatgcttttaggtatggagcagaaggtccagtcagcaaagaagcgtgagttaatgtactggtatttagcttcaaggggtgttccaaagagcctacattgcctctgcctgaaattggcagaagagtatgctgtaaatgcaatggcccgctcttgtttacctcctccggaacatgtttctcgccttgctgacacatccttcaaccatattgtgcttctgactgacaatgtcctggccgcctctgttgtgatatcctctacagttgaaaatgc

SEQ ID NO: 44580 - DNA, 474 bp, Gossypium hirsutum
  Clone ID: LIB3582-015-P1-K1-F6
ctctcaacaaagctcttcccctctaatcttccacgctgttgcttctctctcacgccatatatggtcatgcttaccttccacattccgccattaatttatttaaaaagttatattttatagtaaataattattatgaaattcaccgccttctgaactttttgatggtaaaaggtcaaaacggccgctgctattcgtatcgaagaaagtacttctgttgggagcgaataggccggaaacggaaatataaaaactatttgattggatcaatttcaaatttgatttcaaaattcctctttctcgaatgatagattttaatttccttcttctcctgttgagatcttaacataaaaggtaaaataaaatgcagcaacaagaagcttcttcaaggcctcaaagctccgcttatctcaacaagctctccctagaaatcgagaaaaagcttcagcgggcattagcgtctccatctcagagacg

SEQ ID NO: 44581 - DNA, 426 bp, Gossypium hirsutum
  Clone ID: LIB3582-015-P1-K1-G3
gcaacgcgtgcgaagcatccggtgacccatttcttgacccatagctgaaaccctggagggaatcaagctagtgtacacactggtgcctcgaatggagcatagcttacagccaatgttagtgacattgcttcttacagagaagcttacaaagcacctgctggtgcacctccagatccattacttgaggcattacatgaagcataaactgaccatatcgcgaccgccactccaactgcgactgctaaataccatgatggtgaccatgattacgttatagataacgatgatgatgatgctgatggtgcaactgatagcactcatgattccgaagaatattctcctgaacttgataccgaacttgacgaccctgcttccaaggctgataccaacgatgattgtagcgataactacattgctaatgacatt

SEQ ID NO: 44582 - DNA, 503 bp, Gossypium hirsutum
  Clone ID: LIB3582-015-P1-K1-H10
cccacgcgtccggcttccatcatgttcggcatgttacatactggaaaattgacagactcgcatagagcggttgatgggatctttgggttcgggcaacagagtttgtccgtaatctcacaactttcatctcaacaagtaacaccgagagcattttcccattgcttaaaaggaaatgatgatggcggcggtatacttgttcttggcgagatcgtggagccggatatggtttatactccgcttgtcccgtcaatgcctcactataatcttgatttgcggagcatttcagtcggagggcaagttttatcaatcgacgcatcagtgttctcaacatcaatcaaccatggagcaataattgattcaggaacaactttatcgtacctagccgatgaagcttacaatgcttttatcgatgctatcaataatgctgtttcagaacatgtgcaccccgttctttcccatggaaaccaatgctacctaataaccgacagtattggtcacatatt

SEQ ID NO: 44583 - DNA, 419 bp, Gossypium hirsutum
  Clone ID: LIB3582-015-P1-K1-H7
aacgagccaacgagtagatggatatacatagcgggctttctagaggagacgatctaacgaaccccgagctgctacaatggatcactgatattgagcaacgtagaggcactgcactggaatcgaattaccaacaaacgaactattataaccatcaaattaaaagacattacactgtaatcgatcaatctgatgattcacggtagaaacaagcgcaaaaatcaagtacagcgctatctgttcaacagacggacgagctaagtgcataataatacgcccgctcaagacggccattatgcgcgaaagacatagctaatgactgcagggagacgtgtacactcgccaattttctagacgaggaatttaaacgcgcgtttcgtatgatcatatccacgttcgatatgattcgtcaagagcttgta

SEQ ID NO: 44584 - DNA, 483 bp, Gossypium hirsutum
  unsure (1)..(483): unsure at all n locations
  Clone ID: LIB3582-016-P1-K1-B5
ntcgcccacccttctgatgctttctctgattctctacccggcactcagatcaacactatgaccacgacagtggcgccgaaagctgataagaagcaccctgctaagaagccaactgcggagactaagacagccgctgacaaagccaccgccgagacgaagccaaaggtcagcaaagagcttcccactgaaggcggagctgcgancggagacaagaccaagaagagtgccgagacctacactgacacctactagatctacatgttcaaggtcttgaatcatgttcaccctgatatcggtgtctcaagcatagctatcagaatcatgaacagcttcatcaatgatatctttgaagagcttgctcaacacgcgtgtaggctcgcgaggtacaacatgaattctaccatcacttacacggatattcagaccgctgttacgcttgaacttgccagagagcttgctaaacacgccacttatgaagggacc

SEQ ID NO: 44585 - DNA, 531 bp, Gossypium hirsutum
  unsure (1)..(531): unsure at all n locations
  Clone ID: LIB3582-016-P1-K1-C11
tataaatccaagttgcagaggttagccctccaaataaaaaactaacaaaacacagctaatgtcagtaggcagctatgaagcatctctgaagctccctccctttcatgttactaatggcagtctatctcagattctgaatacataaaaaagaagccatcattttgtcttagctcctttaatcccacactacatcttctccaaaatggctggacctactcaccaaagaaaaccatccaaagacacttatcataaccaaaagaaaaagcgccgccctcagcctcaacctcagcctcagaagaatgacaaaccaccctctaattggtcacttgtcaaaggcctattcttcggcaaaccacaacaacaacaacagcatcagcaacaacaacaacaacagcaacagcaacagcaacagcaacagcaacagcaacgggaacatgtngtggtggacgaaactggcaagaatgcaagaaatgaggtgtcangatcattatgcagcacacanagatcatgaaagcctgtacagctcccctg

SEQ ID NO: 44586 - DNA, 300 bp, Gossypium hirsutum
  Clone ID: LIB3582-016-P1-K1-C12
gggggagagcgaggaagaggaagcagatcatcatctactgtcaacaccaaatatcgatgttgcattcctcaaagaaaagccagtgaggattgccaaagaactcctatgaaggtcctttcttctatttgttgttcttcaaatgcatggtcccaaatgcatcacagaacatatatatatattatacctcttcatttttattccaaattgtatgatcaattgatcatcattccataattaattcctttactagtgtggaaagattttgattttgatttttttatattataaacccattaattc

SEQ ID NO: 44587 - DNA, 516 bp, Gossypium hirsutum
  unsure (1)..(516): unsure at all n locations
  Clone ID: LIB3582-016-P1-K1-C5
attctggttctatatcatttggcagatttgaaaatgagcccttagcttgggaaaggagatcctctttctcacacaataaatatcttgaagaggttgagaaattctcgaaaccaggtttagttatagagaagaaagcttactttgaagctcacttcangaagaaggcacttcttctccaaggttcatccgagggccaaactggaggtgaagatcaaacctgtgagaatgatgccgtggagaacgagggttacagagaataccaagtggttgaaaatcatgctgctgagaacaagcattatgaagaaggatctgatagtttaagtaaagatagccattgcaatcattttggtgagaatggcttggatgatgcagattgtagggaagatttttgttgtggaagtggaaatgaagggaaccagtctggtgatgcaaatgaaggtagcctttgtgctcactttgataatggtcttgaagattcaaaatatcatactgagggtgcattgattgaatgtggac

SEQ ID NO: 44588 - DNA, 532 bp, Gossypium hirsutum
  unsure (1)..(532): unsure at all n locations
  Clone ID: LIB3582-016-P1-K1-D9
gttttagatatagagcctgcagatgaggattcttgttgtttccctgatataaaagcagaaaatgtgattgtcggaattgaaaataaatatttgtcccaaagatctttttgtcctgaaaatccagtcattactgtttgtcaaacattgctcgacaagaacaggaattcatgggaggcactgaacttatcacaaaagttttgcttaccccctttaaatgatgaatgcttaagaaaagctgttcttggagaaaaaagtgagaatgtttctggacctcatggaaccaactatatgtttggtttccagtttagtgaatctgaacatcttcgtgcccagcatgacactaagttattggaagttttgttaccctttcctactcttcttccttctctacaggataatatcagcatgtcaaagctcttgcctttccagaagaatagcaccctttcgtcaagtgtacttagctggattcaaacttgttcaaccaagaattagcccacttcctacagttattatgcangaatgtctcaatgtg

SEQ ID NO: 44589 - DNA, 551 bp, Gossypium hirsutum
  Clone ID: LIB3582-016-P1-K1-E1
cccacgcgtccggcagtcgccagactgcaaggggagcttgcaaaagatggtagggaacctccagtgtcgtcaaaaaagatgcctgaaaaatctctctctcgtaatgctgctggcacaaggtcccccgataagacaaaaggggaaagtcctctggatcaattctgtgtggatcttacagctcgtgcaagtgagggactcattgatcctgttattggcagggagaatgaagttcaaagaattattcagatactttgtcgcaagtccaagaataaccctattcttcttggtgaaagtggagttggtaaaacagccattgctgaaggacttgcaatcaggattgcacaggcacaaatcccagcatttttgttgaataaaagaataatgtccttggacataggacttctgatggctggtgcaaaggagaggggagagctggaagcacgtgttactgctttactaagcgaggcaataaaatcaggtgaagtcattctatttattgatgaagtccacacacttataggatctggtacagtcggccgaagaaataaggg

SEQ ID NO: 44590 - DNA, 447 bp, Gossypium hirsutum
  Clone ID: LIB3582-016-P1-K1-H11
cagctcttggaggttgaacaaaagcatggtaaatctggatacgatgaagacacgaactgtgttgggtttgctcgactgggaagcgaggatcagatgatagttgcaggcacaatgagacaacttcgtacagtcaattttggggaacctttacattgcctcgtcatagtaggcaagactcatccggtggaagacgaaatgttggagttctacaagattacaaccgagaatccagaacagaaaggcaacgggatcccttgaatcttcctcctggtgtggattcataggttactgtttctttcgaaatctatattgagctttgcttttatttggttccgaaaaaaaacaattttacggtatgcatgtttgtggattgagaccaatatataccttggtctttatctacatttttgatgtctggaaatgaaaatggaacacattttgaactgt

SEQ ID NO: 44591 - DNA, 497 bp, Gossypium hirsutum
  unsure (1)..(497): unsure at all n locations
  Clone ID: LIB3582-016-P1-K1-H4
ccgtacttaattgctcggaccgacgcgtgcgttcactcatccgatcatacaacacttctccatgggagataagtggcaatgagattcgccatgcactgtgtgctgtggttcaaccaagacaactggaaacaagacgactcatancatgtgctccaccgaccatgtcaattaccccggacaatgccagacattgtcacctgctgaaccttgaaattcaaccaagtactaatctttgtgtaaccgacaaattcttgaggctgtcttaaatacccgaagtgatcagctagaccagctgtgtgatccgaggcacagccttgacatgcagcaggtacagggaatgttcagtaaaaccagccaggatcacattatcccataagagccaaggagatgctttcactacaggaaaataaggtcccagttgtcgcgtggagacatatttgtagtcccagcaaaccttccagttacattcgttgcattcccnangcttgcccttttaa

SEQ ID NO: 44592 - DNA, 533 bp, Gossypium hirsutum
  Clone ID: LIB3582-016-P1-K1-H7
cccacgcgtccgcaatttcaacttttttctcctcattttttcagaagaatatttaaggaagatccaatctatctcaataaagaggaaaaaggattatttttctttttttttctctttgactggaaacaaaaatcgaaaaagaaaagcttctctcaataattatttttattgctgtgatgttgtaaaagggaaagtaaggggatttttgggagagaaatgttggccatggagaaggattttgattcaaagcttagggttcagggaactgatgatactaacaaagacaattcttctaatactggtgcttctaacaatgttcagagatctaaaagctttgcatttagagctcctcaagagaatttcagtattcaggattttgaactgggtaagatctacggtgttggttcttactcgaaggttgtgagggcaaagaagaaggatacgggaatggtgtatgctttgaagatcatggacaaaaagttcatcactaaggaaaataaaactgcatatgtaaagctggaacgtatagtgct

SEQ ID NO: 44593 - DNA, 383 bp, Gossypium hirsutum
  Clone ID: LIB3582-017-P1-K1-A1
cgcacccggccgattaacaaaaaggtgtagctggccagggaaaccggtattggttctgcggggatcggaacgttagttatttggacacgacgcttcttttaggcattcggttatctcaagacgatgctacataggctgtcgcataaacaacagtttcaagacagtgaatctattctgaaatgtaggaatcgaagtatgcacgtcactgatcagttctatttactgtgtaaatgatgactatatatctaactatagccataagcgtaaccaataattgaggcacgttcatgttgagctaggagccctcggagtgtgaaactctgacatacatgacccttcatttgcagacaactgaacagcgtgataacatgtgcactcacatg

SEQ ID NO: 44594 - DNA, 501 bp, Gossypium hirsutum
  Clone ID: LIB3582-017-P1-K1-A7
cagacagcacaccacctctccgaacttgccctttatttttcattaaaagccgaaagttatccaaaccaaaagcaaaaaaaaaaaaaaaaaaaaagcaaaagaaacccaaaaacaacaacgtcctactcaactcaacaggacttacaagaacaagtccaagaaacaagaccttttttaaaaaaaaaaatttgctccatttaatgttttaacgtaaacgccaaacacagaagtaaaaaaagaaagggaggagaaggataagttagtataggtagggtgatggcaggtgaaggagtttcaagagaaacccagatgtctatagaagcttcttcaatgtttccagggtttagattttctccaactgatgttgaattgatttcttactacttgacaaagaagctggagggctatgagaagtgtgttgaggtcattcctgagattgaaatttgtagatatgagccttgggacttaccagacaaatctgtcataaagtcggataacgag

SEQ ID NO: 44595 - DNA, 514 bp, Gossypium hirsutum
  unsure (1)..(514): unsure at all n locations
  Clone ID: LIB3582-017-P1-K1-B2
caatgagccgcttgatgctctcttctaacaaagaatccaagccggaatttcccgatgctacttcttcagcttctgcttctggttctccggacgagaaggtggtttcggaggatgccattaacgaggttgatcagtttctccgcgaggcaattcaaaacccccgtgagcgcctttccatcctgaggatggaacaagatgttgaaaaatttatccgtgatcctaatcagcagcaatttgagttccagcagctgcctacatcatatttaaggttggctgcgcatcgtatcgcacagcattattcattgcagtcgatggttttattagacaataatttacccgatggttctggttctagaatcattgtctgcaagacttctgaatgtaggcttcctcgtatacgactggctgacatccctgtaaatntaccatcagaagaccctggtgttgttaaggtggcaattaaacagaggccacagaaaaggtctcagcttgtaagcaattcaaattcaaattc

SEQ ID NO: 44596 - DNA, 527 bp, Gossypium hirsutum
  unsure (1)..(527): unsure at all n locations
  Clone ID: LIB3582-017-P1-K1-D10
ggaaatttagataaaacttaaaaatggaaaagttttaaacaattaattatgttttagtagttactgagtgaaacattaaaggacttaaataccctttatttttcattgcgatattaatttaggttttaagtaatttacatgacctagttgaaatcaagttaactatgcaataaactcaatgaacagctttataatagtatagattatttgactagataatcaaatccatataccaccctcacccaaattcaagttatacagacactaaaggtaaaatgactgatcaaatgcaatctattacaaactaattcaagtttttccttaatataaaatttgttatcgtgtagtttacatgtatgtctgaggtttgccacaacaaagttgacatttaaattattcaacactagattacctccattccaagaaataatcccattccaaactcaacatacaggatttgacaatttccctcaagtntgattattttgaattttcaatttcctattaattggtccagtagacctaaa

SEQ ID NO: 44597 - DNA, 467 bp, Gossypium hirsutum
  Clone ID: LIB3582-017-P1-K1-E1
tccaaaaggaaaaaactggtggtcgttggcgtcgcggccgtcgctggtgttccctagaccctaattggcttttaacccgtggctttttattgtgggaacgttgcggaaactaccgccggcggtaaagccagtctgtcgggggggaccttgtcctaccttttgccgtcattcattcgttcgagctcaatgcgcacatcattgtccattcaagtcatagaaattgaagaggttgcgtgggttttgaattacttgtaccagcagtataatataacttgatcctgtcctttcccttccttgaatatgaacgaagcacggtcgaaactattatcatgttcggcggataggccttcactgttcatcatctgcgccggtaagactgcggcaattgagatacctatgcacacttcatcctatgcgtttcacccgctctgctatatctaatgggctcaagttgcatggaaattatg

SEQ ID NO: 44598 - DNA, 526 bp, Gossypium hirsutum
  Clone ID: LIB3582-017-P1-K1-E11
cccacgcgtccgcccacgcgtccgcccacgcgtccgggttaacaaggccgagaaacctcggtggtcgactgcggttagcatttttgctaagaatttagcacttttgcttgttttggttggattagctcagattattaggagattggctttgaaatctggggatgttagtagcgttgggacacatacgggattaactgaatttgagggtagggttgctgaggttgagagttttttgaagaccacggctaagatgattcaggttcaggtagaggttgttgataggaaaattgaaaacgaaattggtgggttaaggaaggaattgaatgagagaattgtggatcaaactgtggtgttggagaattcattgaaaaaaatggaagaaaagaatgaggaattagataagtccttgagtgaattgaagagtgcaaatttgttgacaaaggaagagtttggaaagatgtacgaacaaatgttaaaagagaagggtcaaaatggcgagtctgaaaatgcagtgagtttaagcgat

SEQ ID NO: 44599 - DNA, 251 bp, Gossypium hirsutum
  Clone ID: LIB3582-017-P1-K1-E9
caccctccccgggctgggggggcttttcctttcctttggcttgctttaaactaaatacaatggacggcgtgctacaacctagcgtctggacaaacactggcgttaccctactccaaaggcattgccagtcatgcactttcgacagtcggagtcatacaatgtgttgccacatccgtaaaccgttgcctacggatgagcagcctgatttccgagacgaacctgacatgagataccacgattaccgacaacac

SEQ ID NO: 44600 - DNA, 291 bp, Gossypium hirsutum
  Clone ID: LIB3582-017-P1-K1-F11
ctcacgcgttcgcacacgcgtgcggcgcggaccctagaactgcagactctaacgcatgaggagcagttcccttcagagcacgtgatcgcatccaggtctgcaaagccaagtgtgaagaccccataagaaggccggtcagagccactgagtacttggccaaccaaggcagccggtgatggctaaccgcagcttggttgcatcatggccgcgataactatggacacttctacaaacggtttcatgatggacccagaaaattatcattgatgctggcaaggtctggagcgggaa

SEQ ID NO: 44601 - DNA, 529 bp, Gossypium hirsutum
  Clone ID: LIB3582-017-P1-K1-F8
gacaatgtttcgcttccaaggcaaaattttggcaagttggttccttttgagaagaacttttatatcgaaagtcctgcagttagagaaatgacagagcaagaagtaatgttttatcgtagaacacgggacattacagttcaaggacatgatgttccaaaaccgataaggatgttccgtgatgccaattttcctgattactgtcttgaggtgattgccaatttgggttttgttgagccaactccaattcaagctcagggctggcctatggctttaaagggtaaagatctaattgggattgctgagactggttctggaaaaacactggcatacttactgccagcattggtgcatgttaatgcacagccacgattggtgcatggtgagggtcctattgtattaatattagcacctacgagggagttggctgttcaaattcaagaagaagctgcaaagtttgcaaatcatgctaacataaggagtacttgcatctatggtggtgctcctaagggaccacaaattagggatctta

SEQ ID NO: 44602 - DNA, 441 bp, Gossypium hirsutum
  Clone ID: LIB3582-017-P1-K1-G11
gaaatgcaggatatggtagtggaaaccttaatgcaaccatgcatggggttttaactccatctcagtggattgagctacaacaccaggcattgatctacaaatacatcatgtctaatgtgcctgtaccttctaatttgctcacacctttgaagaaatccctttacccttatggcttcaccagttcatctgttggatccttgccttataattcattgggattgggttctttccatctgcggtatactggcagcaccgatcctgagccagggaggtgtcgtctaacggatggaaagaaatggcgttgctctcgggatgccgttgctgatcaaaagtattgtgaaaggcatatatacaggtgccgacatcgttcaagaaagcctgtgaaaggccataccgaccacacatttcactcattcaaaggttggatccatgttttccttt

SEQ ID NO: 44603 - DNA, 499 bp, Gossypium hirsutum
  Clone ID: LIB3582-017-P1-K1-H3
cccattcccaccccttttgcttatctctccatcaaaaaacaaacacacactctctaaaaccgtacaacgttatactaaattttctatcgttatggcgacgattgtttgtcaccaaggttcacagtcatgtctcgagtcgcagttggttgagccgagagcattgaggctaacgttatcttcggcgagaccacgcgaattgatcagtaagtcgtgttcggttaaccctgaaccgggcggttggagtttactccaggctctgttcaatagtcctcaatcttcaaaacgggaacaagggaatgaaaacacttatgttcatcctttagtgaaacgttctttgtctagtttaagtgagaagagcttggaactgtgtactgagaatttgggtagtgaaacggggagcgacgatgtgttggaagacgacgtgttcgcattgtcttcacatagttcgcaaggtgggaatcctccgacatggaaatcgggtcaatcattggggggcact

SEQ ID NO: 44604 - DNA, 531 bp, Gossypium hirsutum
  Clone ID: LIB3582-019-P1-K1-A4
cagaagttcaacagaccccctagacgcaacccaatactaccatagaaaaaagaaaactagaaagcaacccagaaagatagctgatggaagccaaaatccccagtgtccaagaggtgacaaatttgagaatgacaacggagaagtcaagggcgatgtaggatgaataaatagcaaggatctacttcggcaaagtacaaaccgagaaacctatagaggagggtcgacccactcagtctctgcagcaactgcgtgttccacctagaaaggtacctcctatacccagagtcgatccgaaggccagcgaaacccccaaagaagcaagctggtgagcgatagagttttgctctctgtaacagtgtctgatctcaaccgttgcgaaactggtaagtagtcgctgtttaccctcattgataagtgccctgatttccgatctgtcctcgtttggattgcagagtttacgaacgacatgcagcgaatccccctcgaaaacaaccggagaaagacccatatcacgagcaaagtctacgatcg

SEQ ID NO: 44605 - DNA, 494 bp, Gossypium hirsutum
  Clone ID: LIB3582-019-P1-K1-B1
acaagagccaatagagagaagaagaaaaaaaagaaaatgcagtcattttgcagatagccaaaagcaaagcaaagcaaaacccatcattaatctacagcaaaaccaccatcagtcatctactacagttaagaaaggaggaggaggaattgatggcttcttggaagaaaaccatcgctacgcctttcagaaaagcctgcactttcttcaaccagcaaccaagggataagaagtcccaaacaggtatatatttctctcttccccttctctctctttctctataatttctcttttaaagggattaatttgaattttttatcattttatgagagttaaaagtgtaattttactattatattatgtatccttttcttgataaatagattgttggatttaacaatataattataggtcgattgagtcttaattcgattgctattgatattggaaaaagattatggggtaatttaggtattttaaaaaataacaatatgata

SEQ ID NO: 44606 - DNA, 473 bp, Gossypium hirsutum
  Clone ID: LIB3582-019-P1-K1-B9
atcactgttctctatctctctcttctctcgtttcctctactgcaaactggctttcataaatgagtccagaaaatgtttccatatcattcagaacaaccaagcagcatgccataacgggatagaatgccaatcatcttcctaatgacacaatgctcaccttgggctctgtatctttctcatggtggaagatggacacattctctgaattgctatttgggtctgtgtttgcattgaaaaatgttgcagaatctctagagaagggagtcagcatgcatgaataaaggtgtgttgcagctggatttgcatgatgataaagccatgcagaacgctttaagagcagactcaactctttgaggaatcgattcgattgccatggacatgagagcaaatgcgataacagggatgggaacagtggaccctgtgactgcggtaagcaaactgcgcatgcgttggccaacatacatagtatgagt

SEQ ID NO: 44607 - DNA, 483 bp, Gossypium hirsutum
  Clone ID: LIB3582-019-P1-K1-C1
ctagggtttccttaattttgagccaaggggattgaagcaaaagttaatggcggataattactggaatcggcagcagccaactcctccgatgctgtcctcaggtgggatgcttaaacgacctcgtactgactatgatgccccgccttctgggctgcatccagctcatgagatgcatcataatctggcaagagatgatgatcaaggtggacacctggctgtgaaggatacgaaaaccattggatcagcatatgatcgttatctacagagtgcgcaactttcttcttttacttctggagaagctagtacatttggtgggttgggaagggctgttggtgttgcaatgcctgctcgtccaatggctgatcctcctgtgatgggtcgtcctgcatctgctgctccagatctggcactaaatggtggaaatgtcagttttggcggtcaatttcccattgacccaatggcaaggctaggtcgggatattct

SEQ ID NO: 44608 - DNA, 542 bp, Gossypium hirsutum
  Clone ID: LIB3582-019-P1-K1-C11
cccacgcgtccgcattttcccttcctcaattactcctcttcctcgaatccaacgcaggagcttgaagaaattttgaaaaatgcttccatggtgaataatactgttattttaacgactttaaatgatgcctgggcaagaactggttcgattgttgaccttttcctcgagagctttatgctcggagatggaacccgtaagcttttggaccatttggtgattgtttctttggacgaaagggcatataatcgttgtcgaattgtacataagcactgctatgctcttgtcaccaaaggtgttggttttcatcaagaagcatactttatgaccccacaatacttgaagatgatgtggagaaggattgactttctccgaaccgtccttgaattgggttatagtttcgtattcacgatgcttgtccaggatgctgatatcatgtggtttagggatccatttccacgcttctttccagatgctgatttccagatatcatgtgacaattatttaaggagacctgaagatatgaataacagtcccaacggggg

SEQ ID NO: 44609 - DNA, 332 bp, Gossypium hirsutum
  Clone ID: LIB3582-019-P1-K1-C12
acgaccacgcttacgctttttgattacctctatcactactataacataaatccaactcatcagcgggatgatattttcaaaggtgcttctatgcacaattatactgaaattacaactactctaatatgatgcataggcaataactgattccattgatgaccttttacattagagctctatgctatgagatagaacccataagctttcttaccatttactcattgttactatggactaaaggacatataatcactgtcgaatagtacataaccactgctatgctcttgtcaccaaacctgttgcttttcatcaataagcatactttattaccc

SEQ ID NO: 44610 - DNA, 505 bp, Gossypium hirsutum
  Clone ID: LIB3582-019-P1-K1-C2
ggaaaatacaaaagtgaatagaagaaatatagctgtgagggagagctaagctaaagatgaattccttgaccctgaaaccctcttcttttgtattgcaatcttctttcaccgtcttctcttcctacgataagtctaaacaatcctttccttcggttcgcttcccaactaatattaaaagcaacacaagattgggtttgagaattaaagcttatgattcttccaaaagcgatgatgcctctaagcccaacggtgactccaaccctcccaatggcaccctgaaaaatcagcagcctaaggccaggcgagatattctgttggagtatgtgaaaaatgtgcaagccgaattcatggaattgttcgtgaaacgagcccctcaacaggttgttgaggctatgcggcaaacggtgacaaacatgattggaacacttcccccgcaattctttgctgtgacagtcaccactgttgctgaaaatcttgcacaacttatgtacagtgttatgatgac

SEQ ID NO: 44611 - DNA, 476 bp, Gossypium hirsutum
  Clone ID: LIB3582-019-P1-K1-C4
ctttctagcatttgtctttttagtgtaagaaatatagtaaattaggaatgttgaattttttatatacatagtcattcaatggagtttttttcttttttaatttcttgacttggtttagcttccattctctagactacaagttcactaagaattgatcagataagattggcagttggtttagttgcttttttccagtttcagaatcattaaaaacaaagcaagtcaaaaacaataaattattaggtgaacttcatgtgagaatgcttttaagtcctttactcaaaaaaggaatcacgtgcatctttgtttatacttgactttgttatcaatccaagttaattttcttcttcaatctctaccaattctagtttaactgataaaaatatgttctgcttttttggtttccccccttggggtattttttgaaatgataaaggtaagagagttttgagcaagaagtgacgaaaaatgaagaa

SEQ ID NO: 44612 - DNA, 522 bp, Gossypium hirsutum
  Clone ID: LIB3582-019-P1-K1-C8
catcactctcccaaaaaggaatgaaaagatggtgggactgagtgtagttttggagaatcaaaagagtggtaaccataacatattcagtaaaaaaaccccgcaacttattagcaaaacaaccatgttaatcaacaccagcagcaaagtttcttcatcttcttcgagctcttctaggttgtctcctcctaccaccacttctcacatggttccttcctttcttgaacaatgcttcctttgcaaacaaaaacttttgcctggaaaagacatctacatgtacaagggggataggggtttttgtagcgtggagtgtaggtgcaggcaaattttcatggatgaagaagagagtttgaagaaagaaaattgctgtttggcttccatgaaaattaaaccttcaacaccttcaccttcttcttcttcaagctctcgccatcatcgcaaagcttattgagaaacctatgcagctgccaagaactggaaaactttttttttttcattttggttaatttcaattgtatttttcca

SEQ ID NO: 44613 - DNA, 549 bp, Gossypium hirsutum
  Clone ID: LIB3582-019-P1-K1-D11
cccacgcgtccgcttctttacgcctaggtgatgatcaagaaagtggctctctttttacgaattccaactggtttgctttagaagatgacagaggttccaatgacaatccaactggtgctctgccttctgcatcacctaatattgagggagctggtgttgtcaacggcgatggtgaagatgataaggtggttgtcggcaaaggcgatgacttagaagatacagcaacatcttctcaggtacctgatgtaaaatcagaagttaactctgccgatctgtctgaagactctaaagaagccgcacacaatgcaaatgatgaaccacctacttgggtcgaatggagagaaacctctgatggcatcaaagcatctggttttgctgaatctgctattgtccgaaacggtgaagtacaagtgaaattagaagaaaaaggcagtgatactgatcataaccaagaatatacttgccgaccctctccatcatcatcctcagacaatgcaagtgaaaccaccttggagccatctgcgaaatcgacaaatacaaacccttggt

SEQ ID NO: 44614 - DNA, 545 bp, Gossypium hirsutum
  Clone ID: LIB3582-019-P1-K1-D3
gctccacccaaagatttcagagctgtcaagcgggaatgggccgctattcgaatccagaccgcatttcgagccttgctggtatagcttcttactttgcttgcactataaacaatgaattgtcatttggaagactaaaagctccatattatgttgtttttgttccaagttttggggtcaattgcaatgaattgccatttagtaatttacaagcccatggagagatatatggtaagagaaaatggtaattaagtataaacctttgtaggaattgaagtaccattttcttctcttttctttttcgtttctctgatccgagtggttttgcattttctttaatggaggtctgtcctgtgggatatgaatgaaacttgatttgattttgatactgctaaatttctttctgcaaaagcacgcgttattgtaaattgagttgtgaacagtcttttatgaagaattgaattaacctttcagtaattggccatggataacaagtacaaattggtaaaaaattgttcatcttcttttaagtgccttcccttttcaca

SEQ ID NO: 44615 - DNA, 541 bp, Gossypium hirsutum
  Clone ID: LIB3582-019-P1-K1-E1
tttatttttaattttttttctgggtttgggattaaattttttctgctaaaaccaagaatgttttccaacctgttattgctgagtgtttcaaattactttgtaacgagtatggtacaatgagtgataagaagaagcatttctctgtgtcacgtatggctttatcattaatagggatgccaaagttggggttctttgttgatgtgattcaagattgtgctgttttggtttgttgggatgctattttggggttgaaaaatatgattttggagactgaatggtggcctagaccttctcctatagttctggagcagtgtcaaaaggctttaccttgtatgtattacttgttttagaagttcccagataaatttaaaaaattgggcggtgatgattctaatgtaatggatatggctttaggggttttgataagtcttttgaaatcagtggcatttttgagggactgctttgtggcgtctgatgtgagtttttttgctgcttttcaagttcgcctcagtgatcaagagcttggtctgttcatcattga

SEQ ID NO: 44616 - DNA, 343 bp, Gossypium hirsutum
  Clone ID: LIB3582-019-P1-K1-E10
agaaaatcccatgaattcttcaggagaaaataacacaaattctgaagcagaccaatgatgacatggagaattctagttttgaagatcagagtgaagaagatgctcaccatctcaagtagaagaaatgaatttatcaagaaaacatggtaggtagtgaaagtttgtgttaaattattgcgcaagtaccattaggatcaacaactccatttagcattgctctctctatgtgataagtggtagtagttgtttaggaatcgaatattaacgaatggacttaaaaacgaacttatttgggatcggtgttaattgaagacttataatataaatcttttgagttggcttt

SEQ ID NO: 44617 - DNA, 550 bp, Gossypium hirsutum
  Clone ID: LIB3582-019-P1-K1-E3
ataaattgctgcaatggccgccatcgaaaccctagcctttccttcccgtcagcttctgtctaatcccctccggttctcttctaccgtttccgtcaacctcaaccccagattctccggctcccgttcaaggtccatttctcttgttggctccacttcccgcgtccgtacgctcagatgcacttctctttcatcatctccttccatagttgatcagtcagtgaaatttcgagaagcttcgaagaacgggaatttagttcctctttaccgatgtatattctcggatcacttgactccggtgatagcatatagatgtttagtcaaggaagatgatagggatgctccgagctttttgttcgagtctgtcgagcctggtttgatggcttccagtgttggaaggtatagtgtggttggagctcagccaagcattgaaattgtggctaaagaaaatatggttacaattatgaaccatgaggaggggagtaagatagatgagattgtggacgatccaatgaccgttccacggagaaatatggagcaatgggagccccca

SEQ ID NO: 44618 - DNA, 525 bp, Gossypium hirsutum
  unsure (1)..(525): unsure at all n locations
  Clone ID: LIB3582-019-P1-K1-E4
cccacgcgtccgctttggttttttggtgaagttgtgcgtttactggaaaaaaatctgttctttttttctttggagtatttgattttccggtgaaatttgtctgtttcagaaagcttaaccggaaaataattgtcttccgtaaacttggcagctgataaaaagatggaatttgtgtttagtggtggataaggatctaggaggaatgtctgactttntgtatgagcttgaagataatgtttgggatgaatttggtgctagtgctaccgatgatcatatagttcctcgtactgttgatgaatatggggctcaattcaaaattcaaggggatggtcgaacaaaaccacaatatgaagtgaatggagttgctaggaatgcagataatacggctaaatatggtattttgggagagaagaaaaaaggcattcatactttgaccaagaacaaaatgttggaaaaatgtccttggtctcacagttctgatggcatatttcccactccaggtgataatgactcactcaaagaagt

SEQ ID NO: 44619 - DNA, 533 bp, Gossypium hirsutum
  unsure (1)..(533): unsure at all n locations
  Clone ID: LIB3582-019-P1-K1-H6
acgactacgcatccttacaagattatattggatccgtatgcaaagttataagcagaggggagtttggggcgttagggcctgaagataattgttggccccaaatggccggaatggtgcctacttcagaagatcagtttgattgggaaggtgatttacctttgagacatccaggcagagatctcataatttacgaaatgcatgtgcgtggatatacaaggcatgaatctagcgggacaaaatttcccggcacgtattgaggtgtgtcggaaaagctcgaccactaaatggaacttggagtcaactgtataaaagtaatgcgacatcatgaattgactgagttggagtactacagctacaattctgtttagagtgactataagttgaacttttggggatattcaacaatcaattatttttcccccatgataaggcattcatcttgtggtatacgtagctgaggtcggcatgcaattaatgaattcaaaatatttgttaaagaagcacataaacgcngaattgaggttatcatggat

SEQ ID NO: 44620 - DNA, 486 bp, Gossypium hirsutum
  unsure (1)..(486): unsure at all n locations
  Clone ID: LIB3582-031-P1-K1-A12
cnngngaagnagnngagaancaaaggggggcnngaancaanggannnancaccnaaaangaaggangaagnnaagaaanngnngaanncnaagcaccagnnnnnagagaaangngngcccaccanaanagnngnggncacgnaacacaagaggnggcnaangagacaccaccncaaangcaacaaaggngncnccanncancgganaangcncaaancggcggcaanccagncganggnncgaccaagacanngaagnnagaagagncngangangaagangangaagaagangangagncngangangangangangangangangangangaaacaangganggacangangaagancaaaangnngagaacccnncacgnaaaaggccnagaaagggaggggggncaccaangangcaacaanngagcaangaaaaaacgaaaggganacaaganggancaaagaaaagnngggagaagaagc

SEQ ID NO: 44621 - DNA, 628 bp, Gossypium hirsutum
  Clone ID: LIB3582-031-P1-K1-A4
gctggaaaaacaagcgcaaagttctcgcgaccgatatgctaagcaacgctaaccttaacgcctgttatgatctacgacgagagcaagtgatgaaaatggtcgaagatgtgtatgaaaacgttggcaagccaattgatatcagcgaattggcattctgtacgttaatcaattcgatcggaaagatggtgtggggtggcgcactccgaggagagaaagggactgcggttgagggtcacttcaaagagatttcttcgcagatggtggtgttaatgggaaaaccaaacattttcgatattttacccgcgattgcatggttcgacatgcaaggtatccagaggggaattaagtaaatccgtcaatcgttcaatgaacttttaaagtctgtgattgaactcagaatgaacacggtgactgagaaagaaacgagtgaacagaaatccgacttcttacaattgctcttggatttacacaagaaccaagatagcccttcatcacttacgatgaatcaagtaaagggccttctcatgatacgacttcaactacgacagagtgggcaatggcagaactaatgcaacatccagaaataatggagaaagtgaagaaagaaataactgatgttgttggggta

SEQ ID NO: 44622 - DNA, 736 bp, Gossypium hirsutum
  unsure (1)..(736): unsure at all n locations
  Clone ID: LIB3582-031-P1-K1-A5
aatnnctggggatcatgagccgcagatgcaccaggcccgngatgaagagatctgaagatccttgctctcgtcagatagctgattcaagatgcagggaaggcattctcaagaaagccgctgaattgtctgtgttctctaatgcagatattggccttctgatgttttttcctacaggaggatatgtttctccgttttattgaagagcccgatgatgataaaaaagcttctgttttggccatctttgccatccttgtttcataaaagaattcacaaatagacaagctgaggctttactaatatgttttgcactggtcctatttgtttttcttcccctgcttatccctgaagagttcttgtgccaaagcctgaagcatttgaagtatgaggcagaaattctggataaaataggaaggttatatgtcctctctcttccaaacatgcacattcatgtacttacacacacaggcacaagaatttttgctttggtttaatttatttcttactcacaagcaattcttttatcatgtaatgatttattggccattaatgcgatgcanagttcagcttggaggctcttgagatgaaactgcttgatcttagtcggcaagaatatgaagctcaggacaagatgaggtgttataaaccagatatgacaaagatcctcacagttcaagaagctcagtaccaccagcaagttgttatcaacgcaattcgacaaattgaaaaagtgaaagcg

SEQ ID NO: 44623 - DNA, 266 bp, Gossypium hirsutum
  unsure (1)..(266): unsure at all n locations
  Clone ID: LIB3582-031-P1-K1-A7
gcgcccacgcgccgccaccgccgagaaacaacggcacangngaaccaccccnncacgcccacgcccccgggcanncacgagnccaccaaacnncnccccncagncccccanaagggggacccacngcangcccancgagangccaagannnaaagcnncaaggcangcgaangccncngcngcaaanggngncgacacanngnngngaagagncgannngganaccagnagnncnccccncgagcccggagccaccagacccgacg

SEQ ID NO: 44624 - DNA, 491 bp, Gossypium hirsutum
  unsure (1)..(491): unsure at all n locations
  Clone ID: LIB3582-031-P1-K1-B7
cccacgcgnccgcccacgcgnccgnaanaancgaaccccccncccgnccnctnncccganngggcnngcnncatggccccgccatggctngggggagctncgcnaaacncaacgcgccgncanccncnnggancggnggccagcagncncncccncaacgcnccggancaaccgcncggcncgccacncgcagagncncacncccganccgngcnggcgcnnacaccgacgaacncancaaaaccgccaaaaccanngcnncaccnggncgnggaanaccggcaanngangaancgaaggcaacangngggaagagannancnnncnangggcnnagacaanacngaacccaaccgccaggcnnacagacagcnncngcncacaacnccnggccncggagaananannnccggngccanncnnnncgaggaaacacnnnaccagncaacnacagangggaagaagnnngnngngncnngcacgaccagaaa

SEQ ID NO: 44625 - DNA, 423 bp, Gossypium hirsutum
  unsure (1)..(423): unsure at all n locations
  Clone ID: LIB3582-031-P1-K1-C3
ggaaggccnncncccacagaagggganatcagncngnnncctncctccgancgggnnnngcanngaagacaagaaaagagggacaaggaaanaagggacccgnggaaggcncgcgnganncgnggcanagngangaccccancaacacanngcnaccgangannncccncngannnncnncgcnccaaccccagaaaggcnnnncncgnannncaagagncanagacaaaanaaacccnaaaagncccccnnnnnnnccncacncnnccccaaacgggcaanngnnncnggggnnncnnnncagaganaccgaagaagggagagnnagcgaaggggnngnagagagnggnggncgacgaaggggagaagagggacaaggagacgncgncgnnccgaaacaacgcgccngnncnncaaagcacc

SEQ ID NO: 44626 - DNA, 627 bp, Gossypium hirsutum
  Clone ID: LIB3582-031-P1-K1-C4
gccatttcttcaccttgccttctctttgcttctttgttttggtgcttgtccagtatttttgtgctataaaatgggggttgtgctgctgcatgcagatgcaagaagacatggtaatgggagaaactccaaccagaaggcaagcagcggtggtgaaaatacatggtgcattgcgaagccatcaacagagaatttcaggctcaatggcaacatcaattacagctgctcacaaaaaggagtggattgcaagccaatccaacctggtggtacctgctaccgccccaacaccatcgtctctcatgcttcttacgccatgaatctcttctacaaggttgcagggaagaatagttggaactgtcatttcaatggcactggcattatcatttcagagaacccatccattggtagctgtaactatccaatgtgatgatcgaaaaagcccgacaactgttgtggaagacatgtttcttcaatgtttaattttgttgtgtcctctgttttagttttgaaaaataatttacatgcagtatattattttcatactcccccatagttattggtattgtattggtatcgattatatcgattagtacattctattttgttcttaatataagtatttggaatttc

SEQ ID NO: 44627 - DNA, 743 bp, Gossypium hirsutum
  unsure (1)..(743): unsure at all n locations
  Clone ID: LIB3582-031-P1-K1-D9
cccacgcgtccgcgatgataacagtagtagcacttctgagccacatgaccgaatcgactacagatctagcattgaatgtgagatcgaaaagttctgccacggccatgacccgacggacaacccccacgactagctccttcaaccgacagcgcttcttcaacaaggtttacgttcaagtttacttcctgcaatacttgagcttgaccactctcacagtcaactaaagcatcaaccaaacgctgcaacgaaagaattccaatcaacaacctagcggacgagataactgcctcaaactccgacggtaagcccgcgagcattacttcaatcttctcttcatcagaaatacaagaaccagaggcatctaacatagcacacaagtctttaattctagcaacataagctttaatagaaaggttacctttcttcaaagaatgaagttcatgcagaatccttgactgcttagcaccaatgtcagctgcaaacagattaattgttgtggtccatatgtcacactctatgcacgcatcatcaaacgacgactgatgagatgaacttacagtagataaaagccatgaagtcaaaagccgatcttgctgcgtgaacacctgagccgccagattttatgcgcgagatccatcgggcatggaaataaatcatgatggcggagcaattgtaccatctaagaatnctgtaagtccatagccatcaatgattaaatttacctgtttgcgccattgaatata

SEQ ID NO: 44628 - DNA, 527 bp, Gossypium hirsutum
  unsure (1)..(527): unsure at all n locations
  Clone ID: LIB3582-031-P1-K1-E10
cccacgcgnccgccccnncacggcnnncccccaancatttcccacncccaanngcccccaaaancccgggggggccccnaaggctaccgcagaggaagcagcacnncaaacggcacaacangaggagaaaacggaagaaccagagaaggaacaagaagcaacaacagacgaagcagcagccgaagcaccagcagcggaaccagcagccgaagagccaaaggaagcggagccngcggcggagcgagacgaggaaccngaagccgcagccgaagangaaaccaaggaggcggnagaagaaccaaaggcngcaaccgaggagccagcagcagaggaggcaccgaaggaaacaangccagaaccagncgccgaggcgaccaaggaaaccacngaacaaaccgnngcaaccaaagaaaccacagagncnagngaggcagcagcagaagcacccaaagaggaagnnaagacggaagaagaagcaaaaccagcngaagnggaggcgaaagcngaaacagaagccganccagcag

SEQ ID NO: 44629 - DNA, 372 bp, Gossypium hirsutum
  unsure (1)..(372): unsure at all n locations
  Clone ID: LIB3582-031-P1-K1-E4
gccgaacgagcgcggactccgagaaagcacaaggcaatccaccggaggagcacaggctnccggcagcgggaggggaaggagacggaaagagaacccgagaagaaaccgcgcagactttcagggaggagcggccagagacgaccaganaccacctnacagaagggaaaancaagacacaggcacacggagcacaaggccctcagcacacaagggccacggaagncangcaagacaacnacagcaaccnaacggggacccaagagaacannagcgaacnnaggcgacannacggcnngnccagacaagcaacagaagccangcccgnggnngaggcggacaaggggacacgagaccgagcaccanagccacccg

SEQ ID NO: 44630 - DNA, 412 bp, Gossypium hirsutum
  unsure (1)..(412): unsure at all n locations
  Clone ID: LIB3582-031-P1-K1-E8
cccacgcgnccgggacgnacggcggnanccnacaacgnngcnccaccnaacnggnccnncgggcagagggcggtggcaaccacggncagagccaccaangacccncnnnnngnaaannaaagngaagananagccnnnagaaaacaggcagcagnagaaaannngaganangncanagggaccaannangggccncnngggnaaaaancaacaaaagagnnnannnnaaanagcccnnnancannnngggnnnagnnnaannanggggnnggngncccnacnnnnnnncncnccggggcaagggcngnnnngggagggagagaagcaangnnnnngggnggggagnnnagnnngannagcngnngacgggnggcanancaannnaaanncaaaaangacaggaanannacnc

SEQ ID NO: 44631 - DNA, 502 bp, Gossypium hirsutum
  unsure (1)..(502): unsure at all n locations
  Clone ID: LIB3582-031-P1-K1-F1
agaagcnngaggctgncnncaanacacgaagngagcagcnagacgagcngnnnggagggaggcaaagccancgaaggcaggagggacagggaangngccgnaaagccagccaagaacaaanaagggcanngagccaaggagcnacnncaccaagggggaaagggagcgaggganacgccnncaacnaaaagagccaaaccccncgctacnccaaccaaaacggccgcnnnaacgaggcnngcccncgnaannnccagcagcaacnccgagaagnggannccnccgnngnngccnncgaaanaaacaaaggancgancnncgnaccgcacnacaanncaaaggcgacagncgnggnccncgncaccgaaggaaacggccacgncgaaaaggncngcccncaccnnncaaggcagagcncacacnnggccncccgagaggaagaagaacaagaagaacaagaagnngaaaggagaagnggacaanacaagagagngagagccca

SEQ ID NO: 44632 - DNA, 560 bp, Gossypium hirsutum
  unsure (1)..(560): unsure at all n locations
  Clone ID: LIB3582-031-P1-K1-F10
cccacgcgtccgcccacgcgtccgnggnaattngggttattttcctcaaaatccaatctttacttgggcacctgaaagtattggcctttatcaacaacttgaaaaccaggaaatgaaaccccagattctaaatcccccaaatcccaactttttcttaccatttccacaagaacaacaaccattaccaaagagactcaatcatggtcagatcccaaagctaccattctcagaccatgagttatttatcaaaaaacaacagcttgttgggtttcaagaacagaagccattaatggtgtctcaacaacaacaagcagccacattgttggaccagctttgtaaagtagcagagatggtagagactgggaatttctcacacgcgcaagggatattggcgcggctcaatcacttgtctccagtaggcaaaacatttcaacggattggtttttacttcaaggaggcattacaattactactcctcatgtataacaataccccagtctcgaaaaatccgacaccttttgatgttatctttaaaatgggagcttacaaggtcttttccg

SEQ ID NO: 44633 - DNA, 487 bp, Gossypium hirsutum
  unsure (1)..(487): unsure at all n locations
  Clone ID: LIB3582-031-P1-K1-F7
gncaccaagnaacagcccacaggnnnngacagcaggcaaggaaggaactacaagggnngctggagaaggnaaggaaggggatatnaaaacaaaagaagnngaaangcccatcatcnnaggannagcagcaaagnnctcaaagactttacaggctgaaaattcctgtcagatccctagtgaggaacctgggaagctaatgggggatcaaaagaacaatttaaatgattcagtcagaaatgaaaatatggaaataatggaaaataatgttggagaaagcgatccgaaaaaaaagaggggaagaccacgtaaagcagtagttacaagtccgaaggcttttcatgctggaaggataaatgacgaccaaaaaacaagagaggttcacttggcgactgctgggatttccgacatgaatgaggacgatcaacctctatcaacttggatagggggaatccactcctcaggtgatgaagaatcaaggctctctttt

SEQ ID NO: 44634 - DNA, 478 bp, Gossypium hirsutum
  unsure (1)..(478): unsure at all n locations
  Clone ID: LIB3582-031-P1-K1-G7
cccacgcgnccggctnacactncnnngctnncnnnnagcgnnngctngcnngnncnctnccanggcggcggnngcgcagaagagcgcgncactaaccancaccagganccaccnngggggcagccncagcaaccncagccacgncaccaancccaangccaaccccagaacccgaangcncnncagccnaagcaccggnnnaggncagaggcnggngaaaccgagnncngggaccaaaangaggancaannccagngngcnggngnngcnnnccnacgncanaagaaccagcgcaaaggaccccnanggccnncannnaccagngcnccnanngcgggcnangnngaacaaggggagggnanncaaggggcggncnncccaggnngncccgagacanancaancacagncgcaacaaaananacaaganaggccacaaagagancagcaccaaaagcccagacggnngaaggagggcg

SEQ ID NO: 44635 - DNA, 366 bp, Gossypium hirsutum
  unsure (1)..(366): unsure at all n locations
  Clone ID: LIB3582-031-P1-K1-G8
cccacgcgnccgggccacngagncaccaagngnngcaganccagnagcnaaaaanagcaggaaaggggcgncaacggcaccagcaccagcaccagcagnagcacccacnagnncagaacaggaagnganaaagcgcacaangggnaggcngaangngaggcngaagaagcnaaanacaaacncancaangcnnaananncncacnnnaanggcncncaccnggcancnngnnaaccncggccaacgccnaaccnnaaacngnngangaganggangcnacnnganccngnngaaagaacnagncnaggacagnnnggnnnngcaacacnngnnncngngnacnnnnnagnaaaannnncngnncac

SEQ ID NO: 44636 - DNA, 520 bp, Gossypium hirsutum
  unsure (1)..(520): unsure at all n locations
  Clone ID: LIB3582-035-P1-K1-B2
aggacacttaaaaaaaattctgctttaaaaaaaattctgcttgtttttctggctacaattcgattagagagggagaagagaattgttgcatgctaaattttgagctcgtttagaagctaattttcctcaagaaacttgcaaaaaggggaaggagaaggcagcggcaaaggggaagagatcttactcaaggttatggttgacttcgagtttctagctggagtttttcatgttattcaatggtggcgaagtacaatgtaacgacctagatttctcaaaaagaaaggaaagacaaaaccgtggacgaatggttcggaatgtacggtttgtgttctaaatttgaattacttcgtttgctgcatttatgagttgtattgcaaggtaagatcttaatgagagctgaaaatgattaaaaaggggctgaattgtttcgatacggaatggttgcgtacgatgaggattaaatngaataaatgtggaaatatngtatattgatataaatatgaaatatgatcttgtctgg

SEQ ID NO: 44637 - DNA, 645 bp, Gossypium hirsutum
  unsure (1)..(645): unsure at all n locations
  Clone ID: LIB3582-035-P1-K1-B4
caagaaaaaaaaacaagcctgctagataaagaagagataatcccatcttgcaaagactccaaaaacatcagattgattgttcaatcacctgaaaaggattttgaagaagaaagagagtctgtcgaccctggttcactccagaaagaaactaatgattcattggtggtggattgtgttgaccagcccaggggtgccagtgctaaaaccaaaaacaacccatggaggatggatcttcaagctcttggagtttcttacaagatcaaaaggttgaaacagcaacttctcatgcttgagaggttaaaaggaaagcaagaaagtggagaggatatggatgggggtgacaatgggatcaaagggtttctgttgttgatctctttgcttgataaacaagtcagccgctaccagtcccttcaagggaagactgacgatctctgtaagcggatggtaagcaatgacatcaatgactttcactggtgatctgcaaaattttgaacattttcttctttgtttgctgctagaaatgaaatcaaacgctacttcattactttactgtggcctatgactactntctcatcacaatctcatctacaatttttagaatgagaatgaggtagactcgagtcaaggagattgcaagcatgtgaa

SEQ ID NO: 44638 - DNA, 650 bp, Gossypium hirsutum
  Clone ID: LIB3582-035-P1-K1-C1
cccacgcgtccgccacgcgtccgcccacgcgtccgcccacgcgtccggattattgcagcagagtatcttggagatggagtcgttacagaaccatgttggttgaattacatgagagaatggggtccaaccatagtatacgattcacgatctgaactggataggataattaatatgctccccttttttgttcgattttcagtggagaacatctttgacctgtttcctacggaactttatggcgaggaaggaccaaccgggccgaaagaaaaggataattgggaaggagatgaaagatgttagtttcaacatatatacatttgcacgcttgtacgcttgtatagtcatactaaagcacggttttggtatattggaggacctccaagaggcagtatgtaatttggtttcggaacagcaacagacacattcatgttgcggagtatctatgcatgttgaaagtagtttccgatgcgcccagagcgctcgatctcgttcagcacatagataaagaagtctgaagtagtataagaactctgcagttccccatgcatcctggttgtgcatatatagctcctgttgtaatgcttgtgcttgttaaaggacttgcggatttgccatgaaaccttgcaaaatttggaaaagaaaaagagttg

SEQ ID NO: 44639 - DNA, 600 bp, Gossypium hirsutum
  unsure (1)..(600): unsure at all n locations
  Clone ID: LIB3582-035-P1-K1-C12
aaaggcagcaaattaaggagtcccagaagacccagatgatgacttctgggaaagcgcatggttcaattgtagggtcacggatgggagataagagagctacactatttctgagtggcgagaggattgagaacaggctaaagaagccgactactttcttgtgcaagttgaaattccggaatgaacttccagatcctagtgcacagcccaaactcatgtctttgaagaaagataaagatcgatttacaaaatataccatcacttctctggagaaaatgtacaagcctaagctttttgttgagccagatcttgggataccactggacctgcttgacctcagtgtatacaatcctcctagtattagactgcctctcgccccagaggatgaagagctcttgcgtgatgatgctgctataacccctgtaaaaagagatggtataagacgaaaagaaagacccactgacaaaggtgtntcttggctggttaaaacacattacatatctccacttagtatggaatcaacaaagcagtcnttgactgaaaagcaagcaaaagaactgcgagaactaaaggaggccgcaatcttttggtgaaccttaacaa

SEQ ID NO: 44640 - DNA, 635 bp, Gossypium hirsutum
  Clone ID: LIB3582-035-P1-K1-C5
cccacgcgtccgaaggaattttcctttttatggtttatccttggtgacgaagtccttgaggagaaaagaaatggaatgttcagttttgcctgctgcaatgcataacaattatatttagaagctgaccagtgcctgctttctaacacccattttacacgtaaaccaccatagtacatgtcatggtatacacatatgattaatcaagatgagttgaaagaatatatgaaaaagatgtttggtgccaaattctatggtagaggtccaaatgaggttaccggaataaaatttctttttcgtttttccctctagagtcagatatttatgtaccgtaaacatgtctttctaatggttcgaaaattcagaatgtggtaagtgttgttgtttgtgggagagatcattctattatcttcaagttggccatcttgctgctgataggtaaaatcacttccactggccattgttgttctattgaatggattgttttattctaaggctttgtttctcattgctttttgaaagtgtttttggagccataagcaatgctcaacagacaacttttgaagtcaaaagtgcaattttttttagctgttgcttttggaaaagcagtttttgagccaaaatgaacattttatccc

SEQ ID NO: 44641 - DNA, 295 bp, Gossypium hirsutum
  Clone ID: LIB3582-035-P1-K1-D2
ctaatatccaagtgttgaaggcctttgcaaacacaggagttgaacttatggttgcagttccgaattcggacttattagcgttctctcagttccaatcgaatgcaaattcatgggtaaaggacaagtttcttccgtattacccggccactaaaatcacataccttactggagggtttgaagtcactgagagccccaattatgcctcagctttagttgaaccttctatgcacaatgtccctacagcattgaaaaaagctggtttacacaaaaaggattaaaggtttcgagcaacgca

SEQ ID NO: 44642 - DNA, 691 bp, Gossypium hirsutum
  Clone ID: LIB3582-035-P1-K1-D6
cccacgcgtccgcccacgcgtccgcccacgcgtccgcccacgcgtccgcccacgcgtccgcaaagtggttgtgatcttcatgtctcatacaacagttgttgttttggttgttttattatttgatttgacactttgtcgataaaatgatgaaagtagaaaggacattggattgaactagtgggaaaagttttgcttttacaaatcaaatgttaggaatgatgaattctatgcactaccctttagacttaataagtttttcccaccaatttaaccttttgaaaaataaaaatttactgtgacaaattatttgctttccaattccatttcttaagttagatttatcttcctaattttccttttcatcctacatctttattcaataagctatttttgagtcaccttggctaatctaacagctgattttacctcatgttacactctctcttatttttcctttatctatctgtggttcttttcttactgtcaagtctctgtcctattttaagcttaatgttctgcactctgtgtagttaatagaatgtaatgtgttaccatgcacattgcttttcgggttgatgatggttatatgcattagtttcaagttgtttatgcttgttgcatgcagatgccctttctctatgcaattttcgttctatgccattcacttcatatttcaatgtttcatgtcttc

SEQ ID NO: 44643 - DNA, 516 bp, Gossypium hirsutum
  unsure (1)..(516): unsure at all n locations
  Clone ID: LIB3582-035-P1-K1-D7
cttttttgttttcaaatgcgagaatcgaaagactaaaagaaaaaaattcgagagaaaatcaaaagcattaagaattttgaatcgggaatcaccttttgaatttttggttgctttgtatgcgtttgtaaaaaaagatcaatacattgtctttggctctatagccgaaatccaaaaataaaaataaaatttttcttcttgtttttgctgtcgttctctcgtttgtttgcaggtacggggtacggggccagctgtgagcgcacggaggccgtacatgggagtgttggctgcggcgcaccaaggaaacctagggcttccgaaagttttttgattttgggccacttgggccttgtatttttgggctaggtttaattaatgggctgatgtaaatagactattttaattttggttttttgtctttattattttatttttttaattgtttgggctggttaatggttttgggctcggataaatttgggtacttacactaacaatntatggagaaaatttaagttg

SEQ ID NO: 44644 - DNA, 672 bp, Gossypium hirsutum
  Clone ID: LIB3582-035-P1-K1-E10
atcatctccgtcaaccccattcccaccgatcgactgaccatctgtgaccacttgacacctgccgtctgaccgctcccaccatcaccgctcatttctgtctcaaagctcaattttcagaatatgtcgatgattggggaaaatgatgatgacttaaagaagatatcttcttcaactgatgcgtctaaggaaccttaaaggctaaaatggtgatggagactccaacaagtgcaaaaaacaaaaggaaaggggagaaggcctttgaaattacaacagatggagttaaaaagggaaaaccttctactgtttgggataattttaaaaaaattgatggtgataaaaatcatgatgaatgtatttatttcatctaacaatggaactaatgtaatgaggtgtcacagtagtcggtgtaagaaagccccttttaacctagataaaaaacaatcttagattttgagtctaagacaaagtgcaacgctgatgggaccatagaaactgttagtgttcttagattatggcgttttgatcaagatgagattagacaagcacttgctaaaatggtgattattgatgagttgacatttaggaccatttcttcgttgcttttgaaaagtgttgtggaaaagtacttttgaaaaatgctgtggaaaagtacttttgagaagtacttttgag

SEQ ID NO: 44645 - DNA, 685 bp, Gossypium hirsutum
  unsure (1)..(685): unsure at all n locations
  Clone ID: LIB3582-035-P1-K1-E11
agagcgcttaaacgcaaaagaatcaatggcagtcgaagctcgtaatatgaatcttttccctcctcagttaatccctaatggagattttatgaaaggttatcaagggagtggaaatatacacaatacccagatgcagcaagaagtttcacagatttttcctacagtttatcagtcgcttgtacgtgatccgatttcagccaaagctgatagtggggttacttataatatgaatatcccagtctcggccccaaggaaaaggcctagggattcatattcatacacagttgctcgaaagaacgaattttgtggggtttcttctgttcttgacgatgatatcttttcccagatccaaaaacaacaacaacaagaaatcgaccgtttcattgctcaacatacagaaaaagtgaggttggaggttgaagaaaggaggaagaggcaatcgaggatgttgattacagcgatccaagaaggggttatgaagaaactgaaggaaaaagatgaagagatacaaagaatggggaaactgaactgggttcttcaagaaagagtgaaaagcctgtatttagagaaccaactgtggagggacttggcgcanacgaacgaagccaccgccaattccttacgcaccaatctagaacaagtccttgcccacgtcggcgaggaacgtcacgccagcggccgaggt

SEQ ID NO: 44646 - DNA, 534 bp, Gossypium hirsutum
  Clone ID: LIB3582-035-P1-K1-E4
cccacgcgtccgatcgacgattactcatcacgaatgtaccgataataacacctctgcgcaagatggccatacctactgcaaatttggcactggactctcggacgaaacgaacgccctcgaccttgaatagacgaatggcctccgccacgaaagggaccatccgtgggtggaatgagcggcccctccaccacatttgcagcaaccaacacctcttgagcggaccggacttggcgggcttcacactcaagcaaagcatcgacgatgcgttgaaaggacaacaggctcgtagagagagacacagacgaaatgatagcatcaaactcagaggagagaccggcaagaagaaccgccgtctgttcatcctccgagatctgagatcccgacgctgcaagaagagcacacaagcttgtgattttattcacatacgaacaaattgagaggctacctttacggagagaatgaagctcatggcgcaactgtgattgcttcgcactggaatcagccgcaaacaaattggtcgccacgatccaaaca

SEQ ID NO: 44647 - DNA, 673 bp, Gossypium hirsutum
  Clone ID: LIB3582-035-P1-K1-E7
gttgattctagtgctggtgcccttgctagagtacattggttaagggtgatactagatgaagctcaaacaataaaaaatcatcgaacacaagttgctagagcgtgctgcggtcttcgagccaagcgaagatggtgcttatctggaacacctatacaaaatgctgttgatgatttatatagctacttcaggttcctgagacatgaaccatacgatgtatataaatcattttgctatgggattaaagttccaatagctagagattatgtaaaaggttacaagaagctgcaagctgttttgaaggtagtaatgttgcgtcgcacaaaagcaacgttgattgacggggagccgataatcaagttgccgccaaagtcaattcacatgtccaaagtagagttttcagctgaggagcgggctttctataaccagctagaagctgattcacgttctctatttaaggaatatgcagctgcaggcacactgaaccaaaattatgcaaatattctgttgatgcttttgcgcctacgtcaggcttgtgatcacccgcttcttgtcaaaggattcaacaatgattccattcgaaactctgactctgttgaaaactctaaccctgttggacaagtttctgtagaaatggccaagacacttcctagagaattgctgattaatctactga

SEQ ID NO: 44648 - DNA, 443 bp, Gossypium hirsutum
  Clone ID: LIB3582-035-P1-K1-E9
agagaacactgcaagttgtcgtcgatcgggaatggtgaaggagacggagtactacgatgttctaggggtcagcccttctgctacagaggctgaaatcaagaaagcttattacatcaaggcacggcaggttcaccctgataaaaaccccaatgatcctctagcagcacaaaattttcaagtgttgggagaagcctaccaagtattaagtgatcccacacaacgacaagcatatgatgcctatggaaatcaggatctcagctgaagaaatatagatcctgcacgatattgcaatgcttttggtagtgagcttttgaggatttttagaacagtggtttggataaatggttaattgacattttaacagaggggagcaggtagactaaaagttgaggaaaaatgaggttgtcaaaggagaagaaaaaagcttgccaaatactgaagat

SEQ ID NO: 44649 - DNA, 719 bp, Gossypium hirsutum
  Clone ID: LIB3582-035-P1-K1-F10
ctcactttcccaagaaagacaattttaggaaaaaaaaactttttttttatgcagaagcgagagttgtccagaaaagcatgctttcaagggtgaatagcggtttggtttggatggaaggtactaaagaagatgaacactcatcttcatggaacagaaccaacggtaataacaacaacaacaacaacagtgttataatggagaacaaagaaatgatgggttcttctttatcttcattcaaatccatgttagatgatgaatggtacgttccaaacaatggtatttcgagccatcatgatattagagaactttcgttttctccaaatcttggtgaccatcaagataatctcttgctgcatcatcatcagcagcagcagcagcagcagcagcgaccagtggattcttcttcttcatgttcaccatcttcctctgtttttaacaatattgacccatctcaggtacagttctttttgcagccaaaaccaagcttatcttcgttccttaatgttgtttctaataaccctttagaccatgggtttgatttgggtgaaattgggttccttgacaaccaagcaacaacaaatgctactactttattaaaccgggaacatactagggttttgggtggtttcaccgatttaagccctggtaatcagttagacactgctaattcctgccccgagactcaattctcgggttctcgagtggttcagctgacggaa

SEQ ID NO: 44650 - DNA, 704 bp, Gossypium hirsutum
  Clone ID: LIB3582-035-P1-K1-F12
aaaagagagcggcgtttaaacgcacagtaaaagaagaaatgctaaagcaggctctccgagtccgactcggtgctatctcctcttcacctgcctcctctaccatgttgtcttcttcttcttcgattctcgccctcagaagcaacaaccctgcctctcttcttccttctagattcttcagcaatggagttctcaacaaccaactcgttttctcgcctcacttccaacgctccatttcccttcggtgtttcgcttcttccagtggattcgataaagttcaagttctaaatccgatcgtcgaaatggacggtgatgaaatgacgaggattatttggagtttgataaaagacaaacttatattcccttatttgaatttggacgtgaaatactttgatttagggatattgaatcgtgatgcgactgatgacaaagttacagttgaaagtgctgaagcagctctaaagtataatgttgccatcaaatgtgccacaatcactcctgatgagacaagagtaaaagaatttgggctgaaatctatgaggagaagtcctaatggaacaattagaaacatcttaaacggtactgtctttcgtgaacctatcctatgcaggaatataccaagaattgttcctggttggaagaaacccatatgcattggcagacatgcctttggtgatcagtatcgtgccactgatacagggattact

SEQ ID NO: 44651 - DNA, 713 bp, Gossypium hirsutum
  Clone ID: LIB3582-035-P1-K1-F5
tcatcgttgatccaaaaatacagattcaagcgtgcaattttggtgcaaaaaagagctggatcaaccacccctgttcctacatggataacggctacaaccaagtcaccgtctttagcaatcccaagtgttgaatttccctccaaaggttcaccaaagaatgtttctaaaaccaaagaaggctcagtttccgctagaaaacttgccgccactttgtgggagagtaataaaatcccttccccacaagctatggaagatttggagaagaaagataggaggagaaaaccgcccatagttgccaaaatgcctcatagtttgccgcccagtttgtctgatccctcttatactcctatttcagagaaaatggaccgacccagaatcaaagctcataagagaagatcttcagttgtttctccaaagcttcaattaactgatttggactctgttggcaatgccagtctaatggagattgaagctcattctagaggtaatgatcatgacggatgcataactgggatcggaaatcgtttaaaggatgttcgaaatagccttgccacttcgaaagaactcttgaaagttttgaatcatgtatgcggactcgaagagcgaaattcatccagcgtgtcccttatatctgccctacgtgttgaacttgatcgagctcgcgtcgaaattgatcagttgatccgtgagcgacaatctaattttgatgaaac

SEQ ID NO: 44652 - DNA, 742 bp, Gossypium hirsutum
  unsure (1)..(742): unsure at all n locations
  Clone ID: LIB3582-035-P1-K1-F8
accatacttaatcatccttttcactgtgttttcctgatattgataaaatcctttgacatagatgcataaaacttttcaagactatacatcgcattctatatttgcctcatcttagatggcgttgcattattttggatcttccttaagccaatgttttacactttgccctaataaggttatatatgtaactttctcaacagagtatctaggattttaggtggttctcgatttggcgtcttgtagtcattgtcttacttctaacataggatttatagttaaagttgcagttatcaacggacgttttttattgctagaagaattttactcttgttgtcttgagtttgttaattcattcaagaatttcgagtttttctcttgggtgagaattaagatataaagatggacttgcattcaccgggtccatatctatctaaattgtggatattccttgtttgcagtcataaggcgaaagctcccagaacatgggtaggcattctttagaatgtaaaactccacaaattggctaagcaatatattattgacatgttgctaaaaataggtgtccatgtaatattaaaagacatactagcatctgaatatacagttttttgttcaatatttcattgctaacatgcttccggcttcaatgctttaatcaatgaaaaaaaaccgctattttgctgctatgttgcacaggatccaggnaacaaacccgcaaggaggatctggtcttcaatcaaca

SEQ ID NO: 44653 - DNA, 428 bp, Gossypium hirsutum
  Clone ID: LIB3582-035-P1-K1-G11
acggtcctttcatagatttggtgaattgagtcatctcacttcattttattggttatggttccctgtggatatcaatttgtgtgctagtacttatgaactttgattcttttcctattttgttttttgaaatatatgtttctgcactatcgacaattggaagggacttctatatggttttcggagaaagaagctttgtttgcagtacgagcgtatctgattaatttattaggcaactttgagaaaaaacattgggcaggtgaaagatatattgtgtagggttctccgtatcgtcttgtattactgtagaataatgtgtttagtgctaggagaccataatattaaggtaaaatgtgatgggtgagtcttctataaatataattaaacgggatggaagataattctgagcctcttattatgagaaattatag

SEQ ID NO: 44654 - DNA, 669 bp, Gossypium hirsutum
  Clone ID: LIB3582-035-P1-K1-G8
gataaaagaaagctgagtaaaatgtcggcgcaaaagggtaatcggcgatcatccttttcttcatcgacgacgtcgtctttagccaaacgacatgcatcgtcatcggagaatgtgggaagagtcatagcttctttggctaaaaagagagtccctcttactaacattactaaccaaaagcagagctcaagctcaaaaagctcggctttggcctcctctttggtacaaagttcaaacaaaatccaaaaggcaaggaagacacagtctgttacaaatgtaggtctttcaggacatgttctgcctcctacaaatgaaagacgcagttcagttttgcctcccaaggttgttccatctctgccaacaggaaatgaagtgttgttgcctcctccaccagtacagtttagcatggagttttctcctagtaaatcagatggactgtcatcattttccttggatgagacaatgtccacttgtgattctttcaaaagccctgaagttgaatatatcgacaaccatgatgtttcagctatcagttccattgagcgaaaaacattcagcaatctctgtatttcggaccatgatgtagtagcaacaggaagtatttgcaatcgagatgctgtggcagagaaggaagccgatgatatggtaaatgatgttgatgacaatttcatg

SEQ ID NO: 44655 - DNA, 568 bp, Gossypium hirsutum
  Clone ID: LIB3582-036-P1-K1-B11
ggtaccgaatttcaaggcccggcccgagccaggcgtccgtccactcgttctcccactcgtccgtccacgcgtccgtgaaaaaccagtataataactaaagatgcttgcggaagggattgtaattgtaatgcgatttctaattggtcacattgctacctcatggggtatccttgatagggctattgaatctgaaaatcttaatcatggtgacattctgaggctggatcatgttgagtgtttcctcaaattatcttcaaatacaaagacattctttgacactgcctatgctttgtggtatacttattactatgtaaatgtttattaattatttgcttttaaatatagctactctttgagcatctttggctagacatgtgtccaagccatagttttacattagttgcatgaaatttgttcatttcttgctcaatagggaattatataccatgaacctgaatatttgaaattcgttttggaatgaaactagtttttttcatattctacttttcttctatattccatttattagatttggctttatacatatcctattaccatcattttcttt

SEQ ID NO: 44656 - DNA, 291 bp, Gossypium hirsutum
  Clone ID: LIB3582-036-P1-K1-B12
gccacgcgtgctgccacgcgttctttcactcattcactgcattttacttcatatatactaattattgatcacacgaaccgtactaaatggtcggcatctttcgctctcttgtctaaatcctaaccatatactacagcatggctactggagatactgcaaccgtatgtctcgatgaagtgatagaaagactataatcaatcctacatctgtacatgtgttgacagactatatatgcaaaaacagccgtataccttatcacaggtccaaacgctctagacaccatacttcagc

SEQ ID NO: 44657 - DNA, 581 bp, Gossypium hirsutum
  Clone ID: LIB3582-036-P1-K1-C12
ctcctcttctccaagttgctaggtgtcaatcagaagcagacgtagatgttgctgaagctgttgaaggaggtgagcttgggattgttggcgaggatgttcaggattttggtgatgggaattttggcccagcgccgggagttgaaactgtatgcattttccccaaaaatagtgcgaaattggttgtggctggagaagagactgaacttttagttgggatggaaaatgttgttcatttgctagatttcaatgcttaccagttttgcattagccatgccagtcctctcttatgcttaggggtcacctttaaatagcattgcaatccaagcaagtgttcatctccctttcgatcatcgaatgcttgtacaaaatcttacagcgcagaccttcaacaaagcatctgtgtccccttcagtgcaagctactttcccttacatgtttgctgttagcaggtacttacagcccggaacttttgatcttgtgggtacgattgtctatgaaattcaccagaaaccataccaaaatacattctacaatggtaccgtttgagttgttgaggcttgtggtttcctaagtggtgagtc

SEQ ID NO: 44658 - DNA, 587 bp, Gossypium hirsutum
  Clone ID: LIB3582-036-P1-K1-C4
cccacgcgtccgaccacgcgtccgcccacgcgtccgcccacgcgtccgctgaattgtaaaagtgttccgtgggccttgcatactcccttgtgcagtttgcatagttggtcatctgtaggatccaaagtcaacgaggcttcgtctcaagttgttatggactcagaaccagttcaagagcccatggatgttgatatggatggaagatctggtatctcgaaggaagagctggagggttttagggaagatggggagcttccatctttgctttcagttccatccttcacaaatgatgctaaactgactccactaaagggatctagtcttaaacattccaagcagttggccttgatttcgaagagcattttgtccccaggcagtaggggaaaattacctagtttcaaaaaacatgacgatgactctgtcttcatgctagagactgatagtgaagtggatgagcccctagagacagagactgaaaactcttcttctactcagtgctgtgaaatagctgaaaaatcatgggttgactgtggtatcaaggaatttgttcttcttttaacgaagaaaatggacacaactggacacaa

SEQ ID NO: 44659 - DNA, 554 bp, Gossypium hirsutum
  Clone ID: LIB3582-036-P1-K1-D6
cggacgcgtgggttaacatctcttcttattatttattcttttgcatttgcagttgcacccccactttcatttcatcaccctttctaatatactaattaagaaaacatgtctagcagaaggtcaagatcaaggcaatcaagtggttcaagaataactgatgatcagatctatgatcttgtttccaaattgcagcaacttctccctgaggttcgaaacaggcactctgataaggtatcagctgcaaaagtgttacaagagacttgcaactacataagaagcttgcatagagaagtggatgatattagtgagagattatcggagttactagcaacaaccgacagtgcccaagctgccgtcatccgtagtttgcttatgcaatagatgagttaaattagggttaatagggtgttttaagtaatttaatttttgtcttatcccttcgcatttctgtctaagttatcctttggttatttttagagttgttaagtaggtagctaagaacctagttgaagttcaatgactacataatcaaggaattaaataatatatatttg

SEQ ID NO: 44660 - DNA, 530 bp, Gossypium hirsutum
  Clone ID: LIB3582-036-P1-K1-D9
cccacgcgtccgattaatggcggggaataaaagggtcccattagcttgcatttgatgattgctggaaaaattgctgttgtttgtggttatggagacgttggcaagggttgtgccgctgctcttaaggcagccggagctcgtgtgattgtgaccgaaatcgatcccatttgtgctcttcaggctttaatggaaggtattccggttttgacattagaagacatggttgccgaagcggacatttttgtgactaccactggaaataaggatattattatggttagtcatatgaagcagatgaagaacaatgcggttgtgtgcaacatcggtcatttcgataaggtcatttcgataatgagattgatatgcttggtcttgagacttacccaggtattaagcggatcactatcaagcctcaaactgatcggtggatctttccggagactaataggggtatcattgtgcttgcggaaggacgacttatgaaattggggtgcgcaaccgggcattcaaattttgtgatgtcttgctcg

SEQ ID NO: 44661 - DNA, 446 bp, Gossypium hirsutum
  Clone ID: LIB3582-036-P1-K1-E11
atcaatcgttcgattacttcgaaacttacaaaagagagagagaatccactcgtgtttttacctctacaattttctttgcgaaatttcgcatgctattctctgaaatggataccaatatgggatcacttgacagatgaaaacctacttgcaacgacacttgctgcgccgcaaactgtgccgcttataccatccaaggatccgtttacggcaccattatcaactcctttgaagacactttgggccgccacttgggtaggcagtttgcgcaggtcgtaatacgtgatggaatatgtgatgccggggatgtcaactggactttgatcgagcatttgatagaccagccagggctcaacctaatgggctgctgtaacgaactctacgctgggcacgcagctgatggctacgctcgatcacacggcggaggaccttgcgttggcactttcacc

SEQ ID NO: 44662 - DNA, 251 bp, Gossypium hirsutum
  Clone ID: LIB3582-036-P1-K1-F6
cggacgcatggggaggaacacgtcaatatggcgagtaaccctcttttgctttttccttcccttcggcttgttttgaacggccgactacttcgccagacctttaagcgacaataatcctaaacagagggtcaaagacttacgcaggccacctctgcacccgacacccgaactcactgcgcaggacacaccaccaaacgggggaaccacgactgtcaacaactaacatgtgctggactgtctctaatctggca

SEQ ID NO: 44663 - DNA, 440 bp, Gossypium hirsutum
  Clone ID: LIB3582-036-P1-K1-F9
gtttttgaagcttttccttggaagcattttctgttctgtttattgcatggagggagccctttgaatcacgtcagtctgttgcctcatttcatgtagtcatggctgatcatgctttagtggtagctgatacttctcatacccttgtagaacattcattagttatcgggcaggaatttcctgatgttgaaacctgcagaagaaccttgaaagatattgctatagcattgcattttgatcttaggatagtgaaatcagatcgcagccgatttatagccaagtgctccaaagaaggttgtccctggcgagtccatgttgcaaaatgtcctggggttccaactttctcaattagaactctgcatggagagcatacatgtgaaggggttcgcaacctccatcatcagcaagcatcagtgggttgggttgcaagatcagttgaagca

SEQ ID NO: 44664 - DNA, 621 bp, Gossypium hirsutum
  Clone ID: LIB3582-036-P1-K1-G3
cttaatctctctcaagtctcttcattgaatcttccttcatgaaaaagagtaaaaaatcccagaaaggagtaacatccaacgacaaaaacaaaggaatggggaaggaaaaggaaagggagaagaagtcaagtagccttgaaagtggaagctacaattacaagatgttcagcttcttcaacaggaagttcaagatcaatgaagtggagccaccttctgacgtcaacaaggccttttctttattcaccgatgaaggttccacacatatgacccccgagcaacttagacggttcatgtcggtccaccagtgtgaggttagcacccgactcgaagatgctcagaatatcattgaacaggttgtgaacaggagacaccatatcaccaaattcgccagacacaccctcaatgttgaagatttctttcattttttgctttccgatgatctcaatggccccattcgtactcaggtacaccatgatatgagtgcaccattgtcgcattatttcatatatacagggcataattcctatctaactgggaatcaactcagcagtgattgtagtgaggttccaattatcaaggctttgcaaaatggtgttcgagttatcgaacttgatctttggc

SEQ ID NO: 44665 - DNA, 183 bp, Gossypium hirsutum
  Clone ID: LIB3582-040-P1-K1-B1
aaaaatacagagcttatactgatcatggtgaggaacaagccactactggaagcgcagctctcacatcagtgccagggctacagcagcttagctacgccaaagactgccccagcagaagaagcgcggatgatcctcaccagaagtacgaggactgcccgaagcgaagccaattggaaacacgtg

SEQ ID NO: 44666 - DNA, 605 bp, Gossypium hirsutum
  Clone ID: LIB3582-040-P1-K1-B2
cgccacgtcgcaacaacgaaagcaaatgacaggggagccaatggtggagagcaacacggatttgagaggcccgcggaagggcagaggcgacaaggacgcgaagaggagggagaagaagaaagagaaccgaaaaggaagagacgacaagaaagacaagaagagcgagcacaggaagaagaaagagaagaacgaggaacaggaacgagacggacaagaaacggcttaaaaaaaacagtcagatcaaggagactgaaacacaggacccctgctgacaatactgatgtaggcaacccacgaagtgcccgcatcaccgcagacaacaggaacaaacgccccattcaccaatacaacaaactcagcgccaacaggggagtacacaacaataatgctatctacgcatgcaactgaagcatgaatgcccacagcatcgttgacatcacaaggggaaaaggaaggacacaaatggtgtaagaaaatggagaggcgatactagatgagcacgtggagaggagacagagaataaccgtaccccagaacatgcagaggagaaaaacgcaggaaggcgagggcaagaaaggatcgcattcaagacacatgccaaagct

SEQ ID NO: 44667 - DNA, 212 bp, Gossypium hirsutum
  Clone ID: LIB3582-040-P1-K1-C2
acaaacagtacccaaatcccgaggaaaacggcagaccaaaatcccgacccatctgccgatgaagacaccgacccggccacctgcggcatcgccgacgactgtaccctctgctggggcgacgtctccgtcgctcatcgctgcacgagccaagcgatatatgcttgaagctagagaagagatcaaggatgaaaggagtatcaaaggcgaagaga

SEQ ID NO: 44668 - DNA, 425 bp, Gossypium hirsutum
  Clone ID: LIB3582-040-P1-K1-C3
ctgtcgtgcattcattgacattaatgtcctatagtggtgacattcttacttgggggcactaagcaaaggaagcaggctttgtttccaaaacatgaaaatggtggcgattggtgtatccactgaagatgtgtgaaaataaacagcaagtttgacggtgggacagtggcgatgtttcatgttcttgggtgtttgctttttaatgtaacatgcaagaaaccatgaatttatcctagtgggtgtaagagtatgcatgctgtgattaaaataggacactgtatgtactattttgaaattttagaagagatataaccacgtgggaatagaccaagctaggacacttacattatgtttgatgtttgataagtctccatgtccgacacatacaaagaaattatttcggattatcggatgacaatgcagattac

SEQ ID NO: 44669 - DNA, 505 bp, Gossypium hirsutum
  Clone ID: LIB3582-040-P1-K1-C7
acaaaatttacccaattcccgaaattttccccaaatcaaaatcccaacccatctgccgctgaagacgccgacccgaccacctgcggcatcgccgtcgactgtcccctctgctgcgtcgccgtctccgtcgctctccgctgccgcaaccaatcggtatatgcttgaagctagagaagagatcaagggtgaaaggagtatcaaaggtgaagagaagttagtggattgaagcttggtgttgcacctactgttttgggaagcttattaaggttagtgttctcttgaattttagcatgcttgtgggaaataaaatttaaatctttaccgggcatgattgtaaatgtaaataatatggaaaagaattaatcaaaagaatggcttgctgatataacatctccattgctgccaaatatgaacataaatccaatttaaccttattccataaagtctattttatttaaaattaaaataaatatatagggaagccctaaacccttccttacatgac

SEQ ID NO: 44670 - DNA, 583 bp, Gossypium hirsutum
  Clone ID: LIB3582-040-P1-K1-D1
ctgggactggacatgcaggaaaatcatttctcagctgtggagcatgttggagtcatctttcattgggaaccttagtgttgctattgttattcttctcggtcaacttgcgaggcttggagttgatgctgttggatatgaagataaagaggttgaaaacttgagagccaagttatctgctttcttgtggcaggagactactattagagcaggtctccccatccagcttgcatccgtttctgctttgcttggacttgtatcccttgattttaagaaagctagtctggagaatggtaatctaccaggcatgtcaggtcaatgtgtgcctgcagaacttttaagaaactggtttcttcagttgactgaagagcagcgatcaatgtcaattaggctttttttccaggccgttgactgagattgttgtggttgcaggggaaagtttcaaattgggatacatgtaagaaattttggtaaaactatagtatttgagaaatcaaagtagttgtgggactctgctgcgcaagtgcatcctacagatttgattttgatatggttgaaataaaatataggaattgggggattgtgg

SEQ ID NO: 44671 - DNA, 283 bp, Gossypium hirsutum
  Clone ID: LIB3582-040-P1-K1-D8
ctcacttgcacctgcttgcttacctatttgttgcgaaaatctagaagcttgctttcccgttttagatctgagaaggcaaaaagctctcttttgcatctcatggctgctactatcgtctacgtcaaagctaggcagatctacgacagccgtcgaaatccaacggttgaggctgatgtgcaaacaacacacggtattaaagctaagggccgagtaactaagcgggacatcaactgcaattatcaagactcttgacctgacagaaggaggtaccgatgaccctgat

SEQ ID NO: 44672 - DNA, 622 bp, Gossypium hirsutum
  Clone ID: LIB3582-040-P1-K1-E6
caacaagatttgaagctgtggggttaatgctagaaagtcccttttgtctttaaaatgaaactagatttgcaagttcccaacatttcaagccgtatgattagttggagctgtgaattgtggagattgtagagaagataatggcacttgaaaccctttcatccaacgagctgttgaactttattatctatgatactatattcgcaaccccatgtagcagccatcaccatgagtcattggtcactgatttctcaatggaaaatagtttcagctccttagaacaagctaggaatagtggtaatgctttgagttgtttgccaatggtgaccccaaagtgccgctcaaagggaatggaaaggtccaacttggcagttcaagggaggaaaaaaagaaggagaaagccaagggtttgcaagaacaaagcagaggctgagacacaaagaatgactcacattgctgttgagagaaacagacgaaagcaaatgaatgagcatctcactgttctacgctccctcatgcctgaatcttatgttcaaaggggtgatcaagcatccatagtaggtggagctatagagtttgtgaaggaacttgagcatcttctgcaaacacttgaagctcaaaagca

SEQ ID NO: 44673 - DNA, 506 bp, Gossypium hirsutum
  Clone ID: LIB3582-040-P1-K1-E8
attttcgtagcggaacccgaaaagagaataagcataccagaaatcaagcagcatccctggtttctaaagaacttgccaatagagttcgtggaaggagaaaatgggtacatggaaaatgaagaagaatcacagagtattgaagaaatattgtctataagagatgaagcaaggaagggtggtgatggtccaaaagttggtagtcaattacttggtggaagcatggatcttgatgatgatgacattgattgtgatgcggacatcgatgatttagaaacaagtggcgattttgtttgtgcattacgagtttgagtttgaaaattatgttccgaatcagacgaaggcagtgcattgtattttcatggcttatgggtaactgttctccaggggatgatgtttcattagcatgaaggggattagattaaactaaatgttatgtctgcttctaaatttttaattactccctaaaattcccaatgcttatctcaatgagcagaatgtgttttggt

SEQ ID NO: 44674 - DNA, 670 bp, Gossypium hirsutum
  Clone ID: LIB3582-040-P1-K1-F5
tccctctttaccaaaaaattaaaaaggaaaaaacccaaaaccctcgctctctctttttacttctctcaaaaaccctaaaatgttcatttttctcctccctctcaaaaaccttgatctttccatacaacccaaacataagccccaacatgaaaacaccatttctaagcctttacctaatctgggtatttttcaattaggggtttccccctttcttctcctttgaaaatttgatctattgggttttctttttgtttctcctctttcttatatgaatggctacagggaaaactgaaggtgaagaatcaaagaacgacaacaaagtttataccaggaaaacccacaacaagcccaaaaatccctcttttttccctcaccaatcttctgagcaaactctacccaccactactacagctgattatcacaactcctctcggcagctgccaccccaacacttcgatgccgtggcgtcagatgattcgtctagccataatcagttgcagcggggtgcacaaaatgctaccaacgggactgcaacttctgggcatgtaagatatgacaaccttgttaagattaacttgagtgttctgtccaagaacgatgttagagttttgcagaggaagttaactagagaacttgagcaagttaggggtttacttaagaaatttgatgc

SEQ ID NO: 44675 - DNA, 746 bp, Gossypium hirsutum
  Clone ID: LIB3582-040-P1-K1-G11
cccacgcgtccgtgggattttcaggcacatctaagtttggaatagtaaaatgtggatcatcttctaatgggagagagcctgattcagctgacaatggtgttaaaagtgtggaacgtttacttgaagagaaacgccgggctgagttatctgccaggattgcttctggagaattcactgttcagaaatctggtttcccttctctattgaagaatagtttgtcgaaaattggtgttcccagtggggctcttgaaatcttatttaaaggggttgatgatgttgaagattatcccaagattccagaggcgaaaggggcgattaaggccatccgaagtgaggccttcttcatccctttgtatgagctttacctcacttatggtgggattttcaggctaacctttggaccaaagtcgtttttgattgtttccgatccttccattgctaagcatatattgaaggacaactcaaaggcttattcaaagggtatattagcagagattttggactttgtcatggggaaaggacttatcccagctgatggtgagatatggcgcattagaagacgtgctatagtcccagcgctgcatcaaaagtatgtagcagctatgattagcttatttggactggctaccgataggctttgccagaaactagatgatgctgcaactgatggggaagatgtaaaaatggaatcgcttttttccaggttgacactagacataattggcaaaggcagttttaattatgat

SEQ ID NO: 44676 - DNA, 450 bp, Gossypium hirsutum
  unsure (1)..(450): unsure at all n locations
  Clone ID: LIB3582-040-P1-K1-H12
cccacgcgnccgcngaacnnatgccccnaagccangnccacgcaacaaagcccggggcncgacnnacngaggggaggaagaangggacnngcccnnggcnaaggccngacggnaaaacccaggnnacgggggagnacaacaacganaanggagccanggnnccggnncgngnncacacngnccncancnccacccagcacgacgagaccgnnacnaacgangaaanngcngcngaccncaaagagcangnnancaagccngncancccngaaaagcaccncgangagaagacaancnnccaccnnaacccancnggncggnnngncannggnggcccncacggngaagcnggncnnacnggacgnaagaacancanngacacnnanggnggcnggggagcccacggnggnggngcannnnccggaaaagaaccnaccaaggnngacagga

SEQ ID NO: 44677 - DNA, 529 bp, Gossypium hirsutum
  unsure (1)..(529): unsure at all n locations
  Clone ID: LIB3582-040-P1-K1-H9
gccccacggaaggcncagcacttcgcaaacggggaccggaacactnncgnaagggnncaacannngagcnanngacggcnngnnnanggcgnngncgaaccancgcaanncaagcnaancccgaggaagagggacgnannnanangcancgnaaacgcacgnnccaggnnnaanccnccagnaccnncgggggaccacgggaangcanncgcgnncccagnggcagnagcacaagcagggaaaccccgncaaaacccannagagnanncannagagcnggngaaacaagcaaagaangangnaacggaagaaaacangaaancannagcagannnaagggngannaagggncgaccacannncacggnnanncgancnaaccnggngncggangngacacaagcccggnnnggcgangcggannncgggnggggcanggcagnnnanggngggccagcnaaaggnggaggaggggcaanaccnggagaagcaaggggnnaaaaaccagncaagaacaagaaaggagagg

SEQ ID NO: 44678 - DNA, 378 bp, Gossypium hirsutum
  Clone ID: LIB3583-007-P1-K1-B4
atacaactaaaccgtgtacccactaccggctgcttgacaacacatgcatagaactgatctttatttgactactcaccgtaaatcctaacattacattcaaactcaatgttttttccgatgtctggaggcggtcactggacaaaacacgagcggatcgaatatagttaggttcgggtttctcattttagaatgtggcttttccttttcaactgatttctgcatatttgcaaaggaaaaaagcattgtatatgtaaatattttaataaccaaagatatcattgtattttcttggcctggtttgatttaatcatctatgtataatgtttgttgattcttgttcaacttatagatacagtccccatttccatttttatcctt

SEQ ID NO: 44679 - DNA, 536 bp, Gossypium hirsutum
  Clone ID: LIB3583-007-P1-K1-B6
ctttccttgttccgggaaagaagcttcttcttttttctttgtatatactccatcttttgggttaagaaaggagagaaaaagcggaagataaatggacggtgaacggaatggtttgaaggctaaggtcccatttcaccccagaagacgtatcaacgtctatggcttgccgttgcttcctccgaacaatcaaggagaaaaagatgatctacatgttcaactatggcatgcatgcgctggtccttcagtttatgtgccacacgctggggaaaaggttctgtatttccctcaagctcacatagaacaggtggatgcatgtatgaatcaagatgggataatggaaatgcctatctacaatttgccttctaagatcctttgcagggtgatgcatgttcagcttaaggttgaacctggcacagatgaggtctttgcacaaataacactgattccagaagcagagcaagatgaggaaagtttggagcatagaaattatcaacctttaccccagaaagcttatccagtgttctttagtaagaaac

SEQ ID NO: 44680 - DNA, 551 bp, Gossypium hirsutum
  Clone ID: LIB3583-007-P1-K1-B9
cccacgcgtccggttacaactaaactttaatctttatatccttttaccaaaatgattaaattttagtttctatactttttttttaacataaattggtgcttatatttttataatgttattaactaaataattaatattgttaattttttgattaaaacaataatttttaatgtaatatactattttaatatactgttataaaatttgtaatataccgttttaatatactattataaatatacttttttaatatattgttttaatataatgttttaactttaatatactgttataaatatacatttaatttgtaacacattaaatgttgatgtcttaatgtattatagtgttacttgtcaaacattaaaaatatattgaatcttatagttaaagctggtttggaacttgctgatgatgttgttggtaagattcgaaatggaattaggtacataaaaaagtcgggaattcataggaaaagattttatgatgtggtcgacaaaagttttcatttgaatgtgaccaaaaagttgcgtcaagatgtgtgtgtgtga

SEQ ID NO: 44681 - DNA, 557 bp, Gossypium hirsutum
  unsure (1)..(557): unsure at all n locations
  Clone ID: LIB3583-007-P1-K1-C5
cacagactccagacaatgacattgggaagaactcatttaactatatccaggtcagctttcgggatggctctttcgaacctgagtaatcccaagaacattttggctctgggccccaatagaagcattctcggtaccataattagaccggatccagttttgcttgagcgcaaaggaggacctagtggggatgtcacctttagtaacttgcttcctggagccggggagcctttacaaacacttaacggagaaaagcaggacatcttatgcaattggcagttcgatgatgaagaaccgctgcctcgagggaacggaaatgctggagatgttagtgctcaatcctctggaagaaagaggaaatcttcttccaaaggaaggcacaaaaagaagaaaataaaagaaaacgttgatgtaacaaaggactgggatgaagaaacattcttaaagaaagaaaagagttcaaggaagaaaagttctagacatagccataaacataaagattccaatggttacgggtatcatcatggtggtgcgtnctggagtcgctagaactaccatac

SEQ ID NO: 44682 - DNA, 552 bp, Gossypium hirsutum
  unsure (1)..(552): unsure at all n locations
  Clone ID: LIB3583-007-P1-K1-D10
cccacgcgtccgcccacgcgtccgggaaaccttgaaattgggagtcttagagaagtggatgtcaagtcgggactcccggcgactacgagtaccgaaagactggaactcctagatgataatgagcatatcctaagcataaggattatcggtggggatcaccgacttcaggtttttctctatcattttagttcatcctacatgaagtaagcaatttaatgcattcccttggtgtttatagatgaagatagttgttgattgtataagcattattaaaaagcctgcaactaagtcattggatcttcaatttattcttttggatacagaactactcttctatcatatcagtccatccagagatgatagatggaagacctgggacactagtgatcgaatccttcgtggtggatgtgccggagggtaataccaaagatgaaacatgtttctttgttgaagcattgatcaaatgcaatctcaaatcacttgcagatgtgtcggaggggctggcaatgcangaccggactgaacggatcgatattcgaaagttgggagctg

SEQ ID NO: 44683 - DNA, 550 bp, Gossypium hirsutum
  unsure (1)..(550): unsure at all n locations
  Clone ID: LIB3583-007-P1-K1-D3
aaaatgatgcccaaatcttaagaaaattattattttagggttatttcaaaagctaagccacacaaggaatgccaggtattggccaaattcatctcatctattatttgattcatgaggaaatacatgcatgtagatgtgcaatttgaatgagtaaagttctatcaattgaatttttaaactcaattcttgtatcagttgtaaattatatgagcagatatgtaggtagattttacaaaatgtaaatcccaaacatcttccctttctgtatcttacccaaacatcttccctttctgtatcttacaatttattgatgttattttttcagtttgataggaaaatatatgcaatcaaaagaataggttttttttcactcaattgttattttgctcctttgctattattgaccatgttgttctcttccaaagttgaagatctctctcatttttttgcctgcattcatatggaatgtcctttatgtattatttaccttatattaacatctttaatgaaactaaagcttcttttctcaccaattntttttaaagagctt

SEQ ID NO: 44684 - DNA, 528 bp, Gossypium hirsutum
  Clone ID: LIB3583-007-P1-K1-D8
attggaaagggctcactacggatattaaacagtgggtacgggagtgtgtaatttgtcaacgttgcaaatatgataatgcggtttcacctagacttttgcaaccactaccgattcctgagcgagtttgggcagatattagtatggattttgtggaaggcctaccgctctcacaagggaagtcaactattcttgtggtagtggatcgtctcaccaaatatggccattttctggcattggggcacccttatactgcctccaccgtggctcaggaatatctcacacgcatttacaagctccatggaattctcgaatccattgtgactgatcgcgataaaattttcttgagccaattttggcaagaattattcaagcatatgggcactaagttgaagaagtccactgcttaccatcctcaaacggacggacagactgagattttgaacaaatgcttggaaggttatttgcggtgcatggtgggggagaaaccgtcagcatgggcttcttggttacctttggcggagtggtggt

SEQ ID NO: 44685 - DNA, 605 bp, Gossypium hirsutum
  Clone ID: LIB3583-007-P1-K1-E11
cccacgcgtccggatgaaatgagaagtcaaaagtgtaaaccaaatatatgcacatacactgctctggtgaatgcttttgctagggagggactctgcgaaaaggctgaagagattttcgagcagcttcaagaagccggtcatgagcctgacgtgtatgcttacaatgcgctcatggaagcttacagtcgtgcaggttatccttatggtgcggcagaagtattttcactcatgcaacacatgggatgtgaaccagacagagcttcatttaatatcatggttgatgcctatggtagagctggcctttacgaggatgctgaatcggtatttgaagagatgaagaagctaggaataacgccgacaatgaaatctcacatgctacttctctctgcctactctagagtcgggaatatagctaagtgcgagaatattgtgaaccaaatacaggaatctggacttcaaccggacacctttgtcctaaacagtatgttaaatctgtatggcaagttaggtcaattcgaaaacatggagaaagttttggttgcaatggaaaaagggaccttatgaagctgacattagtacatacaacattttgatcaatgtttacg

SEQ ID NO: 44686 - DNA, 385 bp, Gossypium hirsutum
  Clone ID: LIB3583-007-P1-K1-E3
cggacgcgtgggataaaaaaaaaaaaacaagaataataataaaaaataagaacaaggaactcacgtaagcgatggccattattaaactccaatacaacacacaacaagacaggtttgaatatcttttgttaaacgcatttcaacggggagttgcattgcaacggactattttctcaggacccttaccttattttccttacccgctttttaacagatttgcgtttgataaatccttgttgtgaccaaatttacttgcctcagtcccacacccctctttctccgcagcctgtcatgcaattgaggccctctctgctccctctctttaacggtgaccaaagttctaacggaaacgacactccctgttgcaatgcccttaacattacca

SEQ ID NO: 44687 - DNA, 534 bp, Gossypium hirsutum
  unsure (1)..(534): unsure at all n locations
  Clone ID: LIB3583-007-P1-K1-E9
cttacatttgtccgccgttcttctccttcttcgtctccgcggctggctgatataatattacaaggtcgaagaaaaaaggaaaccagacagagatggaaggcaataaagagaaaatagtagacgacgtcggttcagtagctgaagctatatctgctgatgacgataacgccgctcctctttatcaagtcgaaagcctctgcatgcgctgcacccagaatggaataacaaggtttttattgacctcaattcctcattttaggaaggtcttgctctctgcttttgaatgcccgcattgtggtgaaaggaacaatgaagttcaatttgctggtgaaattcaaccaaagggatgccattaccgtttggaggtccaaccaggagatcccaagttgtttagccgacaagtggtgaaatccgagtctgctaccataaagatccctgaactggattttgagatccctcctgaggctcaacggngaagtttatcaacggtggaaggaatactagtacgagctatagatggactgcaggcccttc

SEQ ID NO: 44688 - DNA, 603 bp, Gossypium hirsutum
  unsure (1)..(603): unsure at all n locations
  Clone ID: LIB3583-007-P1-K1-F12
cccacgcgtccgccaacataaaatctcaaaataaagaaaaattaaaggcaaaagtttccatcgttttctcagcctccaaacaggccctgacttgtcccactgggtaatggagggaaacggtagcagagccgatgccaaactccttctaggaatcgctaagaagcttctccaaggccgtcatttcaaagcctcaagagatgtcgcagtcctcgcccaacaaaccgatcccctcttggaagggccagatcagatcctagccgtcatcgacgtcgttgtcgccgacgtaaaaagaattaacgaccaacacgattggtactccatcttacaaatcgattgccgttcccaagacaacgatctcatcgagaaacagtatcatcgcctaactctccttcttgatcccgagcaaaataagttccctttcgccgatgatgcgtttaagctcgtatccgacgcatggtctattttgtctaacagctcgaaaaaatcggtttacgacaaagaatttgactcctgtacgagaattgatttaagcaccgncggcgatcgttcgtatcatgccggggatcaactgtcaggggagaagcgcanaatcaggaacgcatg

SEQ ID NO: 44689 - DNA, 541 bp, Gossypium hirsutum
  Clone ID: LIB3583-007-P1-K1-F8
cggttatccacttctgatgctgataagtaagtgattaaggtccaccaatatctcctcattccttagtaaatcatcaagctcctctcttactagggccacatcttccaaatcgtgatccaacatatttagggtgtgattagtcattgaattatcttgctctgtaccaacatgtataaattgcctttcaaattaaagccaagaattggatcaacagacttcgcataacttatcttgtgcttcaccctacgctatccatttatcgatcccatgtttatctcatgaattccacccataactgcctcacttgcctttcgtaaccagacactgttcatagccaaagctctttgggattgtgctcttatcgacaaatcccaccccatttcagtgatttccactccaagcgtcatttttggctcacaaaaagaatcaaaccaataggcacatcatgtacttgaaccgcaaaaggggtcaacattaaagacacttgcaactaatcctcccaccaatatagtttataaggtattagcaaatgattattaaa

SEQ ID NO: 44690 - DNA, 391 bp, Gossypium hirsutum
  Clone ID: LIB3583-007-P1-K1-G10
taaatcttcccccaaactcactgcctaaagacatgcaagggcctccactacaaaactcgtagaaggacagtctccaaaaatatgctcagtggtttcgacatctcttgtacacttggggcacattgttgaacttcacaacctcttattgtacaaattatagtagctaggggtgtaatttttaaagattctccatgctgtaatttttattttctctagtaaattgatccaccagagtctcttaaagaaagttgtataattattgtttctaccaatagacttagcattctgaaaaacaaaaaataaaaaatgtaaaagaaatatatgctgatgtaagattgtttataaataatgcaatggaatacgctgatgagggacgagactttcatctaat

SEQ ID NO: 44691 - DNA, 524 bp, Gossypium hirsutum
  Clone ID: LIB3583-007-P1-K1-G12
aacgatgtcggtataattgataggtcatttggattccagacagctgtagaaatggcagagcaagcaatccatgcagctcatgtggaggccgagagtgcagtgaatggaatcggcttagtgaagctaatgggtcgaagcacagggcacatagccctccatgcaacactgagcagccgagacgtggactgctgtttaattcccgaaactgaattttacttggaagggaagggagggctacttgaattcctcgaacaaaggctgaaagagagggggcatgcagtggtggtggttgctgaaggggcagggcaggatttgatacccagaaccacagcccagaaagaggaaagggacgaatccgggaacatggttttcctagatgtgggtgcgtggttaaagacagagctgaagaaatggtgggacagggagcatccacatgagttgtttacggtgaagtacatagatcctacttacatgatacgtgcggtgccagcaaatgctacggataacttgtattgtacactcgt

SEQ ID NO: 44692 - DNA, 512 bp, Gossypium hirsutum
  Clone ID: LIB3583-007-P1-K1-G6
atagcttccatctcgatcccctcgctccgcacccaagctgatcgtttctgcactcacttaacaactctctgcttataaatttaaacccaaaattctcctcctcctagtacgccatgccctgctcttcactggattccaacttggatcttcaatctatgggtgtaaatgcttccatggaagaaccctaagctgaaccaatacaaaattcaaacggaaaagagtttgttgccgttgaaggaacttccgatgaggaaccatatgtcgggaaggaattcgaatcggaagaagcagccaaagtgttctacgacgcctacgccactcgtgtgggattcatcatgcgcgtagaagcgtttcgccgctcaatgcgtgacggcaaagtggtctggcgtcgactggtctgtaacaaagaagggttccggaagctaaggcctcgtagaagtgaaaatcgaaagcctagagcgattaccagagaagggtgtaaagccatgattgtggtaaagaaagaaaagaca

SEQ ID NO: 44693 - DNA, 516 bp, Gossypium hirsutum
  Clone ID: LIB3583-007-P1-K1-G8
cccacgcgtccgtttttttaccaaaaaaaaaatagtttttatatatatggaaacaaaccccaggaggccgaaaagttaaaaagctctagaacttagccctcttatgtaagataacctcccatgcagtctgatccggtccagtccaatccccccatgtatgactactattcattccttgaaaaaaaaaaaaaaaacctcagaccagaaactaatactcctacaagaaaaagagtacatagtcaagagttaaaaacaaattctttcgggagctcaacatatccctctttaattcattttatcggtaaacggacgtaatagggcttcagtttcagttcagttcagttcagtcaatcttgtaaatatttttcttctgcttttcgaagagctccagttccgagttttaaggtctctgattctttatttcctttctaagttcatccatggccagagacagagaatacatgataatgaaaccgacgttgcatttaaaaggtaatccgtggggtggtgggggga

SEQ ID NO: 44694 - DNA, 308 bp, Gossypium hirsutum
  Clone ID: LIB3583-007-P1-K1-H1
cgttcgccacgccttcggtggttttcatggggctttcttcccttccccaaaaaagagaggccttttaccattggagccaaggctttatagtccgaaaggaaaggggggaaacccaaaaaaagaaaaaattgaatacattttcaatcatatacccttagttgatttgtggacctttttggatgctagtggctggttttatgtattgcaggtactaagtgcgctggccgctcgggatatggaaggcttaggcatgggcgtggcttgcttgaagcgcttgaagcgtacgggaggccagtcttttgggtgta

SEQ ID NO: 44695 - DNA, 530 bp, Gossypium hirsutum
  Clone ID: LIB3583-007-P1-K1-H7
gccactgttcccgagtacccaaagctcggtggccatggccttgctttcgttctctcaccttcgaagcaactttcaggctctcccagtcaatacatgggcttgcttaatgcaagcgagaatgggaactcaaccaaccacatattcgcagttgagttcgatactgtgaaagatttagagttcggtgatataaatgataaccatgtcggtgttaatgtcaatagcatgaaatcaattgcttcaacccctgctgcttattttcttgaaaacggaacaaaagaagagttgattatcaagagtggggcaaaaatccaggcttggattgattacgattcggccaaaaatcgattagatgtgaagctttcacttttgtccgagaaaccaagatcttcaattttgtctattgatgtgaatctttcatcaattctccaggatttcatgtttgtggggttttcagcttcaacaggtttgcttgcaagctctcactatgtcttgggatggagtttcaacatgagtggagaggctcaatcttt

SEQ ID NO: 44696 - DNA, 276 bp, Gossypium hirsutum
  Clone ID: LIB3583-012-P1-K1-A4
atgattataatgcagcatcctcagcctcatcttcagcatcagctggtaagttggaatagttcaaagcttaatcatctccttttactctgcccatagggtaatcggatgaaataacgagttcaaggactaccggcggctctcctgtgtagggttaacatattatcatatgttgctagagaatcatgtccattccttgatttagttgctgtaacatgtattcgagagcaaggccgatgctaataactatacatgcattgtactacttaagagtatatg

SEQ ID NO: 44697 - DNA, 610 bp, Gossypium hirsutum
  unsure (1)..(610): unsure at all n locations
  Clone ID: LIB3583-012-P1-K1-B12
cccacgcgtccgcagagagctgttttatagtttccatagggatgaggttccagctgaatctgtgatgcacaagtgtgtagtgcactttgttcccatacataagcaacatccaaaccgtaaacagcatccaggttttattgtgcaaagagtttatgacactgtagagcggaaactttggaagctaactgataaagattatgaggatagtaaacagcatgagattgatctacttgttcagaaaactttatcacgtttgggagatctccctgaccttgagattgatgctgctgctgcagttgttgatcaggaagagcaattgaaagcgaaaagaacactcaggaaaaagaacatttcacctcttgatgttacgaggaacgatgaaggaactacaaggtctgatcaacatatgaaagctgaaactcctggaagctgtacaagtaataccactgaatactacactattttgtcaaaagctaacgtgctaactggagtaacccatcgtgataagtggatggagagggctctncaagcagntcaatatatgtgtaagtcttctgatagcgtgcataatgatgacaaagtaaaaggtggttctgatagcttggaacct

SEQ ID NO: 44698 - DNA, 459 bp, Gossypium hirsutum
  unsure (1)..(459): unsure at all n locations
  Clone ID: LIB3583-012-P1-K1-B8
acgcactggcctaaatggcaccccataaattttggatcccctttgcatttagtaatttttatatgagaatttggctacnnaaaaaaaaaaaaaaaaaaaaaaaaaaaaaaaaaaaaaaaaaaaaaaaaaaaaaaaaaaaaaaaaaaaaaaaaaaaaaaaaaaaaaaaaaaaaaaaaaaaaatccaaaaaaaaaaaaaaaaaaaaaaaagggggggcccttaaaaagaatcaaagttaatctccgcgggcaggaaagtaaaaacttttttaatggggcccctaaaataaaatcaatgggccggggtttaaaaaagtgggaatgggaaaaaccttggggtaaccaaattaaatggcttggaagaaaatcccttttttacaaatggggaaaaaacaaaaaaggcccaaacaaattgcctttaaaaaaagtgcccaaccctaaagggcaaagggaacccccct

SEQ ID NO: 44699 - DNA, 507 bp, Gossypium hirsutum
  Clone ID: LIB3583-012-P1-K1-C7
atttattcatattcactcactactgctctctcaggaaaaaaaaattcaagcttttttgctccaattttctaaagaaaacccccaaattttcttaagtttttttactttgattcagtgttgggtttggtttgcagctagaaaaaaggaagagttgaagagatagtgggggtttgatggggatttgcttaagtgctagaatcaaagctgagagcccaaataacacaggtatttttgaaatttcccggaaaatccttaaaattttccttttatggcatcttatctatgtatttatgtttaagttgctttgatattttattatttgcttttaattaagtgtacttgttgtttgttcccttttttaggtttttggctatggtggtaggtaaattgttgtttgaattttcaagtttgcaatttaggaatttttgaggtcccttgaagtttacttttttaaccaacttttttattaattttgcttgaaaaatcttatattccaaggtttagttt

SEQ ID NO: 44700 - DNA, 610 bp, Gossypium hirsutum
  unsure (1)..(610): unsure at all n locations
  Clone ID: LIB3583-012-P1-K1-D11
cgtcgaataattctccggcttatccataaaaaaaaaaatctccggcagcatgacaaaaaaagaatgccgaattattccggaggaaacgtcgagcgccaccgttaaacggaagcatatttactttgaagaatttcattgtaaccgacaaaccaagcggcaaaaattggtgtcctctgaaactaaaactaaaacaaaaaccctaactctaaacccggaaccggtacgaaacccgccgggttggaatcgtttccacgccattcgtccttgctcatcttcgtcgtctcgggtgcacaaacggtggcagaagagaaacaatttcagaagctcggaagcttctcgcaactgggtcttctcttcctatgattgttctgattgcaaagataaagttgtcattgtttcatataatatacttggtgtggaaaatgcagcaaagcatcccgatttgtatcttaatgtcccgcgaaagttcttaaagtgggatagacgtaaagacctaatatgtaaggaggtcaatcattacaatgctgacatncttgtgtttcagggaggtgatcgtnttaaggatttggatgatcttctgcatgaaaatggcttaaaggtgtttacaagg

SEQ ID NO: 44701 - DNA, 641 bp, Gossypium hirsutum
  unsure (1)..(641): unsure at all n locations
  Clone ID: LIB3583-012-P1-K1-D4
accgaaccggaggtccgggcacggcgtacgctcatttatctctccattttcttcctttatgcccccaataaaggccgagccaaggttattggatggcttgccctagagattttatttttgggtgttgtagccgcatgcacgttgacattgcgcaaaacccatgcccaaagatcggaccttgttggaattctttgtgtcatatttggagtattaatgtatgcttcacctcttaccattatgaggaaggtgattaaaacaaagagtgtaaaatacatgccattttacctctcattagccaactttcttaatggagttatttgggtcacatatgccctcattggctttgatctctatatattgattggaaatggattgggggcactctctggagcaatacagttgattctgtatgcttgctacttcaagtctgccccgaaagacgatgatgaaaacgacgtcgtcaagccatctgagcttcaactctccggcagcaatggaccggctagaccaacagttntgatcgttatatatatatatatgtcaaaaggcaaaaaaagcaaaaagactcttaaatatttttcaagtaanatatacaaatatgcatgtaaagatntcataagtgtgtagaatatttttctttt

SEQ ID NO: 44702 - DNA, 519 bp, Gossypium hirsutum
  unsure (1)..(519): unsure at all n locations
  Clone ID: LIB3583-012-P1-K1-E3
aaaatattgtctgatccaatttaaatagacaattctatcaatttctctttatagttcaaaatttgaagtaatttccttctctatattttaagatatatattttattgattttctagcattaaaattatttatgaatggctaataaaatttaaagtatttacatataaaaaatttgaactttaatatttacattttttaaaattgctccttatttaattttcaagttaaattcagtctatttttaaaaaggagcccattacccgttttctgctgactttacaaatcctgctacttttccatagtttgaaaattaaatactcctttactaaccgtttcttttaatccatacctattccatttattgccgtttctccctatcttcaatcacgtaccccccatttanttggcccgtnnttatctcttccgtatttcccatctattaaactnnntccccaaataccaaattagcccgnnttgggtcttcttctttgcctttgcctttttttccttcccctttcc

SEQ ID NO: 44703 - DNA, 560 bp, Gossypium hirsutum
  Clone ID: LIB3583-012-P1-K1-E6
cagtctctgtatgcacatcggggttgggtcgcccacagtacaatccaactgatctgcctcaagaagaagcaatgaaacgcactacactggaaaccaactcctccaaccctagattaggcgccgtcgtgtcaaccaccatcttgggcacatctccgacatcgtactccgtgcatccgccataccccttaatcagctcctgaagctcctcccaagagtttggcttgtgccaactcttttccctcccttcaagcctctccctccacttagcctcgtccgaaggccggcactccacaatcaggaggcgggctccggccgacgccgctaagctgatgagacggtcgagatgggttctgtgagagagaggagagtcgatgatgacgctgatgccgaggtggagctgagttgaggcgactcgccagatagcttcgtaggagaggtggttgaggagggtgtcggaaccttgtggttgctgatggagcggaaaagtggagtcgcggatgtcatctttgtcgacgagagggaatttgagggctgaggctaaggcatgggctaaagtggat

SEQ ID NO: 44704 - DNA, 511 bp, Gossypium hirsutum
  Clone ID: LIB3583-012-P1-K1-E7
ctggagtaggaggttcagatttacagcaaatttgagatctaagttgatggaaatcatgagaaaaacaggggaattggatgattcaaagagaataaaaaaaatccctgaagtatgagaccttgttttccttcactggatccctaagcttctcagcattaaacttcacatctggttgttctatagtccagtattcatataataactccaatcgatttggatgcatagagttcatgatgcagcgtacttcagaggcttctctctgttggagaggagttgctttgagcactgtggacttcaacatttcactaagatcatgcacattagtataaacctcagtaccctctatgccttgttttacacagtttcataacattgcttttttttttttttttctactttatggacaaacatgtatatttgacttcccctgccgcctcttcttaattaatcatgttgaagtaaagctaacctcatttaaagtagtttttgaggttatttgtcataaatgaat

SEQ ID NO: 44705 - DNA, 341 bp, Gossypium hirsutum
  Clone ID: LIB3583-012-P1-K1-E9
ttgtctccttgcatgtcgaaaatcacaagtaacaaagttattgcataatcgttaagcatcaacaatatatgctctaacttcagatccatcttcctccccactttgtaattttctaatgatagttaacgaatcaccctcgacttcaacttttaagaatccagactttgccccaaattgaatcgcctagacgcatgcgaaagcttttgctgcgaatactgttggtatatgttcgtttctgtatatttttgtttttaagacttgacccaagaatttctgataacaatccctgtacacaatctattattctatttttcaaatgtagtgtcaaaattgattttgac

SEQ ID NO: 44706 - DNA, 567 bp, Gossypium hirsutum
  unsure (1)..(567): unsure at all n locations
  Clone ID: LIB3583-012-P1-K1-F8
cccacgcgtccgcccacgcgtccgcaaacattccaaaatctcacgcatgttttttggtatggtccactaaaatctccaaatgcggtttacaacctggttgccttaggggattgtccctctctcatagaaattgcagtagattttcgggaggaaagtggggctgtgttttgccaatgtataagcgaaggtcacgtggcagatgaatatgaggagggcgagagttcacaacgtaatccgtacgaaggtggaaatctggaaacgctggaaatagctgaggtgagatgcttttcaggatttaatggtgaaatgttgttggtgaggttgctgttggagaaggctgtgaatcttcgaaaactatggctgttttggcggctgggtgatctgagtgtgatgcatgacaatgtgttacaagatattactaaatttggctaccctcaacaactttctgatacaatctaggaagaagctaattctattatagcaaccatccttgattttcgtaaaggttctcgtgctcgaatcaaatttggacaagaatggcgaatngaatcctggagacgtcatttt

SEQ ID NO: 44707 - DNA, 577 bp, Gossypium hirsutum
  Clone ID: LIB3583-012-P1-K1-G4
cggattccggtcgaccacgcgtccgcccacgcgtccgattcatattcactcactactgctctctaggaaaaaaaaattcaagcttttttgcttcaattttctaaaaaaaaactgcaaattttcttaaggttttttactttgattcagtgttgggtttggtttgcagctagaaaaaaggaagagttgaagagatagtgggggtttgatggggatttgcttaagtgctagaatcaaagctgagagcccaaataacacagggttgagttcgaactatgttagtggtgatacgagcagcaaggtctcgtcggtttcgatgccattgacgcctcggagcgagggtgagatcttacagtgcaccaatttgaaaagcttcagttttgctaatctcaaaacggccaccaggaatttccggcccgacagtgtgctcggggaaggtggttttgggtccgtgtttaaggggtggatcgatgaaaattcgtttaatgcttcgaaacctggaaccggcattgttattgctgtgaaaaggcttaaccaggaagggttccaaggtcacaaggagtggttggctgaagtgaat

SEQ ID NO: 44708 - DNA, 514 bp, Gossypium hirsutum
  Clone ID: LIB3583-012-P1-K1-H4
cctgatttcaatcagctcaccgtcacactcaccgccggctcttcgcctatcctcgtttccaggtctaagattttgcggtggaaggaagatttcagttggagctagagcaggggtgaatggagcttcggagacgacgtcgtttgaaccttacttggaagaaatggatgtcgtcacgtttcttgatcctcctaactatttgattcctttggatcctggttcttataatccagctgcctatctctggaaaaaaattgaagacataccagaggaaagacgtcatcgattgctgcaattacttaatccgaggcttatttcaatagcttgggagatagctggcacacgataccatgacccaaagtttgtcaagaaaactgattccaacattcgttttaataaagacgctgcaattccgtttcatgtctataactgcagaaccagtggaggtccatttcttattgcttggttgaaattcttcaagaagactatattttatggcaataatgggaagacatat

SEQ ID NO: 44709 - DNA, 532 bp, Gossypium hirsutum
  unsure (1)..(532): unsure at all n locations
  Clone ID: LIB3583-012-P1-K1-H5
acgcctacgcgtncgtccacgcgtccgcccacgcgtccgggaagcttgaaaccatcaggttccaccaccggctcgaccaaatctctctcgattagggtatttgacgaaaaagaagggaatgatttgactccggtttgcttggaagcgtgccccaaggaacatgctgtgaccgacattgttggtgcaggaaatgcatgtatgactaaagaaacagcaatcatctgcacaagagggggtcaaacactttggtctgatcgtatatcaggaaaagtttcggtcttagccggaaatgcaaacttttgggctgtcggatgtgaagatgggtgtttacaggtttatacaaagtgtggaagacgtgcattgccgaccatgatgatgggatctgctgcaacctttatagattgcgacgagagctggaaattattattggtgacgaggaaaggatctttgtatttatgggatctcctgaataggaattgtctcctccgtgattcattggcatctctaatcactttggaccataactcgtcta

SEQ ID NO: 44710 - DNA, 406 bp, Gossypium hirsutum
  unsure (1)..(406): unsure at all n locations
  Clone ID: LIB3583-012-P1-K1-H8
cgtttaatttggagcacaattatgcatgggccacattcataatgttcaatgtagagctagaatatcttggggccttggtcatattttttagcaaatttctgattacgatacttccttgtctgtgatcttgcaagattttcatgtcgttatagttctctaagatctacataatgtaggggaatagaccatagaaacagcatatcacatatttatatatcagatggagtttcaaccatcctatggtaattntgcaactcttatttctcgttattttcaaaatatagttctcgtatacatggtttaggtggtttcagtgatttcatagtcaatgtcgttattattgcagatagacaatgtctatttgatcatgcaattgtctatagagtggatgctaaatatccttgct

SEQ ID NO: 44711 - DNA, 605 bp, Gossypium hirsutum
  unsure (1)..(605): unsure at all n locations
  Clone ID: LIB3583-019-P1-K1-A10
gaaaaaggcccgaaagaatggcttgctaaactggcttaagcaccgaaaacgtgatagtggtatggagtcaatgatgagtgccagtgataagtcaagtggaaataaatctaatagtaccccttcaacccctaaatcaggaagtaaaaaattcaatgtggaatctaggctttcccaatccttgtttacagaaagttctctatgcatggatcttctctcagatgctagacggcatagagaagttccagagaacgattaccttggacaagagactcctttgacaagcctaaaagcagttgatcagatagatctactaagggagcagcagaagattttgtctggagaggtagcacttcattcaagcactttaaaacgattgtctgaggaggctgcaagaaacccccagaatgaacagattcaggacaagatgaaaaggataagtgatgaaatcaggggaaagaatgaacgaattgctttgctagaaaagcanaatgctgattccatcaccgtttccagccatatggagaaatcagaaatatcacaatctacttgtgctgaatggtggcgcaattaaatgagaaatcctttgaacttgaagtaatgtatgc

SEQ ID NO: 44712 - DNA, 493 bp, Gossypium hirsutum
  Clone ID: LIB3583-019-P1-K1-A7
gtatgttttcgctcatgcacaaatatctttgagtgtcggaaaccacggaaaaacttgtaaaccttagaaaatgtatgttctgtctcatatgttgtacacatgatgcacaacaggcaggaaaaatagagacaaatacgattggggttatgacagagaggaaagaaatttagggtgaaagagcagaaattctgaaacaagagattgaaccagtgggagaaatatgaacccagaaaacataaatgtccatgtcttaatgccccataatcaaaaaatagttggaaaacatggatactcctagaaagcacagttcttttctttcatgctgtcctttgttgtttactgtttccaaataaaatatctcacctatgctaactatgttactcagactctgggggaagtattggatataggcatgtgctgacatgggtatgttcttttttttaaagatctttctatgtattttgaggattcttggaggattatatcctcatgc

SEQ ID NO: 44713 - DNA, 496 bp, Gossypium hirsutum
  Clone ID: LIB3583-019-P1-K1-B11
gccacttgcaaagtgaaaacctgagaatcagctcccttttccgtctttatctctgcatttcaagtgcggccctaaaaataccaacgcaacgtttagtttactccaccgtcgtttctggactcataacactatggcgtccatgatattatctgatccttcttccgctgcctccgtccatcgcctctcctttacccgtttcagcaatagtctcgttttccttcgccggtttgtgggtccacttcatgttttctcacataccgctgcccttcctcgagccctctctctccacgctccacgttcttctcgtttcattacagcttcaatggctgctgagccatccgctaaggtgatcgatgggaaatcagtggcaaagcaaataagagaagaaataagtgctgaagtaacaaagctgaaggaagcaattggagttgttcctggattagccgttattctagttggggataggaaggactctgctacttatgtgcggaacaag

SEQ ID NO: 44714 - DNA, 462 bp, Gossypium hirsutum
  Clone ID: LIB3583-019-P1-K1-B9
attgaagttatggtgggatgctcatagatctgtttctgatgaacagcaaatgtatcatccaaagactgttccaggttcaagtttagttcgcagcaactctttggttcatggtcagcatttagattgtggtgctagctcaatggaccctgtaagtggaggaaactccagcaaccctaatcttgcatcgaagcaacgattgcgctggacacatgagctccatgaccgctttgtcgatgctgtagctcaacttggtgggccagatcgagccacaccaaaaggagttcttagagtcatgggtgtgcagggtttgacaatataccatgtcaaaagccatttacagaaatatcgacttgcgaaatatctccctgattcttcttctgatggtaaaaagcctgacaagaaagaaactggagatatgctatccaatttggatggttcatctggcatgcaaattactgaagc

SEQ ID NO: 44715 - DNA, 215 bp, Gossypium hirsutum
  Clone ID: LIB3583-019-P1-K1-C11
gctccacgcgtcgcgagctgggcgacgctcttcgacaggattcggacgtcgtgcgcgtacacatattataagatatttatatttataatgaatatgattgaagaagcagaaaaattattattaaagagattttaccatgttaaagaaatgttattgatgcttgatgaaaaatatgtactaattgtagccatttttaataaaaagttaatttattt

SEQ ID NO: 44716 - DNA, 494 bp, Gossypium hirsutum
  Clone ID: LIB3583-019-P1-K1-C2
cccacgcgtccgcttcttttctcgagattcttcaaatgcttgatttttgtcgttagtttttttacttattattagccgccgttgaacggggctgagaatatatataatttaaagtaattaaagatgcaaaacggcgtcgccgccgacggagtttgctcctcggagtccgcgaatgggagtcgagatgtttggagttgtaaaggttccgattcttcatcagctgatcatcttgttatcatggtccacgggatcctcggcagttcttcagattggaaattcggagctgagcaatttgttaaaaggctaccggataaagtatttgtccattgcagtgaacggaatatgtctaagctgactttagatggtgtggatgtaatgggtgaacgactggcaaaggaggtccttgaggtaattcaagaaaaaccaaatttgtgcaagatctcttttgttgcacattctgttggaggattggtggcaagatacgcaattgggag

SEQ ID NO: 44717 - DNA, 503 bp, Gossypium hirsutum
  Clone ID: LIB3583-019-P1-K1-D1
gctaacttatccacaaattctggtttgaacaattctaaggattctagtcctactacggcttctaagtcttctttagaacatgaggcttctggttcctctacaagttctggttctttgtcaggttctagtgattctaaggcttctggcttgtcatcacattccagttctataaatcatggtggtgctacagcaattctaaggattttggttctggtgcaactcactcttcatcaagttctggggcttctggttcttctacaagttccagttctttatcaggtttgaataattcaaaaaattctaagacttcaaactcttctttaagtcatgatgcttcaggctcttccacaagtttaggttctaacaattccaaggattcaaaatcttcatcaaaatccggtgcttctagctcttctacagactccaattctttatcaggttttaacaattctaaggggtctggatcttttcaaacttcaaactcttcatcaaatcttagtgca

SEQ ID NO: 44718 - DNA, 503 bp, Gossypium hirsutum
  Clone ID: LIB3583-019-P1-K1-E2
gtgaaaatgtgccaccacctgtaaatacatttgttgatatagatttaggggagcttttgaatcaaaacattaggagatgcaagtatgtgaaaccgactccagttcaacgacacgctatccctatagtattaggaggtagagatttaatggcttgtgctcaaacagggtctgggaagacagctgctttctgctttccaattattagtggaattatgcaggaacagtatgtacagagaccgcgtgtagcacgaactggttaccctcttgctctcattttatctcccacaagggagctttcttgtcaaatacacgatgaggtgaaaaaattctcatatcaaactggtgtcaaggttgtagttgcctacggaggggcaccaattacccagcaattgcgagagctggagagaggagttgatattctagtggcaactccagggcgattggttgatttgctagagagggctagagtatcattgcagatgataagattcttagcgctcgat

SEQ ID NO: 44719 - DNA, 597 bp, Gossypium hirsutum
  Clone ID: LIB3583-019-P1-K1-E3
ccaccagagaatagcgccggactgtgtcccatcggtccaccatactgcccaggcctaccaaaaccaacatactgaccaccgcacatctcctatctagtatgagcagatgagaatcgcgccaccgtcggagcagtcagaccgccatactcacggttgaaccagtagaagcaccgttgcgctagatggccataacggtcgcaaatctagcactgtatacgaggacgaaagccacgcccgcgtgaatgaccactgcacacgtcactccgaacagactcaatctctggaggagtttcgaccagattggcatgcatcagtacatcaggcactgtccgtgtttggcggcattcgatctctaagagcacgtcgacaagcttttggaacggaagagcctccgatgagaacaatgccagggttaccacagcatcaaactccgatggtagaccgacaagaataacttccacctttttggtctccgaaacactagatccaaaggcctcaagcagagcacaccagattcttgaattttgccaaggaattctttaacaagtgaactcacctttttttacggaatgcaattcatgcctaacacgagacacc

SEQ ID NO: 44720 - DNA, 505 bp, Gossypium hirsutum
  unsure (1)..(505): unsure at all n locations
  Clone ID: LIB3583-019-P1-K1-F9
cccacgcgtccgttcttctccactagcaaaccctatacccctcttagccttaacattgatccaccaccatgacggcggttagtagtttcaaggcctcgatgagtcgattcttagccttgaggttctcttcagactttgatttcaacgaagtaaaagagaaccatcggcctattcgcaaggttctacgggagcgtgggactactgtacggaggagaaggccacgcaagccgtgtgtgggcatcgctcgtgggagcctgatccgctgctattctgacgtgttccagaaacttcgttgttttgggcctgctttgaaattggacggctaggggcaaaaaccattgctgcggcgctgatcagaatactagggtttccccttctgaaatcggcatttgggtcattcaagctattgngccatttttgcatttgggccttttgggtttacttgggttatgttttaatttgggtctggtttagtttagtttaataactaggctattattataac

SEQ ID NO: 44721 - DNA, 485 bp, Gossypium hirsutum
  Clone ID: LIB3583-019-P1-K1-G4
cccacgcgtccgagctcctatgaagctatgaattaaaagcaccatttctcatttagctttgttttttgtgtcaactcttctatggggaagattggaggaaactcttggttgactgcagtcaagaaagcctttaggtctcctactaaggaaaacgataagaggagctgtagaaggagagaagatggtgaacaagaggaagaagagaagaaaagagggaaacgaagatggattttcaagaagccttcgtatcaggaaacagtgatacaacacagtgaagcaagcaccatagtcacaataaccaatgctaaagttgccactaattcagaaacctcagcactgaataccgttcccgaagctgagcaaagatcacatgccattgcagtggctattgctactacagcagctgctcaagcagcagtagcaaccgcacaagctgctgtagaagttgttcggctcaccaggccttccgttttcttgagagaaca

SEQ ID NO: 44722 - DNA, 490 bp, Gossypium hirsutum
  Clone ID: LIB3583-019-P1-K1-H12
gtactgagctgcagttctacgatatgttagtatagctttattgcaataaagttagtatagctttattgcaataaataccttgactgtcaatatattctgtataatattcgaagtgatactgtggcttggttatcctgagagaatcttatagaagctaagaaccaagcattacagacattgcttttacttttttcaccgaaacagaaatcagcttcactttccggttttgatataatcagctttcacaaattccctcggtatgataatgttgcaaatgaaacctgctgtggacttcaataagtaccgttgctgcagttccatggaacttggctattggttcttcacatggtcattaacaactgtttaagaactttggacttcagagaaccgatatctttctcttttgtttcccaaatatttaaataaagaaaagttgataccttcctaatatgccttcttttttactataaaatcttcataaaagccatac

SEQ ID NO: 44723 - DNA, 590 bp, Gossypium hirsutum
  Clone ID: LIB3583-024-P1-K1-A12
attaatctcagggcttgctttggtacaacaaagtattgtcatgcatggctgagaaatgtgccttgcaacaatcctgattgtctatatttgcatgagattggttctcaagaggatagtttcacaaaagatgagattatatcggcatacacaagggttcaacagataactggtgcaacaaacaatatgctgtggcctgctgggaatatgttacctccgccggtgaatgattattgccccacccccagttatgcttctgcagcaaaacccatttctaaaaatgctccaaataatacaacagtgtgcattcctaaaggttcttcgccaaatggaagcactggaagatctgttgctcttcctgctggagcgttatggggaatgcgtgctttaaaccatcctcaaacagctggtttagcgtcatcaaatggaccgtctaagcagaaatctgatacggttagaagcgcattaccattttcatctgcagtaacaaacacaaatcataattacccagtacatggagatgttataaagaagtcatctgagaggatcacgatatgcaaatgaaaggtaacagcataatgctgatttggatt

SEQ ID NO: 44724 - DNA, 497 bp, Gossypium hirsutum
  Clone ID: LIB3583-024-P1-K1-A2
aatcttttgtatatggatggaataaagttgttggttctgtcgatgttgtgttgttgagtgttaagttgagtggtaccagttgtgaactttgggtggaaagtagatatctggaaagtcgataagcaacctatgcttccacactatgtaatttggttgccggatttaaatggacagttcctctccggaagataacagcaagcaaactgaccaatacccgttgctaatggaacgtgtggaaagccatagcgatcaagagcacatcattaacgtaacatggcatgacgagcttgacgatgcttcttcgagctcggctctggatgaattatcctctagagtgaacttagcacggaatgaatatagatcttcaagcagcacacaagcttccggatatcagacttcttcctcaaacgggttgaactctcagaattcttcattcatgaggcatcgcaagagccctttaaactctgcattatggattttgttcgagttactgttta

SEQ ID NO: 44725 - DNA, 429 bp, Gossypium hirsutum
  Clone ID: LIB3583-024-P1-K1-A3
atatttctggcttcatcgaagtaagacattgtatcaggtcggtaccgtcgtaaactagctgaaacgaggatcgagcttggatcgaaactatggcggcggaatcggagatcggtgccggacttagctcctcacgtggtaatggcgaccattcctgagagtgtactgtggctattcgatgcaggcacactacctacacacgtatactcagctttaataggaggcgtgctatgtcatatggcgcaagagatctttatcaacctgacatggtaggagccgatgctctaggcttatgctgcattgcttttttatagacctaagtgcgagagtactacatacttcttgagtatcggttatcagactggatgccatgtatatgacatgagagtggatgcatggcaggaaggacgcatagaagccactagagcatag

SEQ ID NO: 44726 - DNA, 507 bp, Gossypium hirsutum
  Clone ID: LIB3583-024-P1-K1-A6
gctgatagtattcatggggaggcacaagtcaggttccgtagcttcgctcgtggctctctcacttgactctggcttgctttgctctgccaaagactttcccggcagaagaagcgagggtgatcctcaacagaggtacgaggactgccgcaagcgatgccaattgaagacacgtggacacacggagcaagacacgtgtgaagacacagcgtgaaactgcagtctgaaggaggagcatcatcgtgacggctaagatcctcagagcgagataccatgattgccgacacacactgccaacaggaaagaaagaacgctgtcatcacattgcgaaccaagctgcagggaacaataccagaaacagtagcagcagcagactgacaagcgcttcaaggagtgtcaacagtcttggcatacggcagagcaaaggcccgatacggaagcaacaatgtgcgaaggaatgcatggagcagaaccaagaggatccatgcaatgaacagagagaaaacttgt

SEQ ID NO: 44727 - DNA, 496 bp, Gossypium hirsutum
  Clone ID: LIB3583-024-P1-K1-A7
cagagaacggtctttgatgaagcggcgtcagcaagtttaatagaatggcggaagttacgagcatgaacaactgctccaaagacggcggagccaccgaagctgtgactaataacggctgtactatcaacggtaccggtaaggatatgattaaagtcactgtaaagaaagcgaatgtgaaagatccggaaattttcagttgcttggttcagccggcgagttccgattcagatctcgattcagtcggtgttcggcgatttctactcgctcgcaaagctgagtccggtgttcatcgccgacttgattggagatgtaatggaaaaggttatgtggcctatcgaaattacattcgtaggccaagaaactgggaaaattcacaaataccaagctatccaagcactcctggaaacagtgggcgatggatgttaacttcaagtccactctcgcgtttgtccgaagtggaaagctggagctcaagccaggtatgtacaacatttgt

SEQ ID NO: 44728 - DNA, 333 bp, Gossypium hirsutum
  Clone ID: LIB3583-024-P1-K1-A9
gtattatatcaaggctttaacctccacgacgaagccaaaggatttaatgacatgctgaggagaagggctcagagccgaataaaggtgggcaaattattgctgttgattgcactatatgaaggcaccatgtctgcgttagagctacacgcatggcgaagaacaggaatgcggtcagggacaagtgtactgtgaccattgtcgtgcttggatcgaaacaccaccgactagaaacatagttgatgccaagggtagcagtgagatcatccaaccagaacaccgaggatgtgctgtaccagacggaatgacacgcgggcttagctggacagtacatga

SEQ ID NO: 44729 - DNA, 181 bp, Gossypium hirsutum
  Clone ID: LIB3583-024-P1-K1-B10
aacacgcgtactggcacccgtgcagagatctatagtaatagttctagtgtaaattgctctgccgtggatgaccaacaatcatatgtgcttgaacatgaggatcgatggtcaagaagccatccttgagaagcaggcattggtggattcaggcagacagactcttagcattacattacatact

SEQ ID NO: 44730 - DNA, 444 bp, Gossypium hirsutum
  Clone ID: LIB3583-024-P1-K1-B8
tcggggaaggacgccaatgatgaagttaaatggctttcccaaggttcgaatagagtagtaaaaagatatagtgccttcctcatcaatggaatagttgttaatttttcaattacaagttatgctagtactagagacagtaatcttgttgagggaaatgtggagtattacagacttcttactaacattattgagttggattattatggcatatggaaagttgtcttatttcgatgtgattgggctgatgttaaaactgcttgcagaattaaacaagatcaatttgggtttacaatggtgaacttctcttgattcacattggacaacaattgattgatgagacgaatgtattttcttctctagagaaacaggttttttactcaatagatccaactgatgagggttggtacgttgtacttcgtaacatggctagagacttgtttgaca

SEQ ID NO: 44731 - DNA, 513 bp, Gossypium hirsutum
  Clone ID: LIB3583-024-P1-K1-C6
cggacgcgtgggcggacgcgtgggttaccctagaggccgcctttactcctctatccagtcagccatcgccgacgtccctcgggccaactgataccaccggagtgcagctctcttactctacaatctatttttcggcttaaagactctctcactctcaccgatgccgccgacatcgtaatgatttttcgaggcgatcttgtcaggacttaactcgaatgagaaagaaagcactaagaagaagaagaagctatgggaagcacaagtattgctactttcaactggttgatgcgataatgtcgttttataattggtggttgcgaggtccagttttttagatatatcatagtcaaagatttggccaactgatgaaggcttttaaagtggatcaaaatgttctccacggctcaaagtattgtgatattaacctaaatggtgctctgcattttaatgcaatgttatattcactggacaagtgactgcgacatagagggcttacctaatgaatggttcgaa

SEQ ID NO: 44732 - DNA, 515 bp, Gossypium hirsutum
  Clone ID: LIB3583-024-P1-K1-D3
cccacgcgtccgctttacattttagtgcaataataagtaaaatcactattcatgttcacttcaacttagattaacattttgtgtcatttgtctccatggtggtatgaatttctgattttatatggttcaacttttttttccttagatgtgatagcttgaggtgtcatgcatgtgaacaataggatagaatttgagagggctttagtacaagatagtactgcataagatttcaattgatgtggcaggttaggacatagaatacttatgtacaagcatgcttaagggtgcaaaagacagggttgagcgcaccaagtgtgttatgtagtagtattatatacctggcaaagtgaggtaaagagggaatagcatatgttgtttaaagtgaaaaggaacatatcctatattggactctgaaattgatgtctgagctacagaacattcttatcaaaaatagagaagggagaacatgggtatgtgcagcctatgttactcaaactcaggaatgagtatcagat

SEQ ID NO: 44733 - DNA, 163 bp, Gossypium hirsutum
  Clone ID: LIB3583-024-P1-K1-D9
tcgacccacgcgttcaagaaacattctttttacgaatatgggtcttctaacggggagggaacagtgtgcatcggggaggagctcataatacttcctgcacagttaacgaagagtctagggattttaataggcaataagcatagcatgatcaaagctctcacca

SEQ ID NO: 44734 - DNA, 453 bp, Gossypium hirsutum
  Clone ID: LIB3583-024-P1-K1-E5
cccacgcgtccagccacgcgtactgccacgcgtgcgaaacagaagaacagtcaaaagcaaaaattagatggctcggaaatgctctgtcggtggcaactgacaatgcaatgggacatctgatgaggttcaagagatcgctacaacattctatgaagctgaagctccttatgaggatgttgctgaggttagatgcacgccctgcatatgtagacatgacgtttgtgaaaaggctgatgcattctgagcagcatgtagctgctaagaactgttgagtcacgcaaaggcagagctttgactggagacatgaaggttctgatgctagttaatctgggcgtgtgcaagactatcataacttaactgtgcaagaacggctctactgaatgagaaaaatgcgtttgtacgaggacagacctcgtatgcactgtatcaacgtttgaaggtgattgcctgcat

SEQ ID NO: 44735 - DNA, 519 bp, Gossypium hirsutum
  Clone ID: LIB3583-024-P1-K1-F3
cccacgcgtccgccgataacctgtttatgtttaattgatttgctagaatgatgagtaacatttgtgtagggttgcaaacgagacaacaatgaatagaaaacaaaacttgatgctataactgcaggatagcttcctgctcgactctaaagattagattaaatcgttaatggtttcaatttctcctagactgcaatcctcttgtaaggatctctcttaatttcttctactgtgtatagatctcattcctggtgatttcatccatgtgctcggtgatacacatgtttatagcactcatgttaggccattgcaggagcagcttcagaaactgccgaagccttttccagtgagtatagtgaattaatctttaaaaaccagggaaaggtatttttggttcccatcacccttcaaccttatttcttctgaagcatttttcttaccatatcggaatgcagattttgaagatcaatcctgagaaaaagaacatagattcctttgtggcatctgatttcaaactcatag

SEQ ID NO: 44736 - DNA, 314 bp, Gossypium hirsutum
  Clone ID: LIB3583-024-P1-K1-F9
aatatacagagctaagcggaggcacaaggaagaataagtaagcttgcgcagttctgctggggctggcctttgccttgctttggcttgccaaagactgccaaagactatgaagcaagaagaagcctcgacagacctacgaagacggacaaagactgtcccaggcgaagacactgggacacacggagccagacagagcatcagacaggtgaaaaaagcagtaaaaggcagagcagggagaatagatcaaacgattctcaaacgacataccaagaccgacaacagcaatgacaagagtaagaaagaatgccgacaac

SEQ ID NO: 44737 - DNA, 594 bp, Gossypium hirsutum
  Clone ID: LIB3583-024-P1-K1-G12
ggactggttcacttcgactggctgctgcgcttatagaacgatattttcccaggggagaagttctgatatcatctcccacgtggggtaatcacaagaacattttcaatgatgctaaggtcccatggtcagaataccgatactatgaccctaaaacagttggcttggattttgaagggatgatagcagacatcaaggcagctcctgagggatcttttattcttcttcatggatgtgctcacaacccaactggtattgatccaacccctgaacagtgggaaataattgcagatgttatccaagagaagaaccatattccattttttgatattgcataccaggggtttgcaagtggaagccttgatgctgatgcagcatctgtgaggatgtttgtggcccgtggtatggaggtcattgctgctcaatcatacagtaaaaatcttggcctttatgcagaaaggattggtgcaattaatgtcgtttgctcatcaccagatgctgctgcaagggttaagagccagctaaaaagaattgctagaccaatgtactcaaatcctcctgttcatggggctaggattgttgcccaatttgttgggg

SEQ ID NO: 44738 - DNA, 354 bp, Gossypium hirsutum
  unsure (1)..(354): unsure at all n locations
  Clone ID: LIB3583-024-P1-K1-G8
ggggcgggaaagcncaacangcaacaaccnncncngngccnacgacagaaacgaccncgcggaagcgggcaacggagaccacgacaacangaggaaaanccaacgngcacgaggaaanagaggcaccaacaacagagncagggacagacgccaagacgnaacaccacccagaanggaagaagaagaacgagaggagcgccagcaggagcagcgagaccgacaaacgagaggaggggcaaaagaaaagggccgcaaggaaacaaccagcnccaagaggaacaaggagaaccnggcagacccagaacgggccgacagagagaacccacaagccgggcagaaaaccacccgcaacag

SEQ ID NO: 44739 - DNA, 372 bp, Gossypium hirsutum
  Clone ID: LIB3583-024-P1-K1-H1
tcgtgagaaccaaacacgcacctttagtaaccagctcttactgttggctatggcttttatctagcgtttatactaaaaaggagatggtggtggctttttattctgctctgccatcgacattcatgataatggaagtccatgcgaattgtttgatctggactacgattttcgactatctggacaggctaaatacatcgggtattttcactattggaacaaaaaggctatatgcatagggagcgggtaattactatggatgctatcgatgacagactctgcaaaagctcaccattatgtcattcttctgtgctcctgaaggctctgtacgctagtgcatatgctcgtatgatgagatcctcctacatacctgaa

SEQ ID NO: 44740 - DNA, 268 bp, Gossypium hirsutum
  unsure (1)..(268): unsure at all n locations
  Clone ID: LIB3583-024-P1-K1-H10
cccacgcgaccgaaagaaatngcctagggatgaagaccgacgcggaggcactcgcagggagggaggacaanngcccacaaggacaagaccacgagancgagaggacaaganaagcagaaaagggagaggacgcgagggggagangaagcgggacgaggcannagaagaacacagnganccnagagacgccgacgangcaagagaagcaacgaagggncgagacaggganggaagccggaagaaagcagaaaaagccaaaggagcgccc

SEQ ID NO: 44741 - DNA, 508 bp, Gossypium hirsutum
  Clone ID: LIB3583-024-P1-K1-H2
tcgcgagaaccaaacacgcacctttagtaaccagctacttactttagcgctaggctattatctacagtgtatacgagaaacgaatggtcgtggctttatccacttcatttccattgacattcttgataagggaagtccatctgaattgttcgaactggactacgattatcgactatcttgacggggtcaatatatcgggcatcctcagttttggaacaaaatggctaataacaaaggttgtggcaaattagtaaggatgctaacggatgacagactctgcaaaagctcaccattatgctcttctttggtcccctgcagaatctgttcgctatcgcatagcccgtaagatgagatactcctacatacctgaatgagtgaagactttgtaattatataatcatatagggaacatcggttgctttattttagaatccaactatcgaagaaggaaaaaaagatatctacatatggaaacatatacaatgtaggggaacctatttaaaggttc

SEQ ID NO: 44742 - DNA, 555 bp, Gossypium hirsutum
  Clone ID: LIB3583-024-P1-K1-H4
aaaacatgctgcacatggtggattctcctcatatacgaacaacgcttcatcgggcaggaatcagaaccttcaccatttccctcatgttatgaatttgcacaatgcaaggccatcatcaggtgtggcccaagcatatgggtacatgaaccacatgtaccctagcaacatgacctatgatcactatggtaatgccattagaggtggttctggttttggatcatatggttatgatgcctggaagaaaggactagggtggtatcctgttggtaacaacatcaaatcaaagggtcgtggttatggaaaagaaagtatgaatggtttaaatgagctgaacaaaggacctagagtgaaaggatataggagtcaggatggtgtcgaagctgcaacactagctgtcaaagaaccgaaccttccactgatagagagcgacaaggagaacaatgtttctcttgttccagatatcgagcagtataataaagaagattttcctgagagttattcagatgcaaagttctttatcattaaatcctatagtgaggatgatgtccacaaaag

SEQ ID NO: 44743 - DNA, 372 bp, Gossypium hirsutum
  Clone ID: LIB3583-024-P1-K1-H5
agacatgctgtacataccagattatattaacattcgaacagctcgcaatcgacctagactcacaggctctaatattgtccttaggcaatgcatcaatacaatgcatggccgtcataagctgtggacaacgcatatggctgcaacagccacatgtgcagtaagcacatgacctacgatcactaaagtacagccatgaaaagtggggctgctaatgcatcatctatatatgatgcctgtacgaaaactcatgttgccaatagctgtagaaaaaacatcacattgcagatgtcaaggtctagaacatacagcgtggctgcataaactgcacatgccagaacacctagagagcaaacatatacgagagatcatgca

SEQ ID NO: 44744 - DNA, 448 bp, Gossypium hirsutum
  Clone ID: LIB3583-024-P1-K1-H8
cgaactctagcatgatgtcctatatgattccagaactttacatggaggtgcccgaaactgcgacggtggggttactgtacaggaccgtattggacgcagtgacattctaaagtgttggtggaatacgtgtcgtactactccttaaagggaacaaggtgagagatgacatcagaactctatcacaggctggtatttactgtgatgataatatggatgctatcggatacactatggagcctggacctgtaaaagctactacaaccatgtgctctgaagaaccaacttttttattatgatatgacgacgacctacataatttaacaagatttgtggccactacagctggaaatactgacatgccgaattgcacattcaacctagctttactgaccagttcataaaatcatgctactgaccatgaacccgattcctacataactgacatggc

SEQ ID NO: 44745 - DNA, 404 bp, Gossypium hirsutum
  Clone ID: LIB3583-024-P1-K1-H9
tttttctaaaatcaatacttttgctgtatgatttatgtgctttgataaattattacatcatgggaataacattctgcagaaaaaggaccagattacatggacagagataataagtttcataatatatgctgttctttgtgttgttctgtttgtatgtggatttagaacaacagatgtccttttttttcccaatccatgtaaagcttagaacttgagttgttattgaatttaattgtttttttcaacctcaattcattttctcagctttttatctcttggggttggtattctttgattcttgtttaaagttccaacacatctcacaaagtaaagggagattaaattcttttggatactggagaactgctagtctatgttgttgaattgtaagatttaacattaaa

SEQ ID NO: 44746 - DNA, 554 bp, Gossypium hirsutum
  Clone ID: LIB3585-062-P1-K2-A11
gaaaaccaaattagctttctctatgtttaaattgctctaatgaaaaataatcttgtttagttgttgtgcttggtgccctctacacagcaaagttgaccctgtattaccagggtttccactcatcattcatcactggttatgtaaaattttccctcccttgctttaaaggtcatatatttcagctagagagtagctgaaattatcttcttgcatctaccgttccattattgggaccttgatactgaaaatgggtctctcaggtctcccagcaccatcagaaggagtgctatgtgttgtccaatcaatccttcacattgtcggtattgcgtcttcgtcgccatcctcggattctgtcgaaaatccctcggaatcattcgaattcagccctacaacttgtgatagttacatggaagagttccggaatagaaccccagcgatgaggtttgatgctatatgtagctgcaagcaacctgagtatgaatgttcggtttgcctgactcgatttgagccggaatcggaggttaatcgcttgacctgcagacattttttttaca

SEQ ID NO: 44747 - DNA, 529 bp, Gossypium hirsutum
  Clone ID: LIB3585-062-P1-K2-A4
aagatttttcagcccacttgcagctgctcctcttgtgattctcactggacttggtctctattcacatggtttccctcaattggctagatgcgttgaagttggactcccagcattgatagcattgattttcttttcgcagtatattccccatttaatcaaatccaacagagcgatattcgatcgttttgctatccttttctccattgtggttatttgggtttacgcagaaattttgacagcatctggtgcttatgataatagtgtttcgaaaactcagttcagctgtcgtactgatcgttctggcctcaccagtgctgcatcttggataagggttccatatccattgcaatggggaagaccaagtttccacgctggtgatgctgtttcagtcatagctgcctcttttgttgctatcattgagtctactggtacatttattgcagcatcgagatatgcaagtgccactcctatcccgccttctgtacatagccgcggtgtcggttggctgggagtagccattttgctgaat

SEQ ID NO: 44748 - DNA, 508 bp, Gossypium hirsutum
  Clone ID: LIB3585-062-P1-K2-A6
gacgcgtaagggtggaaatttcctcccgaataataaggcggtggttcggctgaatttgtaccttgaagtccaccataaacaagcaacggaccatgatgatcgactagagacgatgcccgaacacctgatgacagtccttcgtagtcacgattgtagtggtagaaacatcgttgagcgaggtgccctaaccattcgcaaatctggcactaaactctggatcaaaaccctcgtccgcggcttctagatgggggacgagcaccacgaatagagcccctatgaacggcgatagaacagtctccaagaggttggcatgaagaggtatctcctgaatcagacgcgcctgacgattctcgtactcaaggagcacatcaacaaggcgttgaaaccgcaaaggctaagatgagagcgaaacgagagtaataacaacatcaaactcaagagttaagcctacaagcagagtctcgaccttctcttcttcgaagatgcgcgaaccagaagccgctatcaa

SEQ ID NO: 44749 - DNA, 502 bp, Gossypium hirsutum
  Clone ID: LIB3585-062-P1-K2-A8
ctcacctcacagcaatttcttgtcaggttccattcgagtttgcagttcagcaagtgtcggaacagctgagaaagatagcaaagggtgactacactataccaagtactgagaagaggaagcttggaactgttgtttttgctgctgtcgacttgcctgctgcagaaatccaggggcttcttaacaagttgtctggtatgaactccaatgctgaagcattcctcgaggacaaacctatggacaacttcctcaggaaggctcatgtgactctggctcacaagaaaagtcatggtttctcagctgtggctggttatggcctctacctccaccgtcaggttcctgtggaactgaacgctcttctgttcactgataaaatggccgcacttcaggcccaacttggttccattgacgacgaaaagatagtgtcgaaaaatgaatggccccatgttaccatatggactggggaaggagtggcgcccaaggaggccaacacattacctcaatt

SEQ ID NO: 44750 - DNA, 526 bp, Gossypium hirsutum
  Clone ID: LIB3585-062-P1-K2-B12
caagatttgtcaatagtgaagaatataattacgagagcaaaagattgcagtatatgaacactgatgacgatttctttcagctcaagtcatgcggataagaggaaaagatggaaatcggatgataatctacttcattccatggatttcagtgtcagattggaacatatggaaactgaagctttgtttatacatgagcagctgcatcatgaatctagtagatcttacaggttttctaacaaccaagagaagattgaaaatgaggcatatggaaagaggcagcactatgaacatgattctgacctagctgatcgcctaactacagctgagaatgaggtcatttcaccatcatcatcaaaggttgttgatgatatggtcttcaacaagtatcttacagaagctagtggtcttcttaaagaagccaaagagtgtatgaagggaagacatgatgaagagcgtgtagaagtcatcttgaatacgtctgccttattactcttacaagccatctcaatgaagcccatgaacctat

SEQ ID NO: 44751 - DNA, 437 bp, Gossypium hirsutum
  unsure (1)..(437): unsure at all n locations
  Clone ID: LIB3585-062-P1-K2-B2
cccacgcgtccgcccacgcgtccgagcagcancagcaacaacatctcaccacagcagcagcagcagcagcccaggcacggtcactctttccaaagcagcaaacagttgcctttgctccatctatgcacttaatgaacactacacagcttgctagtccaggaggtagaagttcaatggttggaattggtgacccttccatgaatagtaatattgttcaatctagtgggcttcagagtggtgggatgggaatagtgggtataggaactccagcaagccagatatcatccgatgtcatttcaaagaacagtgtagataccagttctttgtccccagttccttatgtatttggccggggaagaaaatgcagtgcagctttggagaaagtagttgagataatgcaaaggagattgatcaataatttagaatcatcttgtaag

SEQ ID NO: 44752 - DNA, 441 bp, Gossypium hirsutum
  Clone ID: LIB3585-062-P1-K2-C1
accagagcaaaaacaaaaaacaatggcaaatttgttcatcaagcaagcaaagcagtacgcacaaggtcgaccagcctacccaccacacttgttccaattcattgcctcaaagactccccaacatgatcttgcatgggatgtcggcactggtagtggtcaggctgctcgatctttggctgagatttacaataatgtgatagcaacagacacgagcccaaaacagcttgaatttgcaacaaaactccccaatatccgataccaacaaacctcaccaacaatgtcctcggccgagcttgaacaaaaagtgggagcagaatcaagtgtagatctagtgaccatagcccaagccatgcactggttcgaccttcctgtgttttacaaacaggtgaaatggttattgaagaaaccccatgggataatctcggcatgtttgctacacca

SEQ ID NO: 44753 - DNA, 258 bp, Gossypium hirsutum
  unsure (1)..(258): unsure at all n locations
  Clone ID: LIB3585-062-P1-K2-C9
gacccacgcgtacgcaaaacctaccacctactcgatcatccaatcactttcttttataatttcatgcgaatgaaaacgncaggtgttttttcgtttggaaaactccttattttccaaaacatttacttcccaattatttcaatcacatcaacttttccagctttatccgtcatctcaacacttacctatttctaaaggttattccacacaaattctaattctcttactatatcttaaatccatatcataaaaatctct

SEQ ID NO: 44754 - DNA, 522 bp, Gossypium hirsutum
  Clone ID: LIB3585-062-P1-K2-D2
agggaagaaaaggggcagacttcttagaggtggctcatcaactgcgtcttctttataatcgatatttgcaggggcgatttgctaatgcccgaccaaaagctgtactgttcaatcagaaagttactgtagtggaaattttgtacaatgtctgcaaggctactttgggtctatgggatgccgtgatcaaaaaaaagatccctttgcagcgagctgatgttagagctcaagctgaacacggatttgaatgatcaaatggggtatctcaacaattgtgcactacttgaaagagatcatataagttctttagctggagcattgaaagatctggatgcaagcactttgcgtcttcccatagctggacgggcacgggcagatatcgtatcattgaaagctgctatttcctctgctgttgatgtgatgcaggctatgggctcctgcatttgttctttactctcaaaggttgaaggaataaacaatttggtcttccatctttgctgactagctactcttgagaaaaacatg

SEQ ID NO: 44755 - DNA, 584 bp, Gossypium hirsutum
  Clone ID: LIB3585-062-P1-K2-D3
cccacgcgtccgcccacgcgtccgcggacccttgggttttttttttttttttttttttgggcaaaacatttgcttattatacagctttaaagaaactcaaaatacataacaaatgatgtttgcattttaaaatatggtaaaaaatatattgctttaacgaaaatacaacaaaacagatcccaataccatgccccatggatctaaatttacccacttttacttttaccaagcaaccgtatttatttcatcttgtgcactcctatataattttagaattttattaagaacagaacggcattccattatcgatggatgctgatgggataatgccaataattattattgttcccatttatccaattattatgtaaaatatattattattctttttttcttttctttttttttgtttataatatataattcttttctacattttatatttttattttttaaatcttaacaatctttttttatttatttaataatctttatttttatcatatttattaaatttattatagtaatattcatttattttataatatattattattaaatttcatattataattatcttattt

SEQ ID NO: 44756 - DNA, 459 bp, Gossypium hirsutum
  Clone ID: LIB3585-062-P1-K2-D8
ctagatcatcagcagccgctgtacaagatgaaacattattacctcctccatcctacgacatagttgggctattatagcaccaactaaaaataaactactcgccgttgtacaacaacgtgactactgaaaaaacgctgtcaccaaacataataatcttgtagcacatcatccttttttcagctggtgtcataataacgaagagggcagcaatgatcgttcttaacaacagctgagcatgcatgatgaataatacgacccctgctgtagcgcatcattaaccgcggctgttgtggtgactaccagcatgaccactgctatagtcaccaccctactacccgctgcttcttctgctttctttcctttcttcgtcaccacggtcggcttttctccccgagcagcaataaatcggctgcttccttggaggctactaattagtgcattacagctcctccaccaaaa

SEQ ID NO: 44757 - DNA, 493 bp, Gossypium hirsutum
  Clone ID: LIB3585-062-P1-K2-E2
cggacgcgtgggcgacatatggcgcgataactggggttttgaagggctctcaggtgcctcgattggtctcagaggtgggaggtccaggagaataaggtgtgtgatttgttgaataacgacaaaaacggatagaatgagagaaagatttatgagatctatggtgaacacttgggggatcgaatatgcaaaattccccttattcataatagtcctgatgacaatcgtatttggttccataatccgttaggcttttactctaccaagtctgcttactcgtggttgactttgaagcatgtggggtatggaacccattgaatcttttgaaggctgatgtggaaacttcaaactctaccgaaaattaaggttttttattggcggctggggcatgatattctgcctacgtatgagaaaatttctggcattcggagggaggtcaacggtatttgtcccagattgaagaatgacaaagataccctttttcatgctattagag

SEQ ID NO: 44758 - DNA, 528 bp, Gossypium hirsutum
  Clone ID: LIB3585-062-P1-K2-E3
cggacccttggttccaggttgaaattgtccttgtaaattatattggcactgcccccacaaagtcacggtcggaaactcctacaaataagcaagatgaaacctcaggcacctttgaatctgccgatggagccacctccaagtccaaaacaactaattccgatcaggttgcaagtttggtgaagtctactgaaaaagtttccataggaagtacggacacccaacatacacatgccattaatgagcctagaaaagacaccgtccagcaagctgctgatgctgctgatgcacgtgtttcaatttccagctcggaaagtcaattcaaggcaatggctgctgatgcatctgttttcagtttcggagacgaggaagattttgatagcgaataaactggagcaacgtcaaacttcctgtacatacatcaagttgcaagttatatgaatccccagtagtattctattgtattcgttttattcgaatcatctcacattctgatttctgactttatagggtttgtaaaatccctattaa

SEQ ID NO: 44759 - DNA, 461 bp, Gossypium hirsutum
  Clone ID: LIB3585-062-P1-K2-F11
ctgcaatccgatggatcgatgaaaatcatcgataggaaaaagaatatattcaagctttctcaaggtgaatatgttgcagttgagaacattgagaatacatactcacgttgccctcttgtagcatcgatttgggtttatgggaacagttttgagtcatttctggtggctgtggtagtcccagaaaggaaggcattagaggattggggtatagaaaatggtgaagctactgatttcaagtcattatgtgaaaaccccaaggcaaggaagtacattttaaacgagctaaatagcactggtcagaaacatcatctgagaggctttgaactgctaaaagcagtgtatttggaaccaaatccgtttgacatggagagggatttggtaaccccaactttcaaacttaagaggccccaactgcttaaatactacaaggatcgaattgatgaactgtacagtgaaggcaa

SEQ ID NO: 44760 - DNA, 558 bp, Gossypium hirsutum
  Clone ID: LIB3585-062-P1-K2-F5
cgagaggaacatcccccaaaccaatcaggtcaaagcaaccaatcaatggtttctgacagtgagaatcggagcagtcaaacaacttcaagggtctcggatacgccatcttttgctggagaatctggagtgcgggtggttcctattaggaccatggttgctgctgtacctgctccgttgggtcgcctaccttcagagtcttctggtaattctgtgggagtatactacccattgcttggaagattacagaacatagctcctggacacgtaagtggtgaacggggacctcaagcatctggtgagcatccatcttctggtgctcaacctgagctgcttcgaattcctgaatctgcagtgcaacatcaaagttcagaagagtctgcaagagatggttcattaccgaatgctaattcaagacaacaggagcgtcctaatacacgcagtgtcaatatcagcattctagctgctggcagaactcataacaaccaaaactctgggagacaaagttctagtaatgttctttagtttttaagggcaatttttctttgtggtgaaattcag

SEQ ID NO: 44761 - DNA, 386 bp, Gossypium hirsutum
  Clone ID: LIB3585-063-P1-K2-A12
ccggaccgggatccgggtcgaccccgcgtccgcccacgcgtccgcccacgcgtccggattaagtacccagagaacttttttctattgcgaggaagccatgaatgtgcatctattaatcggacatatggattttatgatgaatgcaaacgacggtttaatgtgagactgtggaaatgctttactgagtgctttaactgtcttcctgtggcggctcttatagatgacaaaatattgtgtatgcatggtggtctttcccctgacttgacaaacctggatcaaattagaagcttatctcgtccaactgcaattcctgacactggtttgctgtgtgatttactctggtctgaccctgatagagatgttaaaggatggggaatgaatgacag

SEQ ID NO: 44762 - DNA, 409 bp, Gossypium hirsutum
  unsure (1)..(409): unsure at all n locations
  Clone ID: LIB3585-063-P1-K2-A4
cggacgcgtgggagttattatgcctaaaataaaatgtatttgatgactttcctttattgaggaaaggagttgaatttcatgaaccaaaattattgaatttttgtcatatgattttgtttgactgataaaaaagatatttgattgatttgaatagtattgaataatctaacaaagttaaaggagttggatttgagtcacaataaaatttaaagcctnctatctctccataataatatgttggctcacattttaacgcaactaattctatttttaaatgaaaaaataaataaattttagttaacatattatttcagtagaagggttaaattttatgtacaaaatataaatcaatttttattaactaaaaaagatttttaaataaaagggggttgcacttaataaaatttta

SEQ ID NO: 44763 - DNA, 301 bp, Gossypium hirsutum
  unsure (1)..(301): unsure at all n locations
  Clone ID: LIB3585-063-P1-K2-A6
acccacccgtccggcaaaagcctctaacctacagagngtgagtgagaaaatagcatctagggttcctcatctcccactccggaagcggaacaacaaaacaaaagagagatggcattaatggcggatcaccataccctgactgttgtttttggtatatcangtaacatcatctcacccctcgtattcctggcaccagcgccaacattctgacggatatacaaaaagaaatcgactgagagaatacagtcactgccataccacgttgcatcgttcacgtacatgcaatggctgaattacccct

SEQ ID NO: 44764 - DNA, 495 bp, Gossypium hirsutum
  Clone ID: LIB3585-063-P1-K2-A8
caataaggaggacttgctgatgggttttcatcgtggcaactgtgaaactgtagaaaaagttgaaagggatgctaatgaggaaagggtcatggagagaaataaaaatatgtttgaaataaaaacagttgagagtaatgacatggatgtttcttcgaatgatgtatcttacgtccataaacctcattcacaagattcaactataccaagcgaggaggaaagagagagaatcattgaggaaaccagggattctttgcccagatgggtgaccagagaccagatattagatttggttggcagctcaagatggaatattgttgaagcagtttccaatttttatgagcatgaaattgaattctacgagcaagtctctgtgtttagaagctttgaatctgcatcccatgccagttcaccaaagagccctatatcactttcaaattcaggacattttcgtagcagcactgatgaaaatgtaaatactaatttaagtctaatcag

SEQ ID NO: 44765 - DNA, 427 bp, Gossypium hirsutum
  Clone ID: LIB3585-063-P1-K2-B1
acgcgagtcccataaatatgactggtgggaaaacttagaaaagaaagttcctgacattgcaaaatctgggtttgcatctgtatggttgccaccagcaattaattctttttcaccggaagggtatcttccccagaacctatatttactcagttcttcatatggctctgagcagcaattgaaagctttgctccaaaaactgaagaagtacaaagttagagcaatggcggacatagtaatcaatcatcgtattggaactactcaaggacatggaggactgtataaccgttatgatggaattccactagcatgggatgagcatgctgtcacatcttgcactggtggattaggtaatcaaagcaccggagacaacttccatggggttccgaatattgatcatagccaaccatttggttcgaaggacatcata

SEQ ID NO: 44766 - DNA, 337 bp, Gossypium hirsutum
  Clone ID: LIB3585-063-P1-K2-B12
gaaatatttaatattggtaaaagtaccagagatgagagtaaacctgactcactgaaaatgggacgtactggtttaaagaagaaaggatcaggagtggtttttggtgttcctaagcctggaaagaagcaaaagtttatggaagtaagtaaacattatgttgcagatcagagtagcaagactcatgaaactagtgattcagccaagtttacaaaatatttaatgcctcaaggatctgaacctcgtggaacgaaaaataaaattgaaccaaaacgaatggctgtatccaagcccaagattctcaaatccggaaaattgcctagtgtttctagtagaagta

SEQ ID NO: 44767 - DNA, 275 bp, Gossypium hirsutum
  Clone ID: LIB3585-063-P1-K2-C11
cggacgcgtgggcgtgaaactattacttgaagatattggggagctaaagccaagtgtcttgtgtgctgttcctcgtgtgctggatagaatctattcaggtttacaacaaaagatttctgagggaggcttattgaaaaagacgttgtttaatgtggcatattcattcaaattctataacatgaggaatggctccaaacatgcagaggcatctccattttctgacagaattgtattcagtcaggtaaaagaaagattgggagggaatttgaggatta

SEQ ID NO: 44768 - DNA, 460 bp, Gossypium hirsutum
  unsure (1)..(460): unsure at all n locations
  Clone ID: LIB3585-063-P1-K2-C2
cccacgcgtccggaccagtacaaatattggtcaaaccccttagaaacaaagctaccgaatgctccgggcatggaaatatactcgttatatggagtcggactccccaccgaaagaggttatatctacaaagtagctcctccaagtgattgctcaattccatttcaaatagacacctctgtagacggtgatagtgaagattcatgtctaaaaggtggtgttttctctggtgacggagatgaaaccgttcctatcataagcgcgggtttcatgtgtgcaaaaggttggcgtggtaaaaccaggttcaacccttcgggaatacgtacttacaatcgagagtacaaacatgcacccncggctaatcttttagaaggtcgaggcacccaaagtggttctcacgttgaattattgggaaattttgctttgatcgaggatgttctacgagttgccgctggggctaccg

SEQ ID NO: 44769 - DNA, 445 bp, Gossypium hirsutum
  Clone ID: LIB3585-063-P1-K2-C3
gcgacctggggcacgaaagcgaatatgttgcctatcaactacgagtcatggcatcaaatgcccgatgcacaaaaaccaagccctcgataatattaaggaaacgcgctactaatgtcatctgtaatgcttgggaaatagttcattatatttactttataacttggtttttggaggcgaggtttgctttaaggtctcggatgctatgaaagaagcattggaaaaagatgaagagacaataaaagtaatttgaaaaaaatatataagacaaaaacaaccctcgatgagaaattgaaaaatgtccgtggtatgttgaggtaccaatgggaagatgcggtagatttggcattagaagaaatgcattgtgactatttcaaacattgaattattttggttatagattactattacgtctaaaaatttcataacataggatcggaacaagttg

SEQ ID NO: 44770 - DNA, 518 bp, Gossypium hirsutum
  unsure (1)..(518): unsure at all n locations
  Clone ID: LIB3585-063-P1-K2-D1
cccacgcgtccgaatgactactaattattgtagttagaactatgaaaacgtgacatacattcactggattgtataaatttggtaaaaatgaactttacaggtaggtgggtagcaaacatgcattattaaaccatatgttagcttgccttttaggttggaattcattttgatacactagcagtggagccacatgtgtaattcttttttaaattagcttttccaattatactctaaagggtatgtatgactctgttaactccacttgtggaatctaaaaactccactggtggtggatgatatctcttcaagttatggtggaagaaagaaggatgcancttaattgaagtatcgtatgtacctcaaactttaatgtgatttgtttaattctttatgtaataagatntgtaagaagcttttatgtgattcattaaatgtctatttgacctgtgcagttctaaatgaaaatttggttgattgcaaactagggccctcactctgattttgatggacctacctaa

SEQ ID NO: 44771 - DNA, 324 bp, Gossypium hirsutum
  Clone ID: LIB3585-063-P1-K2-D10
gtgcattaaaaagctttggaaaggatatgcgtgcgctttgggttcaacaaggtgaagagcaaaaacagaagaggaaggttgatggacttgccaaagaacttgagaggaaagtcttggcatttcaaagaacagaaagcaggattctcggttcgaaattatctgagaaagatatagaagtaaatgttcggaaccggattgaatatttggctgaaagaaaaaccatgttggatatgttgaggaaaagaatcgatgctgagaagttaaaacacatcacagtcatggaacagacacagcagataactgtgaaaggatttcaaactggat

SEQ ID NO: 44772 - DNA, 344 bp, Gossypium hirsutum
  unsure (1)..(344): unsure at all n locations
  Clone ID: LIB3585-063-P1-K2-D9
ggttgatccctgatatgccttatgtaattaaatttgattggtttgatggggcagatgatggaggattaaaaaaaaaagatggtgggggggggatgaggaaaagcagacaacttttccatcttttggggctgtattgtaggggttcttttttctttctttcttttattatttgaaatttgcagaaaagaagtcagtnaaaaaaaaaaaaaaaaaaaaaaaaaaaaaaaaaaaaaaaaaaaaaaaaaaaataaaaaaaaaaaaaaaaaaaaaaaaaaaataaaaaaaaaaaaaaaaataaaaaaaaaaaaaaaagggggggggggggggnctttttagagaatcaa

SEQ ID NO: 44773 - DNA, 373 bp, Gossypium hirsutum
  Clone ID: LIB3585-063-P1-K2-E5
ggttattcagtaatttctagcagtatgaaagaaatcaaagtcaaagatgcttctcctatgtgtactggtagcgcctgatactgaacccagaatccaaccatcttcctctgtaagtgaggaccgtaagtgttcatctataagtgtgaaatctacccctgaaatagaaaagaaatatgttcatcatgtttatgatgctattgcccaccattttagttccacccgctttgccaagtggccgaaggtcgctgctttcttggaatctaagactactggttcacttatcttagatgcaggatgtggaaatgggaaatatctaggtttaaattctctctgctatttaataggatgtgaaataagtcccttccttatcaaa

SEQ ID NO: 44774 - DNA, 363 bp, Gossypium hirsutum
  Clone ID: LIB3585-063-P1-K2-E6
aatttgcactaggtgatgttctccaaatcttgaatatgataattgccatgaagaaatggattatacatcaggagtcaggatggcagccaattacagtaacccttccagaggctagaacagaaataggcactgaaactgctgcttgaccttgtcaagagtggttttggtactcaaaagtgatccaatggtggaggaagatcataagtgtgtttagggaattgggagtaagaaacaagggtcgctttgggaaaaaagaaagaaagaaatacaatcaagtatcaagaaaagtaagggcagacagtgaatttgggataactacaaaaataaggataggtttctttttggtatgttatgttttttctt

SEQ ID NO: 44775 - DNA, 451 bp, Gossypium hirsutum
  unsure (1)..(451): unsure at all n locations
  Clone ID: LIB3585-063-P1-K2-F1
aatcccggtcgcccacgcgtccgggcacttgccacagagcagggcatgtggttctcatgtcaaagacatcagaaagattccaaagctgtcaagctgcaaaaaaggctcataggaaagtgattgagaatgtaattctgtcaatcagtactaagacggctattcttgctttgcctttgctggcatccacttgtgtgggcagccgttcttgccgatgtggaacatgcttgtgntgatctgtaatagcatgctccttttgcgaggaaaacacaaagatggaagaaaatgttacaaatcttcagttgcagcgcatacaaacaagcatggatccaaagccagtcattgcgactcttttcataagcaccaagatgctagtttaaacaaaaaagtccaaaaggaatgtgagccgtcaacatgttgctccgagaaaatttcctcaagaattcattctggc

SEQ ID NO: 44776 - DNA, 391 bp, Gossypium hirsutum
  Clone ID: LIB3585-063-P1-K2-F3
acggcaaagctcagatcttcacccaatttgaaatcccactcatccgatgcctcgaaagtcgtgcagaacgtgggatcaacatcctctaagaaagtaggactctcttcgaaagaagtctcatcgaaacctaatgacaaaaacttttctaaagcacttagtacttcttcgaagccgaaatctcaggtagaaaagcttcctttggcttctgtcccttcaggagcttcaagtgttaagagaaacagtggaagtagtgatacaaagatgaggaagaggactgtgacctccaaagtagctgtaaagaaagcattggcatcgccaagagcctcattgtctccgagagcttctcctgatagagctacaagtctaactgcaaggaagaacctaaacttaa

SEQ ID NO: 44777 - DNA, 331 bp, Gossypium hirsutum
  Clone ID: LIB3585-063-P1-K2-F5
acgccacatctagtcttatcgtcaaacagttcaagctgcaagtctgaggaactagatgaaaacggggtggtgggtgtgcttgcagtagcaatttcccatgtgaggatatcagaaccaaagaggagtcgactttgtagtccccctggacctatagagcagcagtgttcatctaatttgactgctaacaacctctgtcgagccttctgatccacagctgacaccgctaacatacatgattatctctccattgtattttgagctgggggatttagaaagaattaacttacccttgttgcaattttcagtggcctaaaatgatgattatggatgg

SEQ ID NO: 44778 - DNA, 277 bp, Gossypium hirsutum
  Clone ID: LIB3585-063-P1-K2-G1
cgcgtccgcccacgcgtccgaccaccatcaccaccaaagcatccttacaaatacaagtctccaccaccaccaccagcacgagcctaagcatccctacaagtacaagtccccaccaccaccaccaccatccccaccaaagcatccctacaagtacaagtcccctccaccaccaccaccgtcaccacttatatactcttacaagtacaagtacccaccacctccgtcaccacccaatctcccttaacagaactagtcactcttatctatcatctacctt

SEQ ID NO: 44779 - DNA, 412 bp, Gossypium hirsutum
  Clone ID: LIB3585-063-P1-K2-G2
ggataatttaaagaacttaaaggagttgtatctaaacaataataaaatcgtgagcctccaaagcgtgagtggacataattatgtttaacatatacaacatttgagtagtaaaatgaaaatacagtttatgcaattatcaattacacttctacagaaaagacaatcgaggttgaccaaacttgaggtgctggatttaagttctaattatttcaacagcagcaaattttcatctctcgccgtcctcccgcatttgaaatctttgaatatagaaagaaaccatttgacagagtggagctatattcgaggcaagtatgctgtaaaatatatacatctcttagtttctcattacaagttttaattttttgttattttctctacagatttaaatgttttgagtaatttaaagatactg

SEQ ID NO: 44780 - DNA, 282 bp, Gossypium hirsutum
  Clone ID: LIB3585-063-P1-K2-G8
tgctcgcatacaagagaaaagatagctgagagctttatggaatccttcctatgcaatgaagggctgtattatcgatgctctttcatcaccttccttcaacggactcggcttcccataatcttaaatttaatatatccattcataatgtacgtctgtcactatatgaacactaaagacatacaagtgagacctacaaaatcaggtctgactatattaactcgcttgctctcgactcgactcttcttctaaaacggttacaatacattttgcttatacatactg

SEQ ID NO: 44781 - DNA, 327 bp, Gossypium hirsutum
  Clone ID: LIB3585-063-P1-K2-G9
cccacgcgtccgcccacgcgtccgcccacgcgttcggagaaagtataccacaaacaaagaaagaggcatctggttctacggaatatggtgagaatttggttggtctgaaggtgaaagtctggtggcccaaagaccgtgcgttctatgaaggtgttattcattcgtatgatgcagttaagaagaaacacaaggtgaattatgatgacggtgatcaagaaattttaaatcttaagagagaaaagtgggaggtgattgaagatgagtctggaccagatgaggaagaagcagctgaccatccaagccctgctggtccatctgagatgcctc

SEQ ID NO: 44782 - DNA, 212 bp, Gossypium hirsutum
  Clone ID: LIB3585-063-P1-K2-H4
gcgtgcgcggacgctctcgaggaatcaagcgtagctacgtcaacgtgcgacgaaagaagaccagaatggaggcacctagggctagcacataaggcacttcagtacaacgtatgcacaaggaaaagccgggcggcacccaacgcaagaacctatgcaaacataaagcctgtaccagcaagagctataacctggaggccacggactaacggcca

SEQ ID NO: 44783 - DNA, 500 bp, Gossypium hirsutum
  unsure (1)..(500): unsure at all n locations
  Clone ID: LIB3585-064-P1-K2-C3
ggaaataagagaccagcccctgaatgtcctgtgatgttttcacgctgccaatctccgaacagtagggctgtaaacgggcatcttgtttatgtgcgtanaaaacccgaagcagaattagcgaaaaactgtgctttggactgtagcagcacaagtaattgccaacagccgaggcctgcaggtggtcaagtggaggaaattaaccaacaaaagccccaaataaaggagcctaaagtttcttgttttccagcatttgcaccacttccgatggcgcccttgacaagttcatctgccaaaccttcagtgcctatacctctcggaaaatctgctacgagattagcaccacccttggaatccaatcaacatacactcgattcctcagcctctgcattggatagtccgaatggatttaagaagcttcactgggaagagcggtattatcatttgcagatgctattgaaaaagttggaccagtccgatctagaagattatacccaaatgct

SEQ ID NO: 44784 - DNA, 474 bp, Gossypium hirsutum
  unsure (1)..(474): unsure at all n locations
  Clone ID: LIB3585-064-P1-K2-D2
aataataataaattactcataaaacagcttctaaccaggaatagtgaggtagccattagttatcttctcttacagcatacanaaataacataacacaaaggaacatgaaagacaaaaatgatgcaattccaagttgatcagtactttcagttccatggcagcctagattagctgatcatacatttcaaaactcatgtaagcagactatgaacttcttaatgttaatatccatctccaccaaaatttcaaactatttagtaatccatgcagcccgagttactatttaactgattatttaaggatgataaagagtgctaattccgagtgaataaagggaactttcaaaccatacaaggatcttcttcggtatttgactttttctctttgcaattttccccatccaacaagccagttgcaggttgtttctcttccttggcttcagcaatgtctttggggttcaagaaacttggctgg

SEQ ID NO: 44785 - DNA, 539 bp, Gossypium hirsutum
  Clone ID: LIB3585-064-P1-K2-D5
cccacgcgtccggtgttcgacaaagagatgggacacattaattgacagtgatggggaattgatgcggaagctgttaaagataggattgagttgctgtaaaaaaaatgtggagaagagattagatttaaaagatgctgttgggagaattgaagaattaaagcgcaaggatgatgatggtgcatccaaggccggccagtgaggatggcaacaaatataacatcgacgataacttcttttaattcccgcccactacatatacccttttttactccaagagtcgaccaatctaatctctcttttatctttggtttctttattttgtgggggactacttcaagttgaaggccacaaccttactgaatttatttgagatttggagttcaaagcatttaattttgtttttctcatcgctagatttccttaggattgatgatattatttatatatagcctgcacctgcagtttcttgcccttttttttttctccataaaaatcatcatatgttggacccatccttacatatctaaatcacttttttt

SEQ ID NO: 44786 - DNA, 553 bp, Gossypium hirsutum
  Clone ID: LIB3585-064-P1-K2-E9
ctttaatctgaacctccctcagcccgagatacaacccaagattgagcgcttgaaaacacgccatgatttctgctgcaaaaatagatggtttattcacatgcataactgtttttgaacaaatcaactctgctttttcatttcgtaccactaacccggagcatgactcatttctttacttgttgaacacttcatcaaaattgatttttaacctcagaccatttggagcgacccatctacccatatgaaatcatcttgctggtatgttcgtattcaacccatccagttcttttaggcagttacttacaaaatctgaaatttgagaaccctgttttttttctcctttatgaatgaatctgtttcttgatgtccaaattgcccacaaagcacatgctatcatcctgtacttggccagaaattttgacaaaaatgtttttaaaccattctttgaaatctgtattttcctcagtaataggccaggtaacacctaacttgtcccatgtcttcttcactataggacactccctgaacaaatgctctctaattttcgctcctt

SEQ ID NO: 44787 - DNA, 564 bp, Gossypium hirsutum
  Clone ID: LIB3585-064-P1-K2-F11
gttaattcaaggaatgccagcagaaatgggaacaatttgagtagttcaagcagcagggaagcttgagcttctattccacaaacccctcggagtgaaggtgagattttgcagtcttcaaatttaaagactttcactttcagtgagctgaaagcagccaccagaaacttcagaccagacagtgtcctaggagaaggtggatttggttctgtcttcaaaggatggattgatgaacattcattcaaagccaccaagcccggtactggcataataattgctgttaaaaggctcaaccaagaaggattccagggtcacaaggaatggctggctgaaatcaactatcttggacaattgcatcaccccaatcttgtaaagttgattggttactgcttagaggacgagcaccggctttttgcatacgagttcatggtacggggtagcatggagaaccatttatttaggaaggggtcgcactttccaccactttcttggggtatacggatgaagggtgcacttgttgctgtcaagggacttgcttttctttacaatgccaaaacacaagttata

SEQ ID NO: 44788 - DNA, 472 bp, Gossypium hirsutum
  Clone ID: LIB3585-064-P1-K2-G1
acgcgtccgttctcttcttatcttcttcaaacccctaaacccttttgtaatccacttcaaatgtctaagatctttgttatttcttttctctctgtggaagaattttgcattcggatccagttcctttgtttggacagagtaatcacggtcgattttctcttaatctatgtttgaattattatctcttttttaaacagattttgttgaatcaaccgtgttactctgtctaatcagatgtattggatcatcaaccttcgattcatttagccatgaaaatgatgaagtaaaaggcgatctattttcctccaccaatatcgagagataagcaaattgccggaaaccggtcctcttgcaatcggcaacataaaaatcaaaatgaaaaagctatgtgatgtgatgtgatgttattctttcccttatgcagtttctagatcttgattgctgcaaaaatgggaaaacactgtgggccttt

SEQ ID NO: 44789 - DNA, 394 bp, Gossypium hirsutum
  Clone ID: LIB3585-064-P1-K2-G12
cccacgcgtccgaaaccaagtactagaaagctttagcagcttttgtattacttgtgaattgtattcttagtgtatgccttactttagcagacactacttttagcacctttttctttctctatcagcaacttacacatgattgattgagcaagtgcacacgtgcattactaagaagtattctaaatgtcaggcttaaaagtttcttgttcaggtgttatcctattattgttctagtcatgtttcttggattatgttagaaaatgttgcgtggtgcaggttgtagattccatggttgtggagagggctcgtggggagtcacaagccatatctggatctcttcaatctctatgctggggatcctctgcttttggtggtattgtgagcttctatttta

SEQ ID NO: 44790 - DNA, 510 bp, Gossypium hirsutum
  unsure (1)..(510): unsure at all n locations
  Clone ID: LIB3585-064-P1-K2-G3
ggatgatgctcagagcagttcaagttcactccctccattccttacaaagacgtacgagatggtgggtnagcattctacagattctattgtttcttggagtgcaagtaacagaagtttcattgtatggaatccgttggaattcgcgagggatttacttccaagattcttcaaacacaacaacttttctagctttataagacagcttaatacatatggtttccggaaaagtgatcccgaacaatgggaatttgcgaacgatgatttcataagaggtcaacctcatcttttgaagaacatacatagacggaaaccggttcatagtcattcgatgcagaatctattaggtcaaggagcttctccgttaacggaatcagagagacagagttttcgggatgagatcgagaggcttaaaagcgaaaaaatgtcactcgttctagagttaaagagacacgaggaggaacgacaaggattcgagatgcaaatgcagattttgagggagcgtttacaaac

SEQ ID NO: 44791 - DNA, 470 bp, Gossypium hirsutum
  Clone ID: LIB3585-064-P1-K2-G8
cccacgcgtccgctttgtcagagtctcccaaggagcaagagagagaaaggagggaaggtagtgagttgccctcaaacccggaagaagtagaagacctacgtggcggtgattctgcagcaaatccattaatagcattcacattcgaagagttgaagattatcactgcaaatttcaggcaagaccgtgtgttgggtggaggaggtttcggaaacgtttacaaaggcttcatccccgaggacttgagggaggatcttcagattcagccccttcctcttcccgttgctgtaaaagttcatgacggtgataacagttatcaaggtcaccgagaatggctgacggaggtcatatttctggggcagctgtcgcatccgaatttggtgaaactaattggatactgctgccaagatgaccatcgggtacttatatacgagtatatgccctcgggtagtgtggaaaacaatcttttttca

SEQ ID NO: 44792 - DNA, 529 bp, Gossypium hirsutum
  Clone ID: LIB3585-064-P1-K2-H2
cccacgcgtccgcagagtttggttacagaggattcgtttttagtgaggaatttcggtaacgattggtacattggtcgaaaaatcaaggttcctaaagacaatgttttaaggagattgagattgtttaatgagtacttggttccagaagacaaagatcctttgcatgcttggtctgtaatactctccgtcttccttcttgctcttgcagtcttgagtttaagtatagagtatgatactgcaatcccggtggcaaagaacgtgtacatacatcctcctagtgccgatcgaataattctaccggacggtagatatatggcatatagagagcaaggcgttccagccgatagagctagattttcgatcatcattccacattcatttctttcttcccgactttcagggattcctggacttaaggcttcgctattagaagaatttggagtggcggtgttgacatatgatcttccgggttttggtgagagtgatccttacccctataggaacctcgagtcatcagcatcggatatgt

SEQ ID NO: 44793 - DNA, 160 bp, Gossypium hirsutum
  Clone ID: LIB3585-065-P1-K2-A11
ccccacgcgtcgggcattatcggctgaatatggtaaggggtctatcttatactgcctgatatttaacggcgtttataactgatgtggccctcattattatctcccaatgtatcctcaaatcatgcctgtaaacgacacccattctaacttgatctcaaaa

SEQ ID NO: 44794 - DNA, 211 bp, Gossypium hirsutum
  unsure (1)..(211): unsure at all n locations
  Clone ID: LIB3585-065-P1-K2-A3
cgtccgcccacgcgtccgcggacgcataggcagacgcgtgngttgtctttttaaanccaaaccgatacaagcgggcgtatttttttttaatattttgagtcacattacaaggncatcaaatttagatgttttttccttcgcaatcgaacatactacaattattgatttccatacaatctcttattcttaatgctatacctttctttaatga

SEQ ID NO: 44795 - DNA, 268 bp, Gossypium hirsutum
  Clone ID: LIB3585-065-P1-K2-B10
cccgtcctatcccgtccccacctccgccgtgccccctctaccatttccttttaagggtaatatcggattttggtatgggaagctattccacgtctaatctcactttaactttacacccacactcccccttgctctctgggcaagactgccaaatcaggagtcacactctttagaacacttcaacagctttacaacttaacttccaactcattcttaattgttggatgaacgcactgtctacttctactgcgcatgtttgatgaccggc

SEQ ID NO: 44796 - DNA, 323 bp, Gossypium hirsutum
  Clone ID: LIB3585-065-P1-K2-B8
aaccgaggaggtattttatatatagacctaaatacaattaactgaccgtccttttacaaacaacggactgacaaaacaatccctttacccaactaaatcaatttgcatgacatacatctttcttcagctagcttaataactaacaaacacgcaccgaccgaccttcctaacaaacactcacccagaatgaataatgaaacgcaccctccatcgagccattaatcaagggcggtgtgtttgttactcacacgcagaccgatacattcactagccccctacctaccgctcctttctttttcttcccttccttactaactacacac

SEQ ID NO: 44797 - DNA, 479 bp, Gossypium hirsutum
  Clone ID: LIB3585-065-P1-K2-C2
aggagttgaggttaatgctccagggaccaaaatccgttcagatgaatcattcctatatgaatgtgaaaaggcaaaccttcgggtcgaagggatcacaagcgttcctgttggtaatcataattttgtatttccggaagtggaaggtaaagcaggagcgctatcagctccttcaagcatatattacgagatgagactggctgccctaagtagaaaaaacggaattttggaagtacaattgggagctgcaatggcaagccgagactccattgagagaaatttagcttcggctttgaagagcaaagaggagatggagaaaagactagcagacacagtgaaagagatggatttggtaaaagaaaaactagctggtatagaacttgcacaagaagaggccaacaacatatctaacatagttcactcggataatgtaagactcgaacacgacgtggctttccttaaagcagttctagatgatactc

SEQ ID NO: 44798 - DNA, 240 bp, Gossypium hirsutum
  Clone ID: LIB3585-065-P1-K2-C3
cgagaaaaagctgtagggtggaaatgcaagcggtagaagggtttgcatactccgggggacaattaggtgagagtaaattggggggaaaaaaagattaggccataagatgtcgaagaaaggtcatgtagatttgtattttgagggtgatacaatatctagtcatagaaactgttgttacgaaattggtcttttttttattatttgtcctggaaataaaaaaaggactgttaatttgtgttt

SEQ ID NO: 44799 - DNA, 402 bp, Gossypium hirsutum
  unsure (1)..(402): unsure at all n locations
  Clone ID: LIB3585-065-P1-K2-D5
aattaacggacgacgcacgcgtccgagaatggtcaaaagtatgagccacatttcgattattttcattacaaggctaatcaagagctggnnctgcacgcgtatatccactgtactgatgtatttntctgatgttgagagtggtggagaaactgagtttccaaacgctgagggaaaactatatcagccaaatgatgataaatattcttattgttcaaaaaatggatatgcaactaaacctatataaagtgattcattactattatacagtcttcataagcaacatgcacttcattgctacagttattttccaatcttagcaataattaagctttataagaaggccaattcatgaatgcattactgctaaaaattgcatactcatatgtatcattcttttaatat

SEQ ID NO: 44800 - DNA, 428 bp, Gossypium hirsutum
  unsure (1)..(428): unsure at all n locations
  Clone ID: LIB3585-065-P1-K2-E11
attttcgggtcacttacttgtgctatgttanaaaatgtctcaaaacaagtnggtttaangaattgataagannctatggtaactatctacnaagaactcgaaagaagttctaacccaaaaggagcatatatgncttctttatgnccaggtgctcaacctcgggnccccgagattgatgnnaagagcagaaattaaagccattccattcgagtgtcnaattcannaagaatccgctgaagtcaaattcttggacatattnnctggtcttgatgaaattccaaccccaagcttgattcaattcagatacctcctagctagtattgaatctttttattcaaaatacaatcagctgcaaaagattttagaggacttcttctcaagtgatagttgttctctttttagcgtcaattcttattaatgttcctgct

SEQ ID NO: 44801 - DNA, 462 bp, Gossypium hirsutum
  Clone ID: LIB3585-065-P1-K2-E7
aatgagtcatatagtactgtgcgtagtcagattctattgatgagtccattaccatctgtggagcgtgcgtattcaatgattatgcaagaggagtcgcataggaagcatagctcgagtgatattggggattatttggttcctttttcttcagttcagatggtacagaaaaaaagatttactggcatttgtgatcactgcaaggttaaatgacataaaagggaaacctgttacaagttgattggttatcctgcagattttaagtttacaaaaaagaaggtgaacagtaactctgcctctgcagtaaatagtgtttctgctcctgattctgcttgtagtaatgaagtcatggattcccgtgggtctcgttcacaagcgctagtgtttacacaagaacagtatactcagattctctatctgttaaacaaggaacctgctgtgattgaagctgctaccagtatagca

SEQ ID NO: 44802 - DNA, 258 bp, Gossypium hirsutum
  unsure (1)..(258): unsure at all n locations
  Clone ID: LIB3585-065-P1-K2-F1
caagttttcatggctcatcgacggtgccttctatcactggcccgccacgccacggctatcatttctganagaaagatgccgcctctgtccgccctcnaagtcctaacccgaaaaccgaatccggcaataaccatccccaattcggagctctcatggtttagcctctggtcccattctcgtcacttctcatccagcaaaagccaatatagcgagacccaattgtaaaagtaaatgtacgaggccatctctatcgaatca

SEQ ID NO: 44803 - DNA, 405 bp, Gossypium hirsutum
  unsure (1)..(405): unsure at all n locations
  Clone ID: LIB3585-065-P1-K2-F9
cccggcggcgacgccaacgcgtnctcgcccacgcccgtccggtgaaatgaagagtcttagaactatttgtacttataattttnngtcgaaaacttaaaaagtattgaaatncgtctgtggatgccgttaagagctgcaaccctgactgcnngcattgcaggtattgaaccaatactantnntatttacttnngctgattagaannaattgacttanncttgagtnncagaaatattggtattaggcttattggaccagaactgcaatatngttgcanctctttanaatcnntaggatggtgtgacaaaccgttgtgtgatcctaagagttaccgagtctagcatatnggatgcctctgatctcaagatgcccttagacttgtcgtgtggtgtggggcgggataac

SEQ ID NO: 44804 - DNA, 537 bp, Gossypium hirsutum
  unsure (1)..(537): unsure at all n locations
  Clone ID: LIB3585-065-P1-K2-G3
cccacgcgtccggtttgaacaagaaaatcctgtagcaatcactaagagcaatggcgatagcaacgtagcngtgcataatgggtttaatgaaaagaaccancagcagacggtgacaaagaatggagggcttaatgggtttagcaatgtagaaaatgggagtaatgacgagattttcaagaacgagatgagagatttggttgagattttatctaagctaaaccccatggctgaggaatttgtaccgccttcccttgccaatcatcatcatcatgaaaagcatgatcaaaaccaaaatcgagataatcgctttccggaaaatgggtttggatatactgacaattttgtagtgcaggctaattctggcaacgctgatggacatactaatagaaggaaaaggaataactatagccaagggaagagaaggttgaacaatagaacgagcattgtacagcgagaggatgctattaggaaagaccgtttatgtatcttatattagatctggcaggttatccgaaaaacttttttggtgtgtttttt

SEQ ID NO: 44805 - DNA, 527 bp, Gossypium hirsutum
  Clone ID: LIB3585-065-P1-K2-H1
gcaaattcatcaacagtaagtttaatatatctgattttccctccttgatcaggagggaagtatctttcccggttaagtgtattgatgttttgatttattggagtaatttatgggagttagttggaaggtattagttcttgttctttgactctagcagcacaataacttttatggggtgctagttccttaaattgccattaagtgtagaagtgttgaattgtctgaacaacacatttaccacttgagcaaaatttaactgaatttataaaagcaaaaatgacagccttatgagctaaacaaatcagctctttcaatcaatttgtaactgccaatggttgactgtttacaaatttttagtcatacttatagttgtttcacataacacatttcttcagttcctcattttcctctcatagtggatgataattcaaacttccatttaggataatgctatatttacatttccaatattgatcaaattttgcaagttttgagcaaatcttgtacattaaaaaaaagatccattt

SEQ ID NO: 44806 - DNA, 471 bp, Gossypium hirsutum
  unsure (1)..(471): unsure at all n locations
  Clone ID: LIB3585-065-P1-K2-H6
acaagaatgcatttcattgccacgccacatcatgataacacgacatagtcacacgattggtctttcctattctcttcgacaaattcaagttgaggattggatgtgcaaaatttgttacacggaagttgatataaactatggccattactgttgtcctgcttcttgttgccgttatattgctcatgtacgttgtgcaactgataaagcaatttgggatggaagaattatgctggaaggctatgatgagaggtccgaggaagtggtagatgaaccttggaatttgattactgatgttgttgaacaaatccgtattggggagctaatggtggcaagtgagatcaagcattcctatcatgatcataatttaagactcacttttagtgggaagaccaaagatgatgatagtcagtgcgatgggtgcataagacctatatcaactcctttntatagttgtgagcaatgcaagttctt

SEQ ID NO: 44807 - DNA, 477 bp, Gossypium hirsutum
  unsure (1)..(477): unsure at all n locations
  Clone ID: LIB3582-050-P1-K1-A9
agccggaggaagccgtggtgcagatgtaaaagaggctgcagctaatacttacgatacattcgatatgagagttgataagcattggtctgaaaagaagcttgaagaaatgactgaacgtgactggaggttttttagggaagatttcaacacttcccatgaagggtcgaagattccagggggggtgaggagttggagtgagagtaaattgagttccgagttgttgaaagctgtggagagtgtagggtataagaagccttccccgttacagatggctgcgattcttctaggattgcagcaaagggatgtgattgggatcgccgagacaggattcggtaagactgctgcttttgtttggccaatgctttcttatatttctagattacctcctantgaaaagaatgaanctgaggggccatacactggtgttatggccccaactcgtgaacttgctcaacaaattgaagatgaaactttgaa

SEQ ID NO: 44808 - DNA, 412 bp, Gossypium hirsutum
  unsure (1)..(412): unsure at all n locations
  Clone ID: LIB3582-050-P1-K1-B12
tcccgggtcgtcctcagcgtccgcccactcttccgcccacgcgtccgggcacgcgtgggcccacacatccgcccactcgtccgcccacgcgtccgcccactcgtccggaaagaacgactttgtctttggatgtgcataattcaacgaagccaacgaaaataaaataaaataaatttctaaaaatcaatctctctcattggaggtgtagttnannaaaattccanatctcnatctacccantttcactatcaatancnaanccaantctttcnccccttccnncccnnanatcttcatcntcaaccatntttctaactctncttatcatnttcaccttnctnnttttaattcttttnnccctcnnnatcctttcaattcccaccanttttttttnnannncncacaaacccaa

SEQ ID NO: 44809 - DNA, 558 bp, Gossypium hirsutum
  Clone ID: LIB3582-050-P1-K1-B3
cccacgcgtccgcggacgcgtgggttcgaactcaatccgagcttgatttgggcttaacccagatgaaatcggtgcttgaagataactagggttttaagctttccaatttattggtaaaaattctgcgttgtttgttccaggcggtgttaagaatttgatcgaaaacatggcgaactttgccaaaccagagaatgccttgaagcgagcagaagagttgattaatgttgggcagaagcaagatgctttgcaggcatttcacaatctaataacttcaaagagatacagagcttagcaaaagccactcgaaaggataatgttcaaatatgtagagttgtgtgttgacatgcgaaagggtcggtttgccaaggatggtctgattcaataccgaattgtatttcagcaagtaaatgtttcttctttggaggaggtgatcaagcactttatgcacctctctactgagaaagctgagcaggctcgtactcaggcacaagccctagaagaagctcttgatgttggtgatcttgtttttggcatcaagatagcttgatcactagtttc

SEQ ID NO: 44810 - DNA, 465 bp, Gossypium hirsutum
  unsure (1)..(465): unsure at all n locations
  Clone ID: LIB3582-050-P1-K1-B4
gttcccgacctttctaatctcactgctgtcaagctcctctttttatctcacaaccagttcaccggtgagttcccagcttcggttacctcgttgtttcggttgtaccgtctcgatctgtcgtttaacaactttaccggtgggattcccgtgacgatcaaccgtttgactcatcttttaggggtgcggcttgaggagaaccggttttcggggccggtttctggtttaaatcttccgaatctccaggatttaaacatttctgctaacaggctttctggtgaaatacccgagtctttgtcgagtttcccaatggcagcctttggttcaaatacagctctttgtggagcgccattggagaaatgtaagagcactgggagtgacccgacaaaacccggatccgacggggcattaccgtcgcccgttatgccaggtcgaaacccaactgttataggcncattcccaagctaa

SEQ ID NO: 44811 - DNA, 398 bp, Gossypium hirsutum
  Clone ID: LIB3582-050-P1-K1-B5
cccacgccgtccgaaaaaaacaaaccaaaggttcatgtctttctctgcaataccacttaaaaaacgtacatttgtatgaatcaaaggttagccatcggatgacattatcacaaggtttgtttttgtgagtggttaaagtttgtgtgaaagatgtcaagggattcaaatacgagaaggcgagggggacctgggatttttctgatcaaaagtgttaggggtaaagattggaccctaaaatcatatagatacataatattattgcttaccttcatagcatatgcgagctatcacgcctctaggaaacctagcagcatagttaaaagcgttttttatcctgaatcactgaaaaactcaaaggtaaacccttggcctgttgggaatgtctttatcaaggaaga

SEQ ID NO: 44812 - DNA, 398 bp, Gossypium hirsutum
  Clone ID: LIB3582-050-P1-K1-C1
cggacgcgtgggcggacagcgtgggcggacgcgtgggcatgaatcacccatccatgggtaccaagatatgggaaatgaggatcctaatactgtttttgtggaggaggctaacatgcgccgtctccgttccggttagggttccgttgtgtccaaagaactccgttttggaagccgtctttgactgtcgagactctttttgctccattcactctgattttattgaatctattgattccgttggagttaccgagggggatgagatttcattgcagaaggcacttaacatggttcatgggaatattcatgaatatgtagcagtgcttttctatgcatcttggtgtcctttttcaaggtcttttagaccaagctttttgaccctttcttcttcctatccttcc

SEQ ID NO: 44813 - DNA, 151 bp, Gossypium hirsutum
  unsure (1)..(151): unsure at all n locations
  Clone ID: LIB3582-050-P1-K1-C6
attttataattgtattgtaccaaaggtgactgagagttgnacaattgagtctatttattataagggctatataattaattaatngaaaagttnatattaatagaattaattgtgaaatatttagtaaactttggtacaatacaattataaa

SEQ ID NO: 44814 - DNA, 186 bp, Gossypium hirsutum
  unsure (1)..(186): unsure at all n locations
  Clone ID: LIB3582-050-P1-K1-C8
ccggtcgaccagctccgcacttatagaaacgcattggcgggaagagtnaaactaggggaactaagtaagagtcaaagcatcgttagaagtaaagtgtccctcgcacacgtaattcagcaggcagaaggatgcacgcaacgaaacggatggtcaaagcgcaaagcagtntccattgccgaaaagctt

SEQ ID NO: 44815 - DNA, 496 bp, Gossypium hirsutum
  Clone ID: LIB3582-050-P1-K1-D4
ctcaaagtcggtccactgttcttcgctttcttgcttttcttcttcttcgtattcttcaggacattgattcagtgcagctgaaatgggtatttcctggttttgaaggaaagaaaaaggggaaatttttttggttcacataagagcttggtttagtgcttaaacaagtcaagaatggtgaggggtgaagtgggtatttccgggttttgacgaggataggggaaatttgtggttcaaagggcttatctttcggtaatttttgtggtttagttcataaacaggtgaagaactgaagtgggtttttacgggttttgaagagaaaagaggggagagaattttgggttcaaagtgctgatctttgtgtaattttggttcacataggagctttgtttagtgcataaacaagtcaagatggaggacacttatatggggttttcatgggtttgaagaaaaagggtcaaaggactaatattgctggaaatttgggtcacattggggc

SEQ ID NO: 44816 - DNA, 414 bp, Gossypium hirsutum
  Clone ID: LIB3582-050-P1-K1-D5
gggacacgaacgcataacgttctcgacgcatgagagcagcaagcctgcaatgcaacaccgggagcagccctcacagtgccaacaggaagcactgtgaactaggctaaccaagacatcaaggaaaagctacccatagcatgaacctcaccgctcctgttaataaccctggacatttcgaggggagcttaccaactacaaaccctcgccccaaagcatctctaccagcctttacacgagaaacgcttgatcctgacttcaatacactaagagagcagctagactagctgcatagagggaggcaaagccaccacaagcagcaggggcaggcaatgttgcgaataccagccaaaaacaaataagggcactgagccaagaagccactacgccaacggagaaaagtgacaagagacacga

SEQ ID NO: 44817 - DNA, 387 bp, Gossypium hirsutum
  Clone ID: LIB3582-050-P1-K1-D7
cccacgcgtccgcccacgcgtccgcgggtgagcgtgtaacttcatctttgccgaagattgcagatccgtgtcctgaaaatggtaaattaaaggaaattgtgatggctgctttagtcaatctgccttctgcatgcactgtggagaaaactactgatattgatgattccaaagagcgctgggaggaaaagtctgatgaagtggacgatgattgctgtttggatgctaaacaaaaggggagcacttctgcggtaaatgaagaggtcattgatccaggtgtaaaagtggagaaagaagtggttgaaggttcatcatctgtaccttctattgaagttgatgcggataataacaagaaaaatgtcactgaagattcagagagaagttcacaga

SEQ ID NO: 44818 - DNA, 459 bp, Gossypium hirsutum
  unsure (1)..(459): unsure at all n locations
  Clone ID: LIB3582-050-P1-K1-D9
ctttgatgtttgttgagtcttcaagtgttagtgagtttatgagtactttcctcctattatcaataaataactatgcttccctcttatcaaatcccaaaattcttcataattttaaatatttcattaaaaaaaataaaccagcttataatcgtattaagttctataaagaaatttaaagggggatagaactcaagataatcattattaaggttgttcactccatagttattaagattgccgctagaagttgtggcctgaggttttaggggtatcgttgtttcccttttcctaaatatcatcaaaacatttatgatttgtctaacattttactcagtaaattttatgatctatttgatatgattatttattatctggttcattcaaaacatactgctttatnaaagaaaaacttctttctcttcattcttgcatttgatacaaatttctttagtgattttt

SEQ ID NO: 44819 - DNA, 403 bp, Gossypium hirsutum
  Clone ID: LIB3582-050-P1-K1-E5
cggacgcgtgggtgaaagacatatttgtggtgcagactgcaattggaaactttttcacggctgtattgtcgagagaaggcagagtttacacattctcttggggcaaagacaggaagcttggtcaccaaactgagccaaatgatgtggagcctcagcctcttttgggggcactagagggggggcccgttgtgcaaattgcagctggttactgctatcttctctgcctagcttgtcaaccaagtggcatgtcagtgtactctgttgggtgtggcttgggaggaaagcttggacatggctcaagaacggacgaaaagcaccctcgactaattgaacagtatcggcttttgaaccttcagccaatgggggttgctgctggggcttggcatgcaactgttgtggctcg

SEQ ID NO: 44820 - DNA, 441 bp, Gossypium hirsutum
  unsure (1)..(441): unsure at all n locations
  Clone ID: LIB3582-050-P1-K1-G1
cccacgcgtccgagaaaatggaggaaaatggcagtggagctgaagccctacgccttctagggatcgccgagaagcttctccaaaatcgtgatttcaacggctcaagggagttcgcaatcttagctcaagaaaccgagcccttattagacgggtcggatcaggtcctagccgtcgccgagtggggtcctcgccgccgaaaaaaaaaataaacggccaacacgattggtactccatcttgcaagttgatcgccgatccgaagacaacgatctcatcaagaaacagtatcgtcgcttagctctccttcttcaccccgacaaaaacaagtaccctttcgccgatcatgcgtttaagtttggagccgatgcctggtccgttttatcgaacaactcaaaaaaatcttaattcgacaaaaaaataaacttttttcaccagnatngatt

SEQ ID NO: 44821 - DNA, 222 bp, Gossypium hirsutum
  unsure (1)..(222): unsure at all n locations
  Clone ID: LIB3582-050-P1-K1-G12
cccgggtcgtcttagcgtccgtgatttttggacgaacttgggttggggacggggggagaaatcatgacgaatttgactactggggacaattggctttattttcaaccattgctgtttggtttgtaacacttgtctatttagactatttaactttctttttttttataagcgtggctgtacatgnaactnaatgtaatancattattatatctnnnattttct

SEQ ID NO: 44822 - DNA, 563 bp, Gossypium hirsutum
  unsure (1)..(563): unsure at all n locations
  Clone ID: LIB3582-050-P1-K1-G6
ctgaaataacatgtttctgcaccatggctggagcataaaacctgggtagcagatggtaattcgtgctacagagatgagacagagaataaagcagacggagaagagggcctgaatcttttctgtgattacactactatacaggcacgattatctgaagaaagtgacaatgtatggggggtaatccctgaacttaggaagaagttacatttccaccagaaacgggcctttgaattcctatggctaaatatcgcgggttctttgatacctgcactaatggaaccatcatcgaaaaaaacaggtggttgtgtagtttctcattcaccgggatctgggaaaacttttctcattattgcatttcttgctagctacttgaagttattcccaggaaagcggcctttggtccttgctccaaagacaactctatatacttggtacaaggaatttatcaagtgggaaatccctgtgcccgttcatttaattcatggccgnagaagttatagagtcttcaagaagaatgagtgaagtttatggagttccgagaactatcaagatgtatgcacgtt

SEQ ID NO: 44823 - DNA, 551 bp, Gossypium hirsutum
  Clone ID: LIB3582-050-P1-K1-G9
cccacgcgtccggtgagaacaaagtgggacatgcgagactggtggtatctgcaacccaagaataccgatgattattatgatcccgaaaagcctggagtatcgggggtttcccatctggtcactgccctcattctttatggctatttaatacctatatcactttatgtttcaattgaggggatgaaggttttgcaagcaacctttatcaatcaagacatacaaatgtatgatgaagaaactgggactcctgctaatgctcggacatcaaatttaaatgaggagttgggccaggttgatactatcctttcagataaaacaggcactttgacatgtaatcagatggattttctcaaatgttcgattgctggtaccgcatatggcgtgcgctctagtgaagttgaacttgctgctgcacaacaaatggcgaatgaccttgaggatcgggatgcaaaaagatcaacttgttccaggcaaaaaggtaaacagcaagaaattgaacttgagactattgttccttccaaagatgaaaaggatcataaatctcccataaa

SEQ ID NO: 44824 - DNA, 263 bp, Gossypium hirsutum
  unsure (1)..(263): unsure at all n locations
  Clone ID: LIB3582-050-P1-K1-H11
cccgggtcgacttagncgtcccggactcttgggcggacgcgtgggcggacgctgggggtacataacttccaccttgcgccaaatgtagcggcgatttctccaatctccaatttccttcataaaaatcagccaataaaaaaaaatccctcgccatttctctaccttcctcttccgntacacntttttttttcctgtggtattttggtcannnnnnancttttnnctcaanaaaaaaaccactanatcnatccacnnctcattct

SEQ ID NO: 44825 - DNA, 391 bp, Gossypium hirsutum
  unsure (1)..(391): unsure at all n locations
  Clone ID: LIB3582-050-P1-K1-H4
cccacgcgtccgccggacttgggattcatcgtctcttcacttaccacaactcacagttttctgaaaatttcgttaatcagagaccaaccctgttgaaaatctcaatacccatttctcagagtcccaaaacttagtactttcataccttcaaaagctcaatcctcaaccttttggtcattgggatggtggaaaaggtggtaaacttccatcatttttgagctttttaaaccctttatttcctttaagtagacagttacgactcgcgatttctgaaagtttcattaatcagggaacactgagttcaaaattctcaatacccatttcccaaaatcccaanactctgtactttgatacctnaaagagttcaattttcaaccttttgctcattctt

SEQ ID NO: 44826 - DNA, 208 bp, Gossypium hirsutum
  unsure (1)..(208): unsure at all n locations
  Clone ID: LIB3582-051-P1-K1-A10
cccagacatacgaaacaaacaagttggtgacagtgataaaacgcaacaaatacaatatcatcatcttgacctataatatcctcatatcatataccttgatttcctctaccataactacaccaagaaagaaagctacgttcacactcgacaaaatctccaggactacactacgaggagggtggtcancaacaccctnacaaacaattca

SEQ ID NO: 44827 - DNA, 539 bp, Gossypium hirsutum
  unsure (1)..(539): unsure at all n locations
  Clone ID: LIB3582-051-P1-K1-B10
caaatctgtaaacgaaaaaaaaaggggggaaagtggttgattttgaaacgaagcttgttctttagcgtaaaatagtttcgatattttttattcgttttatagtaaccaaatggctggagtttgctgtggagttgttcctgaaagtgaaactgcagctgcggtcgaacaaactcggatgatgtcgtcnccngagaatggaagttcgtccgtttaagtttgtggctgacgctgccgttcaaccgccgtcggaaaacggccggaaacgtcagaagcttgatctcgatctcgtcctcccggcttctcctcgtgactgtgataacgctgttgagagctccggtactaacaaggttaacggagatcaggaaattaatgaaggtttaaattctaatagaatagtagaattagaaaaggaattgcccgaatttggtttgacttccgtttgtggtcgacgacgagatatggaagactccctttcaattcaatccgcgttctgtaaactaaccagtgaaactcaaatttcgtcggatattcactttttc

SEQ ID NO: 44828 - DNA, 107 bp, Gossypium hirsutum
  unsure (1)..(107): unsure at all n locations
  Clone ID: LIB3582-051-P1-K1-B12
cccgggtcgtcttagcgtccgaaattattgacactgaaatgattcgggtattgaaattaaaaataatccaagaccttccaccagaaacatangttgggtgttgcaac

SEQ ID NO: 44829 - DNA, 491 bp, Gossypium hirsutum
  Clone ID: LIB3582-051-P1-K1-B9
cgaaaattcagaaaacaaaagcctcaggtaggacgagtccacccctgttttgaatcagaaaagttcatcgagcaaccatgcagaccaaaatgctgaaacttctcttcctgaagaaaaggtgacatcagcttcacctaattgcctatccactgataagaaagagccaggtacttgtgcggggggtaaggaagctaaaaaggctagtcagtcaaaagatcatgaaccaggtgtaatgaggggatcagataacttggcatcccaggttccaccaagttctgcggaggagacttgggggaaggaaacctcagcacaagagtcttctcaacgaacagaggtagtgaaggaagtagaaatgtccgagtctgttccattagaaaagaatgagcctgctgatgcagctgcatcagaaccagtggcagagctatctgaaccagcagaggcatcaaaaaatgtagagaccgtttctggctctccatctagagcaaagaatg

SEQ ID NO: 44830 - DNA, 509 bp, Gossypium hirsutum
  Clone ID: LIB3582-051-P1-K1-C1
ggattctgcatcaattcctgctgccaaaaaagctgatattagggccaagattgcgcaacttcagaagcaactgaaaaaggtacagaagaagattgctgaacaaaatatgcagaaagcagtcacaatagcaattgaattggctgaacttgctaccaaagagggaaaaaccttctgtatctgcgggattgatgttggtttagatgcagctgctctacgtgaagcagtttcaaaagttattcagcagaaggaaatgccagttatggttttcagtatcgatgaaattacaaacaaggctgttgtttatgctggtgtaccagagaaatctgaatctatcaagcgattggaggtatcagaatggttgacaaaggcacttgggcctctgaaggggaagtgtggtagaggcaagggtggtttggctacaggacagggaacggatgcatcacgtgttaatgagggtattgatttggcaacttcatttgcgtcaatgaagttgagatgataaccgattt

SEQ ID NO: 44831 - DNA, 524 bp, Gossypium hirsutum
  unsure (1)..(524): unsure at all n locations
  Clone ID: LIB3582-051-P1-K1-C11
gctaatcctctctttcaggtttttggagcagaggacatatataaatcctttcgttttcttgagtcgactcgggggtatcatgcaaacgccgaaagcaagtagaacaagctcggtggtagtgcctcagaaaaaatctcctatgacaccacagactgctcgacagtttaagatccgggagtgttttnnnttctgtttcntcaccaaataccgcaagtaaggcatcaaaagaccaaagtcctaaggttaccgagcgtaaagcattgaaaagttcggtgtctgagaagaatggactgagccgagtggcggaacttgaagcacagctcgatcaactccaaggtgagttgaagaagacgaaggatcaactaactgcatctgagtcatggaagaggttggccttacaggaggctgaggaggcgaaaaaagagtatcgataatgtcagctaagctcgaaaaatctgaacgacaattgatggaaatttctgcttctgaggatgacccagtggaagaactccctaaaatatcca

SEQ ID NO: 44832 - DNA, 487 bp, Gossypium hirsutum
  Clone ID: LIB3582-051-P1-K1-C7
cccacgcgtccgcccacgcgtccgcgggtttacgggttggggcaaagttatcttctcaagatccaaagcatgctcattatggaattacttttgctcgtaatgtgattgattcagcagcagatgatcaagtgaatgaacatttcaagagtcaagctcataagttccttggtgtttggtgcgtgggtgctgctagaatttccatatcagatgctgaaagatctgtctttcagaaagaatctttggcctcacttaactgcgctgctttcaacatgaaggaagatcctgacttgatctttaacctcagtttggaaaatgcagttcagaggaatttggatgtggcctgtgacaatgcaatggtgtactctaacatggtgactgaagattcaggtaggggctggaggctattggcactaatactttctgcagaccggcggttcaaagacccccaaaccatacttgaagttgctttggatgaagctgggagttt

SEQ ID NO: 44833 - DNA, 456 bp, Gossypium hirsutum
  Clone ID: LIB3582-051-P1-K1-C9
cccacctatcctgcttgagtagaccggggtggaaaacaatctcctaccaaactcactttcacttcatgtgctttacattatcttaccatctgcttacacattctcacactatgaggaagaccatactcttagaaatcaacttctacaagggatctctgatctcacgctccaaacattatcaaggggtgagcaaagctacttgtacaagctgactcaaacacactattatttcttacctatacaaacattgcctcataactagtacatgtccagtcactattaagcttcacttctgctggactccacataaatgagctgactttataaggaaacagacaagagctctgacctatacattttcaggtacatctacaccatcaactaagctctccctaagggaactgcttcaaaactatttcttgatctaatatacttgttatcagttctaccaaacgc

SEQ ID NO: 44834 - DNA, 482 bp, Gossypium hirsutum
  unsure (1)..(482): unsure at all n locations
  Clone ID: LIB3582-051-P1-K1-E12
ttcttatcccccaatcactgttcatggtgggtgcgtcccaaaaccttaaccaattcaacttagatcttcataccanaaagggaagatactgttcatgaaacatctcaaaagttcctaccagattatgcttcttcaaacccttttttcttgaaacctacatttactcaatcaggcggggggggccanaaaaanantaaacgaagatatcaaccttattacaatttcaatgggtttctttcttncatgtgtgttagctacttatttgattaggtttgagctttgaagggaagaaacaaaacataacaaatggacccagtaacagctcatgacacgccccttgctgctcctttcctcacaagacatctttatctaaacccccaacatcaatttcaacataaccacaaccaacaacaacaaccacagcaaaactccgataacaaacaaagccgngtccctaaaccagatcgacaataaacaaacac

SEQ ID NO: 44835 - DNA, 461 bp, Gossypium hirsutum
  unsure (1)..(461): unsure at all n locations
  Clone ID: LIB3582-051-P1-K1-F12
aatggttcgaggctatgggggcggggcacgcgtcaaaacaatttataaggctctagattaggtggtgaaactcttggagtgcgaaatttataattataatccagactctgatgcagatccctttctggagaaatgatcaattaacttagtggttgatggtttttctgctggctgcgggggttacnangaanattgtnaaatatttaataacatngatatatnatcacttacatactgcttntacaatatgtcaataccttttnacatcagtctgcacttagttatgttctgtagcatattttctacttttctgggtatatgtcggttattttacccagacttagatttggtctacctggatatgttgtcttttaagtggtttcttacccagatccattctttctaataaaatatcaaattttggttcctggtttaaaaaaaaaaaaaaaagggggggccgc

SEQ ID NO: 44836 - DNA, 489 bp, Gossypium hirsutum
  Clone ID: LIB3582-051-P1-K1-F4
caacatcggcagagaaaaaaagaaaagaaataggagaaacagaaaaaaaattatattcttttctttttgggttataaaaaccccatcgatgtacccttttgaaaaaaaagaaagcgatcggaatacaaaaaaaatatcaaaaagcaccaaaaggtgatttctgggtccttctaccgggtcttttttttcttttttttcgtggttctttttatttaagattccattaggcgttttaaagaggtagagcggtagcaaaaagtctaaagaaaatacctgaccgtcgaatcctcgctctctctgtcgccgtcggagcctgagcgggggttcggagatcagtttgaaggatcgatgagtagagcggcggagtaggggcttagttttttttcattttttttttatttctggcgaatgtgttaggttttccttaggtttatttttggtttattggtgggttttgaaacgtcgccgtttggagctaatgtgatagct

SEQ ID NO: 44837 - DNA, 476 bp, Gossypium hirsutum
  Clone ID: LIB3582-051-P1-K1-F5
gcaagatgaagcaaaaggcactaaaagaatgtgatgagtacacttcgaaatatgcgcagtgtgccgctgggaagactctttctatcgtatggcaatgtcgtaaacaagctaaagaattgaatgattgtcttcatcaattcaccaatgatgctgtcttggaagaaatgaagaaagaatacgtgcttcaggaaaatcacagagaatctgcaagagtctaagctcattcccatttcctgtgctgaccgcagagtcttgcaaacaagtattcaacgtacaacttaatcgttttaatccatatgcttgccttggaacttccatcttttgcagtgttatagggcaaatatatatatgtatatttatatatatgatggtcctatctccgatagttgcaaacactttgtgcatggattaaatcatggatctatctggaactgcagtttgagattttgggatatctaaaccaaatggtggttttt

SEQ ID NO: 44838 - DNA, 308 bp, Gossypium hirsutum
  unsure (1)..(308): unsure at all n locations
  Clone ID: LIB3582-051-P1-K1-F7
cccacgcttccgcaaagacggataagggttgttgttgtaccccctttagctagatgcttgcttgccttggccagtgggaaattatggaagtagttcagtttctaatagcgtgagattgtggcttaaaatctccagcactattaagcagtggtaatgtgtttgtttctgcattatagaagttagagggtangggtagttttgttgggttttttttcgcatttagccaagggcaagatgatgatgatgatgatgggtttatatgatttgtgctgtaattgaagtttcccttatggttttgccaaatccca

SEQ ID NO: 44839 - DNA, 304 bp, Gossypium hirsutum
  unsure (1)..(304): unsure at all n locations
  Clone ID: LIB3582-051-P1-K1-G11
cccgggtcgtcctagcgtccgcaacatctgcgctttcttcttcctgtgccttggctcttcaatttatctcactgcttcaacaacttctttcttccccaaagactccctccccacacaaatctctactacctatacgttcaaccactccactctatctcactatttaatataccttctataaatctcaaacccccactagagttgttttcaaaaccccacttcttattanactccaaacnnncccctcatcctcccccataacttccaacttntttctaactcnnaccatccacctntcaactct

SEQ ID NO: 44840 - DNA, 579 bp, Gossypium hirsutum
  unsure (1)..(579): unsure at all n locations
  Clone ID: LIB3582-051-P1-K1-G3
cccacgcgtccggaatttattaaaaattaaatgcggttgaattgataaaatggaggattgggttattaaggtattttggactcaaactttttcatatgcctataattttttagatttattaaagtgtaaaataatttaaatattatgtaaataatatttgttgttttgtaaaataaatgaatatttgataaatttattaaaaagttagagtttaattgatgggtgacataaattcaattaaatgcattagaagaatatactcgattttagattatggggatctaaagtgcattttcaccattgacttaaaaagacttggtggcaattaagctacttagtgtgtgttaaatgccattaaaaggtgtaaatgattgtgtctaggtgtcagagtgtgtaataattaaaagaattttggtgataggtggcaaatgacagngatgatgccaataaatnccaccctagcatgctaattaggctggaggaggggagtgaggctgccaacattttgcttcgttttcgtacaaagagagaaaggaaaattctaccttnaataaataggactaaattgcaatntaaccc

SEQ ID NO: 44841 - DNA, 575 bp, Gossypium hirsutum
  unsure (1)..(575): unsure at all n locations
  Clone ID: LIB3582-051-P1-K1-G6
cttcctccctctgtctgttaacaacggcccttggcttcctctctctctctctctctctctcaaatggcagctaatcaagatgattcaggaacactcaaatacaagacatgggtcttgaaagtcttcatccattgtgaaggctgcaagaagaaagtcaagagagttcttcaagctagggggggtgtttatgagacgaccatagatgctagacagcacaaggtgacagttactggcagcgtggatgaagaattgctcatcaagaaactgtccaagtcggggaaatacgtcgagccttggccagaaaaggttgagaagaaagagaaaaagcctgggaaatcaaagaacaatgagaaacaaaaagatggcgaaggagaagccggngatgatgataatcatgacccaaagaagaaaaagtcagatgaaaagcctgaattagccgccaccaaagacggcggttctgacggtagcaaaggccagcctgatggggataatcagccttcaacaggggaccaaatgggaggggaaagcgaacccnacactantgctgccnaaaggggggggggaatggagggaat

SEQ ID NO: 44842 - DNA, 484 bp, Gossypium hirsutum
  unsure (1)..(484): unsure at all n locations
  Clone ID: LIB3582-051-P1-K1-G9
ctcaagtcagcaaatttgcttggggggtgtgcggcttcaactgttctatctgacttaactatggctacagttggaaggaatatagcagctccattgctgtttctcaacttgatcatgtatttcattgtgctcggattcgctagctggtgttttaataggtttatcgatggccaaacgtgggacccaagtatgggtggaaatggagccaccggtttcttcttgacaatctcaatcttggctgctgtagccggcatagtttcaaagttagcaggagggggtcatattaggtcttggagaagtgatagtttggctgaagctggttcatcttcgttaatagcttgggccttgactgcattagcctttgggtttgcttgcaagcatataaatataggagggtggagagggtggagatngagagtaattgaagctctcataataattctcacattaaccgaactcttgtacntttgtttgatccatgcct

SEQ ID NO: 44843 - DNA, 411 bp, Gossypium hirsutum
  unsure (1)..(411): unsure at all n locations
  Clone ID: LIB3582-051-P1-K1-H2
aagattttaggagcttattgaaaatgctgatttaaagtctggtcagttggttgatagtaatacgaaaggaaatttgacccttgaagatgaaggatggtccaggttcacctccaatgaagatgttccttcccttgaggctagttctgctggaaaaaatcaatatggggatagtccaagacggggaatggtagatttgggacaaaaacccattgtttctgtccatcacttccccatgatcttatcccccatttcacctagagtgtttgtcttaccttctgagggatctatagctgaagcatgcttatcatctgaacacgaggattccattagtgctgggttgccttccttgagtaccggattgccatctgatgttgatgagggncctnctgctgcaaccctnactggtcattt

SEQ ID NO: 44844 - DNA, 306 bp, Gossypium hirsutum
  unsure (1)..(306): unsure at all n locations
  Clone ID: LIB3582-051-P1-K1-H8
caaggccttgctgatcttgaagaaggggtgcaggtggttcacaaaactcaaagctaacactgtgggcatcaaaaataaaatcccaggttccctaaacttaatttttaacgtctgctcaaagaaagttccaactggcttccaaagaacctaataattggctccaaatctttctcagggggatgtttggncnnnctctnaatatctaantaaaaaatanatnnaaattcnaaataacttatttcttaaanaatnaaaaacnaataantnaactacttncaattataaaaaaannctcatctaatnnaa

SEQ ID NO: 44845 - DNA, 436 bp, Gossypium hirsutum
  unsure (1)..(436): unsure at all n locations
  Clone ID: LIB3582-052-P1-K1-A10
cgtccgcccacgctttcgaccgtattctggggaccaggtgcgttgaatacaccantcnaggcanagaacactgatgccaggctgcgctgaatttgtaagtcggtcaccaagagtggattctaaacagaagatgtggaatagtccgatgactgccccagcatggactaactctcttntgaaaggttgggtgtgctaancttnnttaangtgctatagatcataaagattactattcaacctttcacaagacaaacctccagaagaaattcatggagcaagaatggaaagatttcagtcagaaatctacccggaaagccatggtggaactggcagcttctccggaattcatagattggatgattgagcatgcttacattttaaaactccttccacctgatgatagtttagatgaatcagtgggaaataaatcaagttc

SEQ ID NO: 44846 - DNA, 306 bp, Gossypium hirsutum
  unsure (1)..(306): unsure at all n locations
  Clone ID: LIB3582-052-P1-K1-B10
ttctacatacaacttactgactaaaaaaaccctttacccacctaacttaatctccttcaaatacatctggcgtgggccagcttaataaataacaaacacgcacccaccgatcttcctaacaaacactcacccanactgaataacgaatcgcaccctccctctacccattcatcaagcgcggcgtgtgtggtactcacacgcagaccgacccatacactagccagctacctaccgctcgttcctttcgcttncttccctttcttgctacccacgttcgctttctctcccaagcaatatataaatcgc

SEQ ID NO: 44847 - DNA, 398 bp, Gossypium hirsutum
  Clone ID: LIB3582-052-P1-K1-B3
cagggtttttgttgaagtggagaagagaaaaaagcagagtaatggctaagcccctgaagtttaaaggggtggatgaagagttgcaaaagattttggatgctaatatggatgaagcacctgctagaaggagagccagggaagcctttaagcatattcaacttggacttgatcatattttgttcaagacacctctcgatgggctgaagatgaaggagtcatatgagatgaattctaggggactggaaattttctcaaaaagttggcttccacagacctcttaccccaaggcaatggtgttcttttgtcatggttatggagacacttgcacattttttgctgaagggattgccaggaaattggcatcatgtggatatggagtttttgcaatggattaccct

SEQ ID NO: 44848 - DNA, 477 bp, Gossypium hirsutum
  Clone ID: LIB3582-052-P1-K1-B4
cccacgcgtccgctcattccttccctggcctcgagccgaaaggctatgtccaagccctcaacagcccaaaattcgacgatgaacgaagttgagcctttcgacaacgtgagcgcgacacaacatcggtatggtgaacatggtttgtgagtgcgttgatggtcgtgggtggagaacatgggcgcatggtggctgaagggaggcagtttctctctttgctggaaaagttttgtgtgctagggtttttttaaaaagtttgggcttttgttttatttgggtttaatgtaattggtttgtattttgggtttattattcattttgcatttgtatgtatatgggttgtaactgagtatttgggctggaattaggtatcccgggcaaaattgggtctcacaggtttcatatgggccatgtcttcaggaattggtggaagtcaaacattaatcatttatcatcaaatgatagaggcgtccaccggag

SEQ ID NO: 44849 - DNA, 422 bp, Gossypium hirsutum
  unsure (1)..(422): unsure at all n locations
  Clone ID: LIB3582-052-P1-K1-C12
ataatattgaaccaggtgaggttctgtatgagagcgtgtttanttaggaatgagttcctgacctgaggaatcctcaatcacctcaagaatactctatggacagttgccttggtgtatggcttctttaaacaagcatccttttctgtatcttgaaagaggttcaaacttttnctcagggttgttggatccccncacttttaacctgcaaaaaagagcaaggcttcttattttcccagggaatattacaatgaatgccttcaaattaatgagaatttcatacaatcccacttcacacccttttctattcttggtgcaatggacttacttttaccttgcaagtgcactcgggctgttaaaaaacttaatttaaaaagggtatatcgatgggactaccaccatgtgtacacattaaaggaaagcaa

SEQ ID NO: 44850 - DNA, 492 bp, Gossypium hirsutum
  Clone ID: LIB3582-052-P1-K1-D1
cggacgcgtgggaaaaaaatggagaaccaaaagccgctccaaaacgggaataatgtggccggcgatgatcgccgccgcgtcggcgatggatcggcgttgattttccttggaacaggttgctccagtgccgttccgaacgcaatgtgcttgatccagccctccgatcctccttgtcacgtgggttctcaatccctctctatccctcccgaacataaccctaattacaggtgtaatacatctttgcttatagattattgttcgaccaatggtatgcataattatattataattgatgttgggaagacattcaaggagcaagttttgcgatggtttactttccacaagattcctcgaatcgattccattgttttgactcatgaacatgctgatgcagttcttggtctggatgatatacgtgttgtgcaaccacatagtcctacgaatgatatcgatcccactgcaatttacctaactcaatacacgatggatagc

SEQ ID NO: 44851 - DNA, 517 bp, Gossypium hirsutum
  unsure (1)..(517): unsure at all n locations
  Clone ID: LIB3582-052-P1-K1-D11
cccacgcttccgggttcccttattggtgtgcgagagatttacttctcctgacttcctcaccaagaacagagataaatcctttgaatctaaggtttgaggattcatgactatggatgctgctgcggaatcatctgaatctagattatccagttcccagttaaacaaaaacaagccttggcgcggtgatnagagttgtcctaaagaagtattacctgttaggggttgcgggtcgaggaatacaagcccatcaggtcggataggatcgaggaacactagtccgtctaggcagaaggtggtaaagactaaaccacggggtttagatgaggagacggttgctacatttggtaaggcagttcatcctgatgttcaaatggaagataacatatgggcaatgttgcctgaggacttatttaatgaaattttggcaagggttcccccatttatgatattcccgcttccttcagtttgtaaaaaatggaattcaatacttcaagataatagttttctcaagtttcac

SEQ ID NO: 44852 - DNA, 493 bp, Gossypium hirsutum
  Clone ID: LIB3582-052-P1-K1-D4
aggaatgctgtttctgtttacagaggaaccacatggaaccttattaaagatagtgttcatttccacattggacagtggtatgcttctcttggcatgtatgatgttgcagtcactcatatgctggagatcttggccagcagtcatcaatcaaagacatcacaggagctatttctgagagattgtcttcatattgttcagaaaactggaaaaatgtttgaggtgttgaaacttcagttacctgttatcaacatttcctcacttaaggtcatttttgaagatcatcgaacttatgcatctcctgcggctgcaagcatcaaagaaggtgtatggtgttcactggaggaggatatgatcccatcattgtctgccaagtccaactggctggatgtgcaatcaaagcgtattccgagaaaatataaagaatccaatatttgtgtggcaggagaagcaataatagtggatattgaatttaaaaaccctctggaaatcccta

SEQ ID NO: 44853 - DNA, 424 bp, Gossypium hirsutum
  Clone ID: LIB3582-052-P1-K1-D7
ccccgcgttcagaccaatggtgaatgaggagagggcatggaagaaagacgttacaagcacacatataaataagattattatttttggctttaaaagattacaagaagaggaaggttaaagttagagttaactaaagcgagcgagactaagtcgggacattaggtgtgctactcgctcgggggggaaaacaaagaaagcaattgctaatgcattcactcctcactcttggtctcttctgaaaacgttttgctatttctggctaagtcgaggccatctgtgcaagtatggtagaagacaatcgaatatagaaccttgaattcaagtggggtaaaaaaagaggaactgcggggataaatacgaaagttcagttttactaatcatttacttattacggtattgactacactctttatgacaatgttta

SEQ ID NO: 44854 - DNA, 329 bp, Gossypium hirsutum
  unsure (1)..(329): unsure at all n locations
  Clone ID: LIB3582-052-P1-K1-E12
cccgggtcgtcttagcgtccgaataaattagattcattcccaaaaaagctanaggacatccattccttcctttagaacctaaccaacttgcactttcctacaacaattaacattactaacccaacccattcaatttattttgaataatcttctccaaacattcaatcattaatttccaccaaattctttctacaatacttgttttctnctatcctaaaataatntctataaaaaactccactatatatacacccttcatatatcactcacaattctttcaatttcttaaacctacaatttatacatatactaacaacaactactactat

SEQ ID NO: 44855 - DNA, 619 bp, Gossypium hirsutum
  Clone ID: LIB3582-052-P1-K1-E3
gagagatgttgaaggcagggtggcagcttcatcattgttattagcatttcaattcagtccccaaatctgtttttccaaaaaatgagttctaaagaaagttgcagaatcgagctccgcactgctattcgccaactcagcgaccgttgcctttactctgcttccaaatgggcagcagaacagcttgtcggaatcgagcaagacccagctaagttcacgccttcaaacacgagatttcagcgtggaagctcgagtatacgcagaaggttccgcaccaatgagattacttccacacctcccactggtgttgcctatgtgtccactccagtgatggaggaagatgaagccatacatggcgacttttaccttcttgccaagtcatactttgattgccgagaatataggagagccgctcatgtgcttcgggatcaaactggaaagaaatccgtgttcttgcgatgttatgctctttatctggctggagaaaaacggaaagaagaagaaatgatagaacttgaagggcccttaggtaagagtgacgctgttaaccgtgaattggtttctctagagagggagttagcaactctttgcaagaataacacgatagatccttttgggttga

SEQ ID NO: 44856 - DNA, 444 bp, Gossypium hirsutum
  unsure (1)..(444): unsure at all n locations
  Clone ID: LIB3582-052-P1-K1-F10
cggacgcgtgggttttagaaggcaagagtncaggtgaaataagccaaattactgaccttcgggttctagatgtttctaggaacagtctcactgatgaaattccaaaggagatagcagactgtaagaaattatcagctcttgtgctaaccaatttgatagatttcggttctgatgcggggggtgggacatggatggttttcgaggagaattcaatgcattcgacctcggtgttccttttgaactattttcccattctagtttggaggtcttgtgggcgccaagagccaatcttcgagggcggttgcccgctaaatggagtgagttttgctcactcaaggtcctaaatttggggcagaattactttgatggtatgataccggaaagcattgtgatgtgcaagagccttactttcttggatttgaattccaataatttgtttgggta

SEQ ID NO: 44857 - DNA, 418 bp, Gossypium hirsutum
  unsure (1)..(418): unsure at all n locations
  Clone ID: LIB3582-052-P1-K1-F11
cccagcttccgcccacgcgtccggggacgcgggcgtttattacagttgaactcttgaaaaaatttaccaataaactatctctaatagtgttgtttcaatgtccctttgatcattagttttcagagctagttatttcatttaagatagcgaaagcacttcaatgttttntttgggggggtgttnnttanaaaaattccaaactattnatttnnttcttacctacaantccatatattctttttcaaattncatnttncactttantnattnacatancaaaantttnttanaaaaaatcaatnaaaccttnnttancatttctnnattaattnaanntcttcccnatcctttttccctttatttcctaacacnnnttcccttctacctatatcctaanttnnaaattntttctcattcc

SEQ ID NO: 44858 - DNA, 418 bp, Gossypium hirsutum
  unsure (1)..(418): unsure at all n locations
  Clone ID: LIB3582-052-P1-K1-F12
tcccgggtcgtcttagcgtccgcccacttttccgcccacgcgtccgggggtgnagangagagattgttaanagcatcatatatgcaggccttgaagccattttcacttgcttctctctcattgcctccatatctgctaccaatctctcatcagtggaggtgttggcgctgggcattgcgaaccttttttcagatgggggggggtcnancctcnnntattttttgtcttccaacaccaannaanacttanctatcnannaaatnncnntnactcaatnnnanttaaataaccatanaaannaccaacaanancanctccttcaacannaccaaacccttnncatnnaccttaacnaccctaacacnnnnntnaatatattcnccaatttctatnacattctnanaaaccaaaaaataac

SEQ ID NO: 44859 - DNA, 468 bp, Gossypium hirsutum
  unsure (1)..(468): unsure at all n locations
  Clone ID: LIB3582-052-P1-K1-F7
gttcatttagtttctttttcctttttgctttgggccctttaatctttttacggtgtctaaattctgggtttattcttattcttattttcatataaattttgttgttttgttctgattgttcaagtttagaagaagggagctaagcttatttatctgtgagtgtactcttcgttttttgggggggtagcttaaaatttaagtgtgaatctttactgttttggggtttatttttatctgtttctgcataaattttaggattttgatgatcagtttggttatgtttcttagctgttgttatcttagtatagagaatcagaacataaaagcacggaagatgtttgataagagctgcaaaagggaaatttatcgttttgcatgtcaattattggtgntgttaatggttcaactttaacggggggaaatgaattgcatttcaaatacaaaaagtgcttaaaagaatncttattt

SEQ ID NO: 44860 - DNA, 554 bp, Gossypium hirsutum
  unsure (1)..(554): unsure at all n locations
  Clone ID: LIB3582-052-P1-K1-F8
atttgaagggctagcagtttttggaagaagcgctggtatttgtggaatttatagaactaacctccatttcaccattcaagaggtttaaacaaaataaggtgacgtcttcgccaataaaatgccaacattttttgtagaatatcaccagaaaaccatcttcccttggtgcctttgtaaggggtgtatcaaagacggcctctcgaattccctctctgttatagggcgctgtaagtctatgattatctttctcagtaatgcatcgatcgatccccgttaacaaatggtcataattccttcttatttcttccgaaaacaatttttgaaaataggaacgtgcaaccacctcaatctcttgtaatgtatccatttctcatccatcttcagtctgcaatttctgaatgaaatttgtcctccgtcgttgcgaagcttgactgtgaaaaaacttngtgttcttatccccatatttcagccaattaatcctaaccttttgttcccaataaccctcatctttttcaatcttaaagtttaaatcaatttttggatcaatcagcgcg

SEQ ID NO: 44861 - DNA, 470 bp, Gossypium hirsutum
  unsure (1)..(470): unsure at all n locations
  Clone ID: LIB3582-052-P1-K1-G12
tcccgggntcgtcttacgcgtccgtttcttttggcattaaatttgccgtgtctaagtcgagaaccatcttgctcttgttctctaccttctcacctttgatactcccagtcaacctctacggaggtcatttcataagtatttggaccaaattccccactgattctcgctttcttggattccactttttttactcggccggagttgggactnaancacctctttgcagactaaaaactccttaaaattgctaccggatatccccaagcactccattactggctccggacttatttgcttgaccgcccagatgttgcaaataaatcacaacttggcagaatggccatggctcaacaaagaatgcagcagaacatctctgnggccaatcctttttctcttgncttggctgcttatggaagtgctagaangcanaancatactggaagcaatnnancaccaaaaaatcaagttca

SEQ ID NO: 44862 - DNA, 520 bp, Gossypium hirsutum
  unsure (1)..(520): unsure at all n locations
  Clone ID: LIB3582-052-P1-K1-G2
caaagcaaaagcaagatcgggcggagaggtcgatctttggtcagagatcataggagcatcggatcaaccatccacaaacgcacccttaatccaacccgtttatcagagaagaagacgaacatctcaccccaccccctctgactcagaccaccccctgcttctgcaacccactaacagcaatggcctcagtttcgctgctgctaacaacaagcgggtcagttggaatcgctcactttccatcagagggaggataagcattgctgttgctccttgcttggcgaatcaaccacaacaaaagcagcccaggagaagggggaaaccgcctgttcctaaaggcaaggctgcagaacaatcaagcttcgataaggagagagcatattttcaagaggttgatgcctttgagttattggaggaaagcccatcaccaaaacactttgggacatgggcaacaggcaatcaaactgncactgatcctataccacttggttcaaccagattagagaaggggctcttttcaaag

SEQ ID NO: 44863 - DNA, 615 bp, Gossypium hirsutum
  unsure (1)..(615): unsure at all n locations
  Clone ID: LIB3582-052-P1-K1-G6
ataatattgtccagcattgtaattaaaagctccttttaagtccacctaaattacacgtcttccaatatagaagttcttaagctttctcaattcatttactcttattcaaaaaaagtttggaaacatttgcattgctcctatgttttactttgaatgaattttccacaataattttgattagattgttgggttaaaatatatgagttaaattctgtgaattgaatgctccatgatgattagtttttgctaaatcggttgggatactttattctgctcagaggatataaccaggcatttctgaatagttttgccattatttctgaatcttctaagcgagtttgtgacgttcatatggatgatacccataggccttcgcatggacagttttttaggccttcgaatggctctttctttttatttttttctatgatttttttgtgttttttgtttagaaggaaaaagttagtttgtcccttatttgcattgcangtaggtgctggtctgtatagtaaaaatatgtaaaaaaaatatatttagatttgtaaaaatttataaatataaaaaataattaaagttaaattataaaatataaaaaaattgaaaggaatncattga

SEQ ID NO: 44864 - DNA, 511 bp, Gossypium hirsutum
  unsure (1)..(511): unsure at all n locations
  Clone ID: LIB3582-053-P1-K1-A2
cccacgcgtccgttttcccctttgggaatcgggtgaaaagcctaagctttgctcatattttgccaaaggaatctaatttggagttcctatagtggctcacttgggtttttgctcaaaacactccctccaagtgtagattattctatcgtgcgctatgggaaatctggggagaaagggggggtagaatgcatgagaaggcaagtagaactgggaaagaaatagcgagctttgtcaatagttatattacagaactaaatggggttgaaaaaaggacccccaaaatttcacaagaagtcaaaaaatggaagcacccacctggtcagtcagtaaaggtaaattttgatggagcatatgatgggcaactttgtcaatcggcttctcggattggggtcagaaacagggaaggggatgttcttntatcgagctcaaagattcatcaagaagggacctcagcctttgctgctgacgcgcccccttgcctaaaagcagnccaaannggaacaaacatgca

SEQ ID NO: 44865 - DNA, 427 bp, Gossypium hirsutum
  unsure (1)..(427): unsure at all n locations
  Clone ID: LIB3582-053-P1-K1-A3
tggtgaattcaagtttgcttcttggtggttctgtgagaatttgatgggtgaatccataacagttgaggcttcaagtgaagaagttaagatatgagttgtcattctgtttgtagcttgagaatatgattacaatttttgttggttttaaatgtgatgtaaatagatcaagggaatgggttggtcaaatccagagcttgaagtgtcagtctcgtttggtagatttgagaatgattcactttcatgggagaaatggtcaactttctccccaaacaagtacttggaagaggttgagaagtgtgcaactcctggatcagttgctcagaaaaaggctttctttgaagaacattacaagaagattgcttgtagaaaagctgagctactggcttaagacaagtctatggaaacctcatcccactatcacaangct

SEQ ID NO: 44866 - DNA, 402 bp, Gossypium hirsutum
  unsure (1)..(402): unsure at all n locations
  Clone ID: LIB3582-053-P1-K1-A5
catggagataagatggtggttgcaggagatgtgtggtccaagatttattctatttggaataaatgttgagatgcgttaagtttttataaaagatccaatttatagacttgtcttgcattttactttctctcatatgatttttagctatttataaattaactttgataggtttattatggggggttagtagtcttcttttaaagcangaaaaaagctttttttttttttttcagttcatatatatgatgaagatcattcagttagcctgtttttataaggttttgttttgactggttctagaagagatgagtgtgcttcattttggtttcttttggcatatacggaaaaatttattccttggnttcaatgttttgtgntttactaatgctgatacccntgact

SEQ ID NO: 44867 - DNA, 494 bp, Gossypium hirsutum
  unsure (1)..(494): unsure at all n locations
  Clone ID: LIB3582-053-P1-K1-B10
gaaaaaactcaaattccctccaaaatgagcaccgggaccgccttttacaccgcctggagcgaccaactccaacaactcctacgacaactctgttcagccccaaaaccacccactacccaagatcaccttcaccacttaaaccacttagtgaacaaagtcctctcccactacncagaggtgagggggtgaaagccgcctccnccnaacgcgacntcctcnacattttcgccgccccctgggcttcagctttcgagaaaagcctccattggatcgctgggtggagacccaccacggctttccatttggtttacaccgagtcaagtattttgtttgaatcccacatcggcgatattctttctggtgttcggaccggccatcttggtgacttatcgcctactcaattcaggcgagtgagtgagctacaatgcgaaacggtgaaagaagaaaatgccataactgatgaattatctgagtggcaacacagcgtaagtgat

SEQ ID NO: 44868 - DNA, 506 bp, Gossypium hirsutum
  Clone ID: LIB3582-053-P1-K1-B4
cccacgcgtccgcccacgcgtccgggtgaaaatgagtgtgaatctggtgattataatgaagttccaccaagttctaatggtgatttacagcagtctgagattgaagtaaatgatggtgaagctgtggaacaaattgaagacttgaatggacaatgtattccaatgactcgactggattgggacatgtttaaatccgagactgatgttgaaaagtcgatgaacgaaacccctagtgataaaagcttagacacaagtcctaagaacaagttggttccatattcacggttgcatccgaagttatctaaaatacctggctcattcagttataaaagattgcttccatttttgatagacatagcaaatgattactcctgtgttcctggcaaagatgcaggcaccggagcttccaattgcaaaagttcttatgtagagcatagtgatcgtattaggctcactgtgactgcagctactgctatcggtttgcaccaggaacaggcaacacttgg

SEQ ID NO: 44869 - DNA, 430 bp, Gossypium hirsutum
  unsure (1)..(430): unsure at all n locations
  Clone ID: LIB3582-053-P1-K1-B8
gggacatgtaaagctcctcctggtgtggttgtggaagctgacattgctgcagtcaaggttttcatattttattttattcccattgattttgtttctcttcctgctcttccttgtatttgattggaacccaagtctataaattttcctttcatcccatgagcgatcccagttttttggggggggattcancccanaaagttgcttctaactttcccactataatagatctgggaggcattttgcagcagcagaagatttgactttgcccatatatagttcagttcgatatgaatcttattttgcaagtctatattgagaggggacttactcttaaaactatcgggtattctgataatgccattgtttctcaggctggttataggcacattgattgggctcatgtttatgataatgaagaggagattggcct

SEQ ID NO: 44870 - DNA, 239 bp, Gossypium hirsutum
  Clone ID: LIB3582-053-P1-K1-B9
accactcattcaaacacttcctcttggggcgacgacggctctccaaaaccactattattgagctcgttgctccaaacgatcctttcattaccactgaatacatgacttacatctttaagcacgacattgttcactgtcaatagaagcatcatgagcttaacgtgatatactcaaagacgggggggtttcttcaaaatcctttcacagttataagtatcataaaccctagaggaaatccc

SEQ ID NO: 44871 - DNA, 371 bp, Gossypium hirsutum
  unsure (1)..(371): unsure at all n locations
  Clone ID: LIB3582-053-P1-K1-C11
cccactcttccgaaaaataacatgggtgatggggataataataataatataggattttcagagggacgtacttaccccaaaaatgctaaactagagagttcatttgcaatttctcactttcaaagatgccctgctggaggatccatcagtaaccctaaatttaactcacctcaggttgtggagaaacatcttactctatctactgatacatccnantaacttttttaatcaaaaaacctttnccaattaancttncattcaatacattattaaatctttaaaacacacaacttttactccncccttcacatatacaaccaaaccctttttnaccttttataaacncacanancttaattatacctaatcaa

SEQ ID NO: 44872 - DNA, 349 bp, Gossypium hirsutum
  unsure (1)..(349): unsure at all n locations
  Clone ID: LIB3582-053-P1-K1-C12
cccgggtcgtcctagcgtccgaaacattaataagcgtctggtctgcgtgttgagaccttaacgttggctacttggctttgattttggggtccaaaaaattggtaattctgttttttgctgaaaaacactaaagaagatttaaattatagttaagtaagccatcgtgacattgaagttatggtgttattctcatagggctgttttctnatnaacancaaatntatcatccaaaaactnttccannttcaantttanttcncancaactctttnnttcatnntcancatttaaattttnntnctanctcaatnnaccctntaantnnannaaactccancaaccctaatct

SEQ ID NO: 44873 - DNA, 164 bp, Gossypium hirsutum
  Clone ID: LIB3582-053-P1-K1-D2
ctttaatcaccttcacaaatatgggtgcaatatctctctggtgtgtgatttgttctatcctctatttttccaaaaaaaaaccccttaaccctaaaaaccaaagcttttattacccaaatacaagccggttttggctatttttgcttaacttgcaagtcgtgaaa

SEQ ID NO: 44874 - DNA, 496 bp, Gossypium hirsutum
  unsure (1)..(496): unsure at all n locations
  Clone ID: LIB3582-053-P1-K1-E2
cccacgcgtccgcccacgcgtccgcccacgcgtccgcccacgcgtccgcgaggatttcgctgaagctctccctcgcacaatcacactataggatctggcgcggagtggaccgaatctccgatgttctttttactttcaaactaaaagaaggctttagacatttaccaaaacatggtcatgggagacagtcgcaaaccttccggttacaaagagtacgtcgcgggcttgttcgccggtgttgcgactgtggtcgtcggtcaccccttcgatactgtgaaggttaagttgcagaaacacaatactaatgtgcaggggattacatataggaatggcttccattgcactgctaggatactcgcaactgaaggggtatgctccttaatctttgttcttttcttttcaccataaaaagccctggtcgtaaatttgctcgtnngtagcgtttggtgcttttntatgatatgaanccaaagggatggngannactgnaatatga

SEQ ID NO: 44875 - DNA, 438 bp, Gossypium hirsutum
  Clone ID: LIB3582-053-P1-K1-E7
cccacgcgtccgcccacgcgtccgaggatacagtgcctggaagtttgagcgatttacctagtcatcaaaggaggcattctgttggtgaggaggataaactggatctacgagtaggtgattccttgcttatagatgatgagaatcaaaaagattctccatctttggtttcggcactgtgggggtgatccatgttttgagtttaaacacagaagatcctccagcaggaggaatgatgaattctcaccagctagccgtactttcactgagtctactcaagcgggtgaacttattactgggagtaaaccgctggcaggccggatgacatcagatcagatggaccttcttgttgagcaagttaagatgcttgctggagagattgcacttagcaccagtaccctgaaacggctggtggacttttcttgaaatgatcctgacggc

SEQ ID NO: 44876 - DNA, 383 bp, Gossypium hirsutum
  unsure (1)..(383): unsure at all n locations
  Clone ID: LIB3582-053-P1-K1-F12
ctgaaactggtaatgaagaagacggcgggagggggactataattgagtcagcttgaagaaaataacaaggatgagtcagatcctttcggacttgatgctctgattcctagttctggcaaaaaagatgatagagcaaaaggaaggaaagatgtggcaaccaagatctggaaagatgagatgtggacactaanatatttctcaagtcaaaaaaaaaanccttnatttcttntttaaaaattgctnctcnacnttataaaacaccatnntnccanacanttatanacatcttnntaaancatccatttnacaatntancaanntttacatctcnacaaannnatnccattnaaaaactatnnncttctttttnnnancaacaaata

SEQ ID NO: 44877 - DNA, 460 bp, Gossypium hirsutum
  Clone ID: LIB3582-053-P1-K1-F4
cccacgcgtccgggtggtttctctcggtcctggcaagttctacggaagcagtcttccacggcctcgcatctacaccgacaccaagttcaaccccggacgcgtggatcctcctgttccagtccttgatccgctgctctcatgggccgatgaagcccattggtccatgggtggtctcaggggggagcgccttcgcctccaaggtcgcatagaaggcaacgtcaaaaggcttaaagctcagcgcaagaagctcctcaaggacacccccgacaggggtcttaaccttaagaaaagcttaagggacgatgaagatgacgaagacgtatctccccctcctgctcccgtggcggttaaaaggaggaggttcttggatcttaacgatgacgacgacaccgaggatgaaaacaaaggcgatgatgatgaaataaccgtggccaagagaaaaaagaagagggttttgagg

SEQ ID NO: 44878 - DNA, 243 bp, Gossypium hirsutum
  unsure (1)..(243): unsure at all n locations
  Clone ID: LIB3582-053-P1-K1-F8
tttctttcttgtaagcccggcgtttgtcatgcgagcagtatctgacaattcaaaattcatttgtggatgcaactcacaatcagggacaactccattttctacaatcgaggttgaaggtctctctgatgaagggtcactctcgaagcttctagacaagtcagaatcacctatcttggaatggtggatccatccaanctcccattgacttaatgatnccaattaancactncactnattcatntc

SEQ ID NO: 44879 - DNA, 553 bp, Gossypium hirsutum
  unsure (1)..(553): unsure at all n locations
  Clone ID: LIB3582-053-P1-K1-F9
ggctttgaatatgatttatccgtgtgagatgagggagtctacctccttcttccatcccaccaactccgtttccctccccaacctttctacaggtgggtttgtttggaagaggaagggctacagcacagcgattggtaggattaggagactacaatgttcagctcaggctccacacgggggggcggcatggccaggacgagcttttccacaccctggacacaagacttgggatggccccaagcctatctccattgtcggttcaactggttccattggaactcagacgttggacatagttgcggagaatccagataaattcagaatcgtggggcttgctgctggttcaaatgtcacccttcttgctcatcaggtgaagacattcaaacctcaactggttgctgttaggaatgagtctttggtaaatgaactcaaagatgctttggctgacatggagcaaaagcctgaaattattcctggggaacagggagttattgagggtgctcgccatcctgatgctgncaatgtgggtacagggatagtaggatgtgcagga

SEQ ID NO: 44880 - DNA, 376 bp, Gossypium hirsutum
  unsure (1)..(376): unsure at all n locations
  Clone ID: LIB3582-053-P1-K1-G10
gagaaggttgtgccaaaaggttctggtgagcgggatccaacttctttacctgaagaagttttggttcccaagggcttgaaggaggaaggtgatggcagagatcctagtgtttcagaaatggaggatccaatggcaggatcaaatgatcctgatccttcagcttctgctccaaaagggtgttgaattccanaatcataattctacnattttnatncttacaaaaccnannaaaanttccntccttttcanatctnnncactntatnntnatnannnatnncttnccaaantattatnnntnaaatcaannaaatcnantcctccccttttttcaaaatacattttnaaatnncttttttcttncccattttaaacca

SEQ ID NO: 44881 - DNA, 344 bp, Gossypium hirsutum
  unsure (1)..(344): unsure at all n locations
  Clone ID: LIB3582-053-P1-K1-G11
acaatctttcccgctccttctaactgggatatggaccccaaaatctcacttctcaaatcgtagctctctttcctatcaaacccttgctctcatctctcatgccagaaaaacatacaaccatccctttaactcactcattactccacaatataacagtgtgcatttcttaatagtggatgtttttganacnnntctctcaaataanactactaanttcatcaanatcaaccctatataaaacattcccntctaanaaacaccttanaaccctatataaaaaaccaataccattnctccacaccntactaactcaaaacttaacacccctatatttnnttctacat

SEQ ID NO: 44882 - DNA, 338 bp, Gossypium hirsutum
  unsure (1)..(338): unsure at all n locations
  Clone ID: LIB3582-053-P1-K1-G12
ggaaacatagcccgtgccacgagtaggtgtagggctgttcatgttgaaggggaaatcngtcctccttgggtcgcctccgcgccctcaatcntgttgaattccacccctttgcttcttccccatgcaggccactctacgagtctctggttgagtagcctttcnnaagnagtcgcgagagcccagtagagtttttttcaggaggggggtttggaaatnnnnaaagcanacttcttaacaatnaccaataaantcttcctttacaaatccaaacacttccattacntcatcntctttctccatccanaactttccnaccctaatcaaattccacaaaaccc

SEQ ID NO: 44883 - DNA, 553 bp, Gossypium hirsutum
  unsure (1)..(553): unsure at all n locations
  Clone ID: LIB3582-053-P1-K1-G2
cccacgcgtccgattagcattaatatggtgagcggatccctatagagatccaagattacgaacgaatacatgccaaaccctaggtctaatatactgttacttatattgaattcactcgcaatgaagctccacaactttctaactgcataaatccttattgataccaaattaagatgtgtggctgtgcattccgctacaccacatttggagtactaacgctcaggtccgcacctagaggacttgacaaacagtgctcagataggctggtctagggctcaatccatgcactatctcataaactgcattaagtgtgaagatgtaaagctactgtgagaagtcactttgtgactcaaattatactaaatttgtaaagttagttgctcagaaattaaaaggaatgcctcgcattttcttttccctcacaaaaattactgggtcttgttgttcagaatgtgaggcttaatcttcacaggaactttttaaagcattaaaaggcttgcaatatctatttatggaagaacaagaacgctgtttggaagtgacaaaagngata

SEQ ID NO: 44884 - DNA, 417 bp, Gossypium hirsutum
  unsure (1)..(417): unsure at all n locations
  Clone ID: LIB3582-053-P1-K1-H11
agttctatatcgcgagcagcatcctgagcggcggtgcaaaaagtatcaacaccgttnccaacggcaagagcaagggcccgaacggaagcaacaatgtgtgaaggaatgcatggaacattaccaagaggatccatggaagggagagagagaaaacaagtggagaatattatnaagaggaggtggtgtgacaaannananctacaacaaannaacaacccttactacttccatcncanatcnttccaataactattcaaaaaanaacatttcaatttcanattcctccananntttncttccaaacatcatttacttannnncatcaaccanttccncattnccattttanaaacaaaccccaacactttttttcttccacaccattntaaccccnaaaaaatttaccttntcactaac

SEQ ID NO: 44885 - DNA, 538 bp, Gossypium hirsutum
  unsure (1)..(538): unsure at all n locations
  Clone ID: LIB3582-053-P1-K1-H12
aaagaatttgttgattcatggatgggaggaggggcttggaaggctggaaaatttgctttgagccttcgccttgcattgtggtccgaaaatcttggtcttcaccgaggagagataaatcaaataatcgaccccattatcgattcgagttacaaagatatatgggttgggactgcaaatagtggtacnacaatctaccangatgtgttctcctgtgtcccgagtgatctcatacattcccggcttgcgctccgacaaagcattgtgtattggaaagaaagactcggtcacactacaatcgatttaggaatagcccctacaaaattagaatcatatcacaacggagaggttaaacaagtagaccccatggaaagattaaaatcggtaagaggacatcttgtttcgttccccttggatttcatttgcaaagaagatttacgacctgtntttaatgagagtgaatattatgcatctccccaagnnnnncatngagtgagggagaagttatacaaaaaagcctaaattcttttttcttactata

SEQ ID NO: 44886 - DNA, 258 bp, Gossypium hirsutum
  Clone ID: LIB3493-027-P1-M1-A10
cctcaagttaactactcccaggtttggtgatattaaccatctaatttctgccaccagagtggtgttacatgctgcctccgtttcccgggtcagctaaactctgacctgcgcaagcttgccgtattcttcattccgttcccccgactacatttcttcatggtcggattctcgcctctcacgtctcgtggatcccagcaatacagagcactaacagttccagaactaacacaacaaatgtgggatgcctagaacatgatg

SEQ ID NO: 44887 - DNA, 322 bp, Gossypium hirsutum
  Clone ID: LIB3493-027-P1-M1-A4
gaccaaccaacattacaacaactgtagtatttacataaagacagcgactcatcctttcatcaaattcatcaaatctttcattcttatattctcttactttcttcgttctcatatcttcagggcctttcatttgaatctcatccacatctctcctatatttctcagccatctctccacatgctataagaagaagactccatcccaatcttttcttaaagactacccatatcttcttcttcttttttgtcagaagaaaaaatataccaaaatcccatattttgcttaaaaaaaaattccaattctgctggtttttacccctcca

SEQ ID NO: 44888 - DNA, 198 bp, Gossypium hirsutum
  unsure (1)..(198): unsure at all n locations
  Clone ID: LIB3493-027-P1-M1-A9
ggggcatgaaccgtgaccttgtattgcgttttataggatgggcagactanncttatcactcantctgccctcactatgcggagtttgtttggagagagcttctgaagaaggagggctttgtttttttttcttgctggccatcaaaaaaatctccatatcttaaactcaagagtgccaataagtattttcaagatttca

SEQ ID NO: 44889 - DNA, 366 bp, Gossypium hirsutum
  unsure (1)..(366): unsure at all n locations
  Clone ID: LIB3493-027-P1-M1-B1
gtagatatgagatgttgggtgntgganccaattttaaaaacgggtggctacaccaaangtnatgtcttnntgcttaaatcattggcacttttgttcttgtctacacttggggggggtgctactgatttttttttaaatgccagagactaaaccttcctattttggcttccctacctattaggtttgcagtttttttattttatttgtttatttttcctattattttaactttatttatacttactattttttttttgattgtttgtttgtgtttatcatatattctttttttttttattttttatatttcttttcttataatcttttattatattctttctttttctatttttcttatttttatat

SEQ ID NO: 44890 - DNA, 200 bp, Gossypium hirsutum
  Clone ID: LIB3493-027-P1-M1-B11
agaaaatctctgctaacagtagatggctatgatgaaaacacatctccctccttctaaactagcatttaaacatacaaatacaaaagtatcaacacctaacactatccactggcaactcaatcacattttcttctaataaatccaacatccaaatgatgattgccaacaaattccatctccataccaaaaactgtgacttt

SEQ ID NO: 44891 - DNA, 209 bp, Gossypium hirsutum
  unsure (1)..(209): unsure at all n locations
  Clone ID: LIB3493-027-P1-M1-B3
tcaaaaacactaagctttancttctgcatcttattaaatagtgaggggaccccaannannancnntcanactctatntaanangaaccatcttgggttacaagaagtcaaagtcgggccagtatcctttttctttattgatccagattaacaaacttaacacctatgatgaattatctttctattcttccaatcgttttccttatatct

SEQ ID NO: 44892 - DNA, 357 bp, Gossypium hirsutum
  unsure (1)..(357): unsure at all n locations
  Clone ID: LIB3493-027-P1-M1-C1
ttatctctaaaaaaacatctcgagctggaatttttaaaactagaggcaagctcttnttcaacatatttaatactaaaacaaccttcaactacactttatgacatgcaagcatggataatagcacattttttttcacttcccaaaaaacactaaaatctatggatcaatttgattatacaatgatttaactcactgttttttttcatattataaaattatcttctttttttgatactcttaatattttataatttccttaaatttttttattatttttctttttattcttatttttattattctttatatttcttttatattatatatttcttttattactatcttttcttctattct

SEQ ID NO: 44893 - DNA, 122 bp, Gossypium hirsutum
  Clone ID: LIB3493-027-P1-M1-C12
cctcccggtttttgaggtctatttattagacttcttaaatatacagctttcaatgttctttacccattgaaaaaatattttcgctagattctttaatccattaaaatatcatgggcaagggt

SEQ ID NO: 44894 - DNA, 350 bp, Gossypium hirsutum
  unsure (1)..(350): unsure at all n locations
  Clone ID: LIB3493-027-P1-M1-C5
cttttacatacaagcatttaattcagaaggaaaactaatcggggctcttccttcnaggttctctgtcaaaggaaaatcgaactgtttttctttctctttcaatcagcgacagagaaactccattcctctcatctattactctaatagccactcaggatggcttcaatcctgcagccatcgaacgctacctttcttccgtcattcaccaaaatacgtgtcacactttacactccaaaatctccatccattgaagacatacccggtgcgccttaaacctagaatgtccagtcctagatcaaggctcttcgtgatctagctcgacattcattaccactacatctctaaatgct

SEQ ID NO: 44895 - DNA, 131 bp, Gossypium hirsutum
  unsure (1)..(131): unsure at all n locations
  Clone ID: LIB3493-027-P1-M1-C7
ctcgaagcttccttttccnttgtatatctcaaaatgggggaagctctctttttcatctatnnctnctactatcntctccntcaaagctangcatatcttctacagccggggaaatccaacttttttttttt

SEQ ID NO: 44896 - DNA, 273 bp, Gossypium hirsutum
  unsure (1)..(273): unsure at all n locations
  Clone ID: LIB3493-027-P1-M1-D1
ccaccaacctctgttttctggtgtcgatttccaccacctaatggacctaccacaaggaaccgcgaaccagtcctttttacttttttttttttaattattcacatatacatatgctttgtcttttttcaatattcgcagngattcattgtttcaaagcttcaaacttttgcattctttagtgtttctatttctttggaaaaggtctttctgtgtatcatcaatggaagctaatttgttcatagcttctttttttccatcttaggttgtttctaa

SEQ ID NO: 44897 - DNA, 165 bp, Gossypium hirsutum
  unsure (1)..(165): unsure at all n locations
  Clone ID: LIB3493-027-P1-M1-D10
taaaaatcaaaaagccggaacgtctgatttcactacgggtgactgctattgcttcgctttggcgcanttcaccanggtttcttttgaaccctcccccttcaaaaaagggggggcacacatatttttttttttttgtacttggttaaactaaactcactagttttt

SEQ ID NO: 44898 - DNA, 233 bp, Gossypium hirsutum
  unsure (1)..(233): unsure at all n locations
  Clone ID: LIB3493-027-P1-M1-D2
aaaaaagctgccatggaatgngatgtnatgcaccttggtgacgagtggcatctccnangagccatggatcgtgttaggaaagttgggcagaaattctttgaactccctggggaggagaaagagatttttttttacnaccatagctaataaaatgttcagggctattgtagcaatctttctaataatgcttattttcatcntnagtggtatgactacttttttcatctaatttt

SEQ ID NO: 44899 - DNA, 186 bp, Gossypium hirsutum
  unsure (1)..(186): unsure at all n locations
  Clone ID: LIB3493-027-P1-M1-D7
ccgtgactaacnatnagatagcttctgatttaaaggagcgtgtcatcaanccggttaacccnanaagtaccttgatgagaaaaccattttccaccttaacccgtcagggggtttcgtcattttattttcccatggtgatacaaaaataactgttttcaagattattattgtttcttattgatgatt

SEQ ID NO: 44900 - DNA, 368 bp, Gossypium hirsutum
  Clone ID: LIB3493-027-P1-M1-F10
gcgtcttgtcccctatgtgagagcgaaattagtgagagcagcagtggttcaccatagcccaagattcgcattaacagtgcaggcaagacaatcgtcaatggacgaatgatcggtaatgtcttcaatgttttacgttgttctactggttcttgcatttaagtttgagtcgagttaagtcaagtcgtcacgagtcccccatgcaagagatacaaatatatagttaggctatcatcaaaaaagaaacttggaatgctatatactaaaaaagattgtttcttgaggctaacctcacatgttcatacaaaaattattttggttgctattgttcttttttaccatgtaatgtgtaaacatgactgtcttgaatt

SEQ ID NO: 44901 - DNA, 253 bp, Gossypium hirsutum
  unsure (1)..(253): unsure at all n locations
  Clone ID: LIB3493-027-P1-M1-F3
tgatggcctcactcnccaacacaacgtcagtttccaataacggcgccctnaaaatttccaattaaaacttattcccatcatttcttccaaatccctctcctttccctctttcaggccttccattttctttcttaaacccttaatcccaaccaaattctcctctatttcccctctccaattcttctctaatcctttcccttctacctttccttcttcccttttattttcttttttcttatcttttattcttttt

SEQ ID NO: 44902 - DNA, 353 bp, Gossypium hirsutum
  unsure (1)..(353): unsure at all n locations
  Clone ID: LIB3493-027-P1-M1-F5
atcaaatcaaaacagaacttgcaagcctttcatacaagactagtgattcntgttcaaaaaccaaacaagccaagtacatggttgatttggacgttcagatccctacaactttggatccattcgccttattctttgaattttatggcaatgaaaccaactagtttgttcttattctttttctttaattgtttcgttttaatattttcttttcttgttttgtttttatttatattctcttttttctattaatttcttttttggtttgagtgttttttttttttcctttttacttctttcttttttattttttcttttttttttttttttacatctttttcctctttttttttttt

SEQ ID NO: 44903 - DNA, 224 bp, Gossypium hirsutum
  unsure (1)..(224): unsure at all n locations
  Clone ID: LIB3493-027-P1-M1-F6
cggacgcgtgggcgggaaagaaccgcatattgtacataggcattttgnnannaccctnatagtgggccttacacacttaagtatcgcggcagcatgtggggatataaacgattgttcaaaataacttttttgtagcagtcttactaccaaaaatactattgcctctcggcacttctttttctttaaaatcttttttcatttactatttattctctttttttttt

SEQ ID NO: 44904 - DNA, 399 bp, Gossypium hirsutum
  unsure (1)..(399): unsure at all n locations
  Clone ID: LIB3493-027-P1-M1-G1
attcccctgctttaattattttgctganaacctaaaaacaatggcgtcttcctcntacacaaatactaaatcagaaagctagatccaaaccctaaaaccacctctttgttagtgatccacattcatatctttttttccttcattgccaaacctattcttaatatctctatttccaccatcaaccttttcctataatctttcttccctattttcttcactccttcctttcttttattctttccctactatcttatattctttttttattcttttctcaattatattttctatttattctttattctttcttttctacttcttttccctctctctctcttccttttattctattttttcctctttttttttctattccttttatttctttttcattttttc

SEQ ID NO: 44905 - DNA, 219 bp, Gossypium hirsutum
  unsure (1)..(219): unsure at all n locations
  Clone ID: LIB3493-027-P1-M1-G8
tcttcctgcctcctgttatcaacagacctgcttatttatctacagagagtcccctcaccntacaccnattcatcaattactatatccaacncatcaatgcattaaaccttaatttaactcacaaacaatctctttattttatcttcctcataattaaaacttttctttactacttttttctattttctatcttctatttttctttctttatatcttatt

SEQ ID NO: 44906 - DNA, 101 bp, Gossypium hirsutum
  Clone ID: LIB3493-027-P1-M1-G9
cttcatcaggaagcactgagatgatactttataaacattaggggtaaatcccacacatttccaagttttatatccactgcttgcattctcatacaacttga

SEQ ID NO: 44907 - DNA, 221 bp, Gossypium hirsutum
  Clone ID: LIB3493-027-P1-M1-H2
ctccctctttaatttgttttcttttgctttcttttacatatctttatatctctttcatttttcttttgctcgtttcgttgcatattttttttacaggttgtttattgtagaaaggatggctgattttctctaacatccttctgtcatactaaagattgcttgtctactccatcttggtttcttcctttcttaacatcttctatttctttatttatttattt

SEQ ID NO: 44908 - DNA, 185 bp, Gossypium hirsutum
  unsure (1)..(185): unsure at all n locations
  Clone ID: LIB3493-027-P1-M1-H5
caaaatacttcatctgcaatttctggtttagtcattgcttttggtgcatgttggcantnncatttattgtcctagtactactcccgcttattgcaatcaacggatatattcaagtaaaattcatgaaatgatttagtgcagatgtaaagacaatgtatgatgacgcaagccaacgtgctaatgat

SEQ ID NO: 44909 - DNA, 254 bp, Gossypium hirsutum
  unsure (1)..(254): unsure at all n locations
  Clone ID: LIB3493-027-P1-M1-H6
caaacttctaaacatgcttcgacagtanttgattcaagtgcttcggaaaattcatttaattcttttgggtccaaacataaaatgatttacggtaaatatctcatcatactcgggttaaaacaatcaattcgtccaaacacaacaggtcaaaaatagtgtacaatgtatgtatatattttaataattcattacaatcctttatatttctctgtctctcaaaaatttatctcatttacagtttatcttctaatctt

SEQ ID NO: 44910 - DNA, 177 bp, Gossypium hirsutum
  unsure (1)..(177): unsure at all n locations
  Clone ID: LIB3493-027-P1-M1-H8
cgatcaagttcccattatgnaagtcgttttttaaaacgcagctaattccnactatccancacatacccttacttctattctcatatcacaaatacttagcacattaccgagttcaaaaaaaaattttttctcattttctaaaaatcaatcatcaataacctatacatgttccttaca

SEQ ID NO: 44911 - DNA, 371 bp, Gossypium hirsutum
  Clone ID: LIB3493-029-P1-M1-A1
cggacgcgtgggctttttttcgttttggctctagtttctttgattcttcttggaatttagagtgatggccggaaaaggagaaggaccggcgatcggtatagatctcggcacgacttactcttgcgttggagtatggcaacatgaccgagttgaaatcatcgccaacgaccaaggcaaccgtacgacgccgtcctacgttgctttcaccgattccgagcgtttaatcggtgatgccgctaagaaccaagtcgccatgaatccgatcaacaccgtcttcgatgctaagcgattaatcggcagaagatatagcgattcgtcggttcaaagcgatatgaagctttggccctttaaggtaatcgcctgtcctggtg

SEQ ID NO: 44912 - DNA, 377 bp, Gossypium hirsutum
  Clone ID: LIB3493-029-P1-M1-A12
aagctttgcagacacatataagatggattgcccagctgctataaaccgacttgtaacctctggggtgcctgctaccgttgagcaccgagctgcagccgccacatctgctactaactcggctgccattgtggctgaatgcgtgcagaattttatcactgccatggactcgttgaagctcaatatggtggcagttgatcaagtgcatcctctgttgtctgacctctccgcatctctcaataagcttggcattttgccacctgatttcgaggggaagatgaagatgaaggaatggatttcacggttgtcgaaaatgggcgcggctgacgagctaacggaacagcaagctaggcagctccactttgacttggaatcttcat

SEQ ID NO: 44913 - DNA, 318 bp, Gossypium hirsutum
  unsure (1)..(318): unsure at all n locations
  Clone ID: LIB3493-029-P1-M1-A3
tgcaatgaagtttttcctttctcgattggtctaattaaaggtcggggaaaccttttattacttcctttttatatggtcattcttgccctgctttttataatattacttatgtgagggaccttattttcatttttttagggtcacaactatttaccttttttgtcacattttgtgggcngtaatttcttcactttttttttttttattcttcttttctttttttttatttattcctttttctccttttctttcctttttctcttattctctttcctattgtgtttgtgttcttcttttactttttttttttctttttcc

SEQ ID NO: 44914 - DNA, 384 bp, Gossypium hirsutum
  Clone ID: LIB3493-029-P1-M1-A8
gtttattctggatttgggcttgtggaattgaatcaaagcttgcggatgatgtggggaatactgaaatggatcttttcttgattggtaagatggttaaggctagtgtttcttcctgtgggcaagtgcatttgaatgcagaacagatgatgaaagcgaagcgctttcaggaatttttctttaatggcttgtttggtaagttatttgttggatctaaatcatctggagcaccaagagaatttctacttcgggataaatcaagctcattgtggagtccatcccgcatgtatttgcttttgcccctcgaggataattcaactgatgaattgagaatacactggcccgggataacagcttgcacattagctgccgaatttttaaattaaa

SEQ ID NO: 44915 - DNA, 222 bp, Gossypium hirsutum
  unsure (1)..(222): unsure at all n locations
  Clone ID: LIB3493-029-P1-M1-A9
ccctcccggcatctaaaaaaacaggcaaggtttaaaatcactggaagcatgtcctgaaacaaaagctaagatgagtgaacttgaaaacgaactgttaaatatcgtgggcttagatgagcttaaagtacatctttttaaatgggcaaaggggatgctcttggatgaaagacccanatcgcttggatttaaagtttgtcctttaaaaccaccttatatttcttt

SEQ ID NO: 44916 - DNA, 386 bp, Gossypium hirsutum
  Clone ID: LIB3493-029-P1-M1-B5
ctccaggttcaccaggaacgaggtcagcctcgagtccaagtctactattggcgttgagttcgctactcgtagtttgaatgtggatggcaaggtcattaaagctcagatttgggacactgctggtcaagaaaggtaccgtgcaataacaagtgcctattaccgaggagctgtgggagcactccttgtgtacgacgttacacgccactccacattcgaaaatgtagagaggtggctaagagagttgagggatcatacagatcccaacatcgtagtcatgcttgtcggaaacaaatcagatcttcgtcacctcgtggctgtctcaaccgaggacgggaaatcctttgctgagaaagaatccctttacttcatggaaacttctgctctgg

SEQ ID NO: 44917 - DNA, 367 bp, Gossypium hirsutum
  Clone ID: LIB3493-029-P1-M1-D12
cgacacccttttgattattggaacaaggcattggatcaatcaataattcaatcgaaaccgaaatcggcaatgggcacgacgggtgggagcgacgtggaggcgggattcgccaagctacaaggcgaagacttcgaatactacatgcaaacctactccataatgctcggccgcaactccaagaaatccaccgtcgacgtcgacttagccagcctcggcggcggtatgaacatttcccgccaccatgctcgcatcttctacgacttcacccgacgtcgtttcgcgcttgaagtcctcggaaaaaacggctgcctcgtcgaaggcgtcctccaccttcctggtaaccctcccgtcaagctggattcacaag

SEQ ID NO: 44918 - DNA, 375 bp, Gossypium hirsutum
  Clone ID: LIB3493-029-P1-M1-E12
actccctcttcttttggtctcggcttttccttcccattctttgtcttagcccccttttttttgggtttttttcagctgatctttgtccatggattttgattagcttttctgttgattttctgggaaaaaaggtttgatctcttttgggtagtttatggaggaaattatcagcacctttctcaattcttttttaataattagtaaattgacaaatttatgagtttttttttggttttaaattatttgttttctgattaagataggaaaaaaaacccaaatttaagattccttttttcttctccttttttgcaaattataaagtttttcaggcatcaatctttatttgtttctttttatcttttggccgattctgag

SEQ ID NO: 44919 - DNA, 387 bp, Gossypium hirsutum
  Clone ID: LIB3493-029-P1-M1-F6
gcaaagtgtcttggccattgaggctagggacaagcataattacattcacagagacattaaacctgacaaccttcttctggacaaaaatggtcacatgaagttatcagattttggcctttgtaagcctattgattgtgcaaatttaccagcaatctatgagaataagcccatggatgatgagaatatgacagaacctatggatattgatggatgtattactgataagagcagttttagaagccctcgtgagcagcttcagcattggcagatgaacagaagaaagttggcattttcaactgtgggaacgcctgattacatagctcctgaagtgttactgaagaaaggatatggcatggaatgtgactggtggtcattaggagcaataat

SEQ ID NO: 44920 - DNA, 362 bp, Gossypium hirsutum
  Clone ID: LIB3493-029-P1-M1-F8
cggacgcttgggcggacgcggggggcgattttactattgattcccttgtcaatttttattgtgtttctactactacttctattttttcatagctatcttattctgacaaatcagacaacttatgaactcgttagacgcaggcgaatcccatatctaagggggattcctgagcgagtatatccttttagtaaaggagtttgccacaatttatacgacttctgttgtggtggaagcaacatatacagtttggaacctctgccctcagctcaagagcttgaagaaaagtcaaggccctacacttgcttagatgttttaacatgccgttgctgctgacattataaggcaatatatcatttaccata

SEQ ID NO: 44921 - DNA, 368 bp, Gossypium hirsutum
  Clone ID: LIB3493-029-P1-M1-F9
cggacgcgtggggaagggacgcggggtaattcaagaccgcaggacatcagtgcggctgaagcaggatgggcacatgcagcaaatcgattgattgaggctgaaaacgaacctgaaatgattgaagattggccgcctgtgcttagatcaaaaagaaggcttatcttgacaacacagcttatgcagcaactacattgtgctcctccaagagcagttctttctgcagatgctataaaaaactatgagactgtggtctattttgttgccagattaggcttaggagaagcatgcagctcagcatatatatgtgaaagtgataaagctgttccttctgagagtggaagcacccttcctgaaaaggttaagaatag

SEQ ID NO: 44922 - DNA, 287 bp, Gossypium hirsutum
  unsure (1)..(287): unsure at all n locations
  Clone ID: LIB3493-029-P1-M1-G1
gtttcattgaaggctgnactcgcagagttctaaatcaaagcagcgccaccatcacccccaaaaaacaaagcaaattgtagaagatggcaacacaagcacttgtatcatcgtctcttacctactcattttatactgcaaggcagattctaacaactaaacgacaaattgtgcctccaaggaaaggatccttctacattatgctccttcaaaatcaaccctttaatcaaataactttaaaaaccttttaataacttctatctattctagttgccagaattactccttat

SEQ ID NO: 44923 - DNA, 373 bp, Gossypium hirsutum
  Clone ID: LIB3493-029-P1-M1-H1
cccacgcgtccgcggacgcgtgggagggtatataaaacccactgtctgccattttactggttttctacatctttagcatgaaacttgaaaccaatgtttttattgcttaaaacctccgaactgcatttctggtaaaaattttgaacctttgacctttctttaacaacttttgaggcatttacaataaatttcatcctgattaattatattgataatcctcattgctattgtaagtgcaacatttaacatccctttatgtccttccaacttttgaggcatttaatcatattgataatcctcattgctattgctattgtaattgccttcatatttacagctgtatgtaatgttcaatctgtaatgaagttgattg

SEQ ID NO: 44924 - DNA, 168 bp, Gossypium hirsutum
  unsure (1)..(168): unsure at all n locations
  Clone ID: LIB3493-029-P1-M1-H10
gtaatggcaaatactaggccgggaatattcccttgaatgatgggatggatgatgagagttttcggggtctatttcgtcctatcatccaaaaggtcatggtagtgtgtcaaccanatgcagttgttcttcaatgtggtgcagattcattgtctggtgacagattgggtt

SEQ ID NO: 44925 - DNA, 307 bp, Gossypium hirsutum
  Clone ID: LIB3493-048-P1-M1-A6
ctggatttgcaaaccattcctttatggggaaccctctgttttcttcctctttttgtctctatacattttagcctaaagggtcattgagttttgcttctagtcggagataaaatgggagcttatatagatttcatggggaaattggaatgggtgaatagttatggcaagaagcaatgcagaagtcttttctggagagcgaaagcagcgatgaaaaaagctttgaagggtaggggcaacaaaaaacagttcaagttccagtatgatccttcaagttatgctcttaaatttgacgatggttattggcatt

SEQ ID NO: 44926 - DNA, 373 bp, Gossypium hirsutum
  Clone ID: LIB3493-048-P1-M1-B5
aataatgcagatgtcaactgaggatgcttatcgtatggcaatgaagagcttgttgagatgggtgaccagaaatttggatcgtgagaggactagggtttttttcaccagcatgtctcctactcattcaaagggcgattggggaggtgaggctagtgagaactgttacaatcaaacaacaccaatcgcagattcaaattattggggttctgatagcagggaaagcataatgaaagtgattggggaagaattcagtaaatccgaattccccatcacgtttcttaacatcacacagctctcgagttaccgcaaagatgcgcacacctcgatttacaagaaacaatggaattcattgacgacagagcaactagccaac

SEQ ID NO: 44927 - DNA, 342 bp, Gossypium hirsutum
  Clone ID: LIB3493-048-P1-M1-B7
gtttcaggtctgggcgtggagcgtggacgagtagttaggggttcatgggttcgtcctgattcacgtggttatgctactcgtgggatgagaggaattagtagccgtgcccgtccacctagtctaaggaggcctgttggactaagagatagacgttctctcatgtgtgcaccagctagtggcagacctttatcacctcccccttctagatcctatgacagaagagcccctgttatgccttatccaaaaggtagctttaagagggaatatagtcaacgtgatgagcttcctcgtccaaggagcaaagaaattatggattatggatctagagttgtccctgataga

SEQ ID NO: 44928 - DNA, 325 bp, Gossypium hirsutum
  Clone ID: LIB3493-048-P1-M1-C4
ctttccttgttgcttatcttattggtgagttttagaatgctcatcaacatcttttacctgatgtctgacgactcatatctcccacactcattgaaatcctcctttctggagtgatgatcaactctactataaggcgcaggacccatctacttcaatctttctctgttcttttcctttactggttctacgttttttcatgaactctctctctatctttctctctctccttctgattcgaacccaatagcccgcccttattttcttcagcttttcttcaacatttttcatatagaattccatatctgaatttctttgcataataaaa

SEQ ID NO: 44929 - DNA, 311 bp, Gossypium hirsutum
  Clone ID: LIB3493-048-P1-M1-E3
acctcctctgacgcattgtcggagtctttcagttctttttcaaaagagtccaactttttaatcaattaaaaagttagagtacataagacttattatcgtagagtctcttcctttatatcctcaacctccatttcttatcagacgtgcacttcaagaagttgtattaccaggtggttacaaaggtgacaaagatggctacaccattcctgctgggactgacatcttcatttctgtatataatcttcatagatctccatatttttgggaccacccccatgattttgttccatagaggtttcaggtacaaaatg

SEQ ID NO: 44930 - DNA, 218 bp, Gossypium hirsutum
  Clone ID: LIB3493-048-P1-M1-E4
cccttccccacccccccaaaacgggtcttttgaaaacgccatgaccgccatagctgctgctgttgctttatccttgccaatctctttatgcgattcatgcaaggtttctaaaaagtttcagggcgttaaaggagggtttggggtgtttgcagtgttgggggaggcaaatagcttggggccaagcgataagaagagcctctggggcacgttgtttgatg

SEQ ID NO: 44931 - DNA, 561 bp, Gossypium hirsutum
  Clone ID: LIB3493-048-P1-M1-F9
caaatatatccacattttttattgaatgaagggtatatgatagttttacaactaaacaggaaacacttttttaatggaaatgaagtataattaacctgaacctacaggactttgtggaaggaactccaaattagagtaccatgtttatgttactactgtgattaagctaattttttggtgaaaaaaatggaacaaagagttacattacacttataagagccatgctttgccttgaccaagttttctttggttatggttttcttggattgtcactatgaactatgttgatgtggaaaatccattaattattttatggagtatatttacagttctctaatccttgttgcttctttttgtagattgcttcacaaatggggcttttctctttggtctttaatgttcaagttcctgctcaacacactatagtatggtattttattttgtgacgaaggaactagtacctggttcccttttgcatcgatttgttgatggtgatgatgaattccgcaatagtagactgaagcttattccatcagtaccaaaaggatcatggattgtgcg

SEQ ID NO: 44932 - DNA, 432 bp, Gossypium hirsutum
  Clone ID: LIB3493-048-P1-M1-G11
gactcactataaagaaagctggtgcgcctacacatacccctccttaattccctggtccacccactcttccgaaatatattcataaccattatgactttcttactaaacgtggtccatttcattcttatacaacacttaccacctttcaacttccacaacattccaaacatcgttaactcgttacccaatctactttttttctactctctcacatcaccatcctaaccttctcaacttctaacttaactaaaactcatcacccattatattctaactatctacactttacaacactatctcttaaacctcttcttataatctatctcttcattccactgtctataaacacttgactcctactttaagtactacctatctcaataatctaccatccttccatcactgctataagatcatctctaactatcacac

SEQ ID NO: 44933 - DNA, 501 bp, Gossypium hirsutum
  Clone ID: LIB3493-048-P1-M1-G3
cggacgcgtgggctttactcaagtggcggaggtgcatacttatttgtaccccatggtgaagctgtgcctataagtcaatctggtgggcatctggttatctctgagggtcccttgatgcacgaggtgtactcttatccgaagactgcatgggagaatactccgatctcccatagtactcgtatttataatggaggaaatacgatccaggagtttctgattgagaaggaatatcatgttgagcttctcggcaacagttttattgacaaagaattaattgttagatataagacagatattgacaacaaaagaattttctacaccgacttgaatggctttcagatgagtcggagagaaacatatcataagattccgttgcaggggaattactaccccatggcttctcttgctttcatgcaggggtccaatggccataggttttctgtccattctcggcagtcactgggtgcagcaagctgtaaacaggggtggctagagattatg

SEQ ID NO: 44934 - DNA, 224 bp, Gossypium hirsutum
  unsure (1)..(224): unsure at all n locations
  Clone ID: LIB3493-048-P1-M1-G6
tggaggggttggtggtcgtgggatgtgtgacntaaataaaactataaacatatctatccacctcctcatttcaacttccccttcccattgtttaatacaagactcactatggttcatcatatactatattctgagacctactcatacaacactagaaattctttcatacatatcacttaaataacatttcaccacatctatctctaatatactgattcctctca

SEQ ID NO: 44935 - DNA, 591 bp, Gossypium hirsutum
  Clone ID: LIB3493-048-P1-M1-G9
cggacgcgtgggccagattgggatgttgcccctgcgtaagcttattatcatccattgatcccccccttgagtgatgaagtccgtactctgaatcaaacaaagcacatgggcgggtaacaaatatttaataccttccatttaagcgatctgcaagggaaacattcaacaacccgaatatttctgattgtctgagaatctctgtctttgcatttcaccatgagacatgttatcatccaagctcttgcactgaagaaatatattaccgcataaataacatgtcttactaagatcttcaacatattaaacacgaataacctacctccccgtgagtatcaaaggaactgctctggcaatcccacgttactaacacgccagagaaatcttattacagggcccccttcaagaaattcccacaattaacaaccatttttgaagatcatgatgcattttgatttatcacctactgtcagattctttctttcacatttttatctgcttgtatatctacattgctatagcttgcaaaggcagcttattaattgaatgtccttgagattgatgaatgatatgaaaccaaaatttttaatcttc

SEQ ID NO: 44936 - DNA, 380 bp, Gossypium hirsutum
  Clone ID: LIB3493-048-P1-M1-H11
attgtattcttagatttgtcattagtcttgcattactgttttgcttccttttcatcttaattcttaggatatatttctaggtttcattgtttgtgatacataggatgacttataaatgctaatagttttgcattagtcctctgtcatccgcaaggcatctttttagcattagtgcatgtattctcttaccacattgagtagttttgaactgctcctatgcattcctgtatatattttaaaatttctacaatggaattgtatattattgaaacttgggttttacttggatgaagtatacggggcagtcaggtggatcttcaaaacgagctagtggtcgtgaagcagttgctggaagtgagtttgacccacaacggtctcgt

SEQ ID NO: 44937 - DNA, 380 bp, Gossypium hirsutum
  Clone ID: LIB3493-048-P1-M1-H6
gttttgagataacataaagaagatggagcccatgaaagagcaccactgagtcactcatggaaatgggttcgagttctctgtctgactcaggtggttcttccattgattcactcaacaacaacgccttgaagttgggtcgaaatatctacttcaatgattcctccgccgctgtcaacgatggtcctgctactatgaagactcaatcaccaccgtcacagcgacctctgggttgtaagaaacctagggctggtgggatgattcacggtggtcaaccaccgaggtgtcaagtagaagggtgtgaagtggatctgagtgatgttaaggcttattatgcaaggcataaagtttgtgttactcattcaaaatcacctaaagccatt

SEQ ID NO: 44938 - DNA, 338 bp, Gossypium hirsutum
  Clone ID: LIB3493-048-P1-M1-H7
ctggttccgaaaatgcggggtgggagctaaaagtgcaaattatggaaggattatatcctttggaaaagatgtcacggaggcacctttatccgacattgatagaagagacctcagctgtgctcttaatggtcatggtgctgtaaacacgactcgtacaaacttgttaacggtatgccctgacatgggactcgttcgtatccaaccctatggaacgacgtatttcttatcgctgaccacactaccttgcaccaacccttattgtgaccccattctcaacaatgctcactgtgatcttcaacataccctacaagataaacctaattgccggtgagaatcaa

SEQ ID NO: 44939 - DNA, 365 bp, Gossypium hirsutum
  Clone ID: LIB3493-048-P1-M1-H8
cagaatgcttctttcttccctggtgcgcctttccatctttctttgctaggaattcaacctagcttgcgccaccctggaggatcatcggtgccacgcacctccaccccaccgccggttcacggatcaagaccagatatagctgcgaaaatctcggaatcgagaggcgtggcggagtgggacgctggtgagaggcgtgcggcgcaaggactcatgcaacaactttgagtctctgttcgtttgggccttgtttgggtctacttttgtgcctatttttcttgtattggatcatggcatgaatttggtcctacacacaccacacaaggaaaaaacgttatgtttagaacgattaccattggagcatcgga

SEQ ID NO: 44940 - DNA, 167 bp, Gossypium hirsutum
  unsure (1)..(167): unsure at all n locations
  Clone ID: LIB3493-049-P1-M1-A8
cgttattgcaatttgagcggaaacatgcttttgatgattagcaacttangctttttgaattgcagttacagtttgttcattcttgattttaatggattttttcgataaatatgttttaatttaagtcgattggttcttagcgtgtgcatgcaagacgttctgttgat

SEQ ID NO: 44941 - DNA, 387 bp, Gossypium hirsutum
  Clone ID: LIB3493-049-P1-M1-B1
cccacgcgtccggggggggatgggggggaggggggcagggtaaacaagcttaaaatctcacaaaaagatggctatactgtttatttgatatagcaagtattcaagaaaaagaaaatcccattttttgttaaaagggttttagattgctgtgttttgggagaggcaaaggggttgatttttataccaaaagatgaggttaggcaaagggtttcagtttgagttgtatcttcaaggggaaccccttattccaggccttcctgatgatgttgcccttaattgtctccttcgacttccggtcgagagccataccgcttgtaaagccctatgcaaaccatggcacttttttgttggtaataaaaaaccaattttcactttaaaggaaggaac

SEQ ID NO: 44942 - DNA, 317 bp, Gossypium hirsutum
  Clone ID: LIB3493-049-P1-M1-B12
cttctccgtcgggttcagagccggcgatggaactccaagctattacagataagactgttaagtccttcaagaaggttatttctttattggggcagcccagaaccggacatgctcgatttagacgtgctcctcttagtcatctcgaacaagaggtgaaacaccagcaacaagatgcacgacaacctcggcaaaagataccagagtcaggggattcttctcttcaagtagccaaaaatcaggtgtctgcttttaagcctttttgttcaagtctgggtcataggttgcctcctctgcctcacaatcaccacccgaagtaa

SEQ ID NO: 44943 - DNA, 280 bp, Gossypium hirsutum
  Clone ID: LIB3493-049-P1-M1-B6
attgatttaactcttgattatgggggagggagtattgaacataggggacactcccatacactgagatggaatcaaagggaattctaggagcataatatctgatgagatttctcccgcggatccagtatgtttggccctagtcattcctgattgccatcataaccaggagattgtcccactaaaaacatattttggtggacaggaaggtgttggaaagtatacttttcatataacaaataccaagccaaatgggttggttttgacagatatatctagctct

SEQ ID NO: 44944 - DNA, 369 bp, Gossypium hirsutum
  Clone ID: LIB3493-049-P1-M1-C10
catttctattattcttgttccttgccttacctgtcaagatcaaaagaaactcaactaccaaaacaaaaccactcaccaggccactaccttctggaatctatctgtcttgagcctaccaaaaatccaacatggaagattacaacagatcaaggtcatatggcaatggaatgatgcagctggacacttaccatggaccacctaggccttcagcttcttatgacctcaggtgccatagtgctgctgcctatgcacagtcccagatggctaacaactacaactcggggaacaacagggacttcaagttgaagaaagggaagagtacttcagcctcatcttcttcgaatccatggagctttggtgaccctgaat

SEQ ID NO: 44945 - DNA, 502 bp, Gossypium hirsutum
  Clone ID: LIB3493-049-P1-M1-C5
agcacaagctcacaaacaggtacatatatctgaagcaagggttgctaccgctttggataaactagcttacatggaggaattggttaatgataagctgttagaagatagaaatgcaacagggtccgatgtagcatccccttcttctagtacatcaacacaatctttggaagtgaagaggaagttgcctcgaaaaagcttggatgtgtcaggtccagttaaaccatatcacccgcggttgaagaatttctggtatcccgttgctttctccacggatctgaaagatgacactatgattccgatcgattgttttgaagagccatgggttctttttcggggaaaagacgggaatccaggatgcctccagaacacttgtgcacatagaacatgtccttttcatcttggttcaattaatgaggggcggatccaatgtccctaccatggctgggaatacacaacagatggaaaatgtgaaaaaatgccgtctacacaattacttaatgtg

SEQ ID NO: 44946 - DNA, 301 bp, Gossypium hirsutum
  Clone ID: LIB3493-049-P1-M1-D1
ttgcagacattcggggaatgaatgttgctgttactcgtgccagaagggctttattggttatgggtaatgccaaagctctggtgcaatccgatgactgggcagacttaattgctgatgccaaagctaggaattgttatgtggacattgattctctccccaaggacttccaaaaagactttgtctgcaaagaattttctgggcccacgggacttggttaccctccatcgcaggtaaggcttctaacacaaggagtttcaagtatgctggaccgagacatatatcaggagatatgcacatggac

SEQ ID NO: 44947 - DNA, 365 bp, Gossypium hirsutum
  unsure (1)..(365): unsure at all n locations
  Clone ID: LIB3493-049-P1-M1-D10
atctattctgcggcgttacatggatgacattggagtttcaaatgatgatgcactctcagggttttccctaaggcgcccatctcgagctgaacgtgctatagatgatcctatacgagaaatggaaggcatgcttgtggacgagtatggaagtaatgctacatttcagctgcctggcctcttgtcttctaatgcatttgacgatgatgaggaagagctttcggacagtccttgcggagaagctgctgacgcatcacctttagaaacagctcangctttagtagagctagaagcgtgtacagttactccaagtgataggcgtcattgcatcttaaaagacgtggatggtgagctngaaatggaggatg

SEQ ID NO: 44948 - DNA, 476 bp, Gossypium hirsutum
  unsure (1)..(476): unsure at all n locations
  Clone ID: LIB3493-049-P1-M1-D6
gaaatttgctcaaattcccagctcaaggttgattgtcatctgaaaattatacttctctatctttttactttatttcgccttcaaatcaaccaaatgccagttttgacttgtattttcacctcacgttgtggagctcgagaacaaactgaaagagcatgttcagaatcagacagcatccttgtctctacagacatagtgtaagcctaaaatgaaactttgacattttaactttgttgagtaacaataagttcattaaatatgatatccgctattgaatatatggaaaacttagcatcaatactaatntatcaagaggatgtaaatacatatgagtgtataatttcacacgtgaagaagctgaaaacattttgaagagagaacacgggaattgagcttcattcatggacgcttcaacagaaggtaattgtaactaacgaaaatgtttgacttaaatatcaaaatattttggctaaatg

SEQ ID NO: 44949 - DNA, 144 bp, Gossypium hirsutum
  Clone ID: LIB3493-049-P1-M1-E1
cgaaaaagaatggtgaccgtggagagaagttcgtaaggctcaacgtgccaaaggccttcccaccgtttggcccatcggcacataacccccacctaattgtgttgatcagagcacataccttgactactattttcatatcacaaa

SEQ ID NO: 44950 - DNA, 291 bp, Gossypium hirsutum
  Clone ID: LIB3493-049-P1-M1-E7
aatgcattctgaaggtctgaacgagatgcaataaactccaccactgtggttgctgtcctaatcgctaccgttgcttttgcagccatcttcactgtccctggacaatatgttgatgaccctaatgacattccgcccggcgactccctcggagaagcaaatatagctccaaagcctggttctataatcctcttcatctttgattcaattgccctcttcatttctctggctgatggggggggtacaaccccatttttacctatacacttctaaataactaaaccccaatctatt

SEQ ID NO: 44951 - DNA, 218 bp, Gossypium hirsutum
  unsure (1)..(218): unsure at all n locations
  Clone ID: LIB3493-049-P1-M1-E9
tctttctcccctactaagggagacgcactaatcgctagaaacgcactgaaactcanaaaccctgtcttcttccctttttatctattttgaactccaaaatggcgagcgaaaatgagagttccaggggctaggcaattcctggccgcaagatcccgttgatcactggcatcaccggtcaaaacggttcatacctcacctaattcctgctcaacaaaagt

SEQ ID NO: 44952 - DNA, 592 bp, Gossypium hirsutum
  Clone ID: LIB3493-049-P1-M1-F5
gtagtttccaatcttatgatgaagaagagtttcagcatggattgcttgtcttcctctccctctccctctccctctccctctccctcttctttgtcatcttctagagtttccatcgatgaaaattctgataaaacttccattggttatctatctgatggtctcatgggccgatatcctgacagaaaaaaaggagttccatggacagaagaggaacacagaatctttctaatagggctggagaagctagggaaaggagactggagaggcatctctagaaactttttgacaacaaagactccaacccaaattgcaagccatgctcaaaaatattttcttccacaagcaactctcaacaaaaaaaacccaccttcccacctgttttaccttgtttaaaaccacatacttggtttgaccacctattcttactaaaaatcccttaactccatttgcatcatcctcatcccattccttttgattgcactaattctcaaacaaatatttccccttattttaaacttacacttacccccccaaagccccctttaaaaaaaaacaaatcattcccaacaacaacaactctgcttattatacc

SEQ ID NO: 44953 - DNA, 238 bp, Gossypium hirsutum
  Clone ID: LIB3493-049-P1-M1-G1
cttatatggagtttgcactagctgcattcctctgtacatctcagctaaaacatactcatacttgaagccctaacttggtgctgagactctaccatttggtaccctagtaatcatgagtcattgaatcatgattaacatcaagatgggacgcgtgtgctatgtcaatgggttgctgaacatggttgatgcctatctagatgcaactggcgctaaagcttctattgctaaaacttacatg

SEQ ID NO: 44954 - DNA, 297 bp, Gossypium hirsutum
  Clone ID: LIB3493-049-P1-M1-G2
ctagcactcgaatgactgtctctgggactcccttctccaagtaaaaactttcgcttctcttaagagcctccgttgcaatagtgtgagcatagatgttttttgcttttggaataaaagaaaacttaatctcctggtaacaatttttccggttccgaatatctctgattattgctccaatgaccgatctatctgtaatggaacttttacactttttgataactgtttttgcatcacccattatctctattttgttgattcccaaattaatacctagagtgattgcttgtaatcctgcat

SEQ ID NO: 44955 - DNA, 286 bp, Gossypium hirsutum
  Clone ID: LIB3493-049-P1-M1-G3
ctcaacctttccttccttacaaataccatcaatggcgatttctgggctttatcttctttttctaaatctcttctcttatgggacgattctgtcttcagcgacgctttttacactccaaaaccattgcagtttcatggtatggccaggttcactctccggtaacggtgctgcgattggcgagggtggatttgttttggcacctggttcatcaactcaatatcaggctccacctggctggtccggtcaattctggggtccaaccggctgcacatttgacaacctctgc

SEQ ID NO: 44956 - DNA, 107 bp, Gossypium hirsutum
  Clone ID: LIB3493-049-P1-M1-G4
tgggttttcaggtggcatacaagggccgggtgttcctatagatgagcctcatcccttgaatccatcacgagtttgagatggccctatcattgcaactgccagccttt

SEQ ID NO: 44957 - DNA, 321 bp, Gossypium hirsutum
  Clone ID: LIB3493-049-P1-M1-G7
aaaaaaaaactcagtggctctgttgggtttctcccaacccattctttgcgccactaccaaccaaggccatcccacgcccttggtcacctcagtctccgatcaccgctgagaaaggcgcaccgtggcggcaccgtggcggcaccgtccgtgctttttcactctacatgcgtgctgtgagtcttccacctctttcactcagctttatacccttccatttcccttctcttcactataaccccacctgctattattctccattcaccagtgcttactcacttcatctcactatcttgtctaactaaacttaactccttttattat

SEQ ID NO: 44958 - DNA, 272 bp, Gossypium hirsutum
  Clone ID: LIB3493-049-P1-M1-G9
gggagatttaggagccctcggaaactatcccggttctccttttcttccctctgattcagaaattttgcttgattcttcggagcaagaggatatagtggaagaatttttcgtcgattccatccctggacagccgcgctctccatccgaagaagaaaaatcctagaccagggtgagtgtttttccttatgatcttaaaatcgataggttaggatagagccagattgataacaaccattttatacatctattcactctgtatttcaactcgttac

SEQ ID NO: 44959 - DNA, 156 bp, Gossypium hirsutum
  Clone ID: LIB3493-049-P1-M1-H2
gggagatataggagtctttcaaaagtctgagggctgtgctaaacttccttctgatacacaaatttcggttgatacttctgagcaagaggatatagcggatgaattttccgtagattacatacttggacagatgggctctgcatcctgagaagaaaa

SEQ ID NO: 44960 - DNA, 354 bp, Gossypium hirsutum
  Clone ID: LIB3493-049-P1-M1-H5
cgaaagggctgaaaagatcatcggcggcaggattgaaaataacattgagatcgattcgtgaagggaggaagcaaactctggctgaaagcctgaagaaagaatttagactaacaatgaatatattacggaccacaatctctgcagatgtctacgagggtatcagagccctcaccattgacaaggataatgctccaaagtggggcccaccaattcttgatcaagtggatgatgagaagatagacctactatttcagccatttacagaagatttgcagctcataggttccaaacaagaatattgccattttatgtgaaatcggaaatacccctaccttagatattctaaaaaacgaa

SEQ ID NO: 44961 - DNA, 367 bp, Gossypium hirsutum
  Clone ID: LIB3493-049-P1-M1-H6
ggccggcctttttttttttttcaaagtgggggaccagacacaaagcaaggaacatgaagatatatagaaagatactacaatggtagctttattactttgcttttactttttcttttataaattaagtggggtttatctattaggatttgagagagggagatgaatcaaaagatgagaaggcctgatgctcagcaatatgaacaaatagggttgcacatgctacactcccaaggatccccactttggtcttaggttcaataagattttatattagacttcacatttagaaaccctgaaatttattttgtttatgagtgaataactgtgccagtataataaaagctattaaggtgggataggataggat

SEQ ID NO: 44962 - DNA, 338 bp, Gossypium hirsutum
  Clone ID: LIB3493-050-P1-M1-A12
gtttcaatgggaaacctatggttcctcaacctactcttgcctttgtttcttcttcagttgtttcctattttggttgtctcaaaaccctatgtttttcctgaaaaatacttcatcaactgtgggtctgattcttccctcccactgggcagtaggaaatttgttggtgacatgtacccaaactcctcctctgtcacaaatggcaaaactgtgaaagacagcagccagcagtcatcgttagactcgggtctgtatcaaacagcaaggttttcaggacaccacttttcctatgatctcgatatcactgacaaaggcctgtatgtggtacgccttcatttctt

SEQ ID NO: 44963 - DNA, 262 bp, Gossypium hirsutum
  unsure (1)..(262): unsure at all n locations
  Clone ID: LIB3493-050-P1-M1-A2
nataaactaatataaaatatttcatgccgattttgcattttggagcgaaaattgttgcgagtaatgcaagacatccactcgatcgaaggtggctgcatattcagcggcngtggccgtggaggtggangtggangatgaggaaacaaaaggttacgatcgcaccaccattacaaccatcaagctctcaagtgtcctcgttgcgattctctcaacacgaaattctgttactacaacaactacaacctctctcagccacgtcatt

SEQ ID NO: 44964 - DNA, 213 bp, Gossypium hirsutum
  Clone ID: LIB3493-050-P1-M1-B11
agaaaacatagggaaaggagctgggccgggaaacctgaatttttagggattgtttcttcttttttttgtaaaatttggtgagagaaagataagatggtggcggacaaaggaaagaaggtgaaatttacagagaatggagaagaagagaactctgaacaaatcgataaagacctcgtcctttccattgaaaagcttcaagagatccaagatgag

SEQ ID NO: 44965 - DNA, 324 bp, Gossypium hirsutum
  Clone ID: LIB3493-050-P1-M1-B12
aaaaaaagaccaagtgaaggcgtggccactcgcaaagaccttaactttgactctcgcatgtcgtttctttttaggaatcgatgaaccagagcgtatctctaggcttgttaaaagattcgacgatataactttggggatgcattcgattcctttggattttccggggacagctttttacaaagcttataaagctgcggcagcgatacggagggagcttaaggaggttataaaagagaagaaagctgctatggtgacgggagttgtcatgcaagatatactttgtcatatgattggggccaccgataagaccgggaaatacatggc

SEQ ID NO: 44966 - DNA, 146 bp, Gossypium hirsutum
  unsure (1)..(146): unsure at all n locations
  Clone ID: LIB3493-050-P1-M1-B2
ncaatgtgacctagtcccctcataggtgaaagatgactaccaaaaaataaatccaaaaatcctaatataaacatccattaaagaacccgacccggtgaccccgaatgggggcgcatagaacagatgatgacttcgactacttattc

SEQ ID NO: 44967 - DNA, 190 bp, Gossypium hirsutum
  Clone ID: LIB3493-050-P1-M1-C1
cccacacgttctcatacacgtgggattcgggatatttactgctttgggttgcttttgcttttcttagacgggtggtatttgttagataactggtgctaccactgattcttaaaagggaagaatttgcttagccgatgccatatttgagggataggtattggaaaggagaatctatagcgtcattcctttt

SEQ ID NO: 44968 - DNA, 196 bp, Gossypium hirsutum
  Clone ID: LIB3493-050-P1-M1-C2
agtacgcgtacttcttaacacagggccggactatgcattaaagagaaatataaaagtgattgattattcagtgtataatctgatccataacatgattgatctactacacgactacattgtcaagtcggctgtaactaaaaaggatgacattttaactagctacctccaagtgaaagtcactgacccaaaatacttg

SEQ ID NO: 44969 - DNA, 285 bp, Gossypium hirsutum
  unsure (1)..(285): unsure at all n locations
  Clone ID: LIB3493-050-P1-M1-C6
gatgtattcgatgccgattacttgatgacacagatgaatggttttgtcaatgttgntaaagaattgccaccagatatatcatcaaatgaaccccatagagtttattgcagtaaacggaaaggtcaatttgattacatcgaaagtgttcgtccatccttattgaaatatcattacgtctctatcacaccagcaatgagccaaagaagggatagatatcttgtaggtacccaaattatgcaaaagctgcactttgtcaagcctgttacagagcattaaagctgactg

SEQ ID NO: 44970 - DNA, 376 bp, Gossypium hirsutum
  Clone ID: LIB3493-050-P1-M1-C9
gtggaaaggaggaaaggattggatcttggagttcactgacaggagccagtgggctattttcaaggatatgcatgaagagtgctacaaccgaaacattcgtgctgcttcagttaagaacatacctattcctggagtttgcttggtacatgactatgatgaaaatgcaactgatgtgacatttgttcgcagttctttcaagtacttgcggcaggttgaaactgatgtcgagatggctttggatccatcccatgttttttatgacatggatactgatgatgaacagtggatttcaggaattcatagatcttcacagagtgatggtagctgcagcacattggaattttctgacgaaatgtttgagaaagttatggacatg

SEQ ID NO: 44971 - DNA, 358 bp, Gossypium hirsutum
  Clone ID: LIB3493-050-P1-M1-D11
cacaatcgtaaacaggttttgccctaccgattggatttcaaactttttctttattttccaaatacttctcatctgcgctttgaaactatctggattgtatgatttctctgtccaaatagtacagattagagttggtttctcacttggttccaccatcgaagctttaactgataattgtattaattcctctgccagcagtgagatctcatcggccccaatccaagtcgttgccaccactttccatcgtcccaagccgcaacagccactgttcttgcttggattcttgggatagcactcttggcttctaagggtttaccaaaaataatttttccttaaattggaaaagaaaagaaaatat

SEQ ID NO: 44972 - DNA, 292 bp, Gossypium hirsutum
  Clone ID: LIB3493-050-P1-M1-D3
gatgattttccggttgatgggtatcttagtgatttgtctccaaattcgtgggctagcagtactgaagaagaaataagagaagggagctccttgaaattgaatttacagcttacctcatcatcatcatcctataactacgagtacataaccctcagagacctgatgttggattctaattacaggggtggtggcatttcagttataaactcactaaggactagcattgacaattgctacattgcccatttctccactaatggaattttagtccaaggcgggcacgagacctata

SEQ ID NO: 44973 - DNA, 370 bp, Gossypium hirsutum
  Clone ID: LIB3493-050-P1-M1-D4
aaattgtgtccattgaattaaatagctcctcagaatcttcctactggattggttacacgaaaggaatgcaagaactgcaaaggcatattgaagatcacaatgactgcttcgaagttgatccacttaatagtatttaccctgtacttgatcggttaaagatccaacaacttttacttgggctagaggatcttaacgtatggggacgctgcaaattcagggctcctcactttctcaaggttaacagttttgatgaacctgatttggtacaaagactgcatgatgcaacattatctcttccaagtatagtgaaaccgcatgttgcttgtggcgtagctgatgctcacagtatggcaattgtctttcaagttga

SEQ ID NO: 44974 - DNA, 267 bp, Gossypium hirsutum
  Clone ID: LIB3493-050-P1-M1-E1
ggaatctataaaggtattgtcatgtcaattaaagaatatggtgcctttgtggagtttaatggtggtcagcaaggtctgctacacatttctgagttatcacatgaaccggtgtctcgtgtttcagacgtagtgtctgttggccagcaaatttctttgatgtgcataggacaagatgttcgtggtaatataaaattatctcgtaaagcaactctaccccgacctgtatccgagaccaaaagtgtagttgaaggatctgctcctgttact

SEQ ID NO: 44975 - DNA, 350 bp, Gossypium hirsutum
  Clone ID: LIB3493-050-P1-M1-E11
ctaaaagatacagatataagaaaagtataggaagtccaatagttcagattttccaggttattgtagctgcaataaataagaggaagatggaactcccttacagagttgaattgttatatgaggacaccccagatgctcaaagaattcatcacacagatcagttccagttcttggacagggcagccattgttgccgaaagagatttcgaaagaaatgttgtttcatctccaaatccatggaaactttgttctgtcacaaaagtagaggaagggaaaatgatgggggggcttttgccggtgtgggccacaaccatcatattttggaccactttcgcccaaatgatcactttc

SEQ ID NO: 44976 - DNA, 132 bp, Gossypium hirsutum
  Clone ID: LIB3493-050-P1-M1-E12
cgggaatgggaaaaactacgctcttgcagctactggcatgattgagcaaaccaacgtcaggctctatttttattcagagatatacagatgatggcaaaccaactcaatctccgaagtcattggttccagaaa

SEQ ID NO: 44977 - DNA, 380 bp, Gossypium hirsutum
  Clone ID: LIB3493-050-P1-M1-E4
gtaaattcctaaaactctctggctgatggcactctgcaatctctcgattaatccacaccatcgccgagtttgctcccctttagccatcaattctcctccattttctttatttcttctgtttcgtagtcaaaacttaaactgcaaccttaaacgggcgatatatatatatttattctccatcaccttgcttcttctggtaccactggattatctgttggaaagtggattttctcatgaaagtagggaggtagctaccatttggtaatcatgataaagattggggaaaaccaaaatgcaattagttatatggtggattgcaaagatgccatgccttgtaatgatggagtaaatgaaaatatgggtgatattgtggatgaaac

SEQ ID NO: 44978 - DNA, 301 bp, Gossypium hirsutum
  Clone ID: LIB3493-050-P1-M1-E5
cggacgcgtggggttcagctacggagcggttgtcttagatggagctagcggcagaagaccgttcgtgacagggaatgctccggctcgtgtgagtggcaatttggtggaatgggtttggggtttacataaagaaggtaaatcgttaaccgctgccgatgcttatctggaaggtcgtttcgaggaatccgcgatgtgacgagtacttttggtcggggtagcttgttcacaccctgatccattggcttgaccgactatgagaagtgtgggccaaatgtcggtaggtgaaacggaggtcccaatg

SEQ ID NO: 44979 - DNA, 304 bp, Gossypium hirsutum
  Clone ID: LIB3493-050-P1-M1-F12
gcgctatattaataagccaagagatgatggacgcgagtcgagtttcagcaaacatgttccttgaaatgctgtgcggctcattttctgatatagcgagagctgctatagagctgaccaaactgacatactctcaaccagccttctgaggaattttttgtgtactcccgggcagcatgtcgagattactcggtccgttattgttccaagactatttccattgccaactcgtgcaagatttgagcctcagagttcccaaactcaaaatgtagcaagatttgatggaaattgtttttgacatttcaac

SEQ ID NO: 44980 - DNA, 357 bp, Gossypium hirsutum
  Clone ID: LIB3493-050-P1-M1-F5
agaatctctactttcagaaaatcgtcaactgagagatgcactgtttgatagtaaaaaggaagttaaccagctttcttcacaactttctgatgccataatgaaaatctcagagcagtctcttgttgaggaaaacttacttagaagggtagaaagcctcgagtccgcggttgaggatgcacatattgaagctaccatttgttgggatgtatataatttcttgttcaggggggcaatcagccaggtaaagtgcatggctgaagattcagagatggagcacaatatcatgaaaagaaatttatgaccctatattaaaagatgcttcttgcaatatgtcacatgccagaaagagtggatttg

SEQ ID NO: 44981 - DNA, 447 bp, Gossypium hirsutum
  Clone ID: LIB3493-050-P1-M1-F6
cgaaggttgcggaagagacatgtgagattgggacataagattcaagattgcgttaggcctggcggaagggttagcctatttgcaccacgattgcgtgccggccatcatacaccgagatgtgaaggctcataatattctgctaggagactattacaaaccctacttggccgattttgggctggctagattgcttgaggacgaaaacggttcctccttcttcgccaaccccgagtttgcgggctccttcggtttcatggcaccatgttagcaccctgggtcctgtactctaaattttttttaatggaactattaaattaaattaaatttgggggtttatgccataatcatgatttaaatggtaggaaatggggatgtggacaatatgaaatgattggatgggacttaaagcaagctttcacttttttacgtgctaaattacttggaatt

SEQ ID NO: 44982 - DNA, 329 bp, Gossypium hirsutum
  Clone ID: LIB3493-050-P1-M1-F8
attatgatgatcaaaatggttatggaagagaccgggaatatggctattgagatgatgatcggtatggcagatatgggattcaaacagtcgtgatggagatcggtatggcagagattatgaagaacgctacggcagagatggtgacagggatgatgactaccgagggtgaagtagaagcgttgatgattatcaatacggcacaatgatcttggagctctgattgagaccgcgctttctacgaagatggggcttattctcggcgggatgagccggaacaatctgaacaaaatattggggggccccctagggttgaacaatcagtgagtgag

SEQ ID NO: 44983 - DNA, 326 bp, Gossypium hirsutum
  Clone ID: LIB3493-050-P1-M1-F9
gcgaagaatttgacaaatccaaattgcgtcctccttacgacccctttaacaagaaaccggttatcgaagaagtggaagaccccaaaaacctgctacaagtgttccacaatatgagaggagacagcctaatcaacaatgctggtaagatgttcgatgcattgtcaaaagacggactgacccatgaagcattggaacttttttcagagttttaaagatggggcccgatgccggacagtgttggtcatacagcggttattgatgcttatgccaacgcgggacaaaataaaaaaactcacaaaaagtatatgcggatgttggcatctggg

SEQ ID NO: 44984 - DNA, 222 bp, Gossypium hirsutum
  Clone ID: LIB3493-050-P1-M1-G10
gcggccagaatccctgtaattagttgggtttcaaaaataagagatacgcgcttgcttgttgaagcgagggacgctgataaggtaatacagacatgatactagaggatatgggacgtccgtccaatgctgatttgtccgtggggggtgcgcgcttcatgtttacgccttctcgccacgtctgtattattgcaccaaaacactttgattggtttaccagacaac

SEQ ID NO: 44985 - DNA, 285 bp, Gossypium hirsutum
  Clone ID: LIB3493-050-P1-M1-G3
ttccggtactgcatgttcgacccaagcctcccctacagttgaatcacaaattatcggggagattcatacagtcagattgctgtctctaaccttactgtggtctttgcggcttcttggatctgtatcttgtactgatgcagagacgtccaggggaggtctgattgaagctactcactacggcggctttgatgttgttactgctggaaaagctgctggtcgcattgcctttggactcttcacaaaggcggctcctaaagcagcataaaacttacgagcactatgcac

SEQ ID NO: 44986 - DNA, 306 bp, Gossypium hirsutum
  Clone ID: LIB3493-050-P1-M1-H2
tacctccgtacatgcaacattatatattactgcgagggcgaataaacagaccgatatatgaactgaaaatgtgtccattacatctgcattgcagcatactgcattaggcgtgcctttgctgatcgcccctccggtaaattcatgcatgcccctacataactgggatcctggactaccggatgagactgtcacttacaactggctaatctgaatagtttctcttgcttttttgggccaactatatattgcaatctatctctgggcattgatcgaacttggggctcaagctcaaaggtatcgattcaa

SEQ ID NO: 44987 - DNA, 387 bp, Gossypium hirsutum
  Clone ID: LIB3493-053-P1-M1-A10
cggacgcgtgggcatggatcccaggcaagatttttattggcaaaattgaacccatcagcaacatacaacaatgccaatgaaatggctgccggttcagatgtaatctttacggatgatgtaagcttacaagtgttctttgaacatctccaaaggttggctgtacaatcttaatatagaaaaaatagtcgaaaggaagactcaggtatttccggtatggtatgaaaaattcattcaatacgagttatgtatcctgtcttacattctctcttccatttagttcttttttaccttttctttccatcaattttatgaatgagacgacgagcccccatgacgatatttgaaaaaaataagttttaaggatggccaataagggatgcagcagat

SEQ ID NO: 44988 - DNA, 396 bp, Gossypium hirsutum
  Clone ID: LIB3493-053-P1-M1-A11
tcttaccccgacccttaaacatcgaggccagtcattattttaaatttaagaacccacccccccgccaacatacacccatgacccagaattggcttgccttccagataaacaattgcacgcatcatgtaaagttacaagtcctcttagaacatctacaaccgttggctctacaatctccatatacaaaaaatagtcgtaaggaagactcatgtatttcctgcatattctgaaaaattcattcaatactatttatgtatcctgtcttacattctctctaccatttaaaacttttttactctttactttccatcaattttatgaatcaaaccacgatcccccatgaccatattttaaaaaaataaattttaaagatgaccaataatgtatccatcatat

SEQ ID NO: 44989 - DNA, 178 bp, Gossypium hirsutum
  unsure (1)..(178): unsure at all n locations
  Clone ID: LIB3493-053-P1-M1-A2
gttggccaaatcatgaccactctcgggagcggtgagtggatgatactactatncacaccccacgtgggatcctgcgctagatatatcaccggacaagttattctgctaccttcggaagcttcaaggttcttccaatggaggagcgattataaagaacgtggtggctcaagataggcgg

SEQ ID NO: 44990 - DNA, 389 bp, Gossypium hirsutum
  Clone ID: LIB3493-053-P1-M1-B10
gagccattgaagacaacttttcgaatctggaaccctcttgatttctatccgaaatttgtgtcttttgtccgcgaaatccctcctgtttgcgctaagatttgcactaaccaccatccacaggccaaaggattcccccatcatcggcaaagcatcattctttgtcgctgaatctgttccactattcgaagggcttctggaagtttctacacgaccgtgaccgctccgatctgccaaagaagagagacataaatttttaagatgtccatatttatggaaagagaaacatacctcgagtaaggcctctaattccacacgttgaagatgaccattgacgagcacttgagaggattttttttgatagaggaatcctggcagccccgaaaaatgga

SEQ ID NO: 44991 - DNA, 373 bp, Gossypium hirsutum
  Clone ID: LIB3493-053-P1-M1-B11
gtgcagatgcgtgcaacgggtgggggttgcctcggtgttgcagtctatactgccttggtttccgtccctgcatacatcaatgatgctcaggcttaaacgacaaatgaggatggtgaaaaagccggaccaaccgtcaagcacctgcttattatatctactggtcttatgactgggggcagtgcaattgtgacttgggttggtgtgccctcgaccttcaccatttacaattttcgcgatcagaaagctgttatgaactggctactactcttgtgcgtagggggaggtctctgggctgggcttactattggctttggtactgagtgcctacaccacgaatgcttgataggattccttttgctgcaggaattctggc

SEQ ID NO: 44992 - DNA, 394 bp, Gossypium hirsutum
  Clone ID: LIB3493-053-P1-M1-B4
caaaaccatctcaagattcatgtcctttgaaagatgcagtctttgccattgttaaggttgctttggagaccatagactttgagttgcattctggaactcatcctcgacttggagttgtcgatcatatatgttttcaccccttggcacatgcttccttggaccaaacagctgtggttgcaaagtctttggctgcagatataggctccaaacttaaaggtctcttccttttgaaccaaatgttatgtagatattgccagttttagttagattagtgagtgcaactttggaagttcaaccaaaaaaccagttggtcagctatgtttatggaatagtgaattcttttaatatcctgtagcctggaagattttgcttttttttttttttcgtaatcaac

SEQ ID NO: 44993 - DNA, 398 bp, Gossypium hirsutum
  Clone ID: LIB3493-053-P1-M1-B5
gccattgctctttcctgcaccgaggctaagccgatcattcatcagttccatcagcacactctactcgtttgatctcaaaattttctctggaaaatccgaaagaaaaagaaaaacaaacaaacacactgataaaaaaatgaaaataagacgacaatcccaaggcccattaagcaaaggcgaccaaattgaagtgaaacgaccaaacggagcgtattacgcagccaccgtgctccgacccccttcggcaatgcggaaaaacatggtgttcgtcgagtaccacgccgaagacggttccaaatgtgtcagggggtacgtcgacttaacccacgtgcgaccgtcgcctccgctggagctcaaccgtcgcttcagaatcggagacgacgtcgaagcctattggg

SEQ ID NO: 44994 - DNA, 326 bp, Gossypium hirsutum
  Clone ID: LIB3493-053-P1-M1-C1
ctcatgccgaagtattccttgggtgcttgatgaaaaactggcgcagaaacatggtatttcaacggatcttccagaggagttgcgtagcaaattcttccttcaaggtggacagctggttaacagaacgaagaaaaggaaaaatgagaatagaaacaatgttggggaagcaaacggagaatctgggaaatccaaaaggaataaaggagaaactgggaagcctgatgctagtaaggaagaaaataatcagcctgaggacgaacctgtcaaatatccaattgatgacctgctggtgaagcctggtcctgatgatccactgtttactgatc

SEQ ID NO: 44995 - DNA, 117 bp, Gossypium hirsutum
  Clone ID: LIB3493-053-P1-M1-C10
cgatcctcaacggtgtgtgtgtgaggaaaaaaactaccaagattggggccaaacaagatgggttccctgcatgaaccattggtagtggagaaccggttgaaaggatctaaccagggg

SEQ ID NO: 44996 - DNA, 394 bp, Gossypium hirsutum
  unsure (1)..(394): unsure at all n locations
  Clone ID: LIB3493-053-P1-M1-D3
gctcgacaaggttgttggcagatgacgtgctgtggacgagtctgatgtanccaaaatgatttatcttccggctgtgatcaaggaggttctgaggcttcatccaccgggccccctgctttcctgggcccgtctagctatcactgatgccactattgatgggtatcacgtgcccaaggggactacagcaatggtgaacatgtgggctattacgagggaccctcaagagtggccaaatccacttgaatttatgcccgatagatttgtgactggagaaggtgaggtggagttttctgtgcttggttcagaccttaggctggctccattcgggtcgggcaggcgaacatgcccgggaaagaacctgggttgaccaccgtcagcttttgggtggcaaccc

SEQ ID NO: 44997 - DNA, 146 bp, Gossypium hirsutum
  Clone ID: LIB3493-053-P1-M1-E3
cttggattttggagcccccaaaagcatagacaatattgattattacagatcgttactattctcctttaagtacggggacctatgtctactttggcctgaagctttaaccaccctgtgtgtttggaacttgaaaaccaaacttgact

SEQ ID NO: 44998 - DNA, 387 bp, Gossypium hirsutum
  Clone ID: LIB3493-053-P1-M1-F10
cgaatattctactagacgaggacggcaatgcgaagctctcagactttgggttggctagacaaggacctttggaaggatttggccatgtttctacatcagttgttggcacggtaggttatgctgcccctgagtatgtgcaaactggtaggctaaccgctaagagtgatgtttggagcttcggggtggttctatatgagctcatcaccggaaggcgaacactagaaagaaatctacctcggagtgagcagaaacttctggaatgggtgaaaccttatatatccgattcaaagaaatttcaccttatcatagacccctcccttgaaggacagtattgcataaaatctgctcagaagctagcatcgttggccaacaaatgtctaatgaaaa

SEQ ID NO: 44999 - DNA, 393 bp, Gossypium hirsutum
  Clone ID: LIB3493-053-P1-M1-F3
cggacgcgtgggtttcaaaggatgggtgggaggaacatatgcaagtcaatcatctggctcctgcactgctctcaatattgcttttgccatcccttattagaggatctccaagtcgaatcattaatgtcaattctggtatgcattatgttggcttcgttgatacagaagacatgaatgctgttactgggaaaagaaaatactcaagcctgttgggatatactagcagcaagctagcacaggtcatgtttagcagtgtcctccacaaacggctacctgttgaagctggtgttaacgttgtgtgtgtatcacctggaattgtgcacacaaatgttgctcgggatcttcccagaattgttcaagctgcatatcatttaataccctattttatcttca

SEQ ID NO: 45000 - DNA, 265 bp, Gossypium hirsutum
  Clone ID: LIB3493-053-P1-M1-F4
cagagctggctgatattctacaagtcggggggatcgctattagaaaaaaccactcaaagaaacaaaataattggacggggagctctaaacgaaatgctaatacagtatgagatggaatctatactgactaagatcacattgcgctagagaagagaaaacttatattctaaatatctgcacgaattgaagtgaccacctgggatgggacattaaacatcgtaaacatctctgacaacggtctctttcgcatgaggtggacaaacct

SEQ ID NO: 45001 - DNA, 298 bp, Gossypium hirsutum
  Clone ID: LIB3493-053-P1-M1-F9
ctcaacgctcccctctttgtctatgtctctgtaaattttcagctatgagctcctcccattctctcaaatccacccctctgaaaccgaaagcttgtctcagtctaacctcgaaatcgcccgtttccaaaaccccagaaaaggacttcttccaggttcccaaccgtgctcgtaaccgtgggggcgccctctccatcaaggagatcccgcaaggggcttaaagcccggcttaaccttcgaccgacccgaccaaattgggccggaaacagattttattctgggcccaccaatattcttcacc

SEQ ID NO: 45002 - DNA, 243 bp, Gossypium hirsutum
  Clone ID: LIB3493-053-P1-M1-G10
aaaggaaggagcagcggcggcatgagtagtacgctacaggactatcacataaagcgtaacaaacaaatccccagcgtcaaaagaatcctcctctctcgctttcgctctccgggagagctttcctttcctctctttcggctttcttttaggtatagagtcagcttcttttatctggctcgaacccccagtgaataattataatttggaaggtgaagaaacgaaacagggggggggggtttattt

SEQ ID NO: 45003 - DNA, 394 bp, Gossypium hirsutum
  Clone ID: LIB3493-053-P1-M1-H1
caagtttttagttatgccatggagaacgtgattgtaaggtctggagagaaggatgattctcagtttcccattaaagaaccaaagcttgaagcttccgattccttcaaacatttagcatttgatcaagggaatgcaaattcagttccctcaaatgataaagccaatggaatcgttataccagtaaaacccactataaagctccctaaaccagtgataatgttttctccaaggcccctaagtgagctcgatgctgctgcaactaagcttcaaaaagtctatagaggctataggacaaggaggaatcttgcagattgtgcagttgtggttgaggagctctggtggaagaccttagattctgcagcactaagaaggtgttctgtttcattctatgaaa

SEQ ID NO: 45004 - DNA, 361 bp, Gossypium hirsutum
  Clone ID: LIB3493-053-P1-M1-H6
acggggtgcttcacaatcacatgaggactcgaggcatcctcaagactcgaaaccgaacttagaaaacaatagggtcgagttgaaaaacccagaaagcaacatctcgattcgaccgatggagaaaaaaatggacttcgttgattcaaaatcatcaaaaaaacctgagaaaacccaagttccatataattacgaaacaatattgagagatgtcgatttgcctatcgatacgtccactatggataagttgatttctcagctccattatggtgttttcttgaaccaaaagagaaagaagtattgggttgataagaacaacaagaattgtttcatgttatttgcaagagatttatcaattacttgg

SEQ ID NO: 45005 - DNA, 366 bp, Gossypium hirsutum
  Clone ID: LIB3493-054-P1-M1-A11
ggaaaacgaagatggaatctgggaattacagttctttgattccaacgtttcaaagtcagtaacagtcgatgatattacactctctgcaaaacaagtaaatggtatttgcagaggcaataaatcgtctgcaaatgatttccaattcgtggtgaaagaaatgaacgacgtcaactcaattccatcgagtttttggtctgaaatcaaacaactcggcaagcttcagcatccaaatcttgttaatctgatcggaacatgccggtcggacaagaatgcatatttggtttacgagtacataaaagggaaacttttaagtgaaatccttcacgaattaacctgggaaagacggcgtaaaaatcccatggggat

SEQ ID NO: 45006 - DNA, 145 bp, Gossypium hirsutum
  Clone ID: LIB3493-054-P1-M1-A5
gtttggttgcttgaaaatcattggccagggaaattttttttacaaaacactggaaaaggacggttttttttaaggagaatgtcttacccatctcgaaatctgtcagacattttccagaaattgactcttcttttgccctttaccc

SEQ ID NO: 45007 - DNA, 224 bp, Gossypium hirsutum
  Clone ID: LIB3493-054-P1-M1-A7
ttctgatataggaagaaagccaagtgctttgaacccaaatatggaaattcagagaaccttctccactacaaagcaaactaagacatactttgaatcgtctctatcgaactcttccgatccctttccaaaacactcgataatgaagtcggaatgccatcattccatagcccagatcttttgcttcttcgcccttccgctgccaaagcataggctgcagcattaac

SEQ ID NO: 45008 - DNA, 380 bp, Gossypium hirsutum
  Clone ID: LIB3493-054-P1-M1-B10
cttttagctgtacttgatgagcgtgaatctttgaaaccaaaggttcaccggagaattgaagaactaaataaagctcgtgcaggggctaaattgcttgaacctgatggctataaaacctcttcctatggctccgagaagacatcacctttggagtggccccatgtaaataaaggatctagtatgaacttggctattaagcagcctgccaacatggctgttcaatcttcatggaagtataacaatgattgtaatcaatttgacaagcagctccagaagttgtctctcaatataccacttccaaataaagaaacattgtctagacactcgtttcttggtcctaatggtcttcgaggccagtggcttggacctagtgctgagat

SEQ ID NO: 45009 - DNA, 323 bp, Gossypium hirsutum
  Clone ID: LIB3493-054-P1-M1-B4
gaaagtgcaatactctggagatcgattgtgcgaatgtcaaagcaaaggtggctgtcggactctgcagaattcaccttcgtttgacacggttaacctcgatggaggcttgcaagaagtatggattttacttgctatggcgctaggctaccgattgtgtgcttacttttgcctgcgcaaaagaatcagtggatgtcatatttgagcaggattctactttgctgataaatatgtaacagaagagaaagttcgaggggctttgattactcctcacctgcaaacttttgaattccaacatgtgcagaagttatggtacaatgttaagt

SEQ ID NO: 45010 - DNA, 194 bp, Gossypium hirsutum
  Clone ID: LIB3493-054-P1-M1-C1
cgtatctgaattttttctttttcggggtctccaatttattctattccaattctgatggattggatgaggttcattctatgtcaacttcctaggtggggtattacctacaaggtggaaccaaaatattctgtattcctatatagataacaagcgctccaaatagccagaaaggaaaaaaatggggagggttcttc

SEQ ID NO: 45011 - DNA, 284 bp, Gossypium hirsutum
  Clone ID: LIB3493-054-P1-M1-C5
tgccattgcccaatttccttttgcaaccattagtggatgcctgcctggcttggctcaaatcttagggacttatttgtaggcaagacaaaaaagaacatgggcttacaagcttaatatttggatagatatgcttaaaatgagcaattttgaggactacgtcttactctaacttttttgttgtttggggtggttttttccacttcgttgctatttggagatgggtgaataaagaagttcctttgtttgcgagacgtggttaaaaaaaaaataaaaaaaaagggcgg

SEQ ID NO: 45012 - DNA, 365 bp, Gossypium hirsutum
  Clone ID: LIB3493-054-P1-M1-D11
gaagctttcagatttcgggctggctcggcaaggaccccccgaaggatttgggcatgtttcgacagcagttgtcggcacagtaggttacactgcccctgagtacgtgcaaaccggcaggctaactgccaaaagcgatgtttggagcttcggggttgttctatacgagctcatcaccggaaggcgagttttagaaagaaacctacctttaagcgaacaaaagctcctagaatgggtgagaccttacatatcagattcgaagaaatttcaccttattgtaaacccttccctcgaaagacagaattgcctgaaattcggtcggaaactagcatccttagcaaacatatgtctaatgaaaaactgttaat

SEQ ID NO: 45013 - DNA, 334 bp, Gossypium hirsutum
  Clone ID: LIB3493-054-P1-M1-E12
cggacgcgtgggcgaaggattaagaccagaacaacaatggcgttagccgctacatacaaaatagttctcggctcaatagcctttgcaatcttctgggtattagctgttttccctgccgtcccacttttaccaatcggaagaaccgccgggtctttactcggtgccatgcttatggttttattcagagtaataaccccagatgaagcttacgccgccattgatctaccaatcttgggtcttttattcggcaccatggtcgttaggtgttatctcgaaagagccgatatgtttaagtatttaggtaaattgctttcatggaaaagtaaaggagctt

SEQ ID NO: 45014 - DNA, 383 bp, Gossypium hirsutum
  unsure (1)..(383): unsure at all n locations
  Clone ID: LIB3493-054-P1-M1-E6
gagaatgagacctcaggtcacaattcaacaatggaggaaaggagctcaatggttcgagatggaccgtgacctcgccattgaagttgtttcagaccaaatatatttcccagtgttccaaaagtattgcaagggcgcttgctatgctgatgaacattatttgccgactttcgtgaccatgaaatttgcgaacaagaattccaacaggacattaacatgggtagattggtccaaaggagggcctcacccagctaagttcataaggacaaatgtgacagttngaattttggagagattgaggagccaaagccaatgccagtataatggaaataccacagatatctgtcacttgttcgccaggaagttctcgcccgatgctttgtaca

SEQ ID NO: 45015 - DNA, 372 bp, Gossypium hirsutum
  Clone ID: LIB3493-054-P1-M1-F1
cggacgcgtgggtgccgtattggcaagattaccttgttattgcatcgtatttggcttttaaaaagtgggattttcgttggctttaatgcaggtaatagtgggccggacgcgtacaccgtagttaacaccgcgccatggatcatgactgtagcggctagtactatggaccgaagcttcgtggcgattatcgaacttggaaacggagaaactttctaagggtcgtcgttttatactggtaaggccttaaagggattaccaattgtgtatggcaaaacaacagggaatttaggtgctgaatattgcctctctgggtcacttgatcctaaacttgtgaaagaaaagattgtgatttgcgaacaaggaatagtgcga

SEQ ID NO: 45016 - DNA, 281 bp, Gossypium hirsutum
  Clone ID: LIB3493-054-P1-M1-F11
acgcgactcgtggacctgacgcgtgggcttttgctggttgtaaaatggacgatgactccacttatcgaatcgttcgtcaagcttatagtctctaacaacgttacatttcaaggacgagactgggatttccaaatactgcctttggactatatctaatattatcagcaaagtgtgttatcaacttgacatcaaatttcgtttgaggtatgacagggatcactgataaaggtgtctgatcaaaagattatcagagccaatttcttaaaacaccagaatattat

SEQ ID NO: 45017 - DNA, 380 bp, Gossypium hirsutum
  Clone ID: LIB3493-054-P1-M1-F8
ataaaatttgagaatttttcgggttttgtcatcgaaacaagaataaaagggaaacttttcccttattttctcttgttttctcggacttcacttcgtttttcttcttcagttggcgtgaaatttgggtttgttaaaagaaaaacaacttgttttggtaggttttgcgtaactggtttttggatttaacttaaagaattaaacgttgattggtcgtagcgttttccaaaaagaaaaaacaaaaccatttcttcattttttatcaaaaccagagaaagcttgaatattcaacaaaaaattttccaactaccaacaaagactaggttgaatccagatttgtatttatttcaatttttttaatttagtttttctttctctccatt

SEQ ID NO: 45018 - DNA, 292 bp, Gossypium hirsutum
  Clone ID: LIB3493-054-P1-M1-G10
acgagctccattttctgggcgcaggcagttggatcctctctcaccaccttttctaatagctcttcctccaaggtagaagttgtgatagttgatgtttctgctggtcaaaaggaaactgagagttcgggtgatttcaagtttgtgacaagaaaggaacttcttttatgctattctgaatcaggtggtggaaacccaattgcgcttcctgatgatagaggtgaagctgttgttattatgagcaaagcccttcaacattttattaaaaaggcttatgctgatggggtactttgct

SEQ ID NO: 45019 - DNA, 385 bp, Gossypium hirsutum
  Clone ID: LIB3493-054-P1-M1-G2
aatttgttgggctcattccaacgactgccgaatccaccatttcttttggtgatcgatggtgcactagcagcacctagaagctgtcaaaggccatgctcaaggagaacagtatttcacagatatttgggatttcattggcgttgtttcatgtacacttgcaacaccatgattgatggatgacgcctttggatcccccttccaacttcgatctcaaccaaatgaacaaaggtcaatggccgattcgcaaggttcagttgtacggaggagatgacccagatggcgtggaggccgtgtgtggggatctcacgtgggaagccgaccctctggtgccattccagtgtatttcaggagcttctggagctcttggctgctgaaattctttttt

SEQ ID NO: 45020 - DNA, 331 bp, Gossypium hirsutum
  Clone ID: LIB3493-054-P1-M1-G8
cgctttggaaaggcggatgaaatgggtaataggaagaagaaactattaggtcatccttacggaagctttaaaggtctgaaggaggataggcgtaattctgaagagaaaaacttaagacccggattatcgagaatgattccttctgtgagtttcaatgagaagattttgagatctggtttggctccacaatcccaaagaaggaaatcagcagtttttaggctttcttttaagaggagatcatatgatgcagatgacaaactctaggtctatgcatcaaaacgatttttatatcgtcccaaagctggatatataattcctggtatcaaggatt

SEQ ID NO: 45021 - DNA, 270 bp, Gossypium hirsutum
  unsure (1)..(270): unsure at all n locations
  Clone ID: LIB3493-054-P1-M1-H3
cggacgcgtgggtgcgcggactgggggagaagatatcggncctcttggtgggccatttggtggggagaatataaagaaaccagagtgggaacaaggggagggaacaacttatgctttcgggttaaaattggatgggccttttcctgaaaaggtaatacctcttgggaaaggagctcttaccttatgctcaagggtttgacaaaagagcccaataagcaaagtaaaaacactactggctggggccttggacgtatatttgaaatacttttt

SEQ ID NO: 45022 - DNA, 233 bp, Gossypium hirsutum
  Clone ID: LIB3493-054-P1-M1-H5
cgaacgcatgggttatgaacatggcggggacgaatcatacagctcttgagtaaactggggggaaggctccatggaagcaacttgataccaaggctaaccgtaaatctttctcaaccactagctgtgtgaagaaaccctatcgctactcacctgtgatcgaaatgtcttaactgaaattcgaaagtactagaagagtactgcgcttcttatcaagaaatggcctttccaaaagc

SEQ ID NO: 45023 - DNA, 331 bp, Gossypium hirsutum
  Clone ID: LIB3493-054-P1-M1-H8
gcagaagtgctcttgtacaggagactaaagggatttgggttgatctacttataacggtgctttgtgatcagtggaaaaaatgcaaaagagctattgaggcttcatcccctcgaaaggagcccaagtgcattcttttgccatttcagaaattgaattctgaagatattcctgctgagtcatccttcactgctggtgagaggatgagtgaattggtaaaggtatttgtgctgcttcatcaacttcaaattttctccctcggtaggactttgcctgaacagccttctattcagccacaaattgatattccagaaatatcccgtgccaaggcagc

SEQ ID NO: 45024 - DNA, 112 bp, Gossypium hirsutum
  unsure (1)..(112): unsure at all n locations
  Clone ID: LIB3493-055-P1-M1-A8
ccctgccgaaaatcccggtcaccgtcttgggatatatgaaatggaccgaaccaactatttacattttttaggggaaacacttnctttctattaatttcaacatgaacaaaat

SEQ ID NO: 45025 - DNA, 327 bp, Gossypium hirsutum
  Clone ID: LIB3493-055-P1-M1-B1
aaaagaaagaaagtggcaaccggtccaattatatactctcaacgaatcttctcagttctccccactccataattttcttttgattctcactttcttttctctatttgtgtctagttttcctcctgttactttggatacgcttaccatttcttttcctttcctttattatcatcaatagtaccatgtgtgttgaagatatagaacaggtcagccaagaaatggaggaccttggtgatggcagtaccaacaaaaagccttggcctttactttctaggggtgatttcttgagtacccagatggagaattgggttcacaaagactctccct

SEQ ID NO: 45026 - DNA, 305 bp, Gossypium hirsutum
  Clone ID: LIB3493-055-P1-M1-C1
tcggactcgtgggggaagttggtggtgggaaaaaggagtttgaacaacaaatggaagtcttcaatagggtcggtcgacacccaaatgtggtaccgcttcgtgcttattcctattggccggcacagaagctgttggtatacaattacatgccggacggtagcttggtcgcactcttgcatgggaataggacttcggaaagaactccattggattgggatactagaatgaagattgctctcggaactgctagagggattgcgaacaattatactgaaggtggcggcaaatttacccatgggaacatt

SEQ ID NO: 45027 - DNA, 183 bp, Gossypium hirsutum
  Clone ID: LIB3493-055-P1-M1-C11
gctattcacacaatagagtcggggtttttagatgggcttgataggccttgattatttgacacttccttctcatggccgccgctggtgtcgagttcccgtgcttcggccgagggctcacataggccaccgaccaccgggcccttgaagaatccttaagtgtctaaggtgaactcttcttttctt

SEQ ID NO: 45028 - DNA, 229 bp, Gossypium hirsutum
  Clone ID: LIB3493-055-P1-M1-D10
atcttgacaaagttaagggaaggactattacctgaggaccgctatctattacatatacatcaacaccgacagaacaactcacagacacagatgaactcattaaacaaagcctgatcttgtaaactatatacaaacacagcctagcttatttctgagcgactcaggccctgctagtgacaggaccactgactgaataaccatgtagaacttttatattacttgccgaacc

SEQ ID NO: 45029 - DNA, 208 bp, Gossypium hirsutum
  unsure (1)..(208): unsure at all n locations
  Clone ID: LIB3493-055-P1-M1-D4
cccacgcgttcgggcaaatccancgacaggttcaaactactggaaagcaagcacttcangatgcactgagatctatcctggaaacttctgttattccagcatttgagatggcatgcgaatcaatgtgttgagcaaattgatgtcacatttcataaagggcttatagaacacacaggaactggtcataaggaatttgaaaattcacatt

SEQ ID NO: 45030 - DNA, 203 bp, Gossypium hirsutum
  Clone ID: LIB3493-055-P1-M1-D6
aaacatgagagatggcctctgggatgggatctgcaatcttaattactctcggtatttctatctcgacgcttcattcccggtggcatgtaactgcgaaaacagtccaatgatggccccaaaaacatggacgctattgctaccattggggcactcgacactaccgaggtggatggacccagagttagcattcacgaagaacaggc

SEQ ID NO: 45031 - DNA, 204 bp, Gossypium hirsutum
  Clone ID: LIB3493-055-P1-M1-E12
cggatatttctcccctggtctgtactggggtattagaggctgtagttgctgctcttttcatgaatatttatatcgttggtctaaatcagttgtcagacgttgagattgacaaggttaacaagccttatcttccattggcatcgggagagtattcaacacttaccggcatcatgattgtcacatcattttccatcatgagctttt

SEQ ID NO: 45032 - DNA, 200 bp, Gossypium hirsutum
  Clone ID: LIB3493-055-P1-M1-E4
aacgaagggcaaataggtctagtatagctttcctcatgatctgaaaaaaactcgcatggcattcatctaaatgcacctcctaaaccactggatctcctctgagcttatgggtcggttaagcctttttggccaaacttattttcatttccttgttggccgtaaaaatacttattccctcgaccccctttttggaaccaaat

SEQ ID NO: 45033 - DNA, 374 bp, Gossypium hirsutum
  Clone ID: LIB3493-055-P1-M1-E5
atttaatcaaagttcgaatgcgggttgaaggtgaagcccagggccctaacgcggctgctcaaaatctccgcccttctttagcttttcagaccaacagcaccccctcctctactgtacacctcagacaagccacggcggcgcgtattggacctgtggctactgggattcggatctttaaaaccgaaggcttcagagctcttttctcaggtgtttccgctaccgtactccgccagaccctttattccaccacccggatgggaatctatgacatcctgaagcataaatggaccgataaggaaacgaataccatgcctctcgccagcaaaatcctcgctgggttaatagcccggggtatcggcgctgccgtcgggaac

SEQ ID NO: 45034 - DNA, 283 bp, Gossypium hirsutum
  Clone ID: LIB3493-055-P1-M1-F12
tgttttatgctgtttaggttggctcatttggtatggcctatgtgcagctttgcttattctcatagaaatttgtttggaagaaaccaaaagcttaatatttccttagaaaggggccaaatcgactctatattccgcattaactatacagacccatggattgaaggagatgataagaggacatctagaacaataattatttttgcttctactttttaaataatttggaagggtgactttccaccttggagctcttctcttcttttctcttttaaaaggaatttca

SEQ ID NO: 45035 - DNA, 277 bp, Gossypium hirsutum
  Clone ID: LIB3493-055-P1-M1-F9
gcgcccacgcgtacggtagtggctgggtgtccaaacaggaccgaagttattagaaacctttttacgaagaaccagagaaaatcaccttttcccattcactgcatgccgggtgagcagtgctagctgttttagcagagagcagtgcatatgaagaagggaaagagaagatagaagagaaagctgtagtgagtgaaagccatcttacccccggattgggtgataaatacattctattattgtgggggtggggattgggtgattatccagaaagggggtt

SEQ ID NO: 45036 - DNA, 335 bp, Gossypium hirsutum
  unsure (1)..(335): unsure at all n locations
  Clone ID: LIB3493-055-P1-M1-G3
aatttccggagtgaccactctcggcaccgtggctagagtccgcccagaaacagccctgatcgagtgcttcctcaccaatcagccttggctttcccacgcaccatcaaagccctgtgaaaacaatcttgcctaacggggtgtgtagggtcttaaatcgaatcattatgaggtagtgcttaacactgtcttttattntaaaacagctaacaatttcaggttttttacctttccttttataggcgctggcaactgaatctctcacttaaaacgcttccccaccctgctttctttccaaagagggattttttcccttccccctttaactttacgctttt

SEQ ID NO: 45037 - DNA, 278 bp, Gossypium hirsutum
  Clone ID: LIB3493-055-P1-M1-G4
aataaagataatttaacctatggtcaaggtccacccgagtctgtttctcctctttaaacttggcttgactccactgttgcatttgaaatcccaatctatcaaagcttactcaaaataccaccagggatgtctttccaccattttctaaccatctcctcaaaagaattctccaaacaccacttagcctcaaaccgaaagggcttaatctggttattccgatcatacctacctggccctttggtatcaagaagaataagacaatggtcagaaaaagaatg

SEQ ID NO: 45038 - DNA, 313 bp, Gossypium hirsutum
  Clone ID: LIB3493-055-P1-M1-G5
cccacgcgtccgcgagagaaaagagcgtgtcccacttcccgaacatagctaatgaatgcctccaacatggccttgatataactcagcagccaattcccgtggttcctgctgctcattacatgtgtggtggcgtgcgtgctgggctccaaggagagacggacgtgcatggcttgtatgcagctggtgaggttgcatgcacaggtttgcatggagcaaatagacttgctagcaactcattacttgaggcgttgggtttcgcacgaagagcggtgcagccctctatcaatcacatgaagagagttagggttgatct

SEQ ID NO: 45039 - DNA, 293 bp, Gossypium hirsutum
  Clone ID: LIB3493-055-P1-M1-G7
caaaactgtcacgggtcttttgagaatgattgagggtgagaggttaggtgaagtggttgataggactctccttaaccatcttttgaagatgtttactgctttaggtatttactttgaaagctttgagaagcctttccttgagtgcacatctgagttttatgctgcctaaagaatgaaatacctgcatcaatcttattttccagatttccttaagcttgctacgtttaaattccctacaaaccaaataatcttttttccacacctgggggtaaatttcataaaatccctttttt

SEQ ID NO: 45040 - DNA, 235 bp, Gossypium hirsutum
  Clone ID: LIB3493-055-P1-M1-G8
cggacacgtttgagaatggacgggcgcgagatcaacgtggagactatggccgactcgccgttggtgaagaaatcggagacgttcagggaccggactaactaccagcttccgccgagctcttctccggcttcggggaagctgaggaaagagcctgcgctgagtcaagacgagttgaaacttctagtggttataaacataaagaaattctatggggatatgacatttctttggcagg

SEQ ID NO: 45041 - DNA, 195 bp, Gossypium hirsutum
  Clone ID: LIB3493-055-P1-M1-H1
cggacgcgtgggaaaaaaagaactggaccacgtccttgtcctgtatgttatcttcccgtggaggaagctgttgccttgatgccaaaagtcccatcgttttctcctggtattaaaaatttaatatatatttttgaggaaaatttaaatagagaaacggaatttggaggttccgactctggtggggattctactttt

SEQ ID NO: 45042 - DNA, 235 bp, Gossypium hirsutum
  Clone ID: LIB3493-055-P1-M1-H10
cggacgcgtgggaaaaaggggggtcctttcagaacttctcatgatatagtgggacgatcagttgcactatgtgtgtctaagaactgccaacttcaagacctgagtctagaggacatgagaaacctaagtcctgtatttgataatgatgtgtatgagtttcttggagtagaaaatgcagtgaagaaattcagttcatacggttcaactggttttgcatgcgttgcctatcaacttt

SEQ ID NO: 45043 - DNA, 279 bp, Gossypium hirsutum
  unsure (1)..(279): unsure at all n locations
  Clone ID: LIB3493-055-P1-M1-H4
cccacgcgtncggcgagataccatatatggctagggactgctatgatatgctttgctacttttcatggtgccagcactttgttcatctggggtgttagccactacattcaggatgagataacaaaatggcagaggacaggccggatataccttgccggggagataacactggttgtgggcttggttatgtggatcacatcacttcctcagatcaagaggaaaagatttgagatcttttattacattcaccacttggacataatcttgccagtatttttt

SEQ ID NO: 45044 - DNA, 372 bp, Gossypium hirsutum
  Clone ID: LIB3493-056-P1-M1-A1
cggacgcgtgggtctcagttgagaacgaatataagccagatacaccacatggtaatctcaaccaatcctcaacatcttatgtctatgaaatggaagatacaaatcagttacaggattgtttaccacaggatgagcttgcaattcaagcttttaatccaacgctaagaaacagcttcagaatgggggggatcttccattccaatggagagaacagtttgtcatttttgtcagatgaccattttgctacagaggataattctgaagctgaaatgccaatttggatttcaactactccagcatggggatatgccagtggatctgtttcaaccccggcagcatccgaatcgtcttctacaaactttgatgtcaata

SEQ ID NO: 45045 - DNA, 370 bp, Gossypium hirsutum
  Clone ID: LIB3493-056-P1-M1-A3
atcctagcctttatacaccgtagggggtggatctagttctcgcaggtcatccgctattgacaacgccgatagcgacacatctcaccggcaattccttttcacccagaggtggattatatacaattggggatctcatcactgcaaaagaggatttgcatgttactcaagccaacaacaactgctgatgaagcactgcaagctcttgctgaacacacaatcacctggtatactgatatcgatgatgatacgaaataggacagactagcatctgattatgacttgctcgcatagaactccatatctgcgcggcggactgagaatgacctgtttcctgaacttgatagcactcataaaactttcaacgagatac

SEQ ID NO: 45046 - DNA, 294 bp, Gossypium hirsutum
  Clone ID: LIB3493-056-P1-M1-A5
ctaagtgtctgagtgaaaatatgccagcgttcatatctaaacctacatagttactatgactctttaaatgtagccaaatctctcttcatctaactagtgacacacatgaatggattaacgagactctccactgtcatgcttactatccaagccaaccacagacaaattaactgactcaacagaatcatcaagcaaagaataccctgtatagctcgacactagatctactctgtgtaacgactttagaggtgtaagataagtctcatctctcaaacgaactttatataccactac

SEQ ID NO: 45047 - DNA, 363 bp, Gossypium hirsutum
  Clone ID: LIB3493-056-P1-M1-B1
tgcgatttcattacccagaacgggatggctttggctattcgtaaaactggtaatttgaagtcgattttcatgaacggaattggaattccttctttagatgtatgttttctggattccttttcctatgccagaagcttatgcgagcttgatctctccaattcgtttatatccgatgaattgttgtgtttagtagctgaggcaaaccttccgttaaacaagcttgttctctctcgctgcttttgcttcacatttgatgggatttattttctcttgtccaagtaccagttccttgcatacttggatcttgaaggagcaaattttctcaatgacgagtccataatagaattagccaagttttttggt

SEQ ID NO: 45048 - DNA, 261 bp, Gossypium hirsutum
  Clone ID: LIB3493-056-P1-M1-B11
cggactcctgggcggacgcgtgggccgactcctgggtgctggtccagccttcacgcatcttatcaaggtttatcacgaagagcatcatctgttaattactcacggcatctatagattcgtccgtcatcctgggtactctggtttcttcatttggtcagttggcactcaaataatgctttgtaatcccatatccactgttggttttgcaattgttgcttggaaattctttgcttaaagaataccttatgaagaggttttctt

SEQ ID NO: 45049 - DNA, 290 bp, Gossypium hirsutum
  Clone ID: LIB3493-056-P1-M1-B12
gttgaagcactttcaagagctcagcatccaaatcttgtccatctacaaggatattgcatgcataaaaatgacaggctcttaatatattcttacatggagaatggtagcttggactattggttgcatgagaaggttgatggaccatccttgctcagttgggaaacaaggctgaaaatcgcacaaggggcagctaggggtctagcttatttgcaccagtcatgtgaacctcatattcttcacagagatataaagtcaagtaacattcttttagatgagaattttaaagctca

SEQ ID NO: 45050 - DNA, 371 bp, Gossypium hirsutum
  Clone ID: LIB3493-056-P1-M1-B3
gttgaattgcctcatgtaagtggtctaggttattacttctctctcgattggggcatgtgtgtatatctattcattatttggtataaggattttggatgttgagaaatctttgcatttaatttttatactatctttttctctgattttatctattgaagaacttcctgaaaatgttagctgattttgatgtcttaaattttgcagccattgatgcttatctatacccctcttgaaacagatgttatcgtctagctttccgaggctagttcttaatatatgaatttttttcttataccagttggagtttcttaattattaatttactatgatgtcatatttaaggcctctcgagtattttgtactgacttggt

SEQ ID NO: 45051 - DNA, 364 bp, Gossypium hirsutum
  Clone ID: LIB3493-056-P1-M1-B4
ctgttacttggtctctgccacatgaggacagcatcaaggcgccttgctgacagcatagtgttgaagttcgcaacgaacataacaaagagaggagctgttcctgaaacacgcacataaaaggggaaggattatcctgttggccctatgctgcttgggaacttcgatatcgtgtcattggatcatctctcttccagatgatgacgacagcgactcgcggaggcatggcataaagctgtatatatcctatgttaaaaaaaaatgcagaagagactagttatgatctttttctatagagttgtagcgaactgatgatataatatgtctactagacatgcgttgaaactcatgttgtgaagatttcaaa

SEQ ID NO: 45052 - DNA, 372 bp, Gossypium hirsutum
  Clone ID: LIB3493-056-P1-M1-B5
gtcatatttcaaatgtcgtttgttcagctcaaaagctacagacaccaaaggaaaaagttgatatggaagcaaaactgcaagcttggcttgaatcaaaaggcaagacaaagagtgcacaaagaatgggaccattcgcttctcgattagtaggcaaaacacccagttccatacgctctatgaagaagcttgattccaacagctcttgcaaagtaaaaaattctaccaaagatgatccttctaataccaaagacaggggcttatccgtgacttccagaaatttattcaacaatgaagatgttgttgatattgagcagatcatgttgaaacccactatgaacttagctgaagaatcatccggcaaggaagagacta

SEQ ID NO: 45053 - DNA, 352 bp, Gossypium hirsutum
  Clone ID: LIB3493-056-P1-M1-D11
attttatttttatcaacggggaagaatatgcagagatcatcgtcattattaaacactaatcggctaatcttcgactaaatcttggagaacttgccgccgtctaccatggcaacgtgttaacttcttaaagccaccataccttcaacaatcgcttaccgcagtacggtgatcccatcaccgtgactaacaaaaacaaaattgcttacaatcgtcaccacgacatgactggagagacagcgattcacctaattccgggcgtatagggaatccgtgcttacactctctggtgcttctatctacctgcagatagagcaatatgatcagagaaccgccctcatcgcttaattatgga

SEQ ID NO: 45054 - DNA, 367 bp, Gossypium hirsutum
  Clone ID: LIB3493-056-P1-M1-D2
gtcatttcctttttgcgccaccgtgtgtgttgtcatcattggcgatctcttctcttcttcttttcctctattctttttccttcatcgtagctgctatcaccccttctttttctccatttattttcctttttaccaaaactcctaatacttttcttcatcactattgtggccgaatcatctttgtttgctaaggtctttattgatttaccattctcgatcgatttttatgaacacttttatgttatcaatgttcaaggtttgaatctgaagaagatcagtccagatccgatgggtaggagtacaaccaattttgatctatagtcagataagggagtgacttgtccacatactgttggcagtctatttg

SEQ ID NO: 45055 - DNA, 346 bp, Gossypium hirsutum
  Clone ID: LIB3493-056-P1-M1-D4
cgaagaagttgagatagatcagcggagactcccagctgactatgatccttctaatttcgatcccaccgaacaccgcagtcctccaactgagcgtgtctggagactcgttgatgaaacttctggccttactttgtctgaaatttccgagttaggctctattataatgaagaaacgaggaatgattgagccgccgactgtgggagtcatgaaggctggtgctgctgccggcttggcaatgaagactgctggtggcggggcggcagcggcggcaaaggaagagaaaaagccagataagacagtttttgaattgaagttggagtcatatgaagctgcttcgaagattaaa

SEQ ID NO: 45056 - DNA, 374 bp, Gossypium hirsutum
  Clone ID: LIB3493-056-P1-M1-D5
cggacgcgtgggcggacgcgtgggtactcagccgctcgcataaagaaaaaaaagaagaaaaaacccaaaatttctccctttaatattcagctgaccgatggtcacccaaccggctgttcttctgcctctcttttggacccatagagtggtcaattgaggcttcattgaaccaaggagatccgtgggtcttgctcacaaaccccaaatcgccacttagtttcgattgtggcgaaacaagcggggacccgaaggcttcgaaatgcaggtgagtttctcctctttcttttgcccttttttgatgtaaaatgataaagaaatcgattgaaataagtagaaagaacagaggattaaaaaaaagaaggaaaaatcacctt

SEQ ID NO: 45057 - DNA, 369 bp, Gossypium hirsutum
  Clone ID: LIB3493-056-P1-M1-D9
tgctgatattaattatagtttggtttgtccattccaactatgctgcttacagagatagacaaccacaatcattaccagagcttgaattgtcagaggaaatggttaacaacgctgcagcgtcgtttcgtgttaaaatcaataacgtgcttcttatggctcatgatataactcttggcaaagattttcggctttttttcaaggttgtgacttgtctgtggctcttgtctgctattggtagctattgctctttcttcacgcttgcctatattggaaccatcttatcggttactcttcttgccttctacagcaaatacgaagagcctgtgaataaatactgtggaatgatccagcgaaagttttcccagcagt

SEQ ID NO: 45058 - DNA, 151 bp, Gossypium hirsutum
  Clone ID: LIB3493-056-P1-M1-E12
caattctaagatccttggggttgaaacagctattaggagaccttattttcatgcgcgtcctctcaatgttgctgagcttgaaaattggcataactacctggactttatagaaagtgagggtgacttgaataaggtatttgaggttggtttc

SEQ ID NO: 45059 - DNA, 374 bp, Gossypium hirsutum
  Clone ID: LIB3493-056-P1-M1-E4
tcagtctctatgctggggatcgtctgcttttggtggtattgtgagctcctattttagtggttcgctagtggatgcttatggtgtaaggtttgtttttggtatcactgcattgctaccgatgataacatctgctgttgctgttcttgtaaaagaacagcatgtgcctggcccaacaagagggcaaaatgttcttttagccaaccctagctttcttgaaagctcaagagagaatattattcagttgtggaatgctgtaagagaacccaatgtgtttcttcccaccgtttttattttcttgtggcaagcaacaccgcagtcagactccgccgttttttacttcaccacaaataaacttggtttcaccccagaatttc

SEQ ID NO: 45060 - DNA, 369 bp, Gossypium hirsutum
  Clone ID: LIB3493-056-P1-M1-F1
gcgtcttgcagcccagagaaacacaagatactacaggggtatttggcatgcctttcataccatttgcagagaagagggaattttcggcttgtataaaggacttggagcaacattattgggtgttggaccaagtatagctataagcttttcagtatatgaatctttgagatcttattggcaattacaaaggcctgatgattccactattatggttagtcttgcttgtggcagcctctcaggcattgcatcatcaacagctacgtttcctattgatctcgtgaggagacgcatgcaactggaaggggctgtagggcgagctcgtgtttacaaaactgggttgactgggactttcaggcatataattcattc

SEQ ID NO: 45061 - DNA, 365 bp, Gossypium hirsutum
  Clone ID: LIB3493-056-P1-M1-F12
cccacgcgtccgaaacaattgggtttttacctatctgaagtctgaacctttgctccttttcttagtttcccttggtttttgttaaatctcgatactttgttcgaatctaccaccacccattggttcacttatccttgaaccacttccattacaggaattttcttcaagtgttgtttatcatggaaggagagacttcttggaacagccattgcgctgatgacatgtctaaagacatcggtgagtttgattcattctcggaacttagtgatgaaggtaataaagaaacgatcatttctgtagactcgatcctacccgatgacttgttggaacgaattttggcttatcttcccattgctagcattttc

SEQ ID NO: 45062 - DNA, 374 bp, Gossypium hirsutum
  Clone ID: LIB3493-056-P1-M1-F5
gaaggaaaggattctggattggcaggagtcactacgttggcatcatcattggactatatgtcttctagatcgtcactcaaactgcttttacccttgggaagtgttattgaagcgaaattgcttaagcattgtttctctgtgaagtgttattatctgcttgtatatatattggcaataatctgatgttatttctcttcggtgagtaggcagacctgcacgggtcctaaatgttcctgttattccaattggaacattgcttgctgctacccatccttttgcagctaaccctccctacctcctgtcttggttgagtcctcaaatttctaccccggacatgttgcagccaaagttgtttgaaaagcttgttacgaaaa

SEQ ID NO: 45063 - DNA, 363 bp, Gossypium hirsutum
  Clone ID: LIB3493-056-P1-M1-G9
ggaatggggtgcagtgcaggccttatatcagtcgagctagctaaaaacctccttcaagccaatcccaacacgtatgccgtagtggtaagcacggaaaacataacactgaattggtatttcggcaatgacaggtccatgttgctatgcaactgcatattccgcatgggtggagccgctgtgctcttgtcgaacaaggctggagacaaaagtcgttccaagtaccagctggttcacttggttcgaacccataaaggtgcggacgacaaacattacaactgcgtctaccaaagagaggatgagaaaggaaccggtggggtttctttggctcgtgaactaatggcttgagctggagacgcattgaaa

SEQ ID NO: 45064 - DNA, 370 bp, Gossypium hirsutum
  Clone ID: LIB3493-056-P1-M1-H8
cccacgcgtccgatttatctcaggccttatgtctttacctgtaaaactacccggaactcaactttatcgatcattgcaggcaaagaagagaatggttaagattgtacacaaaatcatccaatctaaaagggattcaagcatgagttcaatggttccaaaagatgtggttgatgttttgctcaaggacgctagtgaactattaaccgacgatctaatagcagataacatgattgatatgatgatccctggtgaagattcagtgcctgttttaatgactctcgccatcaaatacctttccgattgtcccgctgcgttacatcaattgaccgaggagaacctgaagttgaaaaggttgaaagctcaaaatgga

SEQ ID NO: 45065 - DNA, 303 bp, Gossypium hirsutum
  Clone ID: LIB3493-057-P1-M1-A11
cctcctcggaccccttggtttaccgagtgccttcttaaacaagggggaattatcaaagaaacatggattgaagaaaatcctatagaaactatacttaagtactctcatgttgcagcaaaagacccaaattttattgctcctgcatatgctgaaacccacccagaacctgtttttgcaaagtcagattcttaggattaagagaaatgatccgattgtgctcatatgtacgatctctatattaccaagttaatatagcttcctaccgaactcattgaatttaactggctttctggaaagatggat

SEQ ID NO: 45066 - DNA, 214 bp, Gossypium hirsutum
  unsure (1)..(214): unsure at all n locations
  Clone ID: LIB3493-057-P1-M1-A12
ctttaatggcatccaagcggcntgggtgcaccaaatgtttgcataaaattatagattactgttcaaattttcttattctgtttcaataatctctgttttaagaaggggtggcggctattattgtttctaaatcattggccaaatcaaaaagagctcattcacaacaccatatctaaaagcctcattccgtccaaaaatccaaactcccatcacc

SEQ ID NO: 45067 - DNA, 317 bp, Gossypium hirsutum
  unsure (1)..(317): unsure at all n locations
  Clone ID: LIB3493-057-P1-M1-A2
tcttcctgcctatactgcccaanaaatggggaaagtttcttataaacatcttccatcaatcttcccctataacccaacttcnttctatctcctaaaaccanccaancacttcaagttgcaccagagagcccctctttttttctcttaagccaaccatcttcatgctttcaacgaaactctttagtctaacttaaatgatgaggaaaaactgaagaagctcggctatcttattaatcatagccaccacagctttggtgttctctatgaatccagcttccctgacttttatgaactattcaaactattcccaaacaatt

SEQ ID NO: 45068 - DNA, 349 bp, Gossypium hirsutum
  Clone ID: LIB3493-057-P1-M1-A4
tcggagagcgttctggaaactcagcggggatcaataaccaccaagggaatcacatgttacaattgcaaccattgacaattcataaagctggtgataccggttttcttcgtttgctttcactgatagctcatttttcatcttcttcgtctctaaaccgaagctcgtcgcggtttaatctggaagaaggcgtcaagacagcaacctttaagttacatttatgttggaaataaacactatatagaaaccaattttcatgttttaatgttttcactgacatatctggttttggttttggttttggtttggattggaagggcattttaaaattcaacccaaaaacacttttttt

SEQ ID NO: 45069 - DNA, 389 bp, Gossypium hirsutum
  Clone ID: LIB3493-057-P1-M1-A8
ggtttcaatggggtatcgcaaaaggcttagaatcgtctccggaattttaaaagacaagggttcatttgtcaaaacaactttatcaacaaagcgccacaaagcttccactcgtcgcgtcattctacgagccaccacccacggctcctctgttcccccatcagatcaccgaatcgcagccgttataggccttggtcatggctcacgtttcacagcatgcacttgtatacaagccgtcatggaccgtctacaccgcaccaaagattcatcggtcgctctcaaatgtctctacacaatccataacataataaacaaaggttccttcatcttgaaagatcagctcgcggtttacccttcttccggtggccggaattttctcaacttatcgacgt

SEQ ID NO: 45070 - DNA, 247 bp, Gossypium hirsutum
  Clone ID: LIB3493-057-P1-M1-B1
acctacgcaagggggtcgttttttaccgggggaggcgtgttgtgacattaaacttttcactaacccatcaaccattacaggtttcactactatatatcaagctcactcatcattggtactccaattaagctcgagcatcatcacctgccaacaacacactaataggcccctttctataggaagcttgaagctctaccttatagggatagggtcctatggaagcaatgcctggaccattttcagaacc

SEQ ID NO: 45071 - DNA, 274 bp, Gossypium hirsutum
  Clone ID: LIB3493-057-P1-M1-B12
cggactcaccacctcttttgcggggtgctacctggggcccaactttcattcactttaacatttaatgaattaatcttttgaacattaagtaccattttctggacttagaatggaaatttttttttttacatttttgatgtggcatgcccgatcccggcataactttttggcccggtttggggtgctaccgtaaaaaaaaatggttgtgggtctatgtttaatttgaaccgttccagggcccatttcaagcattttgtgggaaaaaagtgaaaaa

SEQ ID NO: 45072 - DNA, 112 bp, Gossypium hirsutum
  unsure (1)..(112): unsure at all n locations
  Clone ID: LIB3493-057-P1-M1-B4
cggacgcgtgggcaaaacttgggcnaggttcttatgtgggctcagagcattcnnattctgattttccattactaggcatgagataacttggagaagccaactccaaagaaac

SEQ ID NO: 45073 - DNA, 382 bp, Gossypium hirsutum
  Clone ID: LIB3493-057-P1-M1-B5
gccgggtttattttttatttttggggaggggtaccaaccatggccaatattccaatatgaatttcgcagagttgaggatgtatccatatccgatactagaacactcccttaagggtccctttggtaacatgaatttgaaaattcggatttgactttcatttattatgaaatgcatgcattacagacaaattagctgtgattcaatataatacgtatttgaaaaggataagaacacgaatttatcatcatagatttgagaaataactactcaatttactttatttttgaaatccaagttcccaaaagctacctaataaaaggtttcttttttcatagattctaacctaaattctccggaatattgagttctcctaaaatttat

SEQ ID NO: 45074 - DNA, 386 bp, Gossypium hirsutum
  Clone ID: LIB3493-057-P1-M1-B7
gcgcgaaccctgattaatcggaggtggaattggcaggatcaactttgtaaaaacccgagaccaaatccagatataaaaactctctttgtggatcactcatgtgggcaggcaaatggtgcacgagcaccatcacctgccaataatacacttcttggatccttaccaaaagctggagggtttcctcccttaggggctcatgggccttttcaacctacgcctgcaccggttccagcaccccttgcaggttggatgtcaaatccttcagctgtaactcatccagcagtttcagctggggccattgggcttggtgcggcttcaataccagctgcggtgaagcatccaaggactccttcaactaatacggctgtagactacccatcttgaga

SEQ ID NO: 45075 - DNA, 376 bp, Gossypium hirsutum
  Clone ID: LIB3493-057-P1-M1-B8
tccgcggactcttgggctgaggcgtgggtttctgagagagatagaacagatcaacctgctagtttatatgctgctactaagaaagctggtgaagaaattgcacatactgataatcatatatacggtctctctttaaccggtttgaggtttttcaccgtttatggcccctggggaagaccagatatggcttatttctttttcactagggatatattgaaaggcaagtcaatatcaatattcgaggcagctaatcatggcacggtggccagggattttacctacatagatgatatagtgaaagggtgtttagcagcactggataccgcctagaagagtactggtagccggaggaagaagaaagggcccgctcaattga

SEQ ID NO: 45076 - DNA, 368 bp, Gossypium hirsutum
  Clone ID: LIB3493-057-P1-M1-C1
ggaaattggattgcaaaagagggctcagtcctaaagacattgtcgagggctcaccaaatctcaatcttgcatttgtagctcaaatattccatcacaggaatggtttaactgacagcaaaacgacaacctttgctgagatgatgacggatgatgcagaaacgtctcgtgaagagagatgctttcgcttttggatgaacagtcttggagctactacatatgtcaacaatgtttttgaagatgttagaaacgggtatgttatgttggaaattgtggataaaatttttcctggaacagttaactggaagcaggcaaataagcctcctataaagatgccatttaaacaggttgagaattgcaatcaagtgata

SEQ ID NO: 45077 - DNA, 372 bp, Gossypium hirsutum
  Clone ID: LIB3493-057-P1-M1-C10
cggacaacataaagtacgggtggactttctccgactggacggctctcggttacgggtcttcatgtaacaacctggatgccaacgggaacgcatcttatgcatttagcatgtattaccaggtgcaaaatcagaaagacatggcgtgtaactttcaagggttggctataattacaacacagaatatttcacaaggggcttgcaattttatcattcagattgcttcttcatcatcttcttttacttcagtaagtcgcttaatgttaggattagccatttttataggattaacttcatatttactaatttaactgtgattatttagatatataagatatgtgctattcttttgcaccttatttctcttagattctt

SEQ ID NO: 45078 - DNA, 207 bp, Gossypium hirsutum
  Clone ID: LIB3493-057-P1-M1-C11
gtggaaacccatcctggggatggtgttcaaccatgacgaagcgattcactagcaaaaaccccaagctgctgaacaagaactctgccatacatagccacatgaaagagcgggggccaatgctgctggagaatccagcggctctatatgcgagcgaagaaactgccctaaagtgcaacaaagcggagaaaacaggagctctcgccgaga

SEQ ID NO: 45079 - DNA, 224 bp, Gossypium hirsutum
  Clone ID: LIB3493-057-P1-M1-C2
attatacttccttattggcaaaccaaactttccatcaacgggaacgctatctaccacttggggggggccttcacctttacccaatatactggcagccattgtgggcaggttagcaaagtcaagccaacctgccctcttaataaacgctcgcccattaagtcgagggtatggacaggtgttcggggcactatgaatagttctaaacccaaaaaggggcaaactgg

SEQ ID NO: 45080 - DNA, 248 bp, Gossypium hirsutum
  Clone ID: LIB3493-057-P1-M1-C4
tctaatgcagtgtgaattatgtcgggaggggcttacgctgggcattgtaccatgtataatcttatggtaatactgctagtgtggggtgtatcatccaagggtgtcccggggattattggaacactatgttttggcctatataatcagtaccgatacgaaattaacttcctcgatatcatcactatgaaaaaaaacacttgtaatttcaatgaatagtatgtaactggattaggttgcaattagattgt

SEQ ID NO: 45081 - DNA, 370 bp, Gossypium hirsutum
  Clone ID: LIB3493-057-P1-M1-C5
gggagtactgtctgtgactgtggggtggggtgaagatttggctattatagatttaatgggaaaggctgatccctatgttgtactcacaatgaagaaatcagagttgaaggataaaactagggttgtgaatgacagcttgaatcctgtatggaatcaaacttttgactttgttgttgaggacggattacatgatatgctaatccttgaagtctgggatcatgacacttttgggaaggattacatgggaagatgcattttgacattgacaagggttatattggaaggggaatacaaagattgcctgccgctagagggagctaaatctggaaaactgaatataaaccttaagtggatgccacagccgatattc

SEQ ID NO: 45082 - DNA, 319 bp, Gossypium hirsutum
  Clone ID: LIB3493-057-P1-M1-D12
tgaaaatcatggtggagggaatgagaggcaatattgaagaagaaaaggaaggaaaggagaggaaagtgagggaaatggaggaagagatgaagaaaacggcgtcctttagaggcgagtgcgttgagaacttgaggaaggaaaacgagaagttgaaaatggtggtggaggaaatgagaggaaaagttgaaggatcaagggagatgaacagaacggcgttatttataggctaaaacgacgactttcactttttgttactaatgatgatagggttaattgaagtcagtgtgaaatcaaatctgattaagaatttgaagagaaa

SEQ ID NO: 45083 - DNA, 268 bp, Gossypium hirsutum
  Clone ID: LIB3493-057-P1-M1-D3
ccctcccttggaagcgggtaacaaaggggaagggcaacatgagtggactcgaggagacccccgaaatatcccaaataacagaacttagagaggcttatagagcagtcggcctagatctggtggagcttctctattttggtggaatggatgctattgggttgctaaagagattcgaaaaatttgacaaaccctttccctatagattcaccgattactatggcaaaactcgggctaatcatccttattctcaggtacaacaaggggtcaa

SEQ ID NO: 45084 - DNA, 260 bp, Gossypium hirsutum
  Clone ID: LIB3493-057-P1-M1-D4
ccctctcggagctctgggcccctttacgttggggccccttccaagggctgcatccccctccataacttttctttagaatccatcccttcttcttcatttgattatatcaatttcctatatcaatgggcttttcctattacacctactgggattaccaggggctccattgctgaaagaacccaattccgtgcttatcttatttactccgccttcttcaccggatttagttacccccttggttcccattagctttgggccac

SEQ ID NO: 45085 - DNA, 372 bp, Gossypium hirsutum
  Clone ID: LIB3493-057-P1-M1-D8
tccgaaaaaaaccaaaaaaagggaaagggaaagaaagaaaggagggccttttaagccctctctcttcttattatgcttcttctcagatcttagattctcttacttttcccatctgggtttttttttttcttttgtaaatttaatatcatcatctctttaaaactaaataaaaacataaccagcaaaggaatcctggattgttggtcgattgatagttgatcggtaattggtctcatgcttttcgattgaatccaacagcacccgatctctttatattgatataaataacccccctttgcttgattttctgtattttgataaacatggaaatggaacttggcaagctttttattggtgggagttctttggaca

SEQ ID NO: 45086 - DNA, 238 bp, Gossypium hirsutum
  unsure (1)..(238): unsure at all n locations
  Clone ID: LIB3493-057-P1-M1-E12
aattacccaaatttcatccggccggacaagccgaggggtctcttantcactctttcatatcccaaaccttgtgagaaccctgtcggcgatcatttcttattgtaagggggcaagaacaacatcgtttattgttgattacaccggatcgagatatttttcaacatcgcgctccctggatgcttcaatggcaggggtttttgctgaaaatattcgtcggtttttaaagattttttttttc

SEQ ID NO: 45087 - DNA, 375 bp, Gossypium hirsutum
  Clone ID: LIB3493-057-P1-M1-E4
ggaaaattgggtcgggttgaggggggggtgcagtcaagggtagtcatctttcaggacaacatttttgttaaaggattttcaaatattgggcttggtggtagattagtcttttaacaaatctacctggccaactaagagttatacacttttattaaatatttactaatgccttatatagttatcggcataatttcttgaagcggtttttcgtcgcaatcttatttgttaaatgagtaaatgatttcagcttttgtaattaatcatgatttggtaacctaatagagaaaagaaaagagcagcagaataatgagctttaattgtttaaaagttggctttgggggaagtgattttattaccctcgtatctagatgtttg

SEQ ID NO: 45088 - DNA, 357 bp, Gossypium hirsutum
  Clone ID: LIB3493-057-P1-M1-F10
tggacatgaacagtggagaggactgtagtaacagaatagttatcgaccttactattacaactatattgttaaggtaagttagtattacctgaactccaactttataaatcggcttaattaatctagttactactcgatgtcttattacatccctaatgtgattgataattaaattggatggcattttatggaagtatatgttcttatgcacaatgcgatattgagcgacgaaaaataaaatcatagaattgctgatgacaactatcgtacgttatccgaccagcgctagacccaacaatttgccgattcgtaccacttatgttaggcacaactatcgatggttatttgactagcgct

SEQ ID NO: 45089 - DNA, 386 bp, Gossypium hirsutum
  Clone ID: LIB3493-057-P1-M1-F2
agcgccaaccacgtcctggcggggagacggaggcgcgaaaagctcaacgagcggttcataatattaagatccttggtccccttcgtcactaaaatggacaaagcttccatcctgggcgacaccatcgagtacgtcaaacagctccgtaaaaagattcaagaccttgaaacccgaaacaagcaaatggaggccgataacgaccggccgagatcggccgattcgatgcagagaaatagcagctctaaggatcaaagaagtgggttaacgacacgatcatcgggtcctgataaaaagaagatgaggatagcggaagcgacaaagcagaagacggtggaacctccaccgcaaacggaggaaacgtcggtcgaagtgtcgataatcgaaag

SEQ ID NO: 45090 - DNA, 381 bp, Gossypium hirsutum
  Clone ID: LIB3493-057-P1-M1-G11
tccgggagaagcaacagaatcggggggacacttaacatgcctaaagacctggttgcttcaaagattgctgtgtgggctacggtatgctgctggacttatcagattgttatacactatttgttctatgcttaattacgcgtgtcggacataagtactttaagaaaaatgaagagtttaagtaacttagtcgctcaatactttttcgaatagcattttattactttcgtgtttagcctaatatattcaacttttttgttcttttgcagattgtcaacccatttaccaaatatccttttctttattctatgttactctggacttgactatgagtttgagatactggtatttacccatttaccaaacatgagttaacaatgtcta

SEQ ID NO: 45091 - DNA, 386 bp, Gossypium hirsutum
  Clone ID: LIB3493-057-P1-M1-G12
tccggccgcgtgtccatccgaagggcgatgcactggttatcagcatggagaacatcaccttgaactggtactttggaaatgatcgctcaaaacttgtttcaaactgcttattcaggatgggaggcgcggcaatactgctctctaacaaacgctctgacagaagaagatccaaataccaattggttcacactgttcgcactcacaagggcgcggatgataagtgctttgcttgtgttacacaggaagaagactctgcaggaaagattggcgttacattgtcaaaggatctcatggcagttgctggtgatgctctaaagaccaacatcaccacattggggcctctggttctttcgatgtccgagcagctgctattctttgctacattg

SEQ ID NO: 45092 - DNA, 356 bp, Gossypium hirsutum
  Clone ID: LIB3493-057-P1-M1-G2
tttgatccgaatgttcaaaggggcttaagacagttcctcctccttgttctcattagccagacagctgcttcattatttcggttcattgcatcagccgctagaaacattattgttgccaacacttttggaacatttgctttacttgtactttttgcattaagtggctttgtcctggcacgagaggacataaggggttggtggatatggggttactggatttcgcctttgatgtatgggcaaaatgcgttgatggttaatgagttcctcgggcaccggtggagtcgagtccctccaggctcaaacgaatcgataggacttcaagttttaaagtctagaagtttcttccatgaatcata

SEQ ID NO: 45093 - DNA, 294 bp, Gossypium hirsutum
  Clone ID: LIB3493-057-P1-M1-H1
atctgttcctgtgaattatggtgggcctgatctctttaatgcatgcaacacttctgcctctccacctatatatttgtttcaggtccctgcaaccttaccagttccatccaagaatgtatttcattctgcggcttctttgatgcaacatgggaattcatatcaaccttcaccatctattccatctgtagacctatttgctgggatttctgagcagcccccatctgctagttttggcggaaaattgccagagtcacctgtacctaaaactgaagaatgggcaatgttttattattc

SEQ ID NO: 45094 - DNA, 346 bp, Gossypium hirsutum
  unsure (1)..(346): unsure at all n locations
  Clone ID: LIB3493-058-P1-M1-A3
tcaatcaccaccttcctnccagagtcacgcatgactacaccactccgcagctctacttctggtttcaaccatancagtacaatggatagaccatctttgatgctggatcctaggaaggcaaggtattcaagattgttttctccattgccaaagctacctaacccatcggagacaacacctgcagccatgagaagcagtagcaagttcatgggaagtcctccaatgcaggtgggttcgtccaagcccaagcatcctaccgtggttgcttttcaaccgaaatccttgctttggagtccactcaacctcatgggcactcaaaagaaccaatcattttttccattaccac

SEQ ID NO: 45095 - DNA, 350 bp, Gossypium hirsutum
  Clone ID: LIB3493-058-P1-M1-B10
ggtggttgatgcagctggggaggcccatccgcactgtccgcagctatatctttatagcacagctgataaggtcgttccatatgagtcagttgagtgttgtatcgaggagatgagcaagaaagggataaaggtatcgtccttcaactttggcacatctcctcatgtcgaccactaccggaatttccctaacttgtactcatcagagctttatactttctttaaagaatgtttcccactttctaaacaaaaatgaaccctccaagtacttcaatcactttattgttgttgttgtatgcggatattcctttggaaataaaccttttcctgggcatgaagttgtactgtttatc

SEQ ID NO: 45096 - DNA, 249 bp, Gossypium hirsutum
  Clone ID: LIB3493-058-P1-M1-B11
gtttgagaattgacagggggtacgcgagaagcattggctgccccatgcacccaccgacactctgtttctcagtagatattggatcaaatctttttaaggaagtgcagctggcatccatttctgattccagtgctgaaatattccagttttcgtttacatttttctgagaaggttaatcttaaactggcccagggagtgatgaaagaacatataaatactgcattattctaggctccgaagaaagcataa

SEQ ID NO: 45097 - DNA, 247 bp, Gossypium hirsutum
  unsure (1)..(247): unsure at all n locations
  Clone ID: LIB3493-058-P1-M1-B2
ccctcccctatactctcatctatcatatagtatggcggcaactaaaagtaagtgcactttctcatcctttnagtttgtgtttacttgangccaanaagcggacggggagaactcctactgcaggaagatattaggggtgganaactactcattgaatggattccccgtgatggtcattcttcttatcatggttatttaaaattctccaggatacttagttatagctttaattttaccatctccatcc

SEQ ID NO: 45098 - DNA, 371 bp, Gossypium hirsutum
  Clone ID: LIB3493-058-P1-M1-B5
ctcaaatgcaattactttatgggtttggaaacatgtccatacatgatttaagtataaaaagttattttttataccataataatagtattttaattgtaggatacatattttattttttaaatataatcatgttattttactaatcttatttagaaaaatctaaaaaatatatatattaacgggagataattttctatacattttggcttaccatatcaaacacgtctagggaactagaatttttgtaattacaagagggtgtaattactatattagtaattacactttcatctaattactttgtaatatccaaacgcacctgttattggaaaagaatgttgaatgagtaagaatggggaagttagcttcag

SEQ ID NO: 45099 - DNA, 367 bp, Gossypium hirsutum
  Clone ID: LIB3493-058-P1-M1-B7
agagatatgaacagtgagttgtgtgtgttaaaaagtttgtgcattgcttttactcaggaagaggaggatcttgtaaatgctcacagggaacaagtggaggagaccatgaatattgtcaaagaggtaagcaattagaccatttcattgaagtacctgtgttgctttgacttcttgtttttcttcaagtattttgtatccaacattcatgtccaactcatatcgaaatacgagtatcgggatataaaccctccgagggccttctaaatacatggaaatgcttaaaatgaaatgaacatatatctgggtcgtacacacatccatccaagtatcatagttttggtttaccataggtttggtataacatctt

SEQ ID NO: 45100 - DNA, 366 bp, Gossypium hirsutum
  unsure (1)..(366): unsure at all n locations
  Clone ID: LIB3493-058-P1-M1-D11
agataatgatggacgcagagacgacaacgagtttgtagccatgatgcanaaaggacatgtcaccacaaatggtggcagtgctggtgctggtaaggaaggcttacaacatagttttggtattggatttagagaagcatttaaactttagcatatgcatctcttcatgttcttgtgttatgatccgagacttagctccggtcacgtatagccttactcacggatcgtgacacttgttaataggactgagatttgtatagtaaaaagtaccaaagcaatgctcattgtaaggggcaggtggtggattttccattttcttcaaccttttttttctgcattcagaatgagggtcctttaatgttgtatact

SEQ ID NO: 45101 - DNA, 182 bp, Gossypium hirsutum
  unsure (1)..(182): unsure at all n locations
  Clone ID: LIB3493-058-P1-M1-E1
ccctcctcgcgagctcctgcggcgcaaataaggtncgcagtnagacccaatgggcancttaaacttnctnactttngattancactcatatttnggangccagatccgaangttactcaccagggcttttcgtcatcggatanaggtcctggattacttttttggaccaaggtatatgggtc

SEQ ID NO: 45102 - DNA, 283 bp, Gossypium hirsutum
  Clone ID: LIB3493-058-P1-M1-E10
gagaaaacatgtagatgaggagaaagattatgcacatcttttggagcggttacttgactagctcctgacaggggaggaaatgaagatagacaatagcaagattgggaggatgctgctgtcttgctgagacaggcgcaaacataggaaaacgtttcgaagcataaaggaacttaaagaatcggggatacacgtgaaggctagcacgacgaacaacctcaaggacatgcacttttattggaacttcttggggaaactgtggatgccttgcttgttggtggatcat

SEQ ID NO: 45103 - DNA, 365 bp, Gossypium hirsutum
  Clone ID: LIB3493-058-P1-M1-E11
ctcgcgtacacgtctttgaccggtctgtttccgctgttgtcaaggggtcaattgcgattagtaaaagtggaggaaatatcacagaccatagatgctgaaaatttaaccgtgcagaactctgtccaattctcggggccgttagcctcgagttctattagtgcaagtgcaaagttcgaggtccgaagtcccaggcgagtgcagatcaagtttcaggaaggcataatcggaactccccagcttacggactccatagtcttaccggaaaatgtggaatttatgggacaaaaaatcgatctagctcctatcaaaagcttgctcaactctgtacaagacacagcttccactgttgcaaagacgatttcgag

SEQ ID NO: 45104 - DNA, 132 bp, Gossypium hirsutum
  unsure (1)..(132): unsure at all n locations
  Clone ID: LIB3493-058-P1-M1-E2
tcttcctgaaacacctagacaaactcgtggagggtgcgataaccattgggacaacaaactacngttatcccactcctcatcgcaatcatataattgaccatacccatcatcactatattagtcagaccaaac

SEQ ID NO: 45105 - DNA, 299 bp, Gossypium hirsutum
  unsure (1)..(299): unsure at all n locations
  Clone ID: LIB3493-058-P1-M1-E3
tgattctggtcctcatnaactgggaaaggtgactcccgtacatgcacctnaanttctttctcctggtgcttctgttggtcatcattcaaagagaaaagtgactactgcaattccagcatatattcgaatacagactggtgattgtaatgatggtgccccattgatgaaggaaattttctcttaaacctcatcaaaaaccaaagcttgtgaaacttctcggagtgagggcatgaatactcctactgcttcctcactcctattcaaccctacatccttctttgttatatcataaaaattta

SEQ ID NO: 45106 - DNA, 366 bp, Gossypium hirsutum
  Clone ID: LIB3493-058-P1-M1-E8
gcgtattcgagtatttaggcggggtattatagctcataggatgactccactctcttatcttgactccaccatttctaatactaacattccgtgtggatctcagacttgctgaattcgtgtttcactctaagttgtttgtggagtacgcagtcctttctattattagcattgacatttcgtgcgagctccaggtcttctggacatgtgtttcactctaggttgcttacggtacacgtggtctcccttgcgcgagctcattggacgcatgcaaactgggaccgtgacattcgtttggctcatgtgaactaaacctgcgagcttagcttgcgagttgggtcctcgaactccccttgatgtcctctcacg

SEQ ID NO: 45107 - DNA, 374 bp, Gossypium hirsutum
  Clone ID: LIB3493-058-P1-M1-F2
cggacgcgtgggatggactgcggggagttatactctacatattgctaagtggcgtcccaccattttgggccgaaacacaacaaggaatatttgatgccgtgttaaaaggaaatattgacttcgattcagacccatggccggtaatatctgatagcgcaaaggacttaatacggaagatgttatgctctcaaccttcagaacggctaactgctcatgaagtagtatgtcatccatggatttcccaaaacggggttgccccagatagggcactggatcctgccgtactttctcgtctcaagcaattctcggcaatgaacaaactaaagaagatggctttacgggtaatagctgaaagtctatccgaggaggagatt

SEQ ID NO: 45108 - DNA, 368 bp, Gossypium hirsutum
  Clone ID: LIB3493-058-P1-M1-F7
aaaccacccactttacagagctgttggtgatcttcaaatgaagatagggtttggatttgggttggtttgtcaactgtcaaacttatattgtcatatcatactgaagaatctacgaaaccctgatgggagcggaggctatcaaattcctcatggatttctgttcaacattgtgacatgtgcaaactacactacagagatttaccaatggctcggtttcaatattgctacgcagactgttgcaggttatgtatttctcgtagttgctacttctatcatgaccaattgggccctcgcaaagcaccgccgtttgaagaagctatttgacggcaatgaaggaaagcccaagtacccgcgcagatgggtaattt

SEQ ID NO: 45109 - DNA, 201 bp, Gossypium hirsutum
  unsure (1)..(201): unsure at all n locations
  Clone ID: LIB3493-058-P1-M1-F8
ctatannnaaagctggtaccccttcacatacccntcccnaattccccggtccacccacccctcctccaagcttctattcatccgcgcgggatctatatctaaggacattcaccttccttcttanttccacgctcaatactaccatcatcctccacccccttcattcatacaccctcatcaattatccaatctctcttttta

SEQ ID NO: 45110 - DNA, 372 bp, Gossypium hirsutum
  Clone ID: LIB3493-058-P1-M1-G3
gtttgcatgaaattgacttctggttggtggattctgctttactaatatctaattgcttcaaagtgcataaggtatgttgtcgagactgagattattttagaaggtttcatcccatggagacatggttgtgaatgagttacaaaccacccccccccccaaatcataaaacaaggatttgaggagaagtgagatgaataataaacttcacctctttacgtgttaactgctttagtgaatttgacctcatatgaagcaatatttgtatgctaaataacaaaattgtatccagctgatgctttcaagcattattgtgatgagtatctagttgatattccccttttacttgccagcagtttattctgttaaaactgt

SEQ ID NO: 45111 - DNA, 242 bp, Gossypium hirsutum
  unsure (1)..(242): unsure at all n locations
  Clone ID: LIB3493-058-P1-M1-H10
ttttaacgtgcagttttgtttggttttttctttcgttcctcttcttcaatttttctttctttcctttgacaattgatgctcttgagatcttaggaattcttgtggtgttttgntctttctctgtattttaagctttctgcttagccgggttctttagagttttgtctgtctttttggccttactaccttgataattcaatttcagattcctttgcttctctttctttcattctttccttctc

SEQ ID NO: 45112 - DNA, 364 bp, Gossypium hirsutum
  Clone ID: LIB3493-058-P1-M1-H2
tcaggaagaaagggttgcctgtgaaagcattggttaggaatgaagagaaggcaagaaagatgctcggtcccgatattgaattgattgttggagacattacaaaggagagcacactggttgctcagtacttcaaaggagtgaagaaagtcataaatgctgcttctgtcattattggcccaaaggaaggggacactcctgaccgagcaaaatacagtcaaggagtcaagttttttgaaccagagataaaaggtgattcacctgaaatggttgagtacattggaatgaaaaacttgattaatgctgtgagggagagtgtcggactacgaacagggaaactgctttttggatttgaagatcatctttc

SEQ ID NO: 45113 - DNA, 117 bp, Gossypium hirsutum
  Clone ID: LIB3493-058-P1-M1-H5
gtttcgaaatggacggggtcaagggtgaagggctgtactgaaagaatctccagttcttcctactatatcagatattaacaacggaatatactgcacatatgagtttaggatgtatac

SEQ ID NO: 45114 - DNA, 328 bp, Gossypium hirsutum
  Clone ID: LIB3493-058-P1-M1-H9
gcaagctatcttacatacgtgagggggacaacgttcggcacggattaaacaaggatcttggtttcaaggctgaggatcgaacagaaaatattcgcagggttggtgaagtggcaaagctctttgcagatgctggtttaatctgcattgccagtctaatatctccatatgggaaagaccgtgatgcatgccgagcaatgttgccggatgcttttattgaggttttcatgaacatgcccctagcattatgtgaagagcgagatccgaaaggtctttacaagcttgcccgtgctggaaagattaaaggttttactggcatagatgatcctta

SEQ ID NO: 45115 - DNA, 156 bp, Gossypium hirsutum
  Clone ID: LIB3493-059-P1-M1-A10
agctactggatttgtgttggaaggtggcttgccatttacttcgctaagggagctttgttgttggacgttggaagactggcaacaggttatggtatgggagtcttttcgtatgtggtaccagtttttatttctgaatattaaccaaacaattttcta

SEQ ID NO: 45116 - DNA, 246 bp, Gossypium hirsutum
  unsure (1)..(246): unsure at all n locations
  Clone ID: LIB3493-059-P1-M1-A3
gggaagtcaaaatngtgatctaagcttggctgcgatcctccggaaatcccacgccgctcgttgtgtcggaacgccggagtttatggctcctgaggtgtatgaagaggaatataatgaactagttgatatatattcatttgggatgtgcatattggagatggttacttttgaatatccatatagcgaatgtactcattctgctcagatctataagaaaagttgtttgggaaaaaagccattaggctt

SEQ ID NO: 45117 - DNA, 127 bp, Gossypium hirsutum
  Clone ID: LIB3493-059-P1-M1-A7
ggaatttgatttagtgagatcggtgtgcatcaactgagccataccatatagtttgtgcttgaagcagtttcaaattcaggttaataccttggaatatgggctcttgaggggggttcactcttatttt

SEQ ID NO: 45118 - DNA, 282 bp, Gossypium hirsutum
  Clone ID: LIB3493-059-P1-M1-A8
tggcaatctatatggccgttcgtgttagacaatgttcgagccgatatgaggatcgcatgggaggaaccgtttggtccggttttaccggttataaggattaactccattgaggaaggtatccaccactgtaatgctagcaactttggactccaaggatgtgtcttcacaaaggatgtcaataaagcaatattgatcagtgatgcgatggagactggtaccgttcatatatattttgtaccagctcgcggaccatatcattttccattttagggttttaaagac

SEQ ID NO: 45119 - DNA, 264 bp, Gossypium hirsutum
  Clone ID: LIB3493-059-P1-M1-B10
ttgtatcagaggagtttggctgggttcaagttgggccgaaatgtctgcaatgaaaatgctattcaaacattgtgacctaaaagctacttggcaatgaggaccaggctggatattaattctaaaagatacctaaacaaagtttatttgggacattacactatttaacactcccctagatgggtaggcttgattccttcgaaaccacttgacccaagatgtttaagcaaattggggctccctaattatgtcttatttacttgatct

SEQ ID NO: 45120 - DNA, 390 bp, Gossypium hirsutum
  Clone ID: LIB3493-059-P1-M1-B12
gaaacttctcttcgcttgttcgctgcaaatgaatcccgagaaacctcccaaacccttatctttttaccctttttcaccttcttctccatcaccaaactaacgtttccgtacacaacgaacagaatcaaagcaatgggtaaagcttccaagtggttccgcagcatcctcggcttcaaaaaatccgacccccataaccaaccttctccttcttcttcaaaaccaacttcccataaagacaaacggcgttggagtttcgtcaaatcgtaccgtgaaaaagactcctccacgaacaatagtaatgcgaagttgccgtcgtcttcgcagcaacagaaagactctgtttccttcgttgaaaggaaaggtgacaatgaagtaacggatcctagcaag

SEQ ID NO: 45121 - DNA, 288 bp, Gossypium hirsutum
  Clone ID: LIB3493-059-P1-M1-B3
cggcgattttgcgtagaaatggcagtgtacgtcccccatttgtggtcagtcaagcttggccgtaatcctcaaccaattcatgtacgccgctacgtctcttgaacttgtgcggagggcggtgtctaaagtggaatcgcagcttagatctactcctcccactttgagagcttttgcttcctcagtttctttttggctcaagagggtgcgtgatattgcttttaactaagaaaccaagatctgttattcaaattctggatctacgtctaccttgttgggacttacaaggct

SEQ ID NO: 45122 - DNA, 210 bp, Gossypium hirsutum
  unsure (1)..(210): unsure at all n locations
  Clone ID: LIB3493-059-P1-M1-B4
aaaggccagtgtttanactctcttgttaatggacatttggttgtcggttacccattggtctttggttccaagggcgaagaaaggtatgagatttttggagctttttggtgttggagagtggctgcatggatagagggaggattttggacgggtgatatggatcgggaaggaggattccacgggggatcttggtattaccccgttcttggg

SEQ ID NO: 45123 - DNA, 308 bp, Gossypium hirsutum
  Clone ID: LIB3493-059-P1-M1-B5
gggaactgaaaatgagattccggatgtctaacacaaattcaaaatcggatgaacaggttgaagtgaaagaaacaaaagagaagaaagaagaagcagccatggataaagaagatgatggtaagattcaaatgagagaaaaggatgaagaaatgaagtccaattgcttatcatgggtgagaaaaaggcagagaaacaaacacaaatttaccagaaaaattatctggtttcctcttcctaaaggctgctaaagatggtatatatgaacaatgttggtggaattcttgagattcttcatctctcaaaaacaa

SEQ ID NO: 45124 - DNA, 280 bp, Gossypium hirsutum
  unsure (1)..(280): unsure at all n locations
  Clone ID: LIB3493-059-P1-M1-B6
cggacgcgtggggcaaagggtcttgtnngttgtaaaagagtgcagccaatcatgaaaagactaagcaagctgaagataaccctgatgtggatttagacaggcttttaccagaggggtttatggagagaaccagagataggggtttggttgtgaagtcatttgcgccacaagtagcagtgtttaacaaggactcaattggtggctttgtgactcactgtgggtgggactcggtattggaagcggtggtggttggggtgcctatgattggatgggtcttata

SEQ ID NO: 45125 - DNA, 214 bp, Gossypium hirsutum
  Clone ID: LIB3493-059-P1-M1-B7
tcggtgaaaagagatttcaggcaagtgggttgattcttcatgcgtccaccaaaatttctcttcttttaccttctaattgttcaatcttttgcctcagagacaatctgcggggaggacaataagcttactgcctatgaaggtctcagggattacaacttccctgctggtcttgttttagctggtgatactagctttgatctagaccttgtaactg

SEQ ID NO: 45126 - DNA, 267 bp, Gossypium hirsutum
  Clone ID: LIB3493-059-P1-M1-B8
ggattagcaacatgtggggaagtggttcaagtggtcaacatgttgagtacgatcaacgtccagatgttttcaggggaactgtacgctatgctagtgtgcatgctgagctggggcgaactggtttcatgagagatgatctggagtctctggctctacacacttatttttctcctccgaggccggttaccttggcacggatatcatggtgaaaacataggcttttttgtttgtaagaagaagatggcaacttctcttataaactttttg

SEQ ID NO: 45127 - DNA, 339 bp, Gossypium hirsutum
  unsure (1)..(339): unsure at all n locations
  Clone ID: LIB3493-059-P1-M1-C1
cggacgcgtgggtcattctttggagtcggaatggattttggtgtgtggagtgagaacancanaaacaattataataaatgggatgcgatttctcgctccacaacagagggctacccacgtggatggacggctgtccttctatctcttgataatgttggagtatggaaccttagagtggagaacttggatagatggtacctaggccaagagacctacatgagaattatcaatccagaggaaaatggcaagacagagatggtccctcctgataatggtatttattgcggcgctctgtagagcttgcagaatgaatcacatagctcttctgcattggcattg

SEQ ID NO: 45128 - DNA, 324 bp, Gossypium hirsutum
  Clone ID: LIB3493-059-P1-M1-D7
aaaaaagaataaaaacaggttgagttccattctaaggtgtgggtttttgatttgccttttgtgggtttttttttataaaaaaggtgagcaaaaatgtttattgagaatgttaagggggagagaccaaaattggattacacagagaatgaaatttatggtggctacaagtattaaacttcagagcttgttcatgggaacaaaaatggatcctattaatgggttgctaaacctaaaactgataaatatgaattcaagagtgatatctatgtgcctaaaatgggggtgattcttattggatgggggggaaacattggattatttttt

SEQ ID NO: 45129 - DNA, 348 bp, Gossypium hirsutum
  Clone ID: LIB3493-059-P1-M1-D8
gttctcttgttattcggggcagcacctttggtgggtctgacaaacaactcttttgtctttgctttttctattttcttttccagccatcgttatggccgacggcccgcagacccctgcaagtagagcttctgcaaccctctctccaggcttatggtatagatggtcaagggttgctatggtggggttactgcttatgctccaactctactttgttgctagccatataaatgttcatgttccccagcccttggcctctacttctctgagacacaagcattccccacaggcttggtattaaacctttgatcgatgaatatcttgatgagaactcccctctttggtatttgt

SEQ ID NO: 45130 - DNA, 391 bp, Gossypium hirsutum
  Clone ID: LIB3493-059-P1-M1-E1
gttttggccggggtggtatagggtggggagtcatgattgctccggtctatattgctgagatatcgccaactgttgatagaggctctcttacttccttccctgagattttcataaatctaggaattttgcttggttatgtctcaaattatgcattttccggtctttcagttcatataaattggagggtgatgctcgctgttggaattttgccttcagtcttcataggatttgcactttttatcatccctgaatcgccaaggtggttggtaatgcagaaccgagttgaagatgcgagatctgtgctattaaagacaaatgaaaatgagaatgatgtggatgagaggctctcggaaatagtagcagccgctggaatgtctaatggagagaagaa

SEQ ID NO: 45131 - DNA, 196 bp, Gossypium hirsutum
  Clone ID: LIB3493-059-P1-M1-E11
gcttaacgcctcactttccgttattttcatctcattaagacttgtcggaccaccggtcgtttccccttcctcagatcgttgaaatcaaggagaaatccgaagacctacatgctctaatcagtttgaagggattttgtgaaagctgagaaaaagggtagtaaagatggtgatactgacaatggttgctcttgtctct

SEQ ID NO: 45132 - DNA, 305 bp, Gossypium hirsutum
  Clone ID: LIB3493-059-P1-M1-E3
cttcatttaccaaaaaacatgggcggaacattacgttcttctacttctttcatcaaactcaaagaaaccaacaacttcaaaactcctggtgacttcttaggctccatttgttttgctcaaatgaagccatcctgccgaatccgagcaaggaattcgatgtcgatgcaggaagcaccgctggtgcatgggaaaatctcgaccaaggaaaccgggaagttatacagtctaacaatttcccatgctgaaaataactcaaaggtacctggttatgggatggtgccactagacacaataacctctagggg

SEQ ID NO: 45133 - DNA, 291 bp, Gossypium hirsutum
  Clone ID: LIB3493-059-P1-M1-F12
cggacgcgtggtttacgggatggaaagaatcaggaatccgaaagctgaacctgaagcttataatgaaaggaattatagtatgtttagaatttagaatttgactgactacgacatgatcattttaacgggtgccctccttcccatactgaggagcctccaaaaaagacttctcaaatggggctgggccgtaattaacttgcacccgttggttcaggagggaagtgtttgggcccaaaaggttgggagagggacagcttttgttttttccactgaaaaagcacctgcaaatta

SEQ ID NO: 45134 - DNA, 394 bp, Gossypium hirsutum
  Clone ID: LIB3493-059-P1-M1-F2
ccctggtgttcgattggtgaggccgggccgagtctgcttcatctagacaagcagcttcttgttcagcatcaaatgaggcgattaaggactggcaagatgcatggcatgatgaaagaaaagaaacagagaatcaaggaactgatctgcacgataagttctggcagaagctaaagttgacagctgagaagaaggttggtgcagcagaggcagacaaactttgcaaggcttttcaacacgttcacaggaaacttgtgtacgaggggctgagttttgaagctgctcagaagttcctacactcatgaaactgctgaagagatagtcccttcatggctaatacctgttttatattggtagggtcttttcttcggctggtttttttccccttcttggtatg

SEQ ID NO: 45135 - DNA, 256 bp, Gossypium hirsutum
  unsure (1)..(256): unsure at all n locations
  Clone ID: LIB3493-059-P1-M1-F4
actcactcaacattccatttgggatgtgcagctcccaagggaaatattcctatcanaaacatagcggttggcctgcccgaagaggcgactcacccctatgctctcaagggagctttggctgagttcatctcaaccttgatcttctgtttcgctggatcgggctcaggaatggcttttaacaaggtgaccgacaactgggcaacaaccctcggctggcttgtagccgtctgtttagctcatgggcttcggcttttcg

SEQ ID NO: 45136 - DNA, 178 bp, Gossypium hirsutum
  Clone ID: LIB3493-059-P1-M1-F6
gttagaccccttccattggaacgtcgggtagtggaaagggagacaagcaatgtgcccacttctttggtgtaactataaacgatgaacaagctgagtgtgggattgttgggagggtaactccaacagctcagagcaaattcaagttactatattatgagcactacatcaatggtggcta

SEQ ID NO: 45137 - DNA, 273 bp, Gossypium hirsutum
  Clone ID: LIB3493-059-P1-M1-F7
aaaaaaagagttcagctggttgggttttttggctttgattattatatttttttgcaattctgttgttgtgatttgattgatttacgtgttaatcaacgagatttggtggtgaatttgagtgaaatttaagggtatttagggatttgtcgaggctattatgatgctatattcgagaggtacatatatgagagagcagttctaaacaatagactttggacgattacgacttccggggctggaatctaagggaaatgggtgtaccatgacttattg

SEQ ID NO: 45138 - DNA, 236 bp, Gossypium hirsutum
  Clone ID: LIB3493-059-P1-M1-F8
ccaaatcgcacagaaagtgtagggcacacaacaaagcagagagcaaacaaacatttccgatcctaaaaaagttagatcgttgaccatgaactccggcacatccgacgggggatgggcggcgcctggatcgagcgggagggtgagctctacatcgtcaacagacaaaaaatagaagggacgagtgagccgaacgttgatgatactgtggcatgcttactttaactgggtttgcgctg

SEQ ID NO: 45139 - DNA, 226 bp, Gossypium hirsutum
  Clone ID: LIB3493-059-P1-M1-F9
cggacgcttgattcattgaggggggcttaagcttgccatgggactcacacttaaaggatcaaactcaattatccttccatttgtgaacaataagccaccgactaatgaacacactcatgttataataaaacttgtaacttcatacttgaaacatgttaaacatttaagaatcatacactgtagtttccttccttacttactacattgattcccagcaaacaagaac

SEQ ID NO: 45140 - DNA, 392 bp, Gossypium hirsutum
  Clone ID: LIB3493-059-P1-M1-G1
cggacgcgtggggaatctaaacaggtttcttataaggttgtaagggatgacaatggtaatgttaagcttgagtgtcctgccattggtaaacaattcgccgccgaggaaatttcagctcaggttttaagaaagcttgttgatgatgcttcaaagtttttaaacgataaagtaacaaaagctgttgttactgtccctgcttacttcaatgattcccaacggacagcaacaaaggatgctggtcgaatagccgggttagaagttcttcggattatcaatgaacctacggctgcctctttggcatatgggtttgagaagaagaacaatgaaaccatccttgtgtttgatctttgaggtggtacttttgatgtttcagtgcttgaagttggtgatgg

SEQ ID NO: 45141 - DNA, 275 bp, Gossypium hirsutum
  Clone ID: LIB3493-059-P1-M1-G12
cccacgcgtcgcaattgggtctcactttttcggatgagaatgggaaccttcccacttgtggaactgatagcttttgcatttggcaattcaatttccgtgagtttaatttaagcgaagatatctttgctagtgattcaatcgagttactgcgccagtgtgggattgatttcaagatgaataacgagaaaggtattgatgtgaagcggtttgatgcgctttttgtgttgtatgatgtttattttattatagtgtcttttgaccctttatttttttct

SEQ ID NO: 45142 - DNA, 231 bp, Gossypium hirsutum
  Clone ID: LIB3493-059-P1-M1-G3
gagaatctggaactgctatccgagaggctagcgagccaggatagacctcccctgaaaatacgattaattcggatccgaatgaaagcccacctgcatcgcattgcctgaatccatgttgtatatgggtaagaggccgaccttcttgcttatctcatggatcaattctttgaccggtgaggaccgttatttatgcgtacacagagacaaaatggaatgcaggactaggactgg

SEQ ID NO: 45143 - DNA, 303 bp, Gossypium hirsutum
  Clone ID: LIB3493-059-P1-M1-G7
cggacgcgtggggattttgcctgatggaactttgagtggtggaataaatcaagagggtatcgatcattacaacagattcatcgatgagttgattgaaaatgacatcgagcctgttgtgacacttctgcactttgatccgccggaagcccttgaaaagaagtatgaaagcttcttaagtcatacaattgtgaatgatttcaaggactatgctcaaatttgttctaaaacattcggagatcgagttaaatattggattaccatgaatgagccactaattatggctaacttgggggattccatggg

SEQ ID NO: 45144 - DNA, 395 bp, Gossypium hirsutum
  Clone ID: LIB3493-059-P1-M1-H1
ggccaacacggtgcaatcaagggagtttgctgcgatccagagaagatgaggggcaagatacgttgcaagggtggcgattccatcaagagcattgagatcaaaccacctccaaagcccaaggaccccgagaattctgagaaggaacctgaaaagaaaacagagaagcctacagagtccgagaagaagtctgaaaagcccaaagaaacaccaccaaagtcaccggcgaaacaggcttctcctccggaaggcttttgttgcacggattgttatcatggtcatcgtggtggcccttgctactttggtggaccacctccgcccccatactattgggccttatggtaggccagtttatgttaactggggcggctgcggcggaagcacctactgttattgtt

SEQ ID NO: 45145 - DNA, 209 bp, Gossypium hirsutum
  Clone ID: LIB3493-059-P1-M1-H11
ggaaacactcctcattttgttgccatgctgcattctgggatggagcctgatgagttcacttacggcagtgtcttaaaagcttgtgctggtcaaaaagccttgaattatggcatggaggtacacaatagaataattaaatctggaatatggtttcattcatttgttgcaaggggctttggtgatatgtactgcaaatgtggggatgattg

SEQ ID NO: 45146 - DNA, 309 bp, Gossypium hirsutum
  Clone ID: LIB3493-059-P1-M1-H3
atctaaatctggtgagagtatcgttcttttctcctcgattcttctcctcacattcactctctctcctctttttacaaatctaatctttcgttgtctctcttccaaaggctttccatactgcgtttttcataatgtcggagaaagtcttcccttccgccaagccagccgctacggcggttccgcctgctgtcaacggcggagctccagtgaatatgaatggtacaacagccaacggtggcacgtcaaaatcccacctttataagttcatcttctcggttcaccttaccggtcacaactcctattcctgtc

SEQ ID NO: 45147 - DNA, 383 bp, Gossypium hirsutum
  Clone ID: LIB3493-060-P1-M1-B1
tcttatttgaaggtaagagtcacgtgcgtggggtgggatattcttatttgtttgtgttaggacatagatggatggtgcctatttcaatgttaaatttctcatttgtttacttcatcagaactgatgttacgtactggatgtaacttgtaaccatttattgtgctgcagatggtttatctatatgttctcagttttgtgcggatacatgtttcttggattgtggcttatgacagcttgggagttatatttattacttacattatgaagttcccatgtgttagttatcaattttaaaacttctaaagtccattttcggttattatctgtaatttgtgtttgtgtatcatattttcctggttagtcatgcaattgaattgttgact

SEQ ID NO: 45148 - DNA, 373 bp, Gossypium hirsutum
  Clone ID: LIB3493-060-P1-M1-B10
ggaaaacaagggaagaacagcggcgaagaacgagtatgaagatttgttacctgtgatggctgaaaagcttgacgtggaagcgtttgtttccgagttatgcggtgggtttcgtctactagcagatgaagatcgagggttgataacagccgagagtttgaagaagaactctgcacttttaggtatggaagggatgagcgaagaagaagcttgggatatggttaaagaaggtgatcttgatggagatggcgcattgaaccagaccgagttttgtatccttatggttaggcttagccccagaatgatggaagatgccgagacttggctggagaaagcgattgatcaagagttaaggaaaaaaacctcagcttgatct

SEQ ID NO: 45149 - DNA, 375 bp, Gossypium hirsutum
  Clone ID: LIB3493-060-P1-M1-B11
taaagatgataaacatagaagaaatgaaggtgatgatgatgatgatcatggtacacaacttgtatcatctggttcatattatcatttccaaccttctaatttccctttatcatcacatttagcaagccatggatttgcagtgcatgcgccccaggttgataatttcaacgttgtggcagcaccattgccatcggcattatcactatgtccattaccaccgccgcagccaggaggcggagcaccacccttgtttccgcctcatgtggtggatcctagacaacaagttaaccattttcagatgctgagttcaggtgcacaacagaacctcttgcttaattctctcaactttccaccgataacccaatcttttagacc

SEQ ID NO: 45150 - DNA, 378 bp, Gossypium hirsutum
  Clone ID: LIB3493-060-P1-M1-C5
ggggagggacggcaagctcgtggcggggactatgtacaagtaaactatgtctgccgacgatcaaatggatatttcgttcacaggttgaaaacttgaaatcacaaaaatcctgaacttaactaatgtggagtttcttttatcaattcaccacttcattagttgaaacacatgatgtttgatccagtctgacctgcctctgttctgtgggaaacttaacagcactgtggatcaattcagtggagaaagctctcctgtcacccttcctttggatgagaactaggtgtgttcctgtttccgttaatgtcgataccatagcatcatcactatgttgttgccaactacattctttcacttgagcaagataatttccaatcattc

SEQ ID NO: 45151 - DNA, 327 bp, Gossypium hirsutum
  Clone ID: LIB3493-060-P1-M1-C7
gtttttaagccggaccaaggcttgctatttcctcgatgtttacccttatttcccttggtccaccgactccaataacattaacctcgattacgcgcttttcgaatcccgaacgataaaatacaccgacccggtttccaatctaacctacagtaatttgtttgaccagatggttgactccgttattttcgcaatggaaaaactcgggtatccggatgttcggatctggatagcggaaacaggttggcccaatgccggcgatatcgatcaaataggagccaacatttacaatgccgctacttacaacagaaatgttatcaagaaactaac

SEQ ID NO: 45152 - DNA, 314 bp, Gossypium hirsutum
  Clone ID: LIB3493-060-P1-M1-D1
actgaccaagggcattgcatctgggggactgctagacactgaaagtgctgaccctactgaaattaacgcatgttagtcacaggaataggctgaagaagcttgcttccaagaccatggcaaggcggtaatgactaacaagctggacattggaccagcatgttgcaaatcaataacagctatcaaacacggtcggtcgaataggtaaactgcacacttcgatgttgacttaatcggcctttacatcaccgaacttcgcgctgctgctccatctctcgcacttgttttctaggattttgtatatctagggataaaca

SEQ ID NO: 45153 - DNA, 325 bp, Gossypium hirsutum
  Clone ID: LIB3493-060-P1-M1-D12
cttcgtcggcggacttcgaaaaccaacgtcattcgaacacgagcattcactggcgtgatttctttcggacgcggaaaaagagacaaggagtttcttctcaaggcttgcctataaaaccgaagctcactcgaagaaagaagaaaagaatcaaaggtgacgttgttccacaaatttcttcgtctcttgatgccgaactgtcctgttttaaatcttcctggaagaacttctcgttatcggagcttcgggaagcgaccgataacttcagtcgcgaaaatttgataggagaaggagggtatgcagaagtttacaaagggagattgaaaga

SEQ ID NO: 45154 - DNA, 164 bp, Gossypium hirsutum
  Clone ID: LIB3493-060-P1-M1-E6
gcaagacgaaggcttcttcgggtcccgttggaagcttgttcacaacggtggtgtttccattttggaagttttcagaaagaagtcaccgagactgcactaacaacaactgaaccattcaatgccttggccaccacaagagagctttgtgatactcgatgaagatg

SEQ ID NO: 45155 - DNA, 373 bp, Gossypium hirsutum
  Clone ID: LIB3493-060-P1-M1-E9
cggaaaccaccattttcggaaatgcataaaaacaaagatggcgactattttatattaattacggtagttcgatctcccacttccatagtttttacttattgtttcctttcttcattaaaaaataataataattccctctcctcctgctgtctctctttgcaaatgtttggaaatttcatctttttgcctaaaaaataatatttttacagttatatctctgtcccctttgactgcagattgaaaggaaaataattagtttttttcttttttcctaatttttgttgttgatttcttcattcaaatgtttttcggttgaaacaaaagaagaagaaagacaaaaactcgaaatgtctgtcgtagatgttgctttgag

SEQ ID NO: 45156 - DNA, 378 bp, Gossypium hirsutum
  Clone ID: LIB3493-060-P1-M1-F1
gttacttagaatatctgaattcggaatgcccgcaaaaagcagatcaaatatcgacaaatatccgaatgcacacagtccatttccatcccattcatcaaatctagaagaaatgaaaacaataataaaagaaaaagggagagaatgagaatcgagaatcaaaccaggggttctaggtcgttcgagaatgatttcttcagtggaaaccatggtgaggcgactccccacatcttcacgcacggcatcaccgaatttctcccaattccttctctccagagcccgtttattcaatcgggccttggctagctttcggactcgggtcggcgtcgttattttcaccttattgccttcgtcgttgaacttgtattcgatcactttctt

SEQ ID NO: 45157 - DNA, 179 bp, Gossypium hirsutum
  Clone ID: LIB3493-060-P1-M1-F9
atttatctatccattatatgttgtgttaataccaacttcatatgttagcactgcacttgccatgtttctaattgtatgattcaacttcttctttttgcatagcttgtttagtcctgacaatgtaccaaaatgcaattaagtttgaggcaaaaatgaatttgagagaaacccctttagtc

SEQ ID NO: 45158 - DNA, 241 bp, Gossypium hirsutum
  unsure (1)..(241): unsure at all n locations
  Clone ID: LIB3493-060-P1-M1-G10
atttttatttatattttaaggagcctttgctaaaacgcggctaatggctatatacgccgaggccggcatttagctttgtcatccttcgccattcttctttttctcacgtatgcaggaaaccagcccactgttttattctttctttttataactattttttcttcatgcatgtaaatcctatcaaaatctaattccattaacatttttttaataantaactttttttattaaatttggtgat

SEQ ID NO: 45159 - DNA, 341 bp, Gossypium hirsutum
  unsure (1)..(341): unsure at all n locations
  Clone ID: LIB3493-060-P1-M1-G4
gcggagcctccagaacgagacccgttgccggagttccgcctggattctgatgccggagctacctttgttcttgaatcaaaagggaagtggtggcatgcggggtttcatctgacgacggcaatagtggggccgacaattctgacactgccgtacgcgttcaggggactaggttggggcctgggtttcttatgtttaacggttttaggatgcgtcactttctactcttactatctcatgtccaaggtgcttgagcactgtgaaaaagccggccgccgccatatccgcttccgtgaactcgccgcctgacgtttaaggtctggtntgatggtttaatttggtat

SEQ ID NO: 45160 - DNA, 339 bp, Gossypium hirsutum
  Clone ID: LIB3493-060-P1-M1-H12
gtggtctgtgtatgaggttgaagtagagaaagaaaaactcagaaagcaagtagttgaattaaaggatgaccttaagaagaaggaagatgctgttactaccatggaaaagaagctgaaagagagcaatgaaagagcggcagtttctgatggaacaaaaacaccattagaagacgataaatctgccatggttcctctcagtcctatagaggttgcaagcctaagggagaaagtaatgctgcttgagggacaaataaagtcaaaggaaactgctatagaaacgtcaacaaatgtcttcttggaaatggaagaggatcttcagaagaaaaattgatgagttag

SEQ ID NO: 45161 - DNA, 361 bp, Gossypium hirsutum
  Clone ID: LIB3493-060-P1-M1-H3
cccttccatccctcttttgtttgctctatgttgtatcaacaatgcctgctcaagttacacctcagaaaatgattcagggagttgatcttgtagataaataccaccactcagttactctcactaagaaggcttgaggaaaaagtagcgatcataacaggcggcgccagagggattggcgaagccacggttagagttttcgtgaagcacggagccaaagctgtgattgctgatattgcggatgcagctggcattgccttagcaaactcattggcaccttcagcagtttatgtacattgtgatgtaagctcagaagaggacgtaaaaatgttgataaatagaacaatttcattttatgggaaac

SEQ ID NO: 45162 - DNA, 294 bp, Gossypium hirsutum
  Clone ID: LIB3493-060-P1-M1-H8
gttatgcagttgctgagggtgcacgctaacagaatgtgcaggttgaaaggtaaaaaggatgagcattatttgagttcattgaccttcctgataggtgatactggtggtcaactcaagaacataaatactaacttttaccttgatagccatgctgcacactctgttgcagctgagattaatgaacaatttgagttcacagaccatgatgttgacttgatagctgagtctatagagtgctcgataactaaacttctacctggtatgaaggtctatgcttatctgtcgagtggaact

SEQ ID NO: 45163 - DNA, 409 bp, Gossypium hirsutum
  Clone ID: LIB3493-043-P1-M1-A1
ggggatcagggttatgtgatattgccattttggttgtcgacattatgcatggtttagagccacagacaatagagtccctcaatcttctgaaaatgaggaaaactgagtttattattgcattataaggtagacaggctttatgactggaaagctcgccgcaattcaccaattgggatgacacttaagaaacaaactaaagatgttctatccgaattcaataggagagttacacatgttataactcagttcaaggagcaagggttgaatactgaattgtattacaaaaataaggagatgggtgaaactttcagcattgtgcctacaagtgcagtcactggagaaggcatcccagatttgttattattactggtccagtggacccagaaaacaatggttgaaaaacttacat

SEQ ID NO: 45164 - DNA, 397 bp, Gossypium hirsutum
  unsure (1)..(397): unsure at all n locations
  Clone ID: LIB3493-043-P1-M1-A2
acggcataccacaaaataatgtcccaaggccatccataattcgtgcttgttcgtcctctaccaggcatggagttccatataacccaactgttggtagccgacatgttctaaaagaagcacatcattgcgctcgggttcacaggagttgctaggtgtgcataattctgtaattcaaagggatcgaggtactaagactaggaacatgagttgccaatttgtctcttccaacacaatgtccaaaagactagatactgaagttcctgcaacagtgacccacagtgcatatgttccaccagagaacattgagaacattacttctgctcatgcatcacagtatcaaccagagaacattgagaacattacttctgctcatgcatcacagnatcaacgaaatcct

SEQ ID NO: 45165 - DNA, 247 bp, Gossypium hirsutum
  Clone ID: LIB3493-043-P1-M1-A6
ttaaaaagaaaaaaagagagatggcgtctgtaataaaatctgcaatcttaattctgtgccgatgtttatctttacacttcactttccttgtttagtcgatcctcctataacttactccacttatacactagaattctctgctcaagctttttcaccatacactccaccaagtaaaattatccaacaactacgactctgaacgtcatttcccaatatttattttcttacactatcctatcaagactaa

SEQ ID NO: 45166 - DNA, 460 bp, Gossypium hirsutum
  Clone ID: LIB3493-043-P1-M1-A9
gcctgagaggcttccaacagattctcctaagaggccgagggaaccatttatgggggtgggcgatcctgctggactttggcatttcatttatcgtagtatatttcttgagcaatatgatcttctgagttctcaccgccacttagcagtccccagcaacagaaaaggttatatagagcttaccaaagactgtatgattccatgcatgataaaggaattgggccccataaaactcagtttagaagagatgaaaactatgttttactctgctgggttacacaagattttgaactctatgcggcattcgatccccttgcagacaaggcagtagccataaagacttgcaacagggtttgtcaatgggtaaaagatgtaaaaaatgaaatttttttgcagggagctagccccttttcatggtaataaaaggcattcatggtaaacataatatgtactctaacttttg

SEQ ID NO: 45167 - DNA, 431 bp, Gossypium hirsutum
  Clone ID: LIB3493-043-P1-M1-B1
cctgtttccctcttttttcaactttctctctgattttctcgacatacaaagacatcgcttagtttacgactcttcttttttgccttcccatttttgttactactattagcagtgggggaaacttttctttcctttttctctgttaacattcttggtaaggtttgcttcatgcaactttctcttcgttttcttggtgaatttttggtttaattttctttctcttctagattttttgtggttttaattagatggtatttgggtctgaatctgatccatgttttaaagtgatctgttttgattaaattttataattcacatcttggtagagctgatcaggtaatttcgataacggtactgtacataagtctgaatttagggtttattacaaccgataggacagatccagttgcagcatctgtttggcttgcgag

SEQ ID NO: 45168 - DNA, 463 bp, Gossypium hirsutum
  unsure (1)..(463): unsure at all n locations
  Clone ID: LIB3493-043-P1-M1-C1
tggacctcaccaacaggtaatgagtgaggtctaccaacctgaaaccgataattggtgccgtgtctataacggaatggttgcaggctggcggaacccatgtacttccttaaacggccatcttatgctttggagtgcaangganntggttgtaagctannagggtttatgatgaagtgannctgattcttggggaaagcatatnncgatagtaggattcatcnntgggcaattctcgagctnttagaagcnagcagctctcgttccacttaacgggaaactctgcatcattcggaataatatgagtgtatctttggtcgatgttacaaaatccgacgatctgaggggagctacagctgaacatttatgggaaaccatagcagggaagggtcagttcaagaccttgtttacaaatctttggtctagccttgctgggcggaaccggctgaaaagccacattgttcac

SEQ ID NO: 45169 - DNA, 309 bp, Gossypium hirsutum
  Clone ID: LIB3493-043-P1-M1-D1
gagagggaaaggacaaggcaggattgattcatgactactactatcattaagactcgccagcagatcacaaagcacaagaggacctagctaacccactccctcttctactaaggaataccatcattccacttaccgaaactgcacctgttctttcaggaacttctgtattcctcaaaacaccatataatattttcttaatctcaacatcaactccccatattaccatcccaaaactcgatcaatgctttaagatccacttcctcattctgatcctaataagaacttctatcacatttataatcaatttat

SEQ ID NO: 45170 - DNA, 325 bp, Gossypium hirsutum
  Clone ID: LIB3493-043-P1-M1-D12
tcggacgaattcagtgaagaaataaccaagaagtctacatctgtggaggattcaagtgagatttatgagcttaaagatgaacattcgggagacaagacaaatgaaacctcataaacccatattttaaaatcaaaatgaaaagctcactgtgggaactcttaaggacgatggtttaaacaacaatttttagaaaaagattgttttagaaaatctaactctgtaggatcaaaaacaaccgccccttgtcgtgaaagaaaacataactgtttctggggaagcaatttagaaaactctagcaagagatttgcaacctctaaaaactggg

SEQ ID NO: 45171 - DNA, 410 bp, Gossypium hirsutum
  unsure (1)..(410): unsure at all n locations
  Clone ID: LIB3493-043-P1-M1-D2
cggacgcgtggggtaatttgtaacttttaacgtaaatgattgttaatgatatgatgatggtcttttcatttttcaattcaatcatttcttctattttctcaagagctcaaagtttttttacttgtnngaaatagaaaccccgtttcaaagaaagtaatgagccaaatgtcaatgagagttttctccaaagtcgacttagagttagcaatctatatatttgtatgtgtgcttcaaattaaaggaagctattatgatttatgctactgtaactttcattttgctcaaagtaccatgcccaacaccaatatatgacacattcagacatgggtatggggatataattctncaagtgcatggaaatcttgaaaattttgaacatacttgtgtcgggcatatactcattttcctac

SEQ ID NO: 45172 - DNA, 156 bp, Gossypium hirsutum
  unsure (1)..(156): unsure at all n locations
  Clone ID: LIB3493-043-P1-M1-D4
cggacgcgtgggcggacgcgtgggtaatgtatgtcttttggctctgttttgatacctgtaangcattcatttaggggtcactaatttcaccattataagctgaaaaccgtataaatacgtaaaactttaaagatcttaaagttattcctttttaat

SEQ ID NO: 45173 - DNA, 181 bp, Gossypium hirsutum
  Clone ID: LIB3493-043-P1-M1-D9
cggacgcctggggcaatatccacgggtagatcttttatcactttgaaatccaagccaattctcatataaaaaagcttctataaaagtacttataaattactgaaaatttcaaatcatgctactgctagacttttgtttcacactttcatataatatttcgtgaccacgtaccaattcattt

SEQ ID NO: 45174 - DNA, 200 bp, Gossypium hirsutum
  unsure (1)..(200): unsure at all n locations
  Clone ID: LIB3493-043-P1-M1-E10
tagagataagggattaatgaaacatgtacttgaaatatttgaaaatgctcaccgcnnttactcaatatactacttgatggacagtttcatacagaacttgaagggaccattctttgagaaggaagggcttcattgcctggatgtttnttanctggcgcgggagcagtccnacctgttgttttttttctccccccttccct

SEQ ID NO: 45175 - DNA, 482 bp, Gossypium hirsutum
  Clone ID: LIB3493-043-P1-M1-E3
ccttcatcgtctccgaaaggtgtagtgaatagcaggggacagttatcgccagttcgtgggtcaattcggcctgcatcaccaagtaagcttggggcctccactacttcgtctctttgagggatgagtccctctagagtgaggagtggattggctaataatttggtaaatactccatcaattttgagctttaatggtgatgttcttaagatgggtaagattggggagaataaggcttgggatgctcattttttgaggctacttcataataggctgttgcaatggcgttttgttaatgctagagcagatgctgctatgtcttcccagaagtctaatgcagagaaaagtctctgtggtgcatggataactacctcaaaacttcgagaatctgttagagccaaaagaactgagtttcagctgctgaagcaaaagttgaagctgatttccatcctaaaggggcaaatgatgcttttggatgaatggga

SEQ ID NO: 45176 - DNA, 180 bp, Gossypium hirsutum
  unsure (1)..(180): unsure at all n locations
  Clone ID: LIB3493-043-P1-M1-E7
cggacgcgtaggcgaactcgtctttcaaatgatgcaaaggctccaaataacccaggatatatacaataaagacgggcttgtttatntctacannaaaaccctaaaatttgatttatagctgcctttacccagtcactaacatatcatgtctttaagggggggggtaccttattatttttt

SEQ ID NO: 45177 - DNA, 197 bp, Gossypium hirsutum
  unsure (1)..(197): unsure at all n locations
  Clone ID: LIB3493-043-P1-M1-E8
cggacgcgtgggttttctcacttgtttatcagtctttggtcatccaaattcaagtttcaactccaaaatatggggagtcaaccatggnttttcgtttgccacccattgttgttaatccagcaagtccttaaagctcaacaggctcaatcaagtgtgccggggggtcacattgcaatctatgtatgggaggttgatag

SEQ ID NO: 45178 - DNA, 344 bp, Gossypium hirsutum
  Clone ID: LIB3493-043-P1-M1-F1
cttttcttatcataaccaataccaatggcatcttcagcttcattgatggtcctggctttggtaatggcgagcattgccgccattgctgaggctcgagctttcttcatttttggtgattcactgttgacacgtggcaaccaataactatcctcgaaaccacggctcgtgctgattccccaccttacggcatcgattattcgacaggaagacccaccggccggttctctaatggccttaacatcccagacctgattggtaagcaaattggattgtcggagtcaccattgccatatttgagcccagattttaatggtaaaaagctgcttcttggtgctaactttgct

SEQ ID NO: 45179 - DNA, 501 bp, Gossypium hirsutum
  Clone ID: LIB3493-043-P1-M1-F10
gtctgatttcagcaacggagagagtctccggcaacacaatcacagggattggggggaagccctctccttctcttattatttttgtttaaaagagatttaaaaataaaatataaaaaagaaaagaacacgaaaatagaaatcgaaattaaccgttttttgcttctattttttctttttgattgcttaatgttcgtaaaaaaatttacaaatgaaaatcgtggctcttatagccaattcataaactgttagttttcattttttttgtctttttgcatgttgtttcttctgcttggcttcttcgtttgcgtgttgcaggtggttgtcagagacgtcagatgcatgcgacaaaacggtgtgcgtggtggtcgagggtagcgtgcggcgctggtcaagggcagtggggcatgcggcggctgcaccttggggactagggttttgtctgctgaaaaaaaagtttaagatagtgggctagggtttgatgtaatgggtcatttggttttg

SEQ ID NO: 45180 - DNA, 396 bp, Gossypium hirsutum
  Clone ID: LIB3493-043-P1-M1-F11
gcagaaatgttgtcgatggcagcaccactttccactctgccactgttgctgcgggaggggacgggttcttggccagggatataacatttcagaacacggctggaccatcgaacaccagcagtggcactgcgtgtgggctctgatttatcagcattctacaggtgtggcattttagcataccaggacactctctatgtccacagccttcgccaattctattcacaatgccttgtagcaggcagcgtggacttcatattcggaaatgcagcaccagtgttgcaagactgcgacattcatgctcgtcgacccaatccaaaccaaaggaacatggtcaccgcacaaagccgtagtgacccaaacgagaacactgggattgtgattcagaaatgtaggatc

SEQ ID NO: 45181 - DNA, 434 bp, Gossypium hirsutum
  Clone ID: LIB3493-043-P1-M1-F3
cacacttcacaatcatgcttgtcctttctccaacttcttcttcttcttcttccttggtttgcacttgtttcttcatcattctctttgtaaccataaactcctccaatcctgtaccattacaccaaggccaaacgccccccacgccagctttctgtcaattactatgcaaaatcttgccctcaagttgagcaactcgtcggctccatcacctcccaacaattcaaagaaacccctgtctctgcacctgccaccattcgcctcttcttccatgactgctttgtagaaggttgcgatgcgtctatccttatagcaacacagcctggaagtaaaatattagcagagaaagatgcagcggataacagggacctgagaacagaggggtttgatacaataacgagagccaaggctttggtggagagcaaatgccccggcat

SEQ ID NO: 45182 - DNA, 229 bp, Gossypium hirsutum
  Clone ID: LIB3493-043-P1-M1-F4
acttatatacatatattaattgggaggagtatcactcctttcctttccactgaattctcacgatccactttatcatcccaagatataataccccattttttccacaaagttcttgaataagttgatttaaaaactcgggatttattctcgagaataagtggagagaaaaagtgtaaaacaacattttaatttagcacagaaaacaacatacgatggcgacgttctttta

SEQ ID NO: 45183 - DNA, 456 bp, Gossypium hirsutum
  Clone ID: LIB3493-043-P1-M1-F7
cccaagttcagagctctccttctcttcattgaacatagattttatggtgagtgaaggccatttttgaaagacttataccactcagcaaagaccctggggtacttaaattcacagcagccttgtgctgatttagcacgttctgataacgaagcttgaagtcagaacccgtcattctgaagcatctcccagtgtgtggtcttcggtggatctatatgagaggattgttggcagcatggtttagacttaaataccctcatatagcaattggtgcattggcttcttcagcccctatattacagttcgataagataatcccatggtcaagcttctacgatgctgtctccctggatttcaaggatgtaagccagaattgctatgaagtgataaaggggagctgggcagaactggtggcaatttcaactcggaaacaagccttggctgaactaacaaagcttt

SEQ ID NO: 45184 - DNA, 284 bp, Gossypium hirsutum
  unsure (1)..(284): unsure at all n locations
  Clone ID: LIB3493-043-P1-M1-F9
ggctttgagccgccacctccaccattagtagggatagaagaggaagaatcaggttgtcttcctgtttatgaaaccgcaggtatgttatccgaaatgttcaatttcccttcggtcggtgctgccgctgccgccgccactgcctcgaccgagttactagaccagcatgtacagccgaattatcgagcacaccggccaaccccaggtaataccaacgagtggtatagcaacaggcaaggtgctgttgggggtttgggacagttaggtgaatcgaanagtcacattac

SEQ ID NO: 45185 - DNA, 349 bp, Gossypium hirsutum
  Clone ID: LIB3493-043-P1-M1-G3
cccacgcgtccgattttcttcttctggttctgaagatgaaggaagggataaaaggcaaaggagaggcgaagaagaggaagaggagaggaaaagcacgaagaagaatgataagaaagaaaaagaaagataagaaatctcacaagcactcttctcataaaggttttaattttaagtttataagttcaatattatttctcctttctattttgtttttaatttattgaatctttgttgggcattgggtttaggagtcaaaagttggaagaattgggttatattcatttgttaacttaaaattttacaattttaagaacagtgaaggcatacttaggaaggggaaggtgcaggg

SEQ ID NO: 45186 - DNA, 320 bp, Gossypium hirsutum
  unsure (1)..(320): unsure at all n locations
  Clone ID: LIB3493-043-P1-M1-H1
gcgcggagtaaatataaggaaatcgaagatttgaggagagaagaagcttgtcgcaaacagagtattatagaggctaaaatgaaacttgctgatgcttaaagggatcttcaaaacttgcctctatgagncctccttaaggaggaaattgagagattgaaaaggcaaattcttgagctaacttctttttctcatcaaatgatgcaccacaagaaagagaagggaaaatctctatggcttatgaaaacaaccctaaagaactgggtccatggtttgaaagatatttgaaatacaaaaacttaacttctttatgctttaaagaa

SEQ ID NO: 45187 - DNA, 179 bp, Gossypium hirsutum
  Clone ID: LIB3493-043-P1-M1-H10
ccaactcttagcgttaatgtcctttataaggttcaagacttacttcttttgggtgggaccccactttcactaggggtggcaactgccttttctttccttaccttcttccttccacaaaaacacacaaaatcctactccatatcgaaccctttctactaccactactggtggtaaccacc

SEQ ID NO: 45188 - DNA, 283 bp, Gossypium hirsutum
  Clone ID: LIB3493-043-P1-M1-H4
ctccgtcttcaaaacctacctctactgttgttggaaaaggaagagaaaggggtgacggtggttcttagaatgacaagaacaaatgtggtgcttcgaaatttgtttctagtttcaagaactgggttggaagctgacataattggggcttttagtgagatgggaatatggataccctctgaaattcagtgtgttgggatccccgctttgttggatgggaaaagcgtcgtcttaagctctgaatctggatctggaaggacttttgctttcttgttacccctcatac

SEQ ID NO: 45189 - DNA, 386 bp, Gossypium hirsutum
  Clone ID: LIB3493-043-P1-M1-H7
cagcttttaagacaaaatcttcaaggtttcttcatatattgatcttatcttgcttctgaaaatgtctctgattccaagcttcttcggcaaccggcgcagcaacgtgttcgacccatctcacttgatgtttgggacccattcagggacttcgctgtctctacgacacggacgccggaaacctcagcctttgtcgacacccggatcgactggaaggaaaccccggaagcccacgtgttcaaggccgatgtgccggggcttaagaaaaaagtgaaagtggaagtggtagatgatcgggtgttgcagataagtggggagaggaacgtggagaaggaagacaagaatgatacgtggcaccgggttgaacggagcagcggcaagttcatgag

SEQ ID NO: 45190 - DNA, 464 bp, Gossypium hirsutum
  Clone ID: LIB3493-045-P1-M1-A11
ggccaactctgtacttccccaggttgaacagttgggaactgcacaatcaaatgggtgtgaacctaacaacttattacctccatttcctggaagggagtattctgcttaccacaatgcaactgatccacagaacaatcttctctttggggttagcattgattcctcgtctcttatgctgcatcatgggatgacaaacccgaaaagcatcagaaatgagaatgattcgatgtcccttccgtacgctgcttcaaatttcacaagtgcttctggcacagattttcctcttaattcagacatgactacctcaagttgtgtcgatgaatcaggttacttgcagtcctctgaaaatgtggaccaagtaaacccttcaactggaacctttgtcaaggttcacaagtcggggtcctttgggcgctcattggatatttccaagtttggcagctatgatgagctgcgctgtgagc

SEQ ID NO: 45191 - DNA, 182 bp, Gossypium hirsutum
  Clone ID: LIB3493-045-P1-M1-A4
ctaccactaatccgcacaatcccttcgcgtgcgtaacaagagccgaccacccttcacagtccacctaatgaatgacccctgacgccaaaccgcgtggggacccactacctcatcaccctcccgtttctttctttttgcactccgttccgaataacggctctagtcatatgtacgactaccaa

SEQ ID NO: 45192 - DNA, 429 bp, Gossypium hirsutum
  unsure (1)..(429): unsure at all n locations
  Clone ID: LIB3493-045-P1-M1-B11
cgaagctctgagaagctacagtgaagttgctggtaaaaactaccctgctgatatgtttattcaatgctggagagagatataaaccacagtgaagttttgagtggaatatgggactgngttggaagaaaagattttcagtggatgacacaatacaagtagtggaggacattgaaaagcaactattaagaggattaatcgctgagatttgtgcataagtgtgtggttttaccaacttcttgaatgttggttctgcagatctgcacattcatagcttcaagaggtcggtgatgcagcaatggtaaataagctntactttggttgaaataaaggggcagagttgaacctgtttgcccatttctcccattgaaaaatcatattttcattgctgtaattgacaaaatgtatatttaggcttcaaccacttaaaat

SEQ ID NO: 45193 - DNA, 298 bp, Gossypium hirsutum
  Clone ID: LIB3493-045-P1-M1-B12
ggaaaacggtgcaagtttgagaattgcggcaagagtgcccaagaagcacgatgatgcaaggcccatggtgggggaaaaagatgctcctggggagaaggcaatgcagaattgaaggggcaggagtggtctatgtgcagctcacagtagcatgttgcaggagaggcaggcaagcaagggagggctcattgcaccaggagttttccatggtcttgtatcggcaacatcaaccacaagaagcagctccaacaacaatcactcatcttcaagcaataatgtcatttctgattgcatcgattca

SEQ ID NO: 45194 - DNA, 400 bp, Gossypium hirsutum
  unsure (1)..(400): unsure at all n locations
  Clone ID: LIB3493-045-P1-M1-B3
cagcgacagttcgagtcttattgcagctaattctaacgttgcagtggcaaataaaagcaggaactatagttctacaggcggcatggcggaggcggtgtcngcagtaacgtctcattaacaatataaatgtaagcgagtcgaagttgtatggaaaccctaacaatttagtcttcgaggcaggattactggaacaaggatcagaatcggggatttttccggagattgggagttttacgagcttggttacttcgtcaaacaatgaaacgtcgtcgttgggtttcggtgcggtattaaatgggcaaggacagtggcagcagcaaaagatgatgagtgttggaggggaggaaatcaccggggaattgctcgatcagacgatgcaggttgagctttcaaatttgca

SEQ ID NO: 45195 - DNA, 111 bp, Gossypium hirsutum
  Clone ID: LIB3493-045-P1-M1-B6
cttaccacagttctccatcaagattgctttcacctttgtagtccatccatctctaatccttgcatatataagacatgctgcatatctttcaaagcatcatattctctaaac

SEQ ID NO: 45196 - DNA, 196 bp, Gossypium hirsutum
  unsure (1)..(196): unsure at all n locations
  Clone ID: LIB3493-045-P1-M1-C12
gggaatttaaggataagatcgaaggggttggagctatggatcatcancatttnggccctctcataactaactatggtagtacggatcacaagcttcttgtttatgattacatgccatgggaagcttatctgcgcttttgcatggcaataaaatcgcaggggggggctccactcaactttttttttttttctcgaat

SEQ ID NO: 45197 - DNA, 228 bp, Gossypium hirsutum
  Clone ID: LIB3493-045-P1-M1-C3
ctcattttctctaaaatctaccttccatatttccttcggactgctaagaaagttatttgtgaacaactaaattttgaaaaactcgttttccttttttgcctttcccccttgacgatctcaatattaaaaaataaatcaagcaatttcccgcacggcaagttgggtgggatccatatttataaattttccccactttacctcataaaaaaacaaaacaaccacccatta

SEQ ID NO: 45198 - DNA, 414 bp, Gossypium hirsutum
  unsure (1)..(414): unsure at all n locations
  Clone ID: LIB3493-045-P1-M1-C9
cgccaatggcttagccatgtattccgccatctgccaacaatgtggcttagtcgcgagggtcnaacccgaaatccttggtgatggaccacacgacattaacaagtgtgctgcggtaccgagcgtgtccctcgcagctttgctacanaagctctaaacgaccaccagtgtgatgctcgaaggtacattgttgaaacccaacatggtgacacccggttccgattccccaaaagttgcacccgaggttatcgccgaacacacggttcgtgccttacaacgaaccgtcccacctgcagtccctgcagtagtgttcttatctggtggacaaagtgaagaagaggctaccgttaacctcaatgccatgaacaagctcaagaccaagaaaccatggtcactgtcattctcatttggacgagc

SEQ ID NO: 45199 - DNA, 160 bp, Gossypium hirsutum
  unsure (1)..(160): unsure at all n locations
  Clone ID: LIB3493-045-P1-M1-D1
ccctcccggggctttagggcctgaagataattgttggccccaaatggcccgaatggtgcctacttganaagatcatttaaatggggagggtgatctacctttcacacatccacgcananatctatatttactaaatgcatgtgcgtggatatacaaccca

SEQ ID NO: 45200 - DNA, 417 bp, Gossypium hirsutum
  Clone ID: LIB3493-045-P1-M1-D12
ggaaattagagtgaggaacaggcaaaggaagctttacacaaacagtccagggtgatggtggcctagttataaacaaaccatgtggagtcacatcgtgtttgaacatccagctacgttggaaacaaatggcgttggaacccagataaagaagaaagagattattgagagatcttgttacttttagtgataagtaagagttttatgctaggattggtaaagcttggaaacgtgggtatcttctttatgggaccaccaggactgggaaatcaactatgattgctgcaatggcgaatttgttgaattatgatgtttatgatcttgaactcactgctggtaaaaataatactgagttaaggaagcttttgattgagaccaccagtaagtcttatatagtgattgaagatatagattgttcac

SEQ ID NO: 45201 - DNA, 251 bp, Gossypium hirsutum
  Clone ID: LIB3493-045-P1-M1-D5
ccttcatcttcattattggttcaaaatctaaaatcaaaagcaaattttccataaaagggtacatattaacaccccaaaacaaaaaagacctaaaaaagagtttcattcgcatctttttctttaattccataacttttgccttcttattaaccattatctttttttccttcaatacttgcccttcttaccaccaaaaaacatttctaactttaaattcatccttaaaagaaccttatttacgcatcttccat

SEQ ID NO: 45202 - DNA, 368 bp, Gossypium hirsutum
  unsure (1)..(368): unsure at all n locations
  Clone ID: LIB3493-045-P1-M1-D9
cacaatgataagtcccaacgcatctcagtaacctccacacccaacattattggaggcgcacaaaacgagtcactatgccccaatcgaccacaatagaaacagaaaagggatagacttcatagnttaaacctgacataggagcatctgtcattaaacaaaactgggtgtttcctcttcaagtatcttctgatatcaagtttggctctaattcgcatgtaatttcggtttcccttccctatgtctaatccatcatattctaggaaatcgcctaggagattgctctgttaatttttcagagaataagccaataaggacgtcgtggatttgaacccaaaatggactataaaataatggaacttttagtgggt

SEQ ID NO: 45203 - DNA, 349 bp, Gossypium hirsutum
  Clone ID: LIB3493-045-P1-M1-E2
tggagagttaaaatgctgtactcttgttgttcattgattctgtcaatgaagagtcaagtgaagtattatactacgatggacatgcggctacggttccaagagaactcaaaaaagaatagaaaagactaggagttggaaagaaacaaaaaaatgaagtggaagcagcgggtgaccggaggttcttaacctctctattgtatgatatacccaaagcctcatctttttatcatgttagcactgaatgatctttgttaaggcattgtagtaactgaaggaatttaccttttctataatttgatactatctttaatgatactactttttattgcaaaattcatattaacaaata

SEQ ID NO: 45204 - DNA, 211 bp, Gossypium hirsutum
  unsure (1)..(211): unsure at all n locations
  Clone ID: LIB3493-045-P1-M1-E9
tcttcctgttgggcatttacatgcaaagatcatggatcgttttactccntttttgtttgttgttnttaccctaaaacatattggctaccccccttttaaagctattangacagccttactattggcctattatttcnnngtgctgccttcaccaccccccctctactatctggggggggggggcgccccccccccttttattttttttttt

SEQ ID NO: 45205 - DNA, 372 bp, Gossypium hirsutum
  unsure (1)..(372): unsure at all n locations
  Clone ID: LIB3493-045-P1-M1-F11
gggttttagagttcctggaaattatgtaaaggggatagcctgtggaggacgacaganntgcttatatcacagatgctggagcagtacttactttcngttggggactctatggacaggatcaatatgtannngtaaagtaggagaatttggtggagaaaaaaagccccagtgggagtttgaaaatnaaagtttttattctaataaagggatattctttctaaaattacttttctaatattttctctcctctaatttattgtgatatatgcttgttctatcttctaatacattgtgatatggagttaaattgtttccattttcttgttttctcaagtgtcggccaagaactacaaattatgaatttaaccccaa

SEQ ID NO: 45206 - DNA, 615 bp, Gossypium hirsutum
  unsure (1)..(615): unsure at all n locations
  Clone ID: LIB3493-045-P1-M1-F2
ctcaatggtatgctacttaatgacaaacaagtttttgttgggcctttccttcgtaggcaagaaagagagtcatccataggcaaggcaaagtttaacaacgtctatgtaaagaatctatcaagtcaacaactgatgaggatttaaagaatgcatttagtgaacatggacctataactagtgctgtcattatgagagatgcggatggaaagtcaaagtgttttggatttgtcaactttgagaatcctgatgatgcagctcgttctgttgattctctcaatggaaagaagtttgatgataaagaatggtttgttgggaaggctcagaagaaatctgaaagagagatggaactgaaagggcagtatgagcagaccttaaaagaaacagcagacaaatttgcaggactggatttatatgttaaaaatctagatgatagcatcaatgatgataagcttagggaatngttctcagagtttggacagtcacttcgtgcaaagttatgcttgaccctaatggcataagtagaggctcaggctntgttgccttttcaactgctgaagaagcatctcaagctctcatggagatgaatggtaaaatggtagttagcaaaccacttta

SEQ ID NO: 45207 - DNA, 175 bp, Gossypium hirsutum
  Clone ID: LIB3493-045-P1-M1-F5
gattcgcgattatgggaatcgaaataagccggggcactatcattcacaggaggttggggggcctcccccatggctgtcgcggctaaacatcactcatgtaaatcatccgcggcagctatcttttgtcccactggtggggggcttttcatctttttttttttttccaatttccatt

SEQ ID NO: 45208 - DNA, 132 bp, Gossypium hirsutum
  unsure (1)..(132): unsure at all n locations
  Clone ID: LIB3493-045-P1-M1-F6
cccacgcgtccgccggtgaaagctccgacgagatttttggtggatatttgtatttcgacggagcaccaaataaggatgaattccatcaanaaacatgccngaagatcaaagcccttcactgtatgaattgct

SEQ ID NO: 45209 - DNA, 330 bp, Gossypium hirsutum
  Clone ID: LIB3493-045-P1-M1-F8
gcaagcaagacgaaaatggcgccagtactgcagagctcccaaccttgggttgaagaatatctgccaaagcaagtgagagatgtggcacatcaagacgaggttgttcgagttctcacaacactcctcgagacctgccaattgccccgcatatgcctcttttacggtggcggctggcactggcaaaactactaccgctctcgccattgcccaccagctatttggacctgaactctacaaatctagggtgttggaactaaatgcaagcgatgaccgtgggatcaatgttgttcttacaaagatcaaaaatttttctgctgttgctgtactatc

SEQ ID NO: 45210 - DNA, 134 bp, Gossypium hirsutum
  unsure (1)..(134): unsure at all n locations
  Clone ID: LIB3493-045-P1-M1-G5
atgatatcaaggctccatcagttnttacttccagaaatgtggggaagactctcgttggcggtactcatgataccaagagtgcttcagaaagactcanacaccgtgtgtttgaggtttcatgggcttgatctttc

SEQ ID NO: 45211 - DNA, 178 bp, Gossypium hirsutum
  Clone ID: LIB3493-045-P1-M1-G7
ctaatttgtgttgatgcagagcacatacaaatgactactattttcatatcacaaataatcagcacaccacctagttaaaataaattcaagcgcatttgtgaaaaatctatgatcaacaatcgatggatgtaccttacagattttatttttttagaaaatcccaattaaataaaataca

SEQ ID NO: 45212 - DNA, 230 bp, Gossypium hirsutum
  Clone ID: LIB3493-045-P1-M1-H5
cgaaaaaggtaacctcggtaacaataattgctcgttactaatgcccgaaaccacagcctagggtgctcgcttagcccaatgaaccgtgaaagaataaccaactgagcttgactcttatcactttgtgaaaaaacttgccaggtgtaagataaataggctctcttgggcgagatttaaataccacttcttttaaccgtattttacttattccgagaataggaggccgggca

SEQ ID NO: 45213 - DNA, 455 bp, Gossypium hirsutum
  unsure (1)..(455): unsure at all n locations
  Clone ID: LIB3493-045-P1-M1-H7
gtaactataagcagttgtagttatcatgcgttacgcgtattccanaaggngtgtctcatgtgcttggacattgnatggcatgacagattacataatgngttggcccattaaacattaactggggagaacaatcacataatgacaacccacccaacctttgggaaaaagggggccaaggggaatatttntnntttttgggtgcctttgaggataaatggggcttatttatttgttttgggtcccttggaaccttaaactataaaataaggcctttctcattttttcattttcaaattcatccccaaaccaatcttttctctcttaagttatctcttcttctccccatttgagaaattcttaaagaaattctatttgattgtaaatattttgggagatagtaaaagttatcatctggcttttagtagccccgaggacgtaggtattaatttaaccga

SEQ ID NO: 45214 - DNA, 336 bp, Gossypium hirsutum
  unsure (1)..(336): unsure at all n locations
  Clone ID: LIB3493-046-P1-M1-A10
gcagcagcagttgatgatgagcccatcaaatccatttggtgatacagggggcgggcatttccggtgaaccaagtggcctctgttggtcaaccacatgctaataatccatttggaagcacaggcctgttgtaatgttaagtgtgaagagttgggtttggggattntncctgcncnanttgntcactccctccattcattctaaaattggagcctaaattgaatactcggcttacctcgatgtcatttcacagccatacaaaatcctttggaaatcgaagtcaacgaggcactacaagaagttctatgcaaatcctttgacatcttttatttacttct

SEQ ID NO: 45215 - DNA, 360 bp, Gossypium hirsutum
  Clone ID: LIB3493-046-P1-M1-A11
ataatggatgaagcagaaaaaattcgagtgacgggtaaccgactcttcaaagagggaaaatttgaacttgccaaggcaaaatatgaaaaggtgcttcgggagttcaatcatgttaatccacaaacggatgaggaaggaaaagtgtttttagacacaagagattctttacatctgaatgtagctgcgtgcttcctcaaaatgggagagtgcagaaagtccattgacgcatgtaataaggttttagatgcaacgcctgtacatgcaaaggcactataccgtcgtggaatggcttacatggcagctggagatttccaggaagcaagatttgatttccaaatgatgatcaaagttgataagtca

SEQ ID NO: 45216 - DNA, 308 bp, Gossypium hirsutum
  unsure (1)..(308): unsure at all n locations
  Clone ID: LIB3493-046-P1-M1-A2
atttgtactaagctcttagcatataactagctgctgctgttctacctcttctaaggtaggcttatttttccctactggactttttctttttctttttttgagattttcaagggaaaagaaaatgggtcgtggcaagatcgagatcaagaggattgaaaacgctacaaacagacaagtgacctattccaagagaagaaatggtattttcaagaaagcccaagagctcactgttctatgtgatgctaaggtttcactcatcatgttctccagcactgngaaatccacgagttcatcagccctaatatctc

SEQ ID NO: 45217 - DNA, 182 bp, Gossypium hirsutum
  Clone ID: LIB3493-046-P1-M1-A8
caggatgacgataccggtttcagacaccgtggtagatgttgaatcattggtggcttcatggagaataggtgatgggcagtcaacttcgttatcactgattactggatctttagaacacccaccattctcttcaagcacaagcccaacgcatacattcccaattggtttgccttttggccttt

SEQ ID NO: 45218 - DNA, 383 bp, Gossypium hirsutum
  unsure (1)..(383): unsure at all n locations
  Clone ID: LIB3493-046-P1-M1-B9
cagatttgtatagcagcgtagaggctatggtaaaagaagccattggaaaagaggcggtgcaagacccttcaggcgcatttaatttgtgttatggggctacactaacatcaatgttccagaaatggtgttccatttcagtggtgctgacgttcggttgcaacctgtcaacacatttatggttaatggggacttggtttgtatggtgatagttccaaacagtgttaaccccttttctgtctttggaaactacgcacanataaattttcaggtggagtatgatcttcanaagagggttgtctcttttgcgccaacagattgtacccaaatatagatttgttgctttattaattatatataaataaaggtggttgatcatacagttt

SEQ ID NO: 45219 - DNA, 239 bp, Gossypium hirsutum
  Clone ID: LIB3493-046-P1-M1-C4
caagaaaggtgtcaatggcttctttacttgtcaagaattttttctatcttcttgggcaggtctgcatcttaacaccacaggcacttttcataataccagagaatgtaaaaccaaaaccgatggctgcaccaacaaggaaaaggcctaaccctttaagataatagccattttctccatattgatcgctagtattatcggggtatgtacgcctttatcacactttcggcccagctcttaat

SEQ ID NO: 45220 - DNA, 393 bp, Gossypium hirsutum
  Clone ID: LIB3493-046-P1-M1-C9
cccacgcgtccggtgaaatagcatcatcatcttgtcatctccgtttatgtggacagggtgcatcacctcttacgacttattccaaggcttttaaccttcctcaagttgggcacctgtccaagaatattggctgcagctcgaacattgtgtgacattgcaactaaacccttgaggcaaaacccggatggtattacaaggtggccaaagaagccttcacaaaaggccatgaaagctcgtaagactaaatcaattgagaaaccggacgaaatatatgcaacaccctcttctttattgggatctgacaaaccggtgagatgtgacacagaccagttaatcctctcgaaaaggcctaagctctctgtagttgagaataagaaagatctcaaccacata

SEQ ID NO: 45221 - DNA, 333 bp, Gossypium hirsutum
  unsure (1)..(333): unsure at all n locations
  Clone ID: LIB3493-046-P1-M1-D3
gtgatttgaagctgcatttagttgcacaaagaaccaacatagatataataagcggcgtggccataagcaaaccacagaggaaagcttgagagagaccanaacaatgtctaaggaagtgagtgaagaaggacagggtcgtaaggactatgtggaccttcagcgggacctctgatgacatggctgactcaagcatggctttttacagagcctcatagctgagtcatagcactttctcttctcttgtactgtgctctgaatggtcacagaacacaaatcatgtatggtgtggctcttggtatgcatggctttcgtggatgatcttatcttgttact

SEQ ID NO: 45222 - DNA, 329 bp, Gossypium hirsutum
  unsure (1)..(329): unsure at all n locations
  Clone ID: LIB3493-046-P1-M1-E3
tttcaacctcgcagttcgcacgctctcatcattttcctccgggaccgtcagtctgccgaaacaccttctttccgagaaaaaaaaaacctcaagaaagaaactcatggctgatcaacttacggacgatcaaatctctgagttcaaggaggctttcancctctttgacaaggatggcaatggttgcataactaccaaggagctggggacttgtatgcggtcacttggtcagaaccctactgaggcagaactccaagatatgatcaatgaagttgatgctgatggaaatgggaccattgattttcctgaattccttaacctaatggcaagga

SEQ ID NO: 45223 - DNA, 366 bp, Gossypium hirsutum
  Clone ID: LIB3493-046-P1-M1-E5
aaaaaaaaaagtatttcctttttcttcgtccaaaaaaaatttcctaaaaaaatgaagtgcttttctaataacccaggtccaataaatcatcgcccccccccttctattctacttaacttttaatttcttaaaaaattctcttttcttttttccaacttgaaaatgcaacttgatggtcccaaaacttttgccttggttcacttaataaatggtattccgtagtttctcagtcaagtttgctccttttggttattatccctttagtcactaaagaggttaaagcctttttgttcttttaaaggagcttttataaagattttaaaaactgggttttgatctctggagttgatagttaataattttgat

SEQ ID NO: 45224 - DNA, 431 bp, Gossypium hirsutum
  Clone ID: LIB3493-046-P1-M1-F10
ggagaaaccatcaccttcttgcttctcaatacttgactcattcacggttgagtgtccttcaatatttttaggttcgggcatgaagacgacagctctgtattcttgacaatggcctcctccatgcctaattttccttcattgttgtgaagactcagaaggtgaactccagcttctttattcatcgtatttcttgagtctcacaatttcaacgctcggaacttccctggcttcaaatacttgatccattttttcaaaaatctcccaatctttgcatggatcaggcccaacaaactttggagtcatgccatcgagtagaaaatcctcttcaggattctcagcaagcccgagatattgattgttggcactaagtgcaacagtatcctcacgcttgttcgaaccaaccttacagggaaccttggccacctttgatg

SEQ ID NO: 45225 - DNA, 444 bp, Gossypium hirsutum
  Clone ID: LIB3493-046-P1-M1-F7
tagattttactctttttgctatgtcttcaacaaatgaatatggttcaatagtagtgcaactcctcttgggtaaattttcgctttcccattatcgtctcagacatgtttgtgtcgaatatatctctattgactaagcgacgccaacttctttttttgtgacccaattgttgggcccctattaaattggtaaacccctccagctcagagtttcattcacattgattcttgttagacttatcttccacgtctataggcgtaatttgaaaagataaattagctttgatatccctataattttgcctcattttcacaatttccaagaaagtagaattcttctctgagtaaccttcatttgctgtctgatgtatttgtttcatagaatctggtgaaaaacttcatctctactcggtgcttcacacttgtgtataacattgttcaatgtct

SEQ ID NO: 45226 - DNA, 106 bp, Gossypium hirsutum
  Clone ID: LIB3493-046-P1-M1-G11
gcaaaaatgaatgagaattttgcttatattgatggcactggaattaacagagcgtggacattatgtagttagttgttacttggggataaatccaaatattgttctt

SEQ ID NO: 45227 - DNA, 253 bp, Gossypium hirsutum
  Clone ID: LIB3493-046-P1-M1-G4
gtaggacccaagcactacaacttattgattttagagaaccagaaatgtttgatgtgtggtgcttagaaaatttggagcatctagaggcactacaattccttgatttgtggaattatgcgagataaaaatggacaaagttgtctacatggggtgtcttcaagtaagtggtgcttcatgctttcactcattgagcacagctcagattttacactgataagaaattgacagacatgacctggctgattcttgctcc

SEQ ID NO: 45228 - DNA, 172 bp, Gossypium hirsutum
  unsure (1)..(172): unsure at all n locations
  Clone ID: LIB3493-046-P1-M1-G7
aaatgacccgtcttgcgagagagttttttgctttgcctgctgaagagaagcgtcggttctatatgtctggtggcaagaaaggtgntttcatcntctccagccacctttcannggagaaagctagtgcaagaattggctgagagattgctcacatacttcttcatgggggggg

SEQ ID NO: 45229 - DNA, 265 bp, Gossypium hirsutum
  Clone ID: LIB3493-046-P1-M1-G8
tccctccctttcccctcattctagtaagttccctaaccccaaccctaatcggttgctccgttctcactcatgtttcactcccctcactctccgttctaataaaaccgcgttactcgtttcaagaaagctcctcctcctcaaatgcctctcaatttcctcgttggccgcttcggcgaaggcatattttttttaaggtaatcatatctaaaaactacgacttttgctaaaggtacacaatgtgagctcatcacccaaaaatatggtt

SEQ ID NO: 45230 - DNA, 149 bp, Gossypium hirsutum
  Clone ID: LIB3493-046-P1-M1-G9
cctttttctactatacatgttcttttacaccttgggttaaggcttttatatggtatatagttattttaagagtatataagacaataatttacacttatttgtttttcaaatcaactcttttgtcatgaaacttttgtttttgaaaataa

SEQ ID NO: 45231 - DNA, 337 bp, Gossypium hirsutum
  Clone ID: LIB3493-046-P1-M1-H3
attcaacatattatcagggacttcaatgtcatgccttcatgtaagtggaattgtggctttgatcaaggccagacaccaaaattgaagtgccgaaccagtaattttgttttaatgacaaccgttaatgttaatgataccatccataatccattccaggacttttccactgcagcagtttcaattccctatgatcatggacttggtcttataaaccttttgaaggctctagacccaggtttgatctatgacatttcagcccaggagtacttttgtattcctctgcacacagaaattgactgcaatgcagctaaaagcttttagcaagcattccaatatg

SEQ ID NO: 45232 - DNA, 248 bp, Gossypium hirsutum
  Clone ID: LIB3493-047-P1-M1-A11
aaatctcttgacctcaccgctagtgacctcatcgatcgactctctttccaggcacagcgggatatctcaaacctcaagaacattgctggagagacgggacagaaaataacgccgtggcatccactgcttattacagacttgcaacacacaatgctctgatattatattgttgagggagttctaaagcatatataaaggagttgatcgagacattaccattaccagcccatgtgtgtcatagtgagcat

SEQ ID NO: 45233 - DNA, 321 bp, Gossypium hirsutum
  Clone ID: LIB3493-047-P1-M1-A12
ctctaatctcaaaagctaatatttgaaaatttttggttattttttagaaaatgggttgcttgtttcttcttcctttgcccggtaaacggtgagttgagagacacggccgaagcagtgttttggtgatcctttaataagggatattgctagccgcgttttttctggtgatgggagatgataaatcggcggcgatgacggcgagtagagatcgtgggcttctaattccgggggctggatacggagacgatgattcctgcaaagcttcttctttttcggcttcctcttcttcgcattatggcgggcgtgagaccttttacaaaa

SEQ ID NO: 45234 - DNA, 476 bp, Gossypium hirsutum
  Clone ID: LIB3493-047-P1-M1-A5
ggaggagaagattggcaacattgaaacccttttaataggatcactagcaggggctatgtcaagtagtgcaacattcccacttgaggtggctcgcaagcaaatgcaagtaggggcgctgacggaagacaggtgtacaagaacgtgttccatgcactgtcgagcattctgaagcaagaagggattcatgggttatataaaggtttgggtccaagttgcatgaaattggtacctgctgctggtatttcattcatgtgctatgaagcatgccaaaggatactggtagacaaagatgaggaaatgtagaatttgtggagctggcataagttttaggttttctttcaattttttgatatattgaaccggctaaattttgttgcttgagggcctactcttgagtttgggtagcggcatctttaagtgcaaggtaagtaggtaagaaatgaggttggcaatccataaggggtttcctttggact

SEQ ID NO: 45235 - DNA, 375 bp, Gossypium hirsutum
  Clone ID: LIB3493-047-P1-M1-B10
atcctccgtcaagtgtggaaagcgccagcgatccattgaaaataattgattcgggcgagtttccctttggtgctaggccacaaaggaaggttgagggcattcaagcaagaccatagaagtttcaaccacaaaaccaatctagaggaaagaagtctcagttacactccttatgcaagatcttatcatgtccttcaactactaccagaagccgtgtaagacaacctggaaaccttaaccgctctgagctgcatgttgcacctaaaaaatattcagacatcttatctttgcatattcccgattgttatttggaatcatacccagatactaaaaggcatggaaccttattgtaggaacttgaatgattgcacttaccag

SEQ ID NO: 45236 - DNA, 429 bp, Gossypium hirsutum
  Clone ID: LIB3493-047-P1-M1-B11
ttttgctgcagccttgagtctgttacccggatcgccttcttctgtatccgtgaggggtccgtcacctttcacacctcccatgtctccatctgctaatggcatgtctcattctaatgttgcctggccacagcccaatgttccggccctgcatcttcctggaagcaatcttcaatctagtcgcctcagatcttctcttaatgcaagagacattccaactgaagacttcaacttgctgccagattttgatgtgcagcaacaacagctgataaatgagttatctagcctctctcagccctctatgagttctaattctttaaatcgatctggtcgattgaagactctgactccatcgaatcttgatgatctattttctgctgagaactcatctctgcagtactccgatcaagcattggctgcggcagtttactc

SEQ ID NO: 45237 - DNA, 324 bp, Gossypium hirsutum
  Clone ID: LIB3493-047-P1-M1-B3
cacggttgcctgcattacggagctgtgctcatggctttaccggacgagtgtcttcggggttgtgtgtgttcttttccaccttatttgcaatctccaggttctccgactcccgacttgtcaggttttccaaattgattctgatgttggttcagaattgtgcgaacaccttctgatcaggaggcatttcctgatcatcatccatcgatatctcccgtttataatatgttgcctgatcttgatcactggcaagcaaatcacttctttggttattactaccaaagctacttctgcacttaatttttttaaagctggacaacttgcttt

SEQ ID NO: 45238 - DNA, 269 bp, Gossypium hirsutum
  Clone ID: LIB3493-047-P1-M1-B5
gctacccctcatgctacctgcgttatctaccacgccgaaatagaaacttctcgatggagagaagcccggtatcatgatttgctccacaatagatccaatttccttgaaaggcggagaaaataccgatctcagcgttcgacgctcttcaacggctatgaagccgttttgagaacttttcacggcatgaaagatcctgcattttatctggccaacatacaaatggtcgatgcacatgtcgcgtaaataatcgagattctagttcaaatgat

SEQ ID NO: 45239 - DNA, 145 bp, Gossypium hirsutum
  Clone ID: LIB3493-047-P1-M1-B8
cggacgcgtggtccgacgcttgggaggcaagtgagatgggagcagcaagcaagggagacaagaaaaacagttctacttcaacatcaccttgtgcccatctccgatctgcttaccacaattgcttcaaccaagtggtacctctgag

SEQ ID NO: 45240 - DNA, 242 bp, Gossypium hirsutum
  unsure (1)..(242): unsure at all n locations
  Clone ID: LIB3493-047-P1-M1-C1
gtatatgactatacgcaccatatccaccctacgatcttgttggttctgtattgtgtgcatgtatacttttgtttagagattatcctagtaacggtggcgaccttgactcgagccttgtgggtnctcgagccctagagaaacagtttaaccgaaccctatctctccacctcgctgcaagatttctggggtaagagatggaacctcatggcaactagtgttctacgaccgacggcgtacgaacc

SEQ ID NO: 45241 - DNA, 410 bp, Gossypium hirsutum
  Clone ID: LIB3493-047-P1-M1-C11
ttcataaatgtagaccatatatttataatacgagtaatatataagagttgagtgtggtaggtctcagacatggctcttgatggaagagctatatccactttgatcatcataatacttggaccaaagcataactccgccgtacttggaggaattctttatggcagggaggacctcggatgtgagatcgtttacagggatgaaaccgctgcctgctgcatcaagagctgcccggaagcccaggaaaatcttggttgctgggatatccgaagtccattggttccatgcatcttcaagggtggcaaaatcggccgccagtattggccaggagggttggtatagaattggaccccaacataatcaaagagacccgttttcaatgcatttcccaccccagcctacggaatgggcct

SEQ ID NO: 45242 - DNA, 399 bp, Gossypium hirsutum
  Clone ID: LIB3493-047-P1-M1-C9
gttatgggaagagacttaaattgggttaataacagtttacagtatagagagaagctggcattgctgcgttggcagaaaagactgctctaaattcttgtatcgtgtcttaaatgcctttgcaacgacaagaaaaacaaagttaagttcaaaagccaggccagctgccgcagcacaacgaaaaatccttgaggaaagtgaaaggggaagcaagcaaagctttgattcgagtataaaccctgcgcttttcctacacaaccccttggcatcgtgtgcttaaacacgtgcaaaaagagaagaattggcaatagcggctgtgggaaacaaaaaacaatcggcttctgaaaatcaaaagaaaaaggtccggaagcttatcatatggattgcctgacacaatttaag

SEQ ID NO: 45243 - DNA, 156 bp, Gossypium hirsutum
  Clone ID: LIB3493-047-P1-M1-D8
atagtcttgtagatgggaaaattgttggaaggtggaagataaacctagcttggtggaggtatattattctcacctaccaattcaaaatcaaaagtgatatgatccactctcgtatgcccaagatgtgatatatatttaatttatttggttccttgc

SEQ ID NO: 45244 - DNA, 326 bp, Gossypium hirsutum
  Clone ID: LIB3493-047-P1-M1-E10
ctttccaagcttcatcgccaacttaaagagtttatcatcctttgtttttattggtgagattcaactcaaatggaggcaactcatcataagaaggggttcttcaaaggcaaattaccatagtctttctcttcgaatcaccaaggcaaggacgaccagtagcggaagcaacagcagcagcaaggtggttccctgctccacgccatcatcaacatcatccatgtattcgtctattccaaaagtgtccacctattcttacgcaagctccaagcagccaattaattttcgtgaacaaaagaatgttgcagaacttcccccatctattccaa

SEQ ID NO: 45245 - DNA, 365 bp, Gossypium hirsutum
  Clone ID: LIB3493-047-P1-M1-E11
ataaaatctctacctggatagccaacagagaccgctgtttaccatatcctccggagaattttctaggatgcgggcataactcattaaacctaaatatcatttttaatataattggttgcaaagctcttatataatgtagacgaaatatttaactgtctgcaaggtgtatcatgtaaaaagacaatataagatctaatccaataatactatactatttcaccactctgacatacaaggtagtgctgataatctttgatactgcccttcatctcatgatatcaaatcacaatggattgctaattttcgaaggcattctaccaacgatgaacctatgattgttaaagatgtatttgatatcttatcca

SEQ ID NO: 45246 - DNA, 297 bp, Gossypium hirsutum
  Clone ID: LIB3493-047-P1-M1-E4
aaaaaaaaggccctctaacaactctcctacattagaaatagactcatccttagaaccagtataatcatgaatgacaaggatttcatcaagaaaatggcgctctctccctcattgtagcttcttttgttggctggaacaggaactatgttgttcagtacattatagagctgaaggtcaactctggcaacttactatctcagttcaaagggcacaatgttcatctctcaatgcagaaattcagcagccatgtggttgaaaaatgcctcaagcattttgcagagagtagatctcagatca

SEQ ID NO: 45247 - DNA, 243 bp, Gossypium hirsutum
  Clone ID: LIB3493-047-P1-M1-E8
aacatatttcgaacgtttcatgatcaatgtccttagcaaatatacacagattttgggaaactcagcctgttggtcaattaaaggatgctgggcacacaagattacctgaatgcacaattgacccacctaatcaatcctctgaagtcaaacactaaccttattacctttcgagcacgaatcaatggaccacatgagacttgcatttggcagaaactccaaatggggattacaaggctttgaaga

SEQ ID NO: 45248 - DNA, 150 bp, Gossypium hirsutum
  unsure (1)..(150): unsure at all n locations
  Clone ID: LIB3493-047-P1-M1-F5
cgcattgtttgaggaaaaacacaaatgagttgctgtggctggcttgtgtttcactgacagatcagtttgttcatgagaggctaacagatgagaggtatgaagcangggttatggacttcagcagcatattaacaagtttaggaatctgga

SEQ ID NO: 45249 - DNA, 120 bp, Gossypium hirsutum
  Clone ID: LIB3493-047-P1-M1-G7
acgggctggtctactcaacactctgtggtggctcttagcagactcaggactcagaggcgggggattttttggggaggctgaaggaaccttctatcacataatcgaccaggcacctgcagc

SEQ ID NO: 45250 - DNA, 175 bp, Gossypium hirsutum
  unsure (1)..(175): unsure at all n locations
  Clone ID: LIB3493-047-P1-M1-G8
tttcttctagaatccaactcggataatgctgtagttcatagaatatccgatagggaggtgaggaaaggttcgatgaataagcatggcangcattggaagggtgtctacattctgttttcaatacatacttgtggtgggtgacaggccaagagatctagaggtggagagggttatc

SEQ ID NO: 45251 - DNA, 384 bp, Gossypium hirsutum
  unsure (1)..(384): unsure at all n locations
  Clone ID: LIB3493-047-P1-M1-H1
catctacaagaacttgatataagcttctgcgatcgactagagcaagtcattggttgtgggcaagaagacgagattattgagaatgactctcctctttgttgctggcctaaattgaggatcttcgcatagnaagtttgcccaaatttgaaatatgtttgtgcgaacacttggactcaatggcttcttcaatccttggaatctgtttacataacaggttgttctcaacttatacatgtcctcaacatggaacaaaataagcatggacaagatattgtgcttcctgaacttggatcacagaatcattgctggacaaaactgaaaactctctggatagaggattgtcaactattgaaatatgtggttgcaaacactttatctcaagga

SEQ ID NO: 45252 - DNA, 306 bp, Gossypium hirsutum
  Clone ID: LIB3493-047-P1-M1-H11
ctttttcttcggaaaagagggcctcaatctacatgtggttctgggcatgatcataggagtggctggaatgatttggtacggaaatgcttcatctaagcctggtgggaaagagcgtccagcctatctctttcctacaatccgacaacaaaagcccagcagtttatcggattctaatgaacatgattcgaaagtttgattctcctccatgtaggtaagttaaaagcatccagggttagctgatttcaaaaggctatgggttttttccatttgattagaaggaaaaaaccagccttagttttaatgatt

SEQ ID NO: 45253 - DNA, 242 bp, Gossypium hirsutum
  Clone ID: LIB3493-047-P1-M1-H2
atcttgcttaaactatatgaaaactaatcatactcactgaacactgctattcatgggggtcgttacaaacctacggtggcatgtgacgctgctaatccactatcgattgaataagtgaagtggcacctaccccaaaagcatgaattccgtattaagattctctgcactgctgtatgtcacactgatgtatactactgggagtgtaaagataacactcctctgtcaactcatatacttgctca

SEQ ID NO: 45254 - DNA, 198 bp, Gossypium hirsutum
  unsure (1)..(198): unsure at all n locations
  Clone ID: LIB3493-047-P1-M1-H4
gtactcactcaacattcccatttgcaatctccagctcccaaggtaaatatgccgagcagaaacatatcggttgggcgggccgaagaggctactcaccccgatgctctcaaggcagctatggctgagttcatctcaaaccttgatcttcgttttcgctggatcgggctcaggaatggctnntaacaagttgaccgacaa

SEQ ID NO: 45255 - DNA, 110 bp, Gossypium hirsutum
  Clone ID: LIB3493-047-P1-M1-H5
taaagctagttcgcctgcactgtacctgccggtacttacttcctcgatccacccatgcgttctttctgattaaacataaactgcaatctatctttcttaagtgtctgaaa

SEQ ID NO: 45256 - DNA, 101 bp, Gossypium hirsutum
  Clone ID: LIB3493-047-P1-M1-H6
agtgcaacatctgtcttacatcggttgagttagcacctaacaatactaagaggagcgtgacgagaacatacaacggtgtggaacagagaccaagactcgtt

SEQ ID NO: 45257 - DNA, 161 bp, Gossypium hirsutum
  Clone ID: LIB3493-047-P1-M1-H7
cggacgcgtgggcggacgcgtgggctcttattggataaataaagaagagaagtggggcaaagatgatgcagctgagtattaagagggttcctactgttgtttcgaattataaaaggatgaggtcggaaagagactcgctcagccggagctggtggatgtgg

SEQ ID NO: 45258 - DNA, 184 bp, Gossypium hirsutum
  Clone ID: LIB3493-047-P1-M1-H9
atactgaaacaggagtgcaaacattattcaccatgaataatctgtacagtacataacaaaactacctgtgtcacatcttgcatatgtcatatatacttcggactatctagatatactaaaacgcgctatggaattcacccacttaataatcttgcttaaaaaacccctcacaaatgtttgcctt

SEQ ID NO: 45259 - DNA, 425 bp, Gossypium hirsutum
  Clone ID: LIB3493-052-P1-M1-A10
ctcttccaaacgcagccaacattttaacctgaattcacagccctgaaatcagaatgggtagggttcattccagcaaccgccggaccatcatttatttggtggtcgacaatacacgagcagcgactagattccaccgatgaaggcaccgctcaaggaaatctgtatttcagagatatttgggatttcattggcgacgtttcaaggattgatggatgacacttttggatactccttccaatttcgatctcaacgaagtgaacagaggtcaatggccgatttgcaagactcggccgtacgaagaagcggggagacgtgcgaaggaggccatgctaggagccgctcgttggagcccaactctctggtatattccagaagcttctggtgctctcgaccgctaaacttctttttgggttccgaatttcagc

SEQ ID NO: 45260 - DNA, 324 bp, Gossypium hirsutum
  unsure (1)..(324): unsure at all n locations
  Clone ID: LIB3493-052-P1-M1-A3
aagctatttcaataccacaagttgataatgctgtgagatattctggtgctgagtgctcttctgaggggaagaacgattntattgaggactatntcaataaaaatgtttgctgatttgacagttcatgaggcttgtaggtcatacatgcgttgcaattgcatggttgaccaacctttttgtggagaacgagaagtagctctagtattgagcagtgaggagaagttatatgtgctgcttgttggcgtcacatttgatggatcagagagtatcttggatttattaggttcccatagggttgaagatataagagaggttttagttggt

SEQ ID NO: 45261 - DNA, 313 bp, Gossypium hirsutum
  Clone ID: LIB3493-052-P1-M1-A4
aagagatcttatcaacatcctggaagatgccattaggagcggatccccaattttggtaattgctgaagacaatgaacaggagctttacactttgtggaacaacttaaggtgcttgaagattgttgttaaaagtcccgttcggaacgcagagtagtattggatgacattgtatcttactgagactgtataggatgagtgggcttctggacaagctagcaagaagtttggggatgccttaaaggggctaccaggtacaccaccatgggggatggagccccagagcatgaataacgatgacagattaaaaatctat

SEQ ID NO: 45262 - DNA, 461 bp, Gossypium hirsutum
  unsure (1)..(461): unsure at all n locations
  Clone ID: LIB3493-052-P1-M1-B12
catcattctgttttctctttctttcttgtcactgtcttttggagctaaacggtagtgaaaggcccaatcccagagggaaaggggaaaaccaaattaaacaaaaactaatttctcttacattttatttttttattttataattttataatttattaattttctctgactgaagctactaatatgagtagagcgctcctctcatgccactaccggttatgaatcccaacgtggagccaccacttcctgggttagcaccggcggcacaaccgcctcagcctcaccgtccttctacctcctgtgaccgccatccttaagagcattttactggcttttgcccctcatgcctctacgaacgtttcgctggtctcgagccttcgncttcttttgcttcttcttcttctcggaaaccctccattcgcgccagtacttaaaaccccaccgttgcacttaaagccattttc

SEQ ID NO: 45263 - DNA, 165 bp, Gossypium hirsutum
  unsure (1)..(165): unsure at all n locations
  Clone ID: LIB3493-052-P1-M1-B4
ctttctttgttttttcttttttacaaatggatgcttcacagaaaactattcttgtggctggagtgctgggttcatgggcactcacacattggtacaactactctaatgaatggttntataagtgtcacattattngacaaatctntggataactctggttattga

SEQ ID NO: 45264 - DNA, 251 bp, Gossypium hirsutum
  Clone ID: LIB3493-052-P1-M1-B7
ctaggatcatgtaatcatatatatattaaaaagctttttttaccaacatggtttgggttttaatgtaatatatgggaaaaaataaaacccttttccttagggaaggaatatggtttaatcaactacctacttgtttttgaatcatatggtaatttggtagctttggattgaaagttttggttatgctattttatattaagatttagttggtgagtgtgcatgattggttgtttttagcacagtgctttttc

SEQ ID NO: 45265 - DNA, 340 bp, Gossypium hirsutum
  Clone ID: LIB3493-052-P1-M1-C8
aaccaaactacgagcctatcttggtgatgaaaaagcgaatgaggtcatgtggcgagggcttatatattataagcgtagggaccaatgatttctataaactactataactttcctcaaaggagggcccaattcaccattccaaaatatgaggatttcctcatcggcaatgctgaggatttcattaggaaaatttacagtctgggagctcggaagttgtccctgaccggactcccaccgatggggtgtttgccactgcaaagaacattgaacctaaaaaaccctcatagctgctcggaggaactcaataaagttgctttgaagttcaatgaaaagttaaaag

SEQ ID NO: 45266 - DNA, 137 bp, Gossypium hirsutum
  Clone ID: LIB3493-052-P1-M1-C9
gatcctttggattctacatctcgtatgctctcttcctcatattttgggtgaggagcgctacaacaacttgttcgtggggtccaaaaggttcttccaaacttcaaaaacttgcaggatataattgctattttggggat

SEQ ID NO: 45267 - DNA, 428 bp, Gossypium hirsutum
  Clone ID: LIB3493-052-P1-M1-D3
cgtgaatggagccttcgaactttaatgggccggaaactggcatgtttgccaaccggcgggggaaactgttctacggggaggaactctacggccgatacctaaacttaacgctccgacagaatctaatgaaccatccgaagctgccggtacggcggacatgtggaagttgcaagaaacagcgacaagtctgaactccaactgtcgtttttcacttcaagatctaaagttcatcacataagcgtagaaccatcggtgagttgaagaaactacaatcgtccgatctagatctttgtttgactccaagctttaaaggaaaccgagtgctggataatagaccggcccgggactccgtctatgatctcggatgaatctgtcacgactgcgacgtgcacctgaagtgggttggcaggtcaagggaaggtactaaa

SEQ ID NO: 45268 - DNA, 145 bp, Gossypium hirsutum
  Clone ID: LIB3493-052-P1-M1-E3
ccaaaaaaaaaaatggattaccgcattgtttttccaatttttgggagttttgcctttttaatcgtgggcgggatttgtccggaaacttctcggcggagggatttgaagttgatccgttgttcgaccaagtaacggacggtcacaa

SEQ ID NO: 45269 - DNA, 466 bp, Gossypium hirsutum
  Clone ID: LIB3493-052-P1-M1-E6
cggacgcgtgggcggcggagcttttgttgtcgaggttggagaggggtgattacgggctggatgctcctgtgtagactcaggatcacttatttaacatatccgatcaaaacatgttcaccgtcgtaggtcttgaatattgtgatacttggcttgttgaatttcagactagcataatcaaacctatttcttgtgctacagtaaaataggaatgtaggaatcgaaccactgaaaaaattacttttcatagcccagaaataacaactgatgctgctggaagctacaaaattgaagtgacatgagattatgaagactcatactgtgatatcaacttggcgaagagtcccagagcggattgtaatgatccaacagaatcgtggaagaaagccagtgtggaactcaccgaattggatggtgttacccgcccaaattcgttttgccaacaaatctttgtgtttaaaaaagaaag

SEQ ID NO: 45270 - DNA, 428 bp, Gossypium hirsutum
  Clone ID: LIB3493-052-P1-M1-F11
ctggaaggtatcacacattgctaattaggaattcatcagtgtactcttgtggttgcagtttgtgtggtgtccttggacatggtcctgaaacaacacagtgtgtagcatttacgaggattaacttcccttctctagctaatgtgatccaggtgtcggcctctcagaatcatgctgcatttgttttgcagtctggagaggttttcacatgtggagacaattcatccttttgttgtggccatagagatacaggccgccccatctttagaccaaggcttgttgaagcaatgaaggggattccttgtaaacaggttgctgctggactgaattttactgtgtttcttacaagacaagggcttgtttatacatgtggaactaacacacatgggcagttgggtcatggtgacactcaagaccgaccaacccccaaa

SEQ ID NO: 45271 - DNA, 402 bp, Gossypium hirsutum
  Clone ID: LIB3493-052-P1-M1-F4
gttaaaccgtacaaggagaaaggcaaagttcatgagaagaagcaacaacaattggagagaggagagtattccgcaactccagttgatacccgggaacattgatcttcaactcggtacgagaatgttttataatgctcaagagatgatgttgcgaaggaaactcgaggagcaggccgatttacaacaggccatcgaactacaaggaagaaggttaatgaatttgcagcttttggacctcaaaaaccaacaccattcttcgtttcatcacagtttgtccacctgttctcccattccttcgccgactgtttcccatattcccaccaatcaggctcgtattttcccagttgaagcaaccctagaagataatggtggtttgaaatcaccagctgccaataagctgct

SEQ ID NO: 45272 - DNA, 375 bp, Gossypium hirsutum
  unsure (1)..(375): unsure at all n locations
  Clone ID: LIB3493-052-P1-M1-G3
cccacgcgtccgttaagatcatcaatgactgccttgatggactcatcagaaatgcagaagatagcagacaggaagcggatgttgaaaagctgcagcnagggacctacttgaatattaaggatgcaagtgtttttgcgttttttggtggacatgaggggagctgatgttgatgatcgtcagctgagagatgatctaatgacgatgcttattgctggccatgaaacaactgcagctgttcttacttgggctgttttccttcttgcacaaaacccgtctaaaattaaaaaagctcaagcggaggtcgattcagttctcggccaaaagagtncaacttttggatcaattaaaaagttagagtacataagacttattatc

SEQ ID NO: 45273 - DNA, 404 bp, Gossypium hirsutum
  Clone ID: LIB3493-052-P1-M1-G4
aaataagttgaaggagcttgctgagcaatatgccctctctgaacaacaatatgcgcagaagctaaaacaaaaaacactagaactacagctttcgggattgaaatcaagcaacatgaagagaaattaatccaagaacaagcgcagatgaaagtatatgcagaacaagtgtcacagttattagtgactgaaaagaatttacgcatgcagttgacagctgatggagaaaaattccaacagtttcaggatgcattgtcaaagagcaatgaggtgtttgaaacatttaagcaagagattgagaagatggcaaaatcaatcaaagaactcaggaaagaaaatgtgttcttgaagagcaaatgtgacaaatcagattttactctcatagaacttgtggaagagcgcgagcg

SEQ ID NO: 45274 - DNA, 394 bp, Gossypium hirsutum
  Clone ID: LIB3493-052-P1-M1-H2
gttaaatcgaatacgtaaggtcaatatccagcaacaatatgatattattatcatcggtgctgactccaatttgatataatccatcaatggcgagcgagggataaacaggttcatcaagctttggctctgcataatcatttcctgtgctactctactcataggagaacaagaaaccctaaagactgtacgctcttgttattgcagaatggctattctcgcacccactaacattctcatcattcgtggacactgttctcattttgcttgtactcaacttactttcgcttcggcaagccttatcatcccatctttcttacctcgtcattgcatgcttgttcctataaaatcaacacacccttacatctaaatgtctatcaaacacctacaaactatg

SEQ ID NO: 45275 - DNA, 459 bp, Gossypium hirsutum
  unsure (1)..(459): unsure at all n locations
  Clone ID: LIB3493-052-P1-M1-H9
gatgattcaaccttctctgatttcttactcatttcagtctgctcccgaaccagcactgcttgatgtggctgcaattgcagctgacaggatcctgcttttagaattcttatttcacnncgttgtaattntttcatgggctcaaaactattgcntttcagtggcggaaaagcttggataccccacaatccaaccctgaagccatcagnggcatttngccnnncagttgcttgcaaagccttcctaggnngatnngatgcagattgcannataatcacaggaaaagaatttccagttccctcgtctaagtcattttgtgaccaagcatggnctcaaacaggcccgttttctttctagcaaagtttgaatcccttcctcaacatacnaactcagacagtcatcatccgggcggagatataatctntactgatgatgtcagctttgaggtgttcttggatcatc

SEQ ID NO: 45276 - DNA, 374 bp, Gossypium hirsutum
  unsure (1)..(374): unsure at all n locations
  Clone ID: LIB3493-051-P1-M1-A11
tcttcctcggactcctnnnttctccaggaggtgattctacatagtagtacaaancanccccttccccttccccttccttttccctcccattcacaaacttattccctcaaccctttctttctccctcgcctcctctgccatggatagtgcctcaccttctatgctctttttatgtggaaaatcatcatcagaatgggaagtccccaaatccttgaaaatcaactacactcttaatctccctaactgcggcaaagtttctgctcttttacaatccgagattaatactttccgatttggtgaatatacttttaatgtccatttgtttttgaactcactctccaccaaactattccttctgttccttattttatccc

SEQ ID NO: 45277 - DNA, 500 bp, Gossypium hirsutum
  unsure (1)..(500): unsure at all n locations
  Clone ID: LIB3493-051-P1-M1-B11
tatactactgggggaatgggggcggaaatatctaaagctgcaatgatttcaaanctctgaattgacgtttacatagtgaaggctgccacaagccactcattgagagcattgaggggagaactgatacatggcataccagacgactgactcgggactgttatccggttctcaagatagatcgcatgaggtattggagcatattttatgactaaccacggaacaatatcttggagcctttttcaagtgaagatataaattctaagaaagtgacattttgcgtcaccatgcttgtctctcttcaaagtctgaacttccacaacctgtaataacatttatgagactaaagaattggttgatggtttaataaagattatgaacaacattaccaaatccctctacttttcaatttttatggatttacttcttatataattaatccgaaaattatatttagggtcctatttatttataaatactagataaaactatatttcaacttc

SEQ ID NO: 45278 - DNA, 336 bp, Gossypium hirsutum
  unsure (1)..(336): unsure at all n locations
  Clone ID: LIB3493-051-P1-M1-B7
taccagtagcatctctttcgagcgtgtgtatatccttcattttcatggaagattctcggagctttaangagaaacaacagcttaagcggctgtttccgagcaaaatacatgggacagaacagaattctcttattgaatatcaagtggagttggctgctattgcgattagccttaacgtgcgtttgagaccatctcatatgcccgtttacatgcaagaacactccctccggtgtactctacagcttcttgattctgcccccaaaccccaacctagccttactcacttggcttcagccatcaaaaaggagttttactctgtgtactgaccaccattgc

SEQ ID NO: 45279 - DNA, 435 bp, Gossypium hirsutum
  Clone ID: LIB3493-051-P1-M1-B8
taactctactaccatctcactataagcaaagctgcgtgcgcctacacatacctgatcctccaattcctcactcaacccacccatccagtgttcaacattaataacggttgggctaactatcttaaacgtgtcttccttgctttaaactcccatattaatccacaccatgaaactatctacttcacctcacacattatgatcataaaccaccctttccctatttccaatctttatcccctaatcctagacttccacacctctaacattcatttcaaattttctgatctttttaccacaatttacacacaatctgcccctgaactctagaattaacccaatattttacacaactttgatgcacttattataaacacaatctccaccaaacccataaacagtttacactttatacaaatacccaccactctaactttt

SEQ ID NO: 45280 - DNA, 242 bp, Gossypium hirsutum
  unsure (1)..(242): unsure at all n locations
  Clone ID: LIB3493-051-P1-M1-B9
gcctaaaacctcttcaaaggtactgtacaacacattctttcttctatctactttacttctcttctccattaaactaacctctcctaaaccccatttcttctcaaacattatgtctaccaaacactttattctcactcaacactaactcattcatattcacttctactttcactacttctttactcactaaactccactgatatcttnntcntcattncatcctttaccaacaaatcctctac

SEQ ID NO: 45281 - DNA, 399 bp, Gossypium hirsutum
  Clone ID: LIB3493-051-P1-M1-C11
attagctgccattcttgatggaggttggggccaattggatgattttcatgggcaacctacccaagaagcaaaggtgaagaaattagatgtactattgggtgttgattcaaaaccattaaaagtagatacaactgggaaggagtatggtgggtatttcccttcggtgggaggaagaggatctgatgcacttaatggttcaagcctgtatgactctccaaagcatttgaagatgcaaaatagtattgatttatcacgtgggtatcctagaggatcatcattgtggtcaagccagatgcaacaattagatgcttatgctcaaaattctagctgtaatgtcatttctggtgaaaggaggtactttagtttgcgtgctgcaccatctgcttaagcattggatta

SEQ ID NO: 45282 - DNA, 201 bp, Gossypium hirsutum
  unsure (1)..(201): unsure at all n locations
  Clone ID: LIB3493-051-P1-M1-C9
ctttatatggccttctnctggccggatnatncctaatatggcaacatcttcatntnaanctnatntnccctcaattccattanggnactcctcattccanaatcctctggatgggtncattcaatactcttcanancttcanaacaaanggcaangtnacccacctaccccaacttcaacattttgcaanggttataaatc

SEQ ID NO: 45283 - DNA, 600 bp, Gossypium hirsutum
  Clone ID: LIB3493-051-P1-M1-D1
cttgtcacacgagtgagacattatgggcgcaaccactcgttgactaccgggatactcgatgatcgcttaaatctcgacgatagaagaattgttgatcacatgattaccgtcttgaaaattgctttaatatgcaccagcctgtctcctttcgatcggccatctatgcgtgaagttgtgacaatgctgatagaatctaaaaggcaagatcaagaagacaactttgggaagtctcccacttgcagtcctcccaaacgcagtgcctcgtgaaagtacgtcactagctactccctgttttcattaaccaagatgattcttttgccattgatttttctgttctatttttgccgaaagataaaataggacatatacatttttcgataaagaaaatgtgatactgaaagcctctgttgatagctaatggaagtaaccgatgacactgtaggagtctataggaaatacgatatcgaacaccggtgtacatacgtgaattagattcttttgaaatatcgcagctgtgcttaggtcactcatccggagcatcgtttattcgatcccgtgttgaaaataaactgttattttagttgattccaaatgttttac

SEQ ID NO: 45284 - DNA, 388 bp, Gossypium hirsutum
  unsure (1)..(388): unsure at all n locations
  Clone ID: LIB3493-051-P1-M1-D11
gctatttgggagaattttnggtggggggggctggaataacaggtgcagatcttcagggtgacatgaactgtgccgagggttatgtgaaggatatgtgcaattgggtggttggtagatgccttgacgatatgctattcatgggtaaaaggtatgataaagggtggattggtcgggtgagaatgggtggttcaattccctttggacgggtatcatacacagaagcagtggagcttttataggaaggtgtgagaggtggtaagaaatttgagaatgaagtggagtgggggattggtttggcttctgagcatgaaagatacttgactggagttaaatttcagaagcccggtattggttataactaccctaagggaataaaaacattctacat

SEQ ID NO: 45285 - DNA, 536 bp, Gossypium hirsutum
  unsure (1)..(536): unsure at all n locations
  Clone ID: LIB3493-051-P1-M1-D6
gcttcttttaatccccctttatggccgggacagcaccccaaatctttttantttcaatccacaactgaactagaanggctatacaaacaaacaaattctgggtaagagtgtgctactcctgctcccaccatgtctaattcggagggtggtgccaccaacggagctataatggaccctcagagacagcaagccacgggtaatggttcccttgccataaaaaaacctccttctaaagaccgtcacagcaaagtcgacggtcgtggccgaagaatcaggatgcctatcatttgtgccgctcgtgttttccagttgactcgtgagttgggtcacaaatccgatggtcagacaatcgagtggctcttacgccaggctgaaccttccatcattgccggcactggcaccgggactactgccggcagctttttcaccatgtctgttttcgtccgtggcggagctaattctacttttctatcgtccaccactggttcttcctctttggatcataagccctttgtggggtcccaccccatttatac

SEQ ID NO: 45286 - DNA, 338 bp, Gossypium hirsutum
  unsure (1)..(338): unsure at all n locations
  Clone ID: LIB3493-051-P1-M1-D7
ccaaaataacataaaataggattgtggaagagctaaagccagggcctncaatttgcttccctttcactccattaggcttcttagaaagggcggccaccgtctacggcgaggggcctccatcatctacaataacacttccttcacctggtcccaaacccaccggcgatgcctccagctagcttcttccctctcctccatcggtatcggcagcggtcacgtcgtctccgttttagcctacaacatccccgccatgtacgagattcaattcggcgttcccatgtctggtgctattcttaactgcatcaacacccgtctcgacgctcgcacagtctccgttc

SEQ ID NO: 45287 - DNA, 322 bp, Gossypium hirsutum
  unsure (1)..(322): unsure at all n locations
  Clone ID: LIB3493-051-P1-M1-E10
cttctgcgagcactgtgctggaaggcatcatgcgaagaataagaagtgcttcntatgcaaccaacccacgcttggcattttcaatgcagctcatgagatacgtanaaagatggctgaagagggtaaactcaaaggccattgatgcttctgcttctgcttcaattcctgctgtcttttaacatttttgtttgttgtttagtgttgtagctgactatgttactcttgttagactcagtcttgggtttttatgacataaatatatatattttattttgaagattttcatgtatgtgaagaatctttgaagtacatttacatactc

SEQ ID NO: 45288 - DNA, 387 bp, Gossypium hirsutum
  Clone ID: LIB3493-051-P1-M1-E2
ggtaaaaggaaattcgatggtgggtatgttcataacggactcttgaaggctgcctgatgggttttagatgcagagtgcgaagttttgaaggaactcgtcgaggagcacccaaattatactttgacatttgcaggacattctctcgggtcaggtgtagcagccatgttagctttggtggttgtccagcatcaggataaacttggaaacattgacaggagtaggatcaggtgctatgctatcgcgcctgctaggtgtatgtcactgaatttagcggtcagatacgcagatgtcattaattctgtcgttcttcaggatgatttcttgccacgaacagccacgccgttagaagacattttcaagtcacttttctgtttgccatgcctacta

SEQ ID NO: 45289 - DNA, 329 bp, Gossypium hirsutum
  Clone ID: LIB3493-051-P1-M1-E4
tgacacatctcatcatgattatcggcgggagcccaacttaactgatgctacaatcacctaatattaaccaactgaacctgcacacgatatacactatatacttgaaataacaattgcctgatatgacttgatcaatattgaccaaaaatttagaagacaacacattaaagatgtcacttctacacctaactgaacttgtagatgttatgatctcatcatctcacattgcattatctgataaccatgaaacttacaatgtccaactatttaaatcaatagataagatatctgatttatgatatcatgagacacacaccatatgcttatca

SEQ ID NO: 45290 - DNA, 533 bp, Gossypium hirsutum
  Clone ID: LIB3493-051-P1-M1-E7
cccaagatctgtaaacccaggtgggggtgcattctgccctctgcaatacccttcaggggaattgaagctgttgatacagtgatgtcaccgcagtcggcttttgagaactccggtcctgccgtggcacatctcattatgattatttacaatggcaaccttgagactctgaaaacaaatagggagacttatgcactctcacaaaccaaatagagaaggttgtgacctaatgtttgggagcatcttgataagcttgaagtaaatggaaagcaagtgattgcatgcaaatattgtcacaaggtgttaatagggccaagcaaaagtggaaccacacttgaaaaaccatttgaaaagatgcttagaaaagaaaaaaaaacaaaattaatgaaatgatgaagctgttattttccggctcatgcttaatgaatgggggctcaatgttttggtagtaaatgagttacctggattttacttaaatgatcattaagcatcgatattcatagatattggtgaacaaagaggctttcaattttttt

SEQ ID NO: 45291 - DNA, 342 bp, Gossypium hirsutum
  unsure (1)..(342): unsure at all n locations
  Clone ID: LIB3493-051-P1-M1-F2
ttcttcttggttccaacactgtaggtggtncttttaacggcaacatttattaccttattatgaaagcaaagggtttcccttacttagaagttcatgtcgaaccttatatgagacaactcacggttgcagatgttgtcactggccctcttcaagtctgtcatggaaactagaaggttggtaatatcgtacacatcctcaagaccacaaatcatcaatggtttccggttatcaacgaacctccacattctaaatccccaatttttgatagtttaatcctccatgctcatcttattacactgctaaagaagagagttttgtttcacacccctattctaataagtt

SEQ ID NO: 45292 - DNA, 488 bp, Gossypium hirsutum
  Clone ID: LIB3493-051-P1-M1-G6
atgaaatgaacccaaagatatcagagtgcgggatggctaaatttttcaagaaggatgaacttgaagcaaacaccggcagaattgttgggacatatggctatgttcctccggaatacgttaggaaaggaatatactcaaccaagtatgacgtttatagtttcggagttctacttttgcaaattatcagtggcaagaggaattccagtctgtatggatgccatgaaaacttgaatcttctagaatatgcatacgaattgtggaaacaaggtcgagaggcagagtttttcgatgcatcactggatgattcatcttcgtcatgtaagctcattagatgtatgcaattggcactgctatgtgtgcaggaaaatcctacagataggccgtcaatggtgaaaagttttactattctcaagaacgaaaacagtgctgcaatctctgtacctaagcagcctgcatattcaataacaagatacgaaaggaagggaaag

SEQ ID NO: 45293 - DNA, 417 bp, Gossypium hirsutum
  unsure (1)..(417): unsure at all n locations
  Clone ID: LIB3493-051-P1-M1-H2
gtcagtggaatcatggttactctggggggtatggagttttacaggaaaagataatgagagtaccgtatggcctgaacaaggaatattttaagtactcattgtttctcgttttctgcaaccgcataacaacatctactgtctccaccgtttttttactggcaagtaataaagccttgtttcctgttgctccaatctataantactatctcatatcagcatcaaacatccttaccacaacatgtcattataaagccctaaattatattaattttcctattcataccctttctaantatactaaaataatacctattataatttataacacttttcattatacanaagacatataaagtatctaactatttaatcagcatttctaataacccttaatttattcaatatttatacttattt

SEQ ID NO: 45294 - DNA, 498 bp, Gossypium hirsutum
  Clone ID: LIB3493-051-P1-M1-H6
ctaatgaaatttgtttttctggaccacactttcatgtttcttttccaaattaagattttctttttcaaatgtaacacattaaattttgaaagccttcaaatcatttttcaaaatttccttttcactctcaaaaacatttttatttttttcaaagaaccattttctactttaagcttctaaataatttttttatgttttgaattcatgacctcaaattccaaagataactcattagaagtatattgtaactcactaaaagtatatgaatcaaaatcacattatttataagatacctgtcaaagctctcattagtggaagtgccactatcacttttagtggctaccagaactttattctttcccttttgcttcttcctcaaaagacaatcatacttattgtgccccaatgataactcttgaaaagagttatatttcaaacctctaatgttgatttaatgactatacttaagtagatatattttcatttaaggttattttt

SEQ ID NO: 45295 - DNA, 654 bp, Gossypium hirsutum
  Clone ID: LIB3493-051-P1-M1-H7
gaaagtttaaggagatggagagaggaacttcttggtactgttgatatgtctgcggtcggagagagtaaagagcctgaagttaagatattaagtctctcgatcgtatcccctggtagaccggacataattttaccaatcccatttgttacaaagcctaaaacttgtttgtttactctaaaagaaggaagtcgatttcgtctcaaattcactttcaatgtctccaacaatattgtctccggtcttaaatacataaacactgtttggaaaacaggtattctagtggacaacacaaagctaatgttggggacatttagtccacaaaaggaaccttatacatttgaattggaagaagaaactacaccttcaagcttgtttgctagaggctcatattctttaatgacccaatttgtatattattatgaaaaagtctatttggatgtgagttattacttttaaaatccacaaaaactggggttcacattctttaaggaaaattaaagggataaaaattcatttaatccactttcttattttatttacacttaatttatagattttttttcttttaaaaattctttataaatcctagtttatattaatatttgctaaccaaatatctattctcctacatatcataactttcaccattccttt

SEQ ID NO: 45296 - DNA, 454 bp, Gossypium hirsutum
  Clone ID: LIB3493-030-P1-M1-A5
attttattgtcacatctgaccaagagcaggtggagggcctatcaaaatcattggactttataatcgacactgcatctggtgatcatccatttgatccctacttgtctctcctcaagtctgctggtgtttatgccctcgttgggttcccgagtgaaatcaaatttagccctgcaagccttaatatgggtatgaaaacattcgcaggaagtgtaacagggggaactaaaatgattcaagaaatgataagtttttgtgctgctcgtaaaatatacccacagattgaggtaatccctatccaatacgccaatgaagctcttgaaaggctggtcaagaaagatgttaagtaccgatttgtgatcgacatcgagaacaccctgaaatgagatcatgccaagagaaaatgaatttgttttctacaataaatagcttttagttccggctattgaagaacata

SEQ ID NO: 45297 - DNA, 428 bp, Gossypium hirsutum
  Clone ID: LIB3493-030-P1-M1-B3
aatacattgagtctgtacatagactataagcgtgggagatatacaaacggggacctcggtgctacctaaagtgtactgctattcaagcattgggattcaatgaatatcgacagcatatatcaggcgctactaagagctcacttgcgtcagcaacgagtatggagtacagaaagcagagcataggcctaatggtcgcaccatcaatgtggcagagatcgagccacatgacatagacggcccgttgagaagtcagcatgagctcattaaggctgccatggaatgtgtcgtgaagcaccacgctaaccatcgtatttcctacgggctaatccatcgagacactctagtttgactctcaacatgaggccttgatctctaagagaatgctaaagttagcacctgcacatcctgattgaagggtcagggagaat

SEQ ID NO: 45298 - DNA, 449 bp, Gossypium hirsutum
  Clone ID: LIB3493-030-P1-M1-B4
cggacgcgtggggataaaccgggcgactgctggcggatattggaaggcaaccgggtcagataagcaaatcatatcaaggagaaatcaagtagcagggatgaggaaaaccctagtttttcacatggggaagcctccacatggattaagaactgattggatcatgcatgaatatcgtttagtcaatataccaaacaatgatttcaacttggcaaacaacccaatgatgcagaattatttgaatcatgagatgaaaaatgggtactatgtcatgtatttttgaagaaaaccagtaagaaaagtagtgaggaggagattatgcagagtttttgtaataaaaatagaaatgaagcattgggtcataggatggaacccaaagtgtataattttatgagagaaaaagatgctgagtcatcatcttcatcatcagcaagttcgaggagtgatatcac

SEQ ID NO: 45299 - DNA, 459 bp, Gossypium hirsutum
  Clone ID: LIB3493-030-P1-M1-C10
cgtgaaaccaattttttatttgtgggaaagcgttgggtaaccaattaagcagatggatagtagttgtgtggcaacaagttttaggattccggagcaggttttgacgtcaagtgggcagcggatgcagctcttgggtttcggcaccgcagcctacccgctggtaacaccgcaagttgcaaagcaggcgattctccaagcaatcaagcttggtcatcggcatttcgatacagcttatatttacggaacggaacagccgcttggtgaagcaatcgtagaagcaatctcgcttggcttaattatatctcgagacgagttgttcatcactaccaagctctggtgcagcaatgcttatggagaacttgttcttcctcagcttcgcaggagcttgcaaaatctcaagatggaatacgtggatctctttcttattcactggcctttaagcttaaaaccagggagata

SEQ ID NO: 45300 - DNA, 262 bp, Gossypium hirsutum
  unsure (1)..(262): unsure at all n locations
  Clone ID: LIB3493-030-P1-M1-C5
cctggctgcgaacttgtacgcaaagagcatggttggggaggatgcgttggtaaacgtgagcattgagaagcaagctgatgggaaactgagtgggtacatccggataaggagcaagacccaggggattgctttgagtctcggngacaagatcactcttaagcaaaagggaggcagttgatgcaataatatttcgagataaattgtttcatcgataccggtagtcattgttagttaaatctcctattgaatttgaaatgcatag

SEQ ID NO: 45301 - DNA, 434 bp, Gossypium hirsutum
  Clone ID: LIB3493-030-P1-M1-D11
caattacaaatgctatcgagatatatgacaggttgagtggtggtattaattttatggcctccaataacgactgtggcatgagagaatacgataccgagagatttcaacttttgaatcatttccaattcccttggcctgtaaaccatacatcaatcagcccggatcggagacttattactgtagttggagatcacttggatgcgttgcttgtggattcacagaacggaaaggccgtagccacagcagtaggtcatcgagattactcctttgcatcagcatggcacccagacggacgggtatttgccacaggaaatcaagacaagacctgccgtgtatgggacataagaaagctggcaacgccggttgcgactctaaaaggaaacttgggtgctgtaagatcgatccgtttttcatccgacggccagttcatgata

SEQ ID NO: 45302 - DNA, 371 bp, Gossypium hirsutum
  unsure (1)..(371): unsure at all n locations
  Clone ID: LIB3493-030-P1-M1-E10
gcaaaatggcatccccgatactaaatttaggtgcattattctgtgaggggctttatccttaggcttcagttcggctaataggttcctgttggatcaaaccaatcatgcccacaaaaacatggaccctgctgtccatgaaccaatgaaaaaccctagtgatgaaaaacttggtgtgggttatggcgttggaagtggctcangaaatggcatggtatatggccttggatatggcattgaagatgggaaccagttaggtacagccattggatatggcattggagaagggaaccgggtaggtacaggcattggaaatggcatgggaagtgggaaccagttaggaatgggcattgggtatggcattggaaatgggg

SEQ ID NO: 45303 - DNA, 427 bp, Gossypium hirsutum
  Clone ID: LIB3493-030-P1-M1-F12
gtgataatagcagtgatgatgaagagagtgaagatgatgaggaagatgaaaaatctgtagttttgaacaatgggaataattcagattctagtaagggaaccgaggggagttccggtttggtttctaggagaagacgtgatggggaattctcaggtggagtatcgagtgagagtggttccgaggaagagaaagacattgttccactgcaaagctcgaaatccggtggggaagatgtgctcaatgtagaaaatgataaggttgaagttgaagcaattcaacccgagatactggaaaataatggaactaaaaccgaagatcagaaggaaatagttagtcagggtgccgatgttccagttcaagaaaatgaaggagttgggaacaaactgatagatagagtcgatggttgttctgatgtgaaatcagaatt

SEQ ID NO: 45304 - DNA, 444 bp, Gossypium hirsutum
  Clone ID: LIB3493-030-P1-M1-F5
gtaccttttgctgttgttggtgtttatcatggagatctagtcttcaaaatggccaaagcactacaacggtttggcatgaaaagagcattagttgtgcactcagagggtttagatgaaatgagtccccttgggccagggcgagtccttgatgtcactccagaaaaaattgagaagttctcatttgatccattggaatttggcattcctcgttgtactctagatgacctgcgaggtggtggcaagaactacaatgcggatgtgttgaagcgtattctttcgggggagagtgggcccattgcagaggcacttatccttaatgcagcagcagctctcctagtgagtggtcatgtgaaatcactttctgaaggggtagcattggctcgtgagacacaatcatcaggaaaagctctaaatacgcttaattcatggatagatatctccaat

SEQ ID NO: 45305 - DNA, 153 bp, Gossypium hirsutum
  unsure (1)..(153): unsure at all n locations
  Clone ID: LIB3493-030-P1-M1-G7
ggaagaagcagtcggatgtgatgaggttttgacagattttaaaatacggggaataccnacagcatncntcaattgttaaggtcaaccatcctactcgccctgacaaggcactctctttggggggtaaggccaaatttttttttgtggntnacc

SEQ ID NO: 45306 - DNA, 313 bp, Gossypium hirsutum
  unsure (1)..(313): unsure at all n locations
  Clone ID: LIB3493-030-P1-M1-H7
cgacgcgtgggctgacacttaagttggttgacatttcataaaaggagggctcacaacattctcacattaactcatnatccatctctcaatgacgctgaataacatctttttatgggtgccccnccncatttttttatttttnaaaaganaaagaaacaaactngcacatccatatncttcgaacgatctttaacgaattcttacctaaaaagttgaggagtcaccacaggttaatccttacatatttccttaaatgtaattcatatatacaacttaaacaaatgatttttccacttaattaaataaattttaa

SEQ ID NO: 45307 - DNA, 456 bp, Gossypium hirsutum
  Clone ID: LIB3493-030-P1-M1-H8
gaaagagttaccaaaggtgaatagaagtgagacaccatggttgattgttcttgtgcattgcccgatttataacagtaattcgcatcattacatggaaggtgaaaccatgagagtcgtatacgagtcatggtttgtaaagtacaaagttgacgttgtgttttccggtcacgttcatgcctatgaacgatctaagcggatatccaacattgcatacaatatattgaatggaaagtgtactcctgttcatgacctgtttgcaccggtttacataacaatcggagacggtggaaatcattgcggaccggctttaggcatggtggaaccacagccgaacttctcagcttatagggagacgagtttcggtcatggtatattcgatatcaagaaccggacacatgcttatttcggttggcatcgtaatcaagaccgatacgctggtgaagctgattctttatg

SEQ ID NO: 45308 - DNA, 408 bp, Gossypium hirsutum
  unsure (1)..(408): unsure at all n locations
  Clone ID: LIB3493-032-P1-M1-A11
gtcagatttgaattccgttcttgctaaccctagagttcntcgggtttttctcaagtgaagcgccaaagaaaaacaattatgaaaacttttaccctaaggaaaagaaggaaattccaaagcaaaatgaccaaaaacctgactccaaagaggattcgaaggcagatgaccaatggaattttcaggaaactttcctgaagctttttcaaaatttggttacccctttgcttgtacttgcattgtttctttctatgtctccctggactgttgagcagcaacaaattagtttccaagagttcaagaacaagtttctggaaccaggtttagttgaccatatagttgtttctaataagtcagttgcaaaagtgtatgtgaggaacacaccatacaatcaaacaagtgatgatctta

SEQ ID NO: 45309 - DNA, 375 bp, Gossypium hirsutum
  unsure (1)..(375): unsure at all n locations
  Clone ID: LIB3493-032-P1-M1-A5
atttctcaataatttcgcaccctctttggtgcaatggcccctagaacgagcgtagatgaaaaaccatgcttatcannnatantnnatggaaccaccaatttacctgtcgacatttcatcctttgagttgattaagccaagctttgatgagaccaaccagcattgttctcttgatgtcttgcctatcctaattgaggaggcttcatttccagtaagagaaaaaagcaacttaaacacttcacatgtctcggatgcctatagcttttctgtgttgcctgacgaaggaaacatgaatccaaactgtacacgggtgaagagggttgagccttctacaattttccttttttattaaaaatctagatgtgatatgtgtttc

SEQ ID NO: 45310 - DNA, 170 bp, Gossypium hirsutum
  unsure (1)..(170): unsure at all n locations
  Clone ID: LIB3493-032-P1-M1-A8
ctctgaccatatactttagaaagattgaatttnaacaanangaagctnatttgctaatcactggtaacctggatattggaatctctgctctccnctctaacctcccccccatttacgttgtanaacttgtccttagaaaattggaaaccgatcctctttttttttttttt

SEQ ID NO: 45311 - DNA, 287 bp, Gossypium hirsutum
  unsure (1)..(287): unsure at all n locations
  Clone ID: LIB3493-032-P1-M1-B12
ggaaagatcgaagctccgccaaagaggaanagaaganacatgtatgatttcgatgacagggatgatnacnncnnanacnatnatnagaggccttcaaagcgatagggctaaaagaacaccaccgaatagcttgtgccatgacaaaggtcaaatctctcttcctccctttctctcttttaaaaaacccatttggctttctgtttggtgtgttagaaaaaacaaaaaaaaaaaagtagaaaggatatgatgattattgtatggattcctcattttatttgtcatctttc

SEQ ID NO: 45312 - DNA, 321 bp, Gossypium hirsutum
  unsure (1)..(321): unsure at all n locations
  Clone ID: LIB3493-032-P1-M1-B2
gtggatctgaagcaaatgatactcangtgaagcttgtttggtgttataattatgcactttgagagaccagagaanaanaaatttattgctcnanccaaancataccatggttcaacttggatatcanctagtctttcangacttccacctctgcatcaaaacttctatcttccacctccatttgtgttacacactgattgccctcattattggcgctatcatttaccaagtgaaactgaaaaggatttctcaaccaaaatagccaacaatttataaaaccttattctcaaaaagggtccaaagacaattgctggattgatt

SEQ ID NO: 45313 - DNA, 385 bp, Gossypium hirsutum
  Clone ID: LIB3493-032-P1-M1-B3
cccgaatccttcaaacttaacacactcttactacatcatcagaggtttctggtaacacatctgcaccagcttctacaacaactgccccactcttttaatctcatctaaagtaccatctaaatctccctgcactgactgctacatttctgacaacatatgaaactagtgctccactcaattgcttgaacaatacaagctcaatgtccctcatactcttaattgttctaccctttatttttcacctcccatggatctcataaacctaaaggcatgacccaatgacggcgaactatcttttttgttaaaacttacagccttctttctatctttactgaacaacaacaactacgataatctatgtcatttagttctgtttacttatcaa

SEQ ID NO: 45314 - DNA, 448 bp, Gossypium hirsutum
  unsure (1)..(448): unsure at all n locations
  Clone ID: LIB3493-032-P1-M1-B5
cggacgcgtggggttttgttgaaagctatatatgatgagtaagcctgctgagtcttctgtggccaagaggttanaangcaangtaccattgataactggtggtgcaagtggcataggagagagcacagctaggctgtttctcaagcatggagccaaggttcttattgctgatatccaagatgaattaggtcaatctctctgcaaagagctcggaaccccagatatcatcagctatatccattgtgatgtgacgtgcgaaacggatgtccaaaacgccgtggacttagcggtctcaaggtatggtaagcttgatatcatgttcaataatgccggtgttgcaggggaggatgaattgagagccattgcttcagaatgtgataactttaagaggggccttgattttaatgtagtttgttggttatttatattactatatatattaatatgt

SEQ ID NO: 45315 - DNA, 217 bp, Gossypium hirsutum
  unsure (1)..(217): unsure at all n locations
  Clone ID: LIB3493-032-P1-M1-B8
tggaagaaactggagtggtgctccaaataatccaggccntatgaagaccatgggacaccggattccacacaanaaatnntatcttacaccttctntnntctctatnatnanaagacttcttccatttnnnagcatattcatggaaatntattttnttttttcatccttctnnaattacaaaaactattacttctattcttttattctccttctcttc

SEQ ID NO: 45316 - DNA, 308 bp, Gossypium hirsutum
  unsure (1)..(308): unsure at all n locations
  Clone ID: LIB3493-032-P1-M1-C1
gaacgttgctgttaaagatcttaaacgtggttttnttccttgggactccttgtataattcggacaaggaggctnccaacttcacctcacangttatcatcattaaccaccctggccaaattggaaatggttatgccccagtcctcgactgccacacctctcacatttctgtcaaattttctgagctattaaccaaaattgacagactatctggcaaggaactctagaaggaacccaagttcttgaagaacggtgatccacgtatggtaaatattattcccaccaaacccattgtggtttaaactttct

SEQ ID NO: 45317 - DNA, 223 bp, Gossypium hirsutum
  unsure (1)..(223): unsure at all n locations
  Clone ID: LIB3493-032-P1-M1-C10
aaaaaaaaagatggcgtctgtaataaaatctgcaatcttaatgctgtcaatgtggatatgggtaancttcanttcnnntnttnnnttnctccannaacancccaattatnacctcaaaaacatctactctattgctccattgatgcactctttttttttctatttcaatggaccacaaataagcattcactaatatcatgttctcccaaaaagttcctaaatt

SEQ ID NO: 45318 - DNA, 238 bp, Gossypium hirsutum
  unsure (1)..(238): unsure at all n locations
  Clone ID: LIB3493-032-P1-M1-C7
tagggaaagctcatacgcctgcgagctacctttccaaaattccccactctacccacacgtcctaaagccttcccaaactcagctcacacccacagaaggagacatgaggataaaacataacttgtancaaactcnnttcttnaaatggcatcnaagttgtctgactcgtgcaaatcagcgacggctactcttttctgccggactgactcaccttttatattcttcttctattacttca

SEQ ID NO: 45319 - DNA, 148 bp, Gossypium hirsutum
  unsure (1)..(148): unsure at all n locations
  Clone ID: LIB3493-032-P1-M1-C8
gcaaaacatggcactacaactggtgtgtcancacgtnatagagcaacaactagattggcggtagcttctaaagattccaaaccctangatttcaaccgcccangtcacattttcccactgaagtacanagaaggtggtggggtaaaaa

SEQ ID NO: 45320 - DNA, 297 bp, Gossypium hirsutum
  Clone ID: LIB3493-032-P1-M1-D1
gttcaacttaatttctcatttttctcgtaagccttccaaaaagagaaaatgtaaattctgttcttctatggtcaatcaataaaggaatttaagacgacgagtcttttttcttcttttttttttttagtaattttatctggttggaatcggaggtggaggaggaggaataggggctgattttacctttcttttttcttaattttaggtaatttaggttttgagattccgggggtgtattaattttaactttataactggtttaattattggattaaggagccatagtgtggatgatgt

SEQ ID NO: 45321 - DNA, 152 bp, Gossypium hirsutum
  unsure (1)..(152): unsure at all n locations
  Clone ID: LIB3493-032-P1-M1-D12
ggcatttagacatctgatggctgcaatgcctaagaatatatgantaaccgagaggctggtggaactncannncctnnangaananaanaaaaaggccatggctcgaaatttcacttgcttatatgctttgggtggcgacgtgatcctaattt

SEQ ID NO: 45322 - DNA, 234 bp, Gossypium hirsutum
  unsure (1)..(234): unsure at all n locations
  Clone ID: LIB3493-032-P1-M1-D2
cccactcttccaaattttaactcctcctcaaatatccccntctccacanccatgggtaccaagtcaacaaatacatagcctgtttgtancactgaacaangnccatgttgtaaccaaaaanganttggcaccacgcccctctaatcgaaaaggaaaaacgagcaaaagagtccatttcttgaggaacttgatcagggaagatacctgtttttcaacctatgagaagaggatcac

SEQ ID NO: 45323 - DNA, 198 bp, Gossypium hirsutum
  unsure (1)..(198): unsure at all n locations
  Clone ID: LIB3493-032-P1-M1-D7
aataaatttaaaataaaaataaaactcaccangctggaangtagtnaatgaaaagccaggggcttcntcaaatctctaactccctattactattcttctcttctaaaatttactgaaagaaagcttcttcttttttctatcggaggcttatgatcttttctaatggctctattggaacctattctcacttgactttaa

SEQ ID NO: 45324 - DNA, 292 bp, Gossypium hirsutum
  unsure (1)..(292): unsure at all n locations
  Clone ID: LIB3493-032-P1-M1-D9
gcagaagtacactcaaagcggangtgttangccggttnntcgatcaactctgagaacggggtgcnatccctactcctntntcccttctctatattacacngatccctcgttgacacttttatcttcacccgggtgggggggagcatattattttctttttttcatagcaccatttgacaaggagtcctcatctcatttaaaccatccaaactgcaaactgccaaaaaattgttttcgctgccaacaacagcctccttgttttccgggaaacaaacccctggtcttccttttt

SEQ ID NO: 45325 - DNA, 236 bp, Gossypium hirsutum
  unsure (1)..(236): unsure at all n locations
  Clone ID: LIB3493-032-P1-M1-E1
cccacgcgtccgatcgatttgttcatgtcataaagaagctaaggtangtggaggttacacttatccaagatgcaaancccntgcatgtgagcttcctaccgaatgctgtgtctgcgggttgacactcgtgtcttcaccccatttggctagatcatatcatcatctctttccaatagcaccatttgacaaggtgacctcatctcatttaaacaatccaaactgcaaactgcaaagaa

SEQ ID NO: 45326 - DNA, 231 bp, Gossypium hirsutum
  unsure (1)..(231): unsure at all n locations
  Clone ID: LIB3493-032-P1-M1-E10
aattccccnntccacccacccctccnagtgaatgtcttcttctatnaanaaaaactnaaagaangttgtttacatttagaaactggctctcnncctntcnncnncttcnnatctttcaatcatcattttgtctntacactattcttcctcaaaatcatgcctggctgaactctcttttttctttttcttcaagcacacacaaaaacatattgttcttcccatcttttacca

SEQ ID NO: 45327 - DNA, 162 bp, Gossypium hirsutum
  unsure (1)..(162): unsure at all n locations
  Clone ID: LIB3493-032-P1-M1-E12
cggacgcgtgggaaacactanaanaaggtttantgttacatgcantacttgttgcggtgtccttaanttnntttccattattctcatcntntgcattgcngtnatnggtgcaccctangctgncaaatccggggtgacgtgcagctattttttttttttttt

SEQ ID NO: 45328 - DNA, 191 bp, Gossypium hirsutum
  unsure (1)..(191): unsure at all n locations
  Clone ID: LIB3493-032-P1-M1-E7
atccgcctctctcatcttccgttgtttatacgttgggttgggggttaanaagtgatactagcatnnctacaaanaataacntttnnnacttnaaagaagctgatttgaatggaaagaaagtgtttgttacagtcgatctgaacgatccattggattattactctaacataactgatgacacaaggatccct

SEQ ID NO: 45329 - DNA, 231 bp, Gossypium hirsutum
  unsure (1)..(231): unsure at all n locations
  Clone ID: LIB3493-032-P1-M1-F10
cccactcttccgcccaacgtccgctccnatatagtngcttgagaaatctgggagttaggcnttccctctccattaattcatacaaacacngtatagggggagcggtgaaacattgacaatggggagagcaagagaatttttttatttttatttagaaataaaaatactcaatgtactatcatatatatgaccaaaaaataaatgaatctattcaatcctttaaaaaaatta

SEQ ID NO: 45330 - DNA, 136 bp, Gossypium hirsutum
  unsure (1)..(136): unsure at all n locations
  Clone ID: LIB3493-032-P1-M1-F4
cggacgcgtgggcaacaaagaagtatgttggccccaaaagttgggcacagtaaacacatagaacctgttcacttttaannaaatttcttgatgtggttgangaagtacagatagcacaattagagattagaaatat

SEQ ID NO: 45331 - DNA, 222 bp, Gossypium hirsutum
  unsure (1)..(222): unsure at all n locations
  Clone ID: LIB3493-032-P1-M1-F5
acaaagagagcatctcatcgcattttattgtgcttctctctcagatcttgagagaaaatacagcaatgaaaaanatccacaaacataangatnttnaaccaacanaatttnangaatcaattncccaaacattcttcnatttggagaataccaaccattatcttaaaatttacctcaaagaactctacattaattcagcagtccaaattgatgtgtctggca

SEQ ID NO: 45332 - DNA, 439 bp, Gossypium hirsutum
  unsure (1)..(439): unsure at all n locations
  Clone ID: LIB3493-032-P1-M1-F8
cggacgcgtgggttagcatcgggctgtgcactccgacacttgctcctttattgcaccctggtaaaccctccanactccaccaccgttcaactaccgtcgtctgctccgccagtaaatgggccgagcgcctccttgctgacttccaatttctccctgcccccgataattccgtctcctcttcttcctcctcaaccgccactctttctcccccttaccctccccttctcgccccttctcctcccgaacgccacgtttccattccccttgatttctacaaggttttaggagccgagactcatttcttaggtgatggaattagaagagcctatgaagcaagggtttcgaaaccgcctcaatatgggttcagtcaagacaccataattagccgaagacagattcttctagctgcctgtgaaaccctatctaaccctggctctag

SEQ ID NO: 45333 - DNA, 279 bp, Gossypium hirsutum
  unsure (1)..(279): unsure at all n locations
  Clone ID: LIB3493-032-P1-M1-H11
cacagccgtcccgttcgctatgctagcnnattgtggagaatgcattcactggtatgtgcttcctgtggcatagggagagagcagcgtgactgaaatttactgnnacctgnnnttgtcagaaaaacaaggagaaaannccacttattcctagtgnnngtcttcctcctnnngcagttgagaaaaagtntgcttcttggcttgcttttcgagtattgactnnntcagaagccgtccctttaattgaaaagacatttattgcnnatgttgtttaaaaagctc

SEQ ID NO: 45334 - DNA, 118 bp, Gossypium hirsutum
  unsure (1)..(118): unsure at all n locations
  Clone ID: LIB3493-032-P1-M1-H12
ttaaaatggctgttaccttctttaggagactcttggtagtcagcccanctaccgttaacagtgcatttcaaggtcaacccaagtccggttttgctggatttcgcttctgtaccatcgc

SEQ ID NO: 45335 - DNA, 428 bp, Gossypium hirsutum
  Clone ID: LIB3582-020-P1-K1-A1
gtgattcccttgattcgattctgttctcctcattcatgatgacaatggctttccccgattcctctgtgcctttccttcccattacctattctccttagtgggtagcttccatctttctctatctttttttaattcgaagatctactgttagatctccttgaccctgaaaatccattccattctcccggaaaatctttttttctttgctgctgttttccattttcttcaccgaattcccaaggtgggtttcctttgtacgtaattacattgcgaaagtcgactgcatagggttacctttattcctttctcggaatttcaagctcatatttttgctaaaacggacaaggataaatctacatgtgtaccgccaatgtcaggtcgagttccggtgttttcatcttcctgaaatgctgcaagcacttcaaatg

SEQ ID NO: 45336 - DNA, 570 bp, Gossypium hirsutum
  unsure (1)..(570): unsure at all n locations
  Clone ID: LIB3582-020-P1-K1-A6
cccacgcgtccgcgaatcgtctcactcgtgtctgccctgctcatactgcttgccctcgccgtatcgtccacccgcaacgcacaggaggattccatggccaacaacaccgggacgttggtgggcggcatccaggacgtgccggggagcgagaacgaccttcacctccaggagctcgcccgcttcgccgtcgatgagcacaacaagaaggccaatgctcttctggggttcgagaagcttgtgaaggccaagacacaagtggttgctggcacgatgtactatctcactattgaagtgaaggatggcgaagtcaagaagctctacgaagctaaggtctgggagaagccatgggagaacctcaaggggctgcaggaattcaagcctgttgaagagggtgctagcgcctaaggatgtctccttctccatgtgcgagcctgaagctcaaagcaaagttgcagaataaggagccatgctcccttgtgtaatttcataagactacaaccctattagggcttgtttggttgtgtctgtatcgaagggaattgaaggtgattaattntccttctattctaa

SEQ ID NO: 45337 - DNA, 363 bp, Gossypium hirsutum
  Clone ID: LIB3582-020-P1-K1-B11
gtcagctgagtaaggctttgtttagcctttattttcaaaaaccaagaaataatgctaaacaaataatttttgagttagaagtgcataatttttaaagtgagaagtgcttttgaaaatgtttttgaacctaaaaatatccagtttatatctcacaatttccaaagcttcgtctactccatctcaaaaaaagaaattaagaaaagcaaaaatctatcacgacatggatcaagttcttggatttgggtattatgtttctggaagttcatctttttattttcttgcgggttaagagtttctttaggtttaggttactttccttttcctggctaatcttttggcactttggcttgtgttttctggaca

SEQ ID NO: 45338 - DNA, 559 bp, Gossypium hirsutum
  unsure (1)..(559): unsure at all n locations
  Clone ID: LIB3582-020-P1-K1-B8
cccacgcgtccgcggacgcgtggggtgctggagaaaggcataaaggtgatgatctcctatgctactcttggggtggcaacggccatggccaattaggcctaggagatacagagagtagggctcgtcctgaaattgttggaacgtttagccaggacattcaatggacggtttatgaggtagcatgtggtgccttccacactgctttgcttactcgtaaaaagagaccaagtgacacacttgagagtatgtgttggacgtttggccttggggacagggggcaacttgggcatggaaccacccgaagtgcattggttcctgaacctgtgaaagagttaccgcagcctgtatacctggtttctgttgactgtggattgtttcacactagtgttgtttcatcagccggagatgtgtggtcatggggaatggaaaagggtctaggtctatgccccgatgctagttttacaggaacagattcaggtgacgccatttctnccctaaggatacacggacctaaatttaatgatccggttcaagtatcttgtggagctgcacatactgt

SEQ ID NO: 45339 - DNA, 558 bp, Gossypium hirsutum
  Clone ID: LIB3582-020-P1-K1-C10
gatctctacactcgcaagagcagctaagaatccagttgttttggtgcttctttctggaggtccagtggatataagctttgccaaaaacgataaacacattggaagcattctatgggctggttatccaggtgaagctggaggtcttgcattagcagaaattatatttggcgatcacaatccaggagggaggttaccggttacttggtatccacagagttttgttaaagtaccaatgacagacatgagaatgcgtcctgaaccatcatcaggctatcctggacgcacttacaggttctaccaaggacaaaaggtttttgaatttggttatggtctgagctactcaagctattcttatgaatttctccctgtagcacaaaacaaggtctatttaaaccatcagataaagtctccaaaggctgagcttgagaactcaaatgctctcaaacacgtaccagtttcagagttaggaacagaactttgcagtaagagaatcccagtcacagttagagctcaaaaccatggtgatatggcaggtaggcatccacttttgctatttgt
